United States Patent Application Publication US 2011/0214205 A1 - sequence listing, part 6

SEQ ID NO: 17374 - DNA, 1115 bp, Setaria italica
  Peptide Sequence Number=SeqID_83348
atcaaggggctcagttagagccgtaacccagaaagccagaattcttcagcttcgcatagtacacatcaaaaagtctgcgcttttcggttttcttcagttcagctttccccattcattgcaaacttcgacgcccttcgaatctgcagttttttcaattgagcaaggaagcgaagaacaaggaaacaaggacatggatgctttaagtgcagttatggacaaggtgaagagccacccggaagtggtggagaaggtcaaggacgaggttaagagccttgctcatgctcttcatctgcggaggcatggatctaaagataaagaacctgaggctgaagagaaagcagaggaaggcgaagctgcccagaacgctgacgtcgccgcctctgctgacaagactgaagaatcgaatgtggagcaagcagtagaagaaattcaggctgtcgtcgcagcggtgcagcaggaacagacagcccccacaactgaaactgaaactccaactaagactgatgctactgctgaaacttcagctgaaggagagaagcctgaagaaacaaacagggaggtggagaaagatgacccgaagaagcggctcgatttcttagggttcttcgccatgctgtttgagaggttctgctcccctgccaacaagaagaaagattaagtgatatgcaggtcaggtgtggatttctcgttttgtgatcatggacttggaaactacatggagatggaattgcattgggattgcgggtggtgtacagtttgcagttatatgcttctcttcagacaaatctgctgttggtttttactctcttctatggtgatggatgcatggatatggtttatttggtgtagttcttgtcaaccttgtggaattgattttatttatatgaacaaatgatttattttcaagagctttctgtgcctcaagtgctgtagacattcttttttgttaagataatgtagtgtatgtgtgggaagcacgaacatgtaaggacccgtttttgctaattgtgaagtaaaatgtttgctcaactcaagtagcaatctccattccttggagttgtttcctatgtgtaatcaagctgaaataaaagagttggttgtaaactaaaaaaaaa

SEQ ID NO: 17375 - DNA, 958 bp, Setaria italica
  Peptide Sequence Number=SeqID_83349
ttttttttagtttctttaaccctatgccactgagacaattttcttgttatccatcgtcatcatcatagcaatacaataagagtggatcaaactcgtagtagcggtttgatcaatgtctaaagcttttaacctcaaaattcagatggatgaatgcaattgcaatttgcaaaggtaaaaaatgccaggcccaaaattgagtctacattctatagtaagcatgcagagtatagaaccactccctttcttgttagtcttcgaaggctgacaccagctccggcaccggctctggcacagtgggcagcactgggtagttcctagagaagcaggcgtcacagagctcatgcgcttcatcaccgtagatgctgtggagcttgtcgagagagaggaaggcgagcgagtcgcagccaatcgtcctccgcacgccctcgaggtccatcctgttggatatcagctcgccctcgctcggcgtgtcgatgccgtacaggcaggagccgatgaccggggggctggcgatgcgcatgtgcacctcgcgcgcgccggcgtcgcggagcaggcgcacaatcttgctcgaggtggtaccgcgcacgagcgaatcgtcgacaacgaccacgctcttgccggtaatgacgccgcgcacgggcgcgagcttgagcttgaccgcgaggtcgcggattgcttgcgacggttggataaagctgcggccgctgtagtgccaacggataaggccctgctggaattcgagacccgacgcctgcgcgaagccgagcgcggcgtagaaccccgagtccggcacagggatgacgacgtccgcggtcggagccggggactcctcggcgagcgcgcggccgtatgcgctgcggcgctcgtggacggcgtgcccaaacacgacggagttgggaagggcgaagtaagaatagtagactacgaaagaacgacaacgaacttagacgggggacta

SEQ ID NO: 17376 - DNA, 836 bp, Setaria italica
  Peptide Sequence Number=SeqID_83350
gtccgatcttgctggaggttaaccaatggctccccctctcctctcgccgccgctgctcgccgaaccactcgtggcgctgccgcgctctttcccctgctcccgccccacgccgcagctggccaccgtcgggttcgccggagccgtacggagcgaccggcaggggagctggagcgcgcggagaaggagggatctcaggatccgtgccactgcaacggaagcggattacgaaaggccggaggaggatgtcgccgacgattactactccgttctgggtgtgatgccagatgcaacccctgaggaaatcaagaaggcatactacagttgcatgaaagcgtgccaccccgaccttagtggggacgaccctgacgtgaccaacttctgcatgttcatcaacgaggtttactcggtgctgagcgatccagcgcaacgtgcagtgtatgatgaaatccatgggtacacagcaacagcaatcaaccctttctttgatgacagtgcacccaaggatcatgtgttcgttgatgagtttacctgcattggatgtaaaaactgtgccaatatctgccctaacgtcttccaaattgaggaagattttgggaggtcaagggtctactcccagtcaggtagcacagaactaattcaggatgccattgatagctgcccagtcgattgtatccactggacttccgctgcacaactatcactcctcgagaatgagatgcgtagagtagagagggtgaatgttggtttgatgctttctggtatgggagcttcagttgatgtttttcggatggcaagtgttcgctgggaaaaaggcaagcaaaaatcttggaaaaggt

SEQ ID NO: 17377 - DNA, 472 bp, Setaria italica
  Peptide Sequence Number=SeqID_83351
tccccacactgtccatcccccgaatcgaatcgatcgaaagcggaagcgaaaaggggcggaggaatctatggcggcgtcgacggcggcggcagcggcacccccttcctcctgcgagatcgcgcggatcccggaggacctcctcgcggcgtcgatcgcccgcaccacgccgcggaacgcctgccgcgccgccgcggtctcgccggccttccgcgccgccgccgactccgacgcagtgtgggcctgcttcctgccgggcgacctcccgccgcttgccgacggggagctctcccccgcgccgccgtccaagaaggagctcttcatgcgcctctctaacagcgacagccccgtcctcctcgccgaccgcctcatggtacgggaatccgcttatgattaggtcgatccctgtgcagttaaggttctcgatcgatggacgactgattggttgtgtacttgtgttggcgtgttcagagca

SEQ ID NO: 17378 - DNA, 249 bp, Setaria italica
  Peptide Sequence Number=SeqID_83352
gtgctctagaagaaaaaatagtttattggtgtgcgaaaaaggtacaggcaaccccaaacgagtcattcggactgcaaagttccgccaggagctcaagaggtaaacgggcactcgtcatctgctgaggccaaggctggagggaccagttgaccatatgctactgggcagatgacgctctgcgatgggaggcacagctgcgggtacggagagcgaaagcacaagtggcgccggccacggccaggttgctgg

SEQ ID NO: 17379 - DNA, 446 bp, Setaria italica
  Peptide Sequence Number=SeqID_83353
gtggcagcggggtcgggccggtgtggcagtgggccgcgacgacgcggctggcgccggggacggggcgggggccatgaatcaggctttcgggaggtggttgggctcgcgctgcgtcgccgccgtggtggcggtgccggacatggcagagggagggcggcggctgctgcaaggaaacccaatcgaatgcagtgaatgaaaaatgggagcttgcttgactatgatggcaggagagagggaaagagagggagaaaagggggttttggttgctttgacgaggtggacttgacttgcggacgccaccagagaaaccgaattgaatggtgtgcaagtggaactaacgccaagcaaagcgagaagacgacgatgcaagaattcgacggcctcttttcccccactctcctctcctcccccgaggaagaggaacggccagaaagatcagtggggtg

SEQ ID NO: 17380 - DNA, 2939 bp, Setaria italica
  Peptide Sequence Number=SeqID_83354
agcatgggagggattagggaggatgaatcaggtcggtggtcttccgctttgtagatgctctgcaagtgtggaaaacgaccaaagcagcgagaattacagaggttactatcaatgaatcaatcaggtctaagtgcagtgggcaaggtggtagcaccctgactcgatcaccgtcatcgttccttgggatggaaaacgacaaccaaaatacttcggttcacgccagcacgccggcgttctaaagcaatcccaaaggattatatccttcgataatgcacactaacatcagagtctcacttttgattgagcagacgcatcgcctctcaattttcatagtgaggagtgacgttaggcatgatgattctcctgtgtcttccgcaccagagaaacgggatgctaacataaagactcggtggatgcagtattcgtacagagcgatggcccagtcacctacggcgtgactatgctaattgccaggccctggaggaaatgacacaccggcctgagcaatgaacaaagcgatggcccagtttgataagcactattgatagaacttccggagagggtagcatttaagcattcctgcattccgtaccatgatcccctcacgactgtgaatttagaacaagcccattgcctcttacagcagggatgtgctcattggattagcgaagaagcgctttctacacttggatgcttctttactggggtcttgcttgaacaggccctgcagcatggtcggagctgtaggcacaggttcttcgaacacccgaacgttaaggtgcccatcaagtatcaacttctccaacagggtccggcaagtctgaggattcaatacatccatccgatggataatatcttcctccattactccaggatagtgcatgacataaccaataacccggcgacttaaaccttcatagacagtgctattagtgctaccatcaccatttatccatggtaatataggctgataaatatgcccttcgcaatcatgatagcaactactctccttattgtcttctcttgaagtagatagcctttcgtcatccccaggatttttgctgtaaatatgaggtgagctcaacttgctttgaacattgattacggtcaccgtgtgcccatcaccaagcatttttataggcccatgaaaattaataggtatggtatgcttctctttcagtagatttttggggtctccattatccacaacttgagaagttggaggacctgagcagctgcaaggattgcattctgcaagtgtggttatatgatactttgacaaatgcaacgagtccacgatctgaacaccatcatatgcattgaccttaatggccagctgaaatctcttgagcgtatcaacaattctatagacaaattgcatggctaatggatgcagtgcctgtgacaattctttccaagtaactccttgttcgccagctttatgaataacacaaaatgcattcctgaacagatcagaagaccatgtgaacgattccttttggtgatctgatactgatggtaactcttccacataatttttcatagcatcccatggccatccacaataagagtcttccaactgagattcagacaataaatgcctatatgtacttgagtgatttgaaaatgatggcatgatgcatctttctgcatgcaaatcaccatccttgttactcattgccctgcttgaagtaaaaacaaggcattctttatcatgtaattcttgcatgttattgcttgtttgaattctctcaagatctagaccaacttggatagcagggaatcctttctcccggcggtagcaaaagtcactttctatctttggcaaaggcttgtgtttcttagcctttccacttttttgtttcattgtatcagccttgcgcttctgagtgctgtcaaccaatccgctggtgtctacgactagaggactagagctgttaggctcctcagcctcgccaactccttcactaggcaagaaaggtgaaacgaacagctttcccgacaaaaccagggagaaaagatgaacgatttctccacattgtatatctggatacagataaactccattgtctgtagcattcttttgctgcgctataagccaattagaaaattcagaagcctttttccctgaaccaaatgggaagggtgaaatacaagcattggttaagaattttgaagaaagggtgtatggcttcccaccactcccagtaaccaagaaatttttttctttcagaagggaaactgcagtaaaaatctcactctctgaataaagctgcagggttgctgctagtgaagcttgtacatctgatcctgatgatctgctgaggaatactaacttcaaaagctccaatgcatttgcaacgggcaaggattcccgtaaacctctttcaataatcttatttctgtggtccttaatgattttttcttgaggtttgcagtgaatgtccatgctttcacttggttggacttcatttgaatgtctgcacattttttcctgatcacagaacccactttctggaactggagttttggttttacctcgtgtagcctgattattcaatagttcctgcgaacttcttgtgtcctttgtgacatcactatcattattattgttcttttcattcttggccccaactctcttggtctggtccactttttctgtccgaattaattcaaggacttcactaagtgcactctttatttccggaacttcgaagtcatcccaattgaatttctcagaatctgaatccaaattagtttcattactactttttgaaatctggggaagtaatcttctctttttcgatctcctttccttttcaaggtatctagcataacgtttcccaagaagattacatatacacatcacagctcctcttatgttttcgtttcccttcaatagtattgccatccttctacgacatgtatttggtggagct

SEQ ID NO: 17381 - DNA, 359 bp, Setaria italica
  Peptide Sequence Number=SeqID_83355
acaatatcatatactcatagcgttggcgtggcgccaagtgtgtatgcgacaagattagcaggtaaaggcgatggtaatccgacctcgtgcagggttagctggacctgatatatggaagattctgagccagctatgcgatcttcgcagagcagattaataaggagctgggttggtaagtccatcacatgcacggttggtgtgtcgtctctgtatctgagcatgatggatgtgttttcaggtttaagagatcagtcctagttttaagtaaaattattctgataccttaagcaagctggattaatggggatctgagcagcactgacaccgaaggtttctctagagaaccaacttgacagctc

SEQ ID NO: 17382 - DNA, 409 bp, Setaria italica
  Peptide Sequence Number=SeqID_83356
ggcgtagatgatagtgtccaatcacggaaattacacatccaaataacattctcttcttgtgcgctttctgagttcatggccatattttccaggttatacactagctgttttatatgttcctttgttgaagttaagctctttattgacgtcataaccacaaacacagttcgcccattcttgtcgagatagtccggtatataggctctacgaacctcgttctcagtgccagcaaggtcttcctaacaattgattccaagcagaaatttaaccatgctcaacataagtatataacatactaacacaaggactgatcaagagtagatcaagtacatataactcaaaagttgcccaatgaatatatcttattaatttatttcctaaaacaccccccactatactgagacgaaag

SEQ ID NO: 17383 - DNA, 542 bp, Setaria italica
  Peptide Sequence Number=SeqID_83357
actagacgaaagtttaatactaaccttttttaattttttttagtcttttagtaaattttctagtgttacagacctcacgttctgtttaacttactgagaagcccaaataacaaaccatgaaggcacgtaagggacgttttattaacctcctaggcgctcacaattatcgagcttgttaagctatttcatggaatctagcttacatggctcagtacattgcaaacagatacaaggtttcagtattcctggtcaggaagatgagatgttgccgtttgcgtgcttgttagttcctcttaactgatcccgtcttctcattctttcagcatactggttaatatcaagcctagccgtgtttctttcctccaaatgcagactccagtttgtccatgtcaaacatatcggccattatcctctggctctctgaattgttgctgtaaataaatttcactctctcttgcaatgtcggctcgatgaagtgttttactatctacaaggagaagtgtgtcatatatcatactaaatattcacaaaacaaatcaaca

SEQ ID NO: 17384 - DNA, 1580 bp, Setaria italica
  Peptide Sequence Number=SeqID_83358
ttattttgttagtttagttttattattactagtattaagttgtatacctagcttcctccaaatgcagactccagtttgtccatgtcaaacatatcggccattatctctggctctctgaattgttgctgttaaatttcactctctcttgcaatgtcggctcgatgaagtgttttactatctacaaggagaagtgtgtcatatatcatactaaatattcacaaaacaaatcctcaatcaatgcagaaatatgttactgtgttgatttaatgtaatcaggtcctaaaaagcattctacaaacatcttcttcagttctcataaactatgactcaattatgatgttttgaataagacactgatgatatacatactaatcctaacgacaatttataaaaagtttatgcaaattacttgacaaatgttacagattcaaaccactggacaacagttaaattaaacatggttgaccacctatattcttaacaaaacctcattgttttggaataggaatttatttgtagttagtttatatacagataagttgataaatagtttgcaaataccttccagaaggattcaaagatcttcggtgggttgctgagaattgctgttctaatcaaccctggataatagttctgaattatgtgcagtgattcacggctctcccacaatggcgtagatgatagtgtccaatcacggaaattacacatccaaataacattctcttcttgtgcgctttctgagttcatggccatattttccaggttatacactagctgttttatatgttcctttgttgaagttaagctctgttgcacatgtcaaatcaagtaaataagatgaacaagaccaagtctagctacaacacaaagaacagaaaagggtgaagttttatttcaactgatcgtgtatctttgtgcttggtaactgaaatctctcttcatacttggaccaaaagaatgtatgctactaatattcctgtccatctaggatggaaccatgccaataagagaaaacgtgccgcacagaggaagtagaaaattagaatctctcaagagaattaggagcctaataaaattgttgaaactagattctcgtacaccaacctcatgtgatttttttggacatacagagtgggtactccgaatattacactaattttatctatgtgcttggaatcatcatgcatgtcatgcagacatataaactatactataatctaacaatattggagccaaattaaagagcaagtgtgtgtaaacaactggctttcagactaacacaaaatccatttcttatgatttcttcaagtttctaagggaaagatatagtctcagagacataactgtaacatatttagaacatatacgaaaaatcataacatatatagaagtgtctttttacccaggtctactaacaatatgatattgctcatattaataatcacaattagtcaaagtaaaaactttttgatgtatgccattttagaagggcatgcagttgtgcttttgttgggtgtgtaaagttaactgtgtatatttcaggcctaactactgtattaaattaaagcgatattatgcgt

SEQ ID NO: 17385 - DNA, 1192 bp, Setaria italica
  Peptide Sequence Number=SeqID_83359
tgtactgagccatgtaagctagattccatgaaatagcttaacaagctcgataattgtgagcgcctaggaggttaataaaacgtcccttacgtgccttcatggtttgttatttgggcttctcagtaagttaaacagaacgtgaggtctgtaacactagagaagcccaaaacttaaaccatgaaggcacgtaagggacgttttattaacctcctaggcgctcacaattatcgagcttgttaagctatttcatggaatctagcttacatggctcagtacattgcaaacagatacaaggtttcagtattcctggtcaggaagatgagatgttgccgtttgcgtgcttgttagttcctcttaactgatcccgtcttctcattctttcagcatactggttaatatcaagcctagccgtgtttcttcctccaaatgcagactccagtttgtccatgtcaaacatatcggccattatcctctggctctctgaattgttgctgtaaataaatttcactctctcttgcaatgtcggctcgatgaagtgttttactatcttccagaaggattcaaagatcttcggtgggttgctgagaattgctgttctaatcaaccctggataatagttctgaattatgtgcagtgattcacggctctcccacaatggcgtagatgatagtgtccaatcacggaaattacacatccaaataacattctcttcttgtgcgctttctgagttcatggccatattttccaggttatacactagctgttttatatgttcctttgttgaagttaagctctttattgacgtcataaccacaaacacagttcgcccattcttgtcgagatagtccggtatataggctctacgaacctcgttctcagtgccagcaaggtcttcccaacaaatcgtctctggcttgaactgacgcctccacttgacagcttctttcagagccttggccgcctgctccgtgctccagttccttgcccggaggaaccggcggatggtgccgtccgacaggaagctcggcatctccgtccgcaggtcgcccagcagctcccggacatcatctatcttttgctgctgttcttctgaagacgctggctttttctgcgtcgcgtcactcctcctggtctggaacagataactcatggctttgcggctgctgctgtacatgcgtggctggctcaccgc

SEQ ID NO: 17386 - DNA, 306 bp, Setaria italica
  Peptide Sequence Number=SeqID_83360
agctcattattctcgtttccaagctttccagctgctagcatttaagcaagtggctaagttgcgagatttttccttgtctagtattggttcactgcataagcgagctgacttaacaaaaaagactgcttgtcttgtcggatgtggaactgcaagatctggtttgtaacaagctcaagttaatctcagagaaagatccatgcagtggaaggcgtgattttcttatagaagtcctagttgctttttttgagaagcggcaatcccaaaagatgcagtaaatgcacttcctctttatccaaatgagcagat

SEQ ID NO: 17387 - DNA, 1192 bp, Setaria italica
  Peptide Sequence Number=SeqID_83361
cccaacccgcaagcaaactcgcctcgcatcccccgcacccgcagcagagagagacgaggagtcgagtcgccgagaccgtgagctccagcctccagcgcacgccgccgccgccgcagccgccgccgatggatccgaagctgacggaggtggcccagatgttcgcccgcttcaaggcggcgtacgcccgcaacgacctcgacgcctgcgtcaccctcctctcgcagctcaaggtccagctcaccaaattccccagccttccgccgttgtttcagcaggcacccaactctgtggaggagctcaaacttgcaagggacatttatgagcatgcggttgttttgagtgtgaaacttgaggaccaagatgcatttgaacgcgatttctgccaactgaagccttattacatggacacatgtggcataattcccccctcaccggaagagtacccaattttggggctcaatcttctgaggctgttggtccagaatagaattgcagagttccacaccgagctggagcttttgcctgtcaaggcacttgagcatccttgcatcaagcatgctgtggagcttgagcaatcctttatggagggcgcctacaaccgagtgttgagcgctcggcaggctgtgccgcacgagacctatgtttacttcatggaccttcttgccaaaacagttagagatgagatcgctgggtgcagcgagaagggttatgattccctatccataagtgatgccaaacaaatgctgatgttcagttcggaccaagaactgaaccagtacatcacagaggagcacccggagtgggagataaagaacggctctgtcttcttccagaaggccaaggagtcgcagccctgcaaggagatcccgtccttgcagctaatcaaccagaccctcagctacgctagggagctggagcgcattgtatgatttggtctcacaataattccgagggatgtttcttttttctgtggtcacttggcattgcctgtactgtcattacgtttcatcacagctctgatgtgtctgaaaaacatcatgtgaacctctgaggagctgtatctgcccgaccgatattgaattgtttgtgtttcaccatgaccaatcacatgtacttgaaaaaggttaaattatttttcagaacgttggcgagcaaaaaaaaaactgagactccaaggcacacaggggatagg

SEQ ID NO: 17388 - DNA, 1534 bp, Setaria italica
  misc_feature (1)..(18): n is a, c, g, or t
  Peptide Sequence Number=SeqID_83362
nnnnnnnnnnnnnnnnnncttcttaggcttagaactgccatacaatgctctaaaacatccgtacataatctggttcctgtgaactactatcaacctcaatacttaaaacaaacagcaaattaaagaacatagaagcattcttgtcctatggaacatcacattctcgagtcaccatggccatgctaggtacagtgcttagtgcatcattcgttgattacagagaaaccatgggaaaaatcgattgctgacaataaaccatgatgaggcctgggctgctgaaggtaaatacatgttcttcattccttctgtgattctgtccttcaggaaatcacatggacacgcattgccaggaattcagaaactgcacagctcgttgtatagaagactcaaactttatcagcagcatccagcgacgtgccctccgaacttctgacagcagccagcttctcagctaatctttgttccagcgcccgttgacccctctctctcctcctgtttgcctcaatcgaatcggaaccaggtaatggcgaggtatctaatgtttgtcccctagcgtcagatctttcggatcttccacaaaggagcctatggaatatagatgctattgggtccagaattggtcttagaaattcagggaagaagcttgagaaagagaactcctcacttgggtctcctttcatgcctgtctcaagtctcttttggaagtaccgcaggtaaatccaactcatataaatgccaaacagcaaaactgggagataagacatcaagtcctttacaaagaagcttacagcaattgagatcagtgcaacaagagatggaatccactttgccttgatctttagcacgaaaaggttaagttcttgatctggtaaaagctgtttgatgcccaccaacaatcctgaaagaactccatagaatccagaaagaggagtatagaggtagatctcttgctgagttatatagtacagcacgatagcagttatgaagacacacgctgaagttgaaaagttgacaataaagatgaactttgataattcttttgaaccccataaaggctctaacagcttcccaaacaagagaagaccaatgatgctaacaatcacccccggaattgtttgctccacatagccagcagttatcaggttccaagcaaaagggatcgtccttgcgggaataagcgcgagataggctacagccgacgggaacagctgtactacaaggtgcacgaggagcaatatgacggcgaggcccttgcacagcttcgtgtatcctctgaagaagctcccactcccggcaggaagcgagggcggcggaggggcgctgccgctcatcatggtggcggcggccgtcacccgacgagatccggagcaccgttactgcacccgctggagcgattcgccgccccggattcgggagaatacctggctgcttggtttctcgctcgggatcgcagtggaagggctctgtactgtggagaattggcggtggcggagtgcagagcaagcaaagcaggcagttggggtttcggggtttt

SEQ ID NO: 17389 - DNA, 460 bp, Setaria italica
  Peptide Sequence Number=SeqID_83363
gccggccatgacgccgccgtcgccgcgctccggcaccgcccccacgttcaaagacgacacactgtgggtaggagtcgcggcgtacggcaggtacgccgccttggactgcgcgaagtcgagctcgatgacgccgccggtcacgctcccgccgcggccgcagatcgcgtccgggaccaggccgacctccgacgacgagccgctatgggcgaccgacgccgccgtgtaggagctgtaggacggcttggcggcgccggcggcgacgccgccaccgaagtcgaggtctaacgcgccgccgctggatccgttgttaggcacgacgctgtcggcgtgcgggaacctcgcgaactcctcctgaccgaggaacgggtccatgacctccgcgaacaggaactccagctgcttcgcgtcgactttggcggcaccaccaagcatcccggcggccgcggcgtcgtcgtccttc

SEQ ID NO: 17390 - DNA, 602 bp, Setaria italica
  Peptide Sequence Number=SeqID_83364
tcccaccaccgcaccaccacgagctgatcacctgagctgagctgacctgagccgcagatggttccgcggccgctggaggcttagcgttggcgaggacaggacgcggaggtgccacatgttgagtgcgcagacggcggctagcagcagcagcagcggaggcgtcgagcaggagaggagcgtcgtcgtcgaggagaggcggcggacggagccggtgggggaggaggacgaggaggaggaggaggaggagccggagttcagggacatccacgcgctgagcccgccgccgagccagccgtcgtcgtaccgcagggggcgcggggagtcgtgggggtccgccgcgggcgggagcaggcacacgtcgatccgctccgtcgggagcgagaccgcccccagtgagcccttcccgactatgagcagggagttctcggccatggtcgccgcagcagccaccgctaacgccgccaactccgccgccgccaacggggccgggagcgacaccgagagggacgtcgacgtgatggggaggatcggggagggcgacgagctggaggagacgaacccgctggccatcgtaccggacagcaaccccatcccgtcgccgc

SEQ ID NO: 17391 - DNA, 259 bp, Setaria italica
  Peptide Sequence Number=SeqID_83365
gttttaaggtttaaaaaaacttaccttaatttttgtcccatctatagtgctagctagcaagtttagcaggaactgggatgatgatagttgcagtgagaaccataagaaattcctaaatcaaaggcctctgcacatatgtgatagtgagaaaaatgttctagtcaactgaggtcagtcaaaagtcttgaaactgaaatcttctctgaaaagggtggaaaacagagaaaaataagattgactaagattaaaatttgaatat

SEQ ID NO: 17392 - DNA, 480 bp, Setaria italica
  Peptide Sequence Number=SeqID_83366
gacgcagctagatagactcaagattttagtcatggcgcccgccaagttcgccaccattctcttcgtcgccgccgtagcctgtgccttcgccatcacctccacctctgcagctaccgtcacagcgcagagctgcgcggagcagatcaagtacttcaccaactgcctggcccgtgacgagatccgccagcagtgctgcatcgtggtcgagaacgcgagctgcctctgccagctgaagcaggcggtggccgtgccctgcatcccgcaccgccgccacgggcaccgctgcccgaggaacgtggttccgccggcggtgcagatggccgagcttcagcgcctcccgtgcttcaagggcctcaagtgcttgcgagcttagcagctagatcgtgcatgcatgtatgcttcagtgcttcgtgtccttgttcgcttgttgctactgcttgttcaaattcagtacctgctgaactttgcagtcttcatgta

SEQ ID NO: 17393 - DNA, 450 bp, Setaria italica
  Peptide Sequence Number=SeqID_83367
ttcgccgcctgctacgtcgccttcctggccggctggctctacatcaccctctaccgcaaccgcctctctgcgcaccgcatccaccacctcatgtccggcctgctcgtcgcccgtatgctctactgcatctctgcggccgaggaccagcactacatccgcactgccgggacaccgcacggccattcctgcaggacaaggagaagaaggtgctcatggcggtaatcccgctgcaggtcgcaactaacattgctgctgctgtggtcggtgagaccgggccattcttacagggatgggtgacatggaaccagatcttcctgtttgtcgatgttgcttgctgctgcgctgtgctcttcccagttgtgtggtcgatgcgctctctgcgggagtcatccaagacagatgggaaggcagccagaacccttgccaagctcacgctcttccgccagttct

SEQ ID NO: 17394 - DNA, 220 bp, Setaria italica
  Peptide Sequence Number=SeqID_83368
ggacatgcggcagctccaaatgaccggactttgaatgatggagacatggcactaatggacatgggaggtgaataccatttctatggatctgatatcacatgctcataccctataaatggcaagttcaacagcagccatataattaactccaggccgcatgtatgatatgacagcattatgagccttaagcacagcattgactactcacactggtcggaga

SEQ ID NO: 17395 - DNA, 889 bp, Setaria italica
  Peptide Sequence Number=SeqID_83369
cattgtgtggtgaatcagcacatacattatgccaaagtcctgaaatgctttaagtagatctaagttcgtaaataatccacatttcacattaaacttccatgaaatcgaaccaagttacgaatagtattttttaaaagaaataatagtaaattttcaagttataaaggatgcatcataaaataaaatagactctccagtccctatgaatacttcttgaggggtgtgttttcaattgcatgtcttcacgtttcaataatgcattccttacttgtgcatatccatataattaactccaggccgcatgtatgatatgacagcattatgagccttaagcacagcattgtatattattatctggctgctgttgaacttgccatttatctgaaaaacatgtaaacctattagatgaaattatcaaacaaatgttacagtaagatgtgatagacaaaagcttgagatttacatcaacggctgtgaaaattaaaattataatctagattccagaaatatatcaggattaacatgatgatctgtgcctctgtcaggtgccagcatcattatagccttaaagcagcaaatgattggagtaagagaagataaaagaaatatcttagagagcccaattgaaccgatacaatagcagtacattacttaatattaagcttggttttgctcagtatcataatctgataacaaagaacagaaaaacaaaatgataaataaagaaggtagaggaaaatggaaatagggatataaaaaggatgctacaatgtttgaattctaagtatgttgagcaaccatattcatgtggcaacacttgcaccctccattactgtatctccctatgaaaaagaacatagtcccatgtgatgtgataactaaagagtgg

SEQ ID NO: 17396 - DNA, 897 bp, Setaria italica
  Peptide Sequence Number=SeqID_83370
ttcgtttgttagttccttagttaatttagttcgttcttactttatttacttactttagtcttattctaaactagtctaactaacttctaaactaactattcaggttccacgaattactacgatgtacactctatacagagcatggtcagttagccccagatcacaagctattcaatcctagtaggttgaataacacactatacggcaagctcaaagcttcagaaccagaacgtacagctccaatactgtacgtggaaaaaggaaagagaaacgtaaaaaaaaatacaaatacacatgcacaacaaagctcaattgttcaaagctctgaatttacaagcatttggctgtgatggagaaggtcgtattcatccttgtggccttggcagacgtcgccagggactcaacattgtggatctgtcgagaagcagcaggaggccaaggaatgtagtggacaaaccgaaggtatacctaggaatatccagagcaccagttcagttgtgcttcagagttgaaagggccatcataggcactgcacaataaaaccatcatatataacctacttggctgtagaacttctgtttctccaaaacagtattgagagcacccactgcagaaaagagattaataaaagttagttttctcgaggatgaagcaaaaatgtggaaaattcagaccggaagatcattactgtatcaattttcagtaatgttgaagaaaaatctatctaaaacaaatggtcaaccaaaaactagctcaaatggctggaagtgtttactgaacacacatatttcagaagattggtaaatgagctcctctcaattaacaattttataacaaaagctgcgggccactgaaacgtttgaagaataatttgtctaatactctattgtagtctgc

SEQ ID NO: 17397 - DNA, 481 bp, Setaria italica
  Peptide Sequence Number=SeqID_83371
ctcgaggcgcacggcctgggcggtcttcctgcgctggtagaactcggagggggacgccgcggcggcggccgggctgaggacggcgccgcggaagcggagctcggcgtcgatggtgtcgtagtagatgttgacgcgcttgctggggttatagaggctcaggttcacggcgacgtggtaggtgacggcgacgggggaggaggcattggagactgcgaggttggagagctcggcggactccacggtggcgcgtatctggtgcggctggaagatggcccagtagatgagcacgacgaagcccagggagatgagaagagtgcagcagctgccgcagcacgtcttctcgcggcttcggccgctgccggacatggtgggcaggagacggaggccggagggggagcttgctgtgctgcctttctgcgacttgctggagttgttggtcaacggccggaggaaggaggagggggaggtgagctcgttggtg

SEQ ID NO: 17398 - DNA, 1188 bp, Setaria italica
  misc_feature (1165)..(1165): n is a, c, g, or t
  Peptide Sequence Number=SeqID_83372
cacgaattactacgatgtacactctatacagagcatggtcagttagccccagatcacaagctattcaatcctagtaggttgaataacacactatacggcaagctcaaagcttcagaaccagaacgtacagctccaatactgtaacgtggaaaaaggaaagagaaacgtaaaaaaaaatcaaatacacatgcacaacaaagctcaattgttcaaagctctgaatttacaagcatttggctgtgatggagaaggtcgtattcatccttgtggccttggcagacgtcgccagggactcaacattgtggatctgtcgagaagcagcaggaggccaaggaatgtagtggacaaaccgaaggtatacttggctgtagaacttctgtttctccaaaacagtattgagagcacccacttgcaaaccctgatcactgagaaactgctcgctgggactgctggtttcttcacaatggctctctgctcagcaaccatctcccagcaaagccgccgcgccatctccctggccatcaccacctgcgccctctccgcccgcagcgccgcgatctccctccgcagtgccaccctgtccgcctccagcgcctcgaccctcgcatacaagttcccgtcccccacatactgcgccaccaccaccggcccagccgccttcgtcgtgctggcgcaggaaacatccaccgtgtactctacttccttctccacgggggacgacggctcctcctcctcctcgccaccgccgtcaacgaccatggctttcagctccatgccagtgctcaggtcgccgccgctccgctccaccaagaccgcgtccatgtcgatctgctccacctcttcgccctcctcgtacatctcctcctcatcctcgtcggtgaacgagtccgggtcgatgccgtgggactggaggcgggagtggtaggatgcggcgaggtcggagagcgaggcgagctcctcctggacctcgcgctcccggtcctcgcggccctcggcgtagcgcttgaactggcgcgcctccatctgcgcggcggccttctcccgctgcaggcgctcgatcatgagcatggcctcgctggtcgccgtctccgcggaggcccgctccgcgtcgagctcctgctgcagcccgcgcgccgcctcctccgcggcctccttctccccccgnagccgcaccgccgccgcctccag

SEQ ID NO: 17399 - DNA, 1802 bp, Setaria italica
  Peptide Sequence Number=SeqID_83373
gtttttttttttttgtccttccaagttccaacggccttgaatttctcctattaacgtttcctcgttcatcctcaaccacgcaacaggatatcataccagtaatctgagagaactccagctttacggaatggttattgatcatcaaaccagcaacaagtttgtggtacactatttattgaatacacccaatctcgcctaatattgtttcgaatgtgggcagggcaccatggagaaagaaattgaaaactaagatgatgctttggacacgccattctctgctgctgccgcggtggaactggaagccggcaaaggccacggtgcgccagccattacggcctcgatttcccacgtctcccggggacagtttgtgaggttctggcatccttgagccgtcacatacacatcactttcaatgcgaacaccaccaaagcttttgtacttttcgacctcttgccagttgaagaactttgaggaaattggatcattcctcgctttagtcagcaaagtgtcgatgaaatagcagcctggctccactgtaataaccatgccttctttgagttctcttgtggtccgcaaggagctcagtcctggctcctttggcctctctaatccctcagggtagcctcctggatcatgggtgtcaatcccaagtaagtggccaagaccatgaggcatgaaaacagctcctaacctttgagccatcatatcatcaacatccccttggaggatttgctctttcttgagagattcaagtattgcccgttctgccaatttgtgcatatccatataattaactccaggccgcatgtatgatatgacagcattatgagccttaagcacagcattgtatattattatctggctgctgttgaacttgccatttatagggtatgagcatgtgatatcagatccatagaaatggtattcacctcccatgtccattagtgccatgtctccatcattcaaagtccggtcatttggagctgccgcatgtccatagtgtagaacagcactattatctccagtagcacatatacatgtataagagcaatgccggcaacctccgtacatataaacatgatggagaaagatgctttctagctgatattccttcatgcctggtcttgctcgtctcatgacctcaatatgagcttcagagcttatatcattagcatactggatgacagcaagctccagatcagatttgatcacacgacattcagttaaaacaggatgaagtatacttaaatcagtatcaaacttctccatcccctcaaaactagcaggctttgaaaaattcccagagtcggtattctttccatataagagaaacagaagaggcttcccatgatccccgaaacgatcttgcacaacctgtgtgatctcatcaacatagaaggccatatcgaccttgtatgtatccctgaagtaagacaaaggttttatttcacccatccaaacagcgtagtcagctggcaaccttggagcaaacaaaattgactgtccagaggcaatgtcgatcgcgccgtagaaccctggctcctgcactccaaagaggtaagcaaagtagctctcctgcctgaagagctctaggtgatcggtgcagtaccgcgtctgctcctccccgccctggaggaggacgaggccgcgtggcgggcggccggaggcggagaggtgaccgcggagcgcggcgacgaggcggtcgcggttcccggcgtgcagctccatgggcaccgccggcggggtgagggaggaaggggaggaggccgccatggctgggaaccccggagaggagagtggcc

SEQ ID NO: 17400 - DNA, 1685 bp, Setaria italica
  Peptide Sequence Number=SeqID_83374
cgccgcgatggcccgcgccgccgccgcccgcgcggccctccttctcctcgccgtcgccggggtcctcatccgtccggcggcggcggagatcaagcaggagtccttcaaggacgacccccgcggctccatcctcttcgagaagttcggcttcggcccccacggcatggtctccgtctccgtcgacggcgccatggcctcctccacgctcgccaagcccgacccctcgcagctcggcttcttcctcctctccgacgaggcgctcttcgaggccatctacgagcagccgccgcccacggatctgaaccccaacccggagtcctcccccaactgcgtcctctccagcccctacgtcataccgctcttcaccttcgccgatctcgacgccaacggccactacaccaagaccttccccatcacccaccccgacgagtacagcctcttcttcgccagctgcgcgccggagaccaaggtcaccatgaaggtccgcaccgacatgtacaacaccaacctggacggcagcaaggattacctctccgtcggcatggcctccgtcccggcgatctacgccttcttcgccgcctgctacgtcgccttcctggccggctggctctacatcaccctctaccgcaaccgcctctctgcgcaccgcatccaccacctcatgtccggcctgctcgtcgcccgtatgctctactgcatctctgcggccgaggaccagcactacatccgcactgccgggacaccgcacgggtgggatgtcatgttttacctgttccagctcgtgaagggtgtcatcttgttcgctgtgattgcgctgattgggaccgggtggtcgttcctgaagccattcctgcaggacaaggagaagaaggtgctcatggcggtaatcccgctgcaggtcgcagctaacattgctgctgctgtggtcggtgagaccgggccattcttacagggatgggtgacatggaaccagatcttcctgtttgtcgatgttgcttgctgctgcgctgtgctcttcccagttgtgtggtcgatgcgctctctgcgggagtcatccaagacagatgggaaggcagccagaacccttgccaagctcacgctcttccgccagttctatgtcgtcgtgattggatacttgtacttcaccaggatcattgtctatgccctcaagacaatcaccaactacaagtacagatgggtgagtgttgcggctgaggaggtggccaccgtggcattctacatgttcatgttctacatgttcaggccagcggagaggaaccagtactttgctcttgatgacgatgaggaggaagctgcagagatggcgctccgtgaggaggagtttgagctctagatgaccacggggaatgcctaacgacatgggaacacagccatctcccactcgacttctcgatgtgatattgatcatactatacagattcagggtttagctaatatttgtctatgtattatggtatcaatcttgtttcgctcctcccttttagcttttgaagctgccgatgagacttgtgataaccagatttcttatgttgcaaagtaaggggggattcaatcactgttatcattttgccaagtctcggtttcggtccttgctatttccatgttttattttgactacgaatgaattactatgtggatgacattgaataaaaaaaaaaaaacaa

SEQ ID NO: 17401 - DNA, 1011 bp, Setaria italica
  Peptide Sequence Number=SeqID_83375
aaatgccacccccgacaggcaagctgaagcacatgacaccaccattcaaaaactctagcaaagctcagctgacccatccacatgctatcagaattcgtagaacaggcatgaattaatgcatttcctaaacggcatacagagacacaatagaagagaatgaaccgagaaggcacgacgagcttgctggataactcaacgaaacagacatatgcaaaacttagtatctgactaaatatgctcttaaagaaagcaagttattcatgaaagacacataactagaataaatcgcttgcaaatgataatcagaaacggtatagtttctggcaacgcacacccgcttcaccccacgaccaattacgccattattcttccgcaaaagcaaatagctcttccctcctctccccactcaaccaggctcaagcgatgaccctcctacgccaacggcgcatttgatatccatgcaaaagttaattgacaagccggtgtagcgaacttcataccggcacacaacacaaccggccagccgagtgaaacttcttgtcgtgctgcctagtaccggtagtgagcaggcttgtagggaccctcaatcgggacactgatgtagtcagcctgagacttgctgagcttggtgagcctggcaccaagcttgcccaagtggagagcagcaaccttctcatcaaggtgcttggggagcacgtacaccttcttctcatacttgccagagctcttctccttccacagctcaagctgagcaatgacctggttagtgaatgagcaggacatgacaaagctggggtggccagtagcgcacccaaggttcatcagacgaccctcagcgaggacaatgatgccagtcttggtctcagggaacacccagcggtcagtctggggcttgatggtgatgcgcttgacaccagggtaggtctcaagaccgtgcatgtcaatctcattgtcaaagtgaccaatgttgcagacgattgcgttgttcttcatcttcctcatgtggtcaac

SEQ ID NO: 17402 - DNA, 1997 bp, Setaria italica
  Peptide Sequence Number=SeqID_83376
gccctccctccacctccactccccccgcccgtctcctcccctcctcccattccctcccagatccaatccgcgagctctccctccgcccgctgccatggcgctctccgtggagaagacctcgtcggggcgggagtacaaggtgaaggacctgtcccaggccgacttcggccgcctcgagatcgagctggcggaggtcgagatgccgggtctcatggcgtgccgcgccgagttcggcccgtccaagcccttcgccggcgccaggatctcgggctccctccacatgaccatccagaccgccgtcctcatcgagaccctcaccgcgctcggcgccgaggtccgctggtgctcctgcaacatcttctccacgcaggaccacgccgccgccgccatcgcgcgggactcagccgccgtcttcgcgtggaagggggagacgctggaggagtactggtggtgcaccgagcgatgcctcgactggggtgagggcggcggccccgacctcatcgtcgacgacggcggcgacgccacgctactcatccacgagggcgtcaaggcggaggaggagtacgagaagaccggcaacggtccccgaccccggagtccaccgacaacgccgagttcaagatcgtgctcaccatcatccgcgacggcctcaagtccgaccccaagaggtaccgcaagatgaaggagaggctcgtcggcgtctccgaggagaccaccaccggagtcaagaggctctaccagatgcaggagaccggcaccctcctcttccccgccatcaacgtcaacgactccgtcaccaagagcaagttcgacaacctctacggttgccgccactccctccctgatggtttgatgagggccaccgatgttatgatcgctggcaaggtcgcagtggtctgcggttatggtgatgttggcaagggctgtgctgctgccctcaagcaggctggtgcccgtgtcatcgtgactgagatcgaccccatctgtgcccttcaggccttgatggagggtcttcaggtccttaccttggaggatgttgtctctgaagctgacatctttgtgaccaccaccggcaacaaggacatcatcatggttgaccacatgaggaagatgaagaacaacgccattgtctgcaacattggtcactttgacaatgagatcgacatgcacggtcttgagacctaccctggtgtcaagcgcatcaccatcaagccccagacagaccgctgggtgttccctgagaccaacactggcatcattgtccttgctgagggtcgtctgatgaaccttgggtgcgctactggccaccccagctttgtcatgtcctgctcattcactaaccaggtcattgctcagcttgaactgtggaaggagaagagctctggcaagtatgagaagaaggtgtatgtgcttccgaagcaccttgatgagaaggttgccgctctccatttgggcaagcttggtgccaagctcaccaagctctcgaagtctcagtctgactacatcagcgtcccaatcgagggtccctacaagcccgctcactaccggtactaggctgcccagcatggcaggaagctcattcggccagccggttgtgtggtgtgcccgtacgaagacgctgatgtgccgttgcttaggaggaattattatggtcatcgcttgagcctggttgagtagtggggagaggagggaagagatgtttgcttttgcggaagaataatggcgtaattggtcgttggttgaggtggcgcgcgttgccagaaacagtttctgattatcaattgcaagcgatttgctctggttatgtgtttttcatgaataacttgctttcttcgaagcatattttagttggatcctgagttttgcttacgtttgttttgtagagttgtgtccagcaatttcgttgggccttctcagctcagtgtcttttgtgtctccttatgccgttctggaaatgcattgattcatgcctgttttgaacgaaaaaaaaaaaaaaa

SEQ ID NO: 17403 - DNA, 2289 bp, Setaria italica
  Peptide Sequence Number=SeqID_83377
tttgcaaaacttagtatctgactaaatatgctcttaaagaaagcaagttattcatgaaagacacataactagaataaatcgcttgcaaatgataatcagaaacggtatagtttctggcaacgcacacccgcttcaccccacgaccaattacgccattattcttccgcaaaagcaaatagctctcccctcctccgattccctcccagatccaatccgcgaggctctccctccaccagcccgcctgccatggcgctctccgtggagaagacctcgtcgggccgggagtacaaggtcaaggacctgtctcaggcggacttcggccgcctcgagatcgagctggcggaggtcgagatgccccgggctcatggcctgccgcaccgagttcggcccgtcccagcccttcgccggcgccaggatctcgggctccctccacatgaccatccagaccgccgtcctcatcgagaccctcaccgcgctcggcgccgaggtccgctggtgctcctgcaacatcttctccacgtcaggaccacgccgccgccgccatcgcgcgggactccgccgcggtcttcgcctggaagggggagacgctcgaggagtactggtggtgcaccgagcgctgcctcgactggggcgagggcggcggccccgacctcatcgtcgacgacggtggtgacgccaccctcctcatccacgagggcgtcaaggccgaggaggagtatgagaagtccggcaagatcccccgacccggagtccaccgacaacgccgagttcaagatcgtgctcaccatcatccgcgacgggctcaagtctgaccccaagaagtaccgcaagatgaaggagaggctcgtcggcgtctcggaggagaccaccaccggagtcaagaggctctaccagatgcaggagaccggcaccctactcttccccgccatcaacgtcaacgactccgttaccaagagcaagtttgacaacctgtatggttgccgccactccctccctgatggtttgatgagagccaccgatgttatgatcgctggcaaggttagacaagttgtctgcggttatggtgatgttggcaagggctgtgctgctgccctcaagcaggctggtgcccgtgtcatcgtgactgagatcgaccccatctgtgcccttcaggccctgatggagggtcttcaggtccttaccttggaagatgtcgtctctgaagctgacatctttgtgactaccaccggcaacaaggacatcatcatggttgaccacatgaggaagatgaagaacaacgcaatcgtctgcaacattggtcactttgacaatgagattgacatgcacggtcttgagacctaccctggtgtcaagcgcatcaccatcaagccccagactgaccgctgggtgttccctgagaccaagactggcatcattgtcctcgctgagggtcgtctgatgaaccttgggtgcgctactggccaccccagctttgtcatgtcctgctcattcactaaccaggtcattgctcagcttgagctgtggaaggagaagagctctggcaagtatgagaagaaggtgtacgtgctccccaagcaccttgatgagaaggttgctgctctccacttgggcaagcttggtgccaggctcaccaagctcagcaagtctcaggctgactacatcagtgtcccgattgagggtccctacaagcctgctcactaccggtactaggcagcacgacaagaagttcactcggctggccggttgtgttgtgtgccggtatgaagttcgctacaccggcttgtcaattaacttttgcatggatatcaaatgcgccgttggcgtaggagggtcatcgcttgagcctggttgagtggggagaggagggaagagctatttgcttttgcggaagaataatggcgtaattggtcgtggggtgaagcgggtgtgcgttgccagaaactataccgtttctgattatcatttgcaagcgatttattctagttatgtgtctttcatgaataactagaataaatcgcttgcaaatgataatcagaaacggtatagtttctggcaacgcacacccgcttcaccccacgaccaattacgccattattcttccgcaaaagcaaatagctcttccctcctctccccactcaaccaggctcaagcgatgaccctcctacgccaacggcgcatttgatatccatgcaaagttatgacaagccggtgtagcgaacttcataccggcacacaacacaaccggccagccgagtgaacttcttgtcgtgctgcctaggtaccggtagt

SEQ ID NO: 17404 - DNA, 292 bp, Setaria italica
  Peptide Sequence Number=SeqID_83378
tctcgcttgcctttccccacctcccccgtcgccgcggcacccgccagctagggtttcgtgccccgctcgccgatccgccccgtccgccatgtcgaaacaaggagggaaggccaagccgttgaaggcgcccaaggtcgacaagaaggagtacgacgaggtatgctgctgcgcgttgtcctcttcttccattccgttgcgcgcgtttggttggttgcctgattagcgatctgcgcgggtagtctctgaccgtatggtttgactcttaatgcaaacgcactaagatcagttcata

SEQ ID NO: 17405 - DNA, 769 bp, Setaria italica
  misc_feature (698)..(698): n is a, c, g, or t
  misc_feature (706)..(706): n is a, c, g, or t
  misc_feature (769)..(769): n is a, c, g, or t
  Peptide Sequence Number=SeqID_83379
attcattcttaattgcatgtttctgaattggtgcatcttccatttgattgtttagggtatttgttgctatttggagctgtttcttttggtctatcctattatcctgtcattaatctagaagctggttgggacagagtgtttcaggatggaaatttctttaatggaaaaaactcaacctcatgtcttaagtcaaaaagagaatgcaattatataataggaaggaaactgtttatgttattggttcttttgctggaacacatggcagtcaagtcccatgataaacaagccaagctgaatccaataagcacttccaaagtatattatgaaaaggatagggtagcaatctgaatatgatattgtgactgctataaaaatccaaatctcttttgatttggagaactagtgaatgtagcaatagaaaaggatgcctgagctgattcagtgatcagttataatgtgtctccacttgacatcattctgataccatctatcgtgcagtctgatcttgcgtatctgcagaagaagaaagatgaggaaaaggcgctgaaagaactgaaggccaaggcacagaaggggttacgggattggcggctctggcctgaagaaaagtgggaagaaatgagtctgttacttgggaaatgataaaatcttctgcctatatgtgctgtggttcaccaaatgtgattgtaacaaaactnttttaagngggttctgtgttagtaatgttgcagtcagttgcttgatccgaagatgatgttggctatgatgn

SEQ ID NO: 17406 - DNA, 578 bp, Setaria italica
  Peptide Sequence Number=SeqID_83380
cagccgcagtctcgcttgcctttccccacctcccccgtccgccgcggcacccgccagctagggtttcgtgccccgcctcgccgatccgccccgtccgccatgtcgaaacaaggagggaaggccaagccgttgaaggcgcccaaggtcgacaagaaggagtacgacgagtctgatcttgcgtatctgcagaagaagaaagatgaggaaaaggcgctgaaagaactgaaggccaaggcacagaagggtgcgattggcggctctggcctgaagaaaagtgggaagaaatgagtctgttacttgggaaatgataaatcttctgcctatatgtgctgtggttcaccaaatgtgattgtaacaaaactattttaagtgggttctgtgttagtaatgttgcagtcagttgcttgatccgaagatgatgttggctatgatgcagatggttctatgataataacatggcattctaagatgttgtcttcttaaaataattgtgctgatttttcttttccatttacatcccttcctcagtaagcaggctatttgctccatccgtttttatgtgaacctatctggccccg

SEQ ID NO: 17407 - DNA, 1240 bp, Setaria italica
  Peptide Sequence Number=SeqID_83381
tttttttttttggtttcaagtaacctctaattaactacagatgttcagaaaaccggagtacacgaattaaaactcagccaaaaagaagatgctacaaatttgacaaatagtagacagaacagtgcggtgcacaactcggaataaaaaatttacaagggtttctgtgaaacttctatctagtctccctcagaatccaagaaaacagatcatgataacagcgcaaacactgcagtcaatcagcagagctcccagggctttctgtagcagcaacccgatctccagcatttgccctaagctatcggcagaacccaggttggggccaacaggtctgcccctcgcattgggatccttgttctccatcaacagtgtcaacacgatggtaatgtttgttatgatgagaaatagaagtggtcttgtaccaactagtactctggtgatggcgccgccaatgtctaggccccagtttgacagaaccaccagaaaagcgatggcgattgatgctaagagacggttactctctgtcgctgatatggccttggtaatctcctgtggtgtgaaattcatgagttccttcagggtttccacagaccaacccgcatcgtgtgcttggtttggctgacttggaggtgctgatctgggtctgatttccacctctcttataggttggacacttggtgcctcttcatgactcgtcttcttactgagggtttcctgatcaggcctatgagatggtgtttcattttttcctcgaactgatggtgtttcatttactggctgaatttcagggactgcgcttgcactgccagtcttgaattcgaggaacagttcgtcttcataacttaagggtttagccttgatttcttggggagtatcagctcttttgaattcaggcaccaggtcgtcatagcttaaggttctagccctgggttcttggtgaatactagctctaggtactgacttttgcaactgagttctatcgctgaacttttcaccaccaaaggcaccttcattctgctgctgttcagactgaaggggtgaagcagaatcatatgaacttggtgaacctggaatcgggtcgcaggataggctgcgcgtctggccggtgatgaaggcgaggcgatccgatcccctctccaccagccgccgccgccgcgtgcccgcgcccttctccatcgccaccaccccacctcctccgcgccggcacgcccaggccactacctcctctctctcgttcccgctt

SEQ ID NO: 17408 - DNA, 391 bp, Setaria italica
  misc_feature (349)..(349): n is a, c, g, or t
  Peptide Sequence Number=SeqID_83382
cgatgtgatcgtctccaatgtcgtcttccaggattcgccgttctggaacatccacccggtttactgcaggtgagcaccaaaggattcgcctgttgtagtgctgttacagagagggagccacatttttcagtccaattggtttgcttaattcgcctgttcgtcagaactccagcttgcacctggacaggttccgggccttgttacgaggttgcaatgtagtttcaggaacaatcattgagcaaaaaatagcatgagaatcgatacacaactcatagttatctgataaactgaatattgacgctgagtccaatgtttgctaccctttctgtcagacagcgaaaaagggttntgaaccgcgatccttctaaacgactaaacgagcgttacttta

SEQ ID NO: 17409 - DNA, 1127 bp, Setaria italica
  Peptide Sequence Number=SeqID_83383
aatggcaccattgatgggtctaaggtctagtcgtgtggtgggatatgtggaagaagcgcacgctgcccttcacaaggccgcacctgctggagctcatgtactccaccgatgtgatcgtctccaatgtcgtcttccaggattcgccgttctggaacatccacccggtttactgcagcaatgtaagtaatagcaaacgtgactgtgttggcaccgcacgactccccaaacactgatggaatcgatctagattcatgcaacaatgtctgcatcgaggactcctatatttctgcaggagatgacttgatttccatcaagagtggctgggatgagtatggcattgcttttggtcgtccaagctctggcatcaccatccggaggataacagggtccggccccttcgctggctttgcagttggaagcgaaacctctgggggcgtggagaacgtccttgttgagcacctgaatttgttcagcatgggcgttgggatccatatcaagaccaactcaggaaggggaggattcatccggaacatcaccgtctctgaagtgaccctgaatggagctcgatacggtttgaggattgctggtgacgttggtggccaccctgatacatcctacaacccgaatgtgcttcctgttgtccacagtgtgacgattaagaatgtttggggtcagaacatacggcaagctgggctgataaggggcatcaggaactcagttttcagtcgcatatgcctctcaaatgtaaagctctatggcagtgcatctatcgggccatggaaatgccgagatgtcagtggtggtgcacttgatgtgcaaccatcgccatgtacagagctagctagtacatctgagacaggtttctgtacaacttagatcagcttctcccaagtgaatgttgttactctcagttccgccgcttaggcatataaattttcctgacaaatagcaataaagatgtcagcattgctctatcttgttttggtagaaatgcttgctgattaactggaatatgtaacagaaacaatgacccgtgacatatccatcagtccattaccttgttcacagggactctcagtcctttgtttcttggaaagctctcctgcaattcagccgtcaggcctgat

SEQ ID NO: 17410 - DNA, 284 bp, Setaria italica
  Peptide Sequence Number=SeqID_83384
cggcactcggctgcgacaagcagcggctgcgaaggcggcaggacgcggcggcgctccttctccgcaggatcaaagggctcgtgcgctgggtcgtcaaggaggtcgccgccggccgctccccgtccatcgtgctccaccggtaccggaactactgctccgccgccgacgctgcgtccccgtccccatgtgcctgcagctacgacgcccccgtaggcacggacgtcctctccctgctccacaaggactgccacacctcccgcctcaatgtgctcctgagggtgctg

SEQ ID NO: 17411 - DNA, 426 bp, Setaria italica
  Peptide Sequence Number=SeqID_83385
cagttgtttcaggaagctgcagcttgcagatcaaaaacaagacctacctgttcagtggctgatgacacctctgaagtctgaacctgcaattgcccgacgagaaggtagattctggatgcggatcggaatcggacaccgcgcgcgtgcgatccaagcagcagcagcagatcggagtccgactcccggtgatttgccgccaccaccgcctacataaccaatggatccatccatcaatcaactcgtcgtctctgtcttggccattgttcctcttgggtgccgtctcccttccgatccctgccatggaagaagatatagtgtgggagattggggagatcgaagcccaaggaggaggagagtcgccgccgttgtttgaccaagccacgccgccgccgctttacccgccggcgtcggtctcgtcactcaccc

SEQ ID NO: 17412 - DNA, 687 bp, Setaria italica
  Peptide Sequence Number=SeqID_83386
agcttgcagatcaaaaacaagacctacctgttcagtggctgatgacacctctgaagtctgaacctgcaattgcccgacgagaaggtaggttctggatgcggatcggaatcgaggaggccggatcggaatcggacaccgcgcgcgtgcgatccaagcagcagcagcagatcggagtccgactcccggtgatttgccgccaccaccgcctacataaccaatcgatccatccatcaatcaactcgtcgtctctgtcttggccattgttcctcttgggtgccgtctcccttccgatccccgaggcgatgccgccgccgcttccatcagcaacaagcgcggccgcgtcgccgcctccagcaaggccatccaaggcctgcgggaggtgacggcgccgccgacggacgggtccgacgacgactgctgcgccatctgccttcaggatctcgattactccgacaaggcccatccagttccggtgagggccatgccttgctcgcacacctttcacgagcactgcatcttcgagtggctccgccggaacgccgtctgccctctctgccgccaccagctgtctacggaggacgaccacgagcaggagcaggaacaggggaggaggaggaggaggaggatcatgaatttcaggatcccctcctcctcctcctcccctcgttcctgctcctgctcgtggtc

SEQ ID NO: 17413 - DNA, 253 bp, Setaria italica
  Peptide Sequence Number=SeqID_83387
gctttctttcatttattcaccatctgtataagatgccatcaatgtaataagatgcatattaagcttcgaattttttagtattaccctactttggagaagaatatatccaaattcaggcagggaaaaaactgaatgccactgatataagaaggatctataacgggaatatggggattgcgtactcacctaaatgtgtagtgtcagtaacattaccaggataccaagatattgcaaacttttgggattaggatca

SEQ ID NO: 17414 - DNA, 1288 bp, Setaria italica
  Peptide Sequence Number=SeqID_83388
gctttctttcatttattcaccatctgtataagatgccatcaatgtaataagatgcatattaagcttcgaattttttagtattaccctactttggagaagaatatatccaaattcaggcagggaaaaaactgaatgccactgatataagaaggatctataacgggaatatggggattgtatactgcagataacttcacactaattagtaacaacaagcctgggataggtatcagtcaaatgttcacccatgtagtccaccaaagatgctttctttcatttattcaccatctaaatgtgtagtgtcagtaacattaccaggataccaagatattgcaaacttttgggattaggatcagcccataccacctcagaccaagaggcttggtactatagatgatagtagtccacagaaacctcaagtaccgcagcactcagtttagaagcaattatgaattgtgaatttggagttcagagtccatctccatcatacgttgcccacctttcaataacaacttgaaatttgttatcccttttcctgacctcaaccagtggcttctttccatgaagcagcatatccacactcctttctgtccgatgagttacccagtaatgtcgctccctcatctcaataaggaatggaaatgttggaggggccttcctctccagaatacttttctgactgcgtcgagcacgagcttcatcatcaccaagagtaacagtttctacacctccaatcaagtcagataaggtcggattcttaatgatatttgcaagtcgttctccatgggcagtaccaataagcatcacacccctttctgcaattgagcggcaagcttgtgcttccgcttcagttccaatctcatctacaataaccacctcaggcatatggttttcaactgcttcagtcattactctatgctgcattgatggttcaggaacttgcattcttcttgcgccaccaatagcagcatgaggaatatccccatccccaccaatctcattacttgtgtccacaattaccactcttttctgaaattcatctgctagaacacgtgcaatctcacgcataacagttgtcttgcctaccccaggccttcccaaaaaaagaatgctttctttgtagtttaggagatcacggaccatatcaacatgtccagtaacagctcggccaactcgacaggtcaaaccaacaaccattccttttctgctccttatagcagatattctatgcaaagtaccttcaatccctgcacggttgtcacctccaaactcacctactgcttgctgc

SEQ ID NO: 17415 - DNA, 1478 bp, Setaria italica
  Peptide Sequence Number=SeqID_83389
gcatccagtctttccaacaacacgttgtacaggcttcagttctctattacacttcacagtgctagcaacggtgcaataatgctattattaggattgcgcaacaataaatctccgtagtattgaccatataatttgcaatcagtaaccaatcgctccctgctgtacgaatcttccgggtgtacactacacatgcacatacgcacactgcacaatctacgatatcgatggtgctcagtttaacggctctgtgctaaagaaaatatgcacgtcaaataaagaaatcagctgctcatgtctacagtacatgacacacacatacactgaacccagaaacctgttccgtgttcatgccgtcccgttgcgcttgtccttccgccactcccatggtttctgtggcttcgacgacgcccacaagcccttcctgccagtctgtgcctgtttctcccacttggccagctccgggcgttggtcgtaggcggtgtagtgccatgcaaaccccttcttcagcatttgctcctgcacgaatacgccgtcgcagtagatgtctccgacgcatctaccataccggtcctggtcgtacacgtagaccttcaggctctttccctgaacaagcttcagcagcgcctctttggcctccttgccgtacggcatcgcgctctccggcgcatcgatgcccctcagcctgatcctgtacttcttggcgagcacctcttcgcctctggcgttagggactggcctgtatcctgcgtccactatgaccttctgcagggcgtcggccttctggtaattcttggcggcccgcgccttggcccgctcggccgccgccttctgcacctcgcggggcacgctgccagactcccgggggtcggccgtgtccacgtacacgttgatggtgtcaccatcagcaacggacttggggtcaatggggagcgtgtgcagctcgaacttggcaccctgaggtttgggcgggccctgaggtttgggcggcgcgggagcagcgggagcgcctgctgccgcgtttgggtgtggcaggccgtagaaagccaagaagccctcgacgtctgctttctgatggttcttgagcgtctgcacaacgaagcgcgcggcttcctccggcgtcttgggcggtggccgggctttcttccatgccaccagcagcttcttgtaccaattcgcctgcgctttcttggaggagacgacgtggcggctcagctcgtccggaacctgcgagttggctccgaagctgaggatgtcgcggccgagcgcggcgacggcggggtgcgcgccgtggagcgcctgctccgacgacgagggcgcgcacaggccgcacaggaaccggtatatgctgttccccatggccgcctcccgctacgcccagctgctcgcagctcaccggcccggcacaccggcaggacgacgaattcgaagacgagatctttgcgaggagtggtggccgggcttccttcctctctctctct

SEQ ID NO: 17416 - DNA, 248 bp, Setaria italica
  Peptide Sequence Number=SeqID_83390
tgctcagatcagaagagctgtgaaaaccaattacaaacagcatgccagtacttacagtagccttgtgagcagcagcaggaggcgcaccaggagtttcggcgccacttgaggaaccaccggacccatttcttgacgcaacaggaggaagcggtgcctcctccacgcttgaagcattcagtgtcggcattggcggcacagatggcggctgggctttgaagggttgaagtaactggtaaagggagccaacg

SEQ ID NO: 17417 - DNA, 1921 bp, Setaria italica
  Peptide Sequence Number=SeqID_83391
tttgtggcttccattagcaatgtataacaccaatgctcgctgaatagtgtaacatttctaccggggaatttatacaggtggaaacgaatatgcagggacatactgaaacagctacagaaacaagtgcttgggagcaccaaaacatcggtcgaagcttgcctgaatcatacagcctcaaggtttgctcagatcagcctactatacagcctcatggtttgctcagatcagaagagctgtgaaaaccattacaaacagcatgccagtacttacagtagccttgtgagcagcagcaggaggcgcaccaggagtttcggcgccacttgaggaaccaccggacccatttggtagtcttgagtttgtgtaccgtaaaagatctctcttccttgacgcaacaggaggaagcggtggctcctccacgcttgaagcattcagtgtcggcattggcggcaaagatggcggctgggctttgaagcgttgaagtaactggtaaagggagccaacgtcaatgcgctgcatgtagttgggcatgtcatttcccaaacctgtacaagtgtttttttgatcttctgactgtcttcgggaagtcagttatgatgcctgacagattaaatgattgaacatagtaattgatctcaacagtttcatctgcaaagaagtccaacggttgtgatacaaactcattccggaacacctgtgcgtacacagctagccctgctgactgtagatctttcacaagactgttctgtcggatcgcaaaatcttgacttaaggtaaaaacagatttcctatcaacaactacagcatcagcaaacttcttcatggcttctaatgaggaagtagaagcatccccaatgcctaaggggagagtgtacacaagcttgcattttgttttctgctgcttcagtttgacaagaacagcactatctttcgactggatcagaacttgcttggtagtctgattatcatagccagcagcacttaaggcagcatttacagaatcaactatgtcaattcctaatgactttgccacaaatgcagcattctcaatgatgatcatgacaccagacaaatccttatccattccgattgctagaaagtcagataagttcagaaacttcccttgatttgtgtaccttgggttccttacaagataataatcactcactggggaagatattttgggttttaaggtgctactattaatgtcatcccaagtaaggttgaatgtgaagattcctgctgtagcctgaatttctggaacaacagaactaagagagctgaaagttgttccctgcacattcgtggtatcaagcaggttaatggaactcatgcacataagaactccatcacttgtcacttgaacaggacaatcaatgacatctgcgccatcattaattgcactatggtaggccaggtccgtacagtctggataatctccactagcaccattatgcgagataactaagggttccccatgatcagtcttacttgaatgcagactagccaagcaaccaatagcctctgacgcagtaaaagggtgttctgacaatacaccatcaacagagaagccaccatcgctgataaagtttaggtattctgccaatggatcataactgtagttatagggaataactctatcatttgcaaaatcagaggcatatatttccagccctgcattgtgggcttcggcgacaattgatgtggacggctgtagatagttatcctttgtcactggccaaatgtatgtcttcgggaccattatgccagatgcaatagacttaataagcgttaggttactcaaaagtgaaccatatgtttggtttatagaatgatccaagagggatttatcaagaaagctaaacacaagctttgttttgcgatgaactgttccagatatattttggaggaagccaagttcagg

SEQ ID NO: 17418 - DNA, 1924 bp, Setaria italica
  misc_feature (856)..(856): n is a, c, g, or t
  Peptide Sequence Number=SeqID_83392
caaacagggagacaatgtaggcagggcttaacctaattcagtctctgggctatcctgggggcatctgatcagctccaagatgttcaccacctcactcatgtccggcctgttagaaggaacctgagaagtacagaccaaaccaagtttcatgattggaacggcctcctccagtggaaatttcccgcagagcctctcgtcaacacattcttccacctttccttcatccaaagcagcccttaccacatcgcacagcacaatcacatcatcttccatgtactccaccggtgtcctccctgttaggatctcaagaataagaacgccaaatccgtacacatcacatttctctgtgatcttcactgttctgcatgcaaactctggagccatgtaaccaagtgcgctctgtaccttgctgcttaagacataacgatcaagcattggaagtagctttgccaacccataatctcccaccttagcctcgcctgatccatcgagcagaatgttgcttgacttcagattgtagtggataatatcatgcctgtggagatgagccaggcttcttgctatgccaagaattatatcaaatctttccttccaggacaggcaatttgtggtggatgactcgtgcaattgcttatgcaagttacccccagatacaaactcataaataagaagctgaagtgatggtgtccagtaatatcctttgagtgcaacaaggttgcgatggcgcagcttacccagcatcttcacttctctctcaaattcaacttgagacttaaccaagcttgacacagtgagcttcttgatggcaacaggttgcccatctcgaagagtggtcttgtagacagtgccaaaaccnccacgcccaagctcacagtccttgttcagaagagcatgggtactggcactgaactctggatttccacctccaaacatgacaagcttgcccgcattcatgtcagtcgtgggcgactggctgagataaccatccgagagttccaagacagcagcagaatgagatccgggggcacgcactcgaaagttgagaacagtaatggtaatgacaccgacagcaattagagcagcagcaccaattgcaactaaggctgagatgctcagtatggttttcttgtgatggaggccaccatcaggcacgggctcagtcggagatattggatcagaagaagtgtttgggtttagcactattggttttggtagcacaccagggcaagaagagttgagctttgcaccacaaaggccgggattgtccaacacagatgatagggggattgtgtcaaaaaagctaccgggtgggagatccccagagagctggttatgtgaaatattgaactgcaggaggtgggggaggttagagagctgcttaggtagaacaccagtgagcctgttccgagaaagatcaacaatctcaagactggtaaggttggctatcgtttctggaattgctcctgtcagattgttatgtgaaagatccagtgatgcaagtgcagagcaattgccaatctgagccgggatattgccagtgagggagttctttcccagcctcaactccttcaatgactctcctccaatggcagctggaatgctcccatttagccggttggcagtcaaatcaagaacctccagtgacttcacctccaaaatgcttgccggaatacttccagacattgagttccatgacatgttcaacgactgcaagttctgcagcttcgagatttccgacggaataactccagagaaggcattgtttgacaagtccactccttgaagcactgaagatacattcataggcattgctacctcgccgctcaatgtgttctgtgacaccgacacccattgcacgccagaagcaaagacccaggtaggcagtccacccgtaagagaattccagctgacatcaacatgcatt

SEQ ID NO: 17419 - DNA, 752 bp, Setaria italica
  Peptide Sequence Number=SeqID_83393
ctgaggccgctatggtcggcgccgggatgcggcccgggtgcctcgtctccgtgtcactaatttcttcgagaagtgaccaattagatggattcccactagacgatttgtttaaggagtgcaacagattctttgatcttgatgtggacaatgatcttctctgtggtgaagctggaagaaactttgttgttgccacagttttcccatcacgtgaggttcaaaagaatggcatcaagctctcttgggatcttgcttgtgttttgggatacccttcagtaggtcaatcgttgtttattagccccttatgtacatctcaggacccaaagcatagtgatgatgtagatattttacgggtagtaaaatgtaagaatctttatcttggcctaattccacctgaggttggatcttccagtggcattcattcagaatctgactacctctctgaaagaaatgaaatgcttatggagacacctaagaagagtccttttactacattgcataggaaggaatcccatgactttgcatccaacagtggctcttcaatgtgcttggatccaaccactacgagatcagcattagcagacgagaaagttaatgagttgttgcagacttcagcttcacgatggcttaatggtcgacacttgctaaaagggaactttattcctctactaacaaaattgtcctaaagtaaaagaaaaacgggaaaaaactaaaaagtaaaaaccttaaaaagtttaaaaagtggtgatgggagc

SEQ ID NO: 17420 - DNA, 1125 bp, Setaria italica
  Peptide Sequence Number=SeqID_83394
tccttccgtcgccgagtgccccgacgccgacgtcgtcgtgctgccgctggacctcagctccctcgcctccgtccgccgcttcgtcgcgagcttcctcgacctcggcctcccgctcaacctcctcgtcaacaacgccggcaagtacgccgaccgcttcgccttgtcggaggacggcgtcgagatgaccttcgccaccaactacttagggcacttcttgctgacgcggctgctgctggagaagatggcggagacggcgcgggcgagcggcttcgagggccgcatcgtcaacgtctcctccaccatccacagctggttcgccggcgacgacgccgtcggctacctcgaccgcgtcacccgccggaagataccgtacgatccgacgagggcgtacgcgctctccaagctcgccaacgtcctgcacaccagagccctcgccgaacggctgagggagatgaacgccaacgtcacggccaactgcgtccaccccggcatcgtcaggacccggctcatccgcgaccgcgacggcctcgtcaccaatacagtgttcttcctggcgtcgaagctcctcaagacgatccctcaggcggccgcaacgacgtgctacgtggcggtgcacccggcggtggccggagtgtcggggaagtacttcgccgactgcaacgaggcgtcgccgtcgaggctgggcgccagcagcgaggaggccgccaagctgtggagcttctctgagaacataacggcagagaagattccgaagatgagtgtccatgtcagcgccggcggcttccggctccaggttcagagctctaatgcagaccgcggcatggccctcgcataggagcctcgagattcagaaattttgatccccaacgatgtgcccctgatgagatcacacatcctgaaaagcatagtaatagtatagtatcagtctcaaaaaccagaggatatagcagtaaactagtagaaatacaagtatagctttgagcctgtaaatatatagccatatatatatgtatacaagtatatgctagtgtgttctgggaattgtctgcagatgcaaagatcagtatgtcaaatgtttatgctgaagcatgagtatattgactattttcgtacaaaaaaaaaaaa

SEQ ID NO: 17421 - DNA, 615 bp, Setaria italica
  Peptide Sequence Number=SeqID_83395
tgtccgttccttgtcctcttgtcggttctgcctatgcatcgccgcggcggcggcgccgccgcccctcgacgtggccgtcgccgagatcgagcagctcaaggccagagtcgaggatgtgagcagtaggaactcgcgttacagcctcatcagcgactctggatccaatcctggtgactctgcttccagcgctgctgtgaccgcaactgcggttgacatgccaggtgaggccaggaacactgtgaaaaagcagccggggtttagtgatctcacccagttgattgccaaagatggcaaagagcttggggtgatgtcagtgtgggggagaagcgacgatcttggtgccatgtccgtcatcaggaaagcttacgaagacccggaagtccggaagaccttcggatgccgtggatgggtgaagctggagtatcctttcaatcgacgcaagttcctgcagagtgtggttgcgcagttctacacaaactcttgcttggaggaggagaaaagtgtagatgttgtcgagctggagaggatggagaacgcagtggtgaagcaaggcggatttgttcaagaattcaaggcccaagtggatgagaagaggtacctactagtgctggaaaa

SEQ ID NO: 17422 - DNA, 313 bp, Setaria italica
  Peptide Sequence Number=SeqID_83396
tggtggcgctgcttcaggtggccatggcgtgcgtggccaggtccctgacgcgcggccggacgcccccgacgtggtccggatgatcgaggagatcggcggcgggcacggcgggcggacgacgacggaggagagcgagggcgtgcggggcacgtcggaggaggagcggtcgcggtcggggggaacgccgccggccgcaccgacgccgtgagcgccctttagaggagggtaaaagggtttcttctcgcgagattaaattgcataggttcttctttggtgcctgtatgtcagtgaacagtggtgttctctctctctc

SEQ ID NO: 17423 - DNA, 541 bp, Setaria italica
  Peptide Sequence Number=SeqID_83397
cgaaaattgtcaacaatcatgattttcatatgaaaaagatatctcatatgatctattcatgccatctatgagatgtaatctactgctagatagtatgacccgactaatacaaatgatgcaatcccactatgggccattcgtagtccgatgccacggaacagaacattcctatcagcaggagatatccctgtctttctctctatccacgttcctggtgctttccacttaagaaacttcctctccattgcgatatacttaggcacaaccgtacattctgaacgactttttgcagtatcaaacgtatgtgaagcagcagctgcaactgctcctgcaaagcctgcagcaacactagaagcaaaagggtgtacagggcctgcgtcttctatattcctaggttcaggtttcatattaactgccttccaagtgagcatcgctgtgtgtatgatttgccaagttgaaaagaacataccaccaaagacacagtctcgagctatccctggtctaagccctctccacagtgcaccccatccttcaagtgata

SEQ ID NO: 17424 - DNA, 506 bp, Setaria italica
  Peptide Sequence Number=SeqID_83398
cggagctgatgggctcgtccttctttcccacttcagccacttccttggcgctctctgacagcgttgcagatgctgcggcgacgacgggcgcgctcgctgtcgccgtggggatcgctggctctgccgcgtccggttgaggctggtacgcctctgcttccagctccagggacgggtggtagccgtcttccatggggacggcgtggacggcgaacatggagaaggaccggagccggccgaggaccatggacgacgcgctgcggcagagcctccgcgtggacgcagccgcgcggccgccgccctgctccccacgggacgacgtgaccacgatggcgccgacgagcacgttgcacaacaggaacaacgccgcgccggggctgatccaagacgacgtcggccaccacgacaagtactccatcgccattggtcggtgagctagccgcctctctccctcccagctgttgtctccttgccggctacgagtttcttgctcttaacaagctacaaga

SEQ ID NO: 17425 - DNA, 419 bp, Setaria italica
  Peptide Sequence Number=SeqID_83399
gccgaaacatcagcggtggatccatcgtacgagtaaccttcatgggtgaaggtgtcccaaatgctgggtgcccttccatcctctgcagcagctccttccacctggaaagccgaggacccagcgccgaagacgaacccctccgggaagtcacgcctggtgatcgcggaggcgctccttggcgcgacgccgacgacaacggcgagcaagacggtgagcagccgcggcgtggcttgcgctcggagtcgccggagcacgccggagctgctgagcggcgccatgcctctgccgacgactggctgctgctcctcctgccgcgcggtggcgatgactggtgactggtgggcgcgggtgggtgaggactttaagctagtgactgacgtgcttccatggatcattcggccgctgctaacactccggat

SEQ ID NO: 17426 - DNA, 479 bp, Setaria italica
  Peptide Sequence Number=SeqID_83400
gcattacaccagtatcaacaaccaatcatggctactagcgccgtgcttctggtggttgctgccgttgttgctctcgtcgccggccatggcgccgccttcgaccccaaccctctccaagacttctgcgtcgccgacacgacatcgaaagtgcgcgtgaacggggtcccgtgcaaggacccggcggcggtgaccccggacgacttcttcttctccggcgtcgaccgcgccggcgccggcacggcgagccggcggtacgggttcacggcgctgtccgtgcagatcccggggctgaacacgctgggcgcgtcgcacgcgcgcgtggacgtggcccccggcgccgtgttcccgccgcactaccacccgcgggcgtcggagacggcggtggtgctggacggcgccgtctacttcggcttcgtgtcgtcgtacccggagaacatggtgtacgccaaggtgctccggaagggcgactcttcgccgtg

SEQ ID NO: 17427 - DNA, 274 bp, Setaria italica
  Peptide Sequence Number=SeqID_83401
cgaacagccaaacacaaagagtgatcaaacttcttatttacgaggttaaatgcatctttggaaattcaatcatgtttcttgattttaagtctgtaacacattttctacaatgtcttattttccgatgatgatgaagcgttctcaagagtaaaaaatgaagcaacaaaacaaccactcaagctgtcaacaaaacaagtatagagtagatactattattttctgtcgtgaaagcaaaataaataatacagtgtaagagccactataagaatcatag

SEQ ID NO: 17428 - DNA, 265 bp, Setaria italica
  Peptide Sequence Number=SeqID_83402
atcctcgtggagaaatttgtgttagaggacctacaatatttcggggttactacaaagatgaagtccaaacgtagatttctatcctccacttttgtttacctttctatattgaattggctgcaactgcaacaaatgcatttgaaaacctgcagaaaagaagtcattgatgaagatggttggttgcacactggagacataggtctgtggctgcctggagggcgtttaaggattattgataggaaaaagaacattttcaagttagctc

SEQ ID NO: 17429 - DNA, 953 bp, Setaria italica
  Peptide Sequence Number=SeqID_83403
cgtcatcggtctcagctctgagccctctcgcgcgagaaatccatttcccctttcgcttgcggcagccccctccctaccttcctcccttccctccctccccacgcaagtcaaatcgagtcccgcacgaaagccacgaaatcccctgcccccaatggaggacgcccagcgccggctccgtgcggtcgccgcccacctccagccgccgcccaccgccgcgggctgcggcctcgccgccaaccccaccgccggcgagtacgtccacgcgcagggctacagtgtcgttctccctgagaagttgcaaactggaaagtggaacgtgtaccggtctgcacgttcacctctaaggttgataagtagatatcctgacaatccagacattggaacacttcatgataattttgagtatgcagttgatacttttagagattgtagatacctgggaacaaggatcagagctgatgggacaattggagactacaaatggatgacgtatggagaagctagcacgagcaggactgcagtaggttctgctcttatttatcatggagtacttgaaggtgcacgcattggtctgtattttataaacagacctgaatggataatagttgaccatgcttgtgctgcatactcatatgtatctgtgccactttatgacactcttggtccagatgcagttcaattcattgtgaaccatgcaacagtagaagttatattctgtgtgcctcaaacactaagcgctctgttaagctttataactaagatgccatgtgttcgtcttatagtggtggttggcggagaagatgttaagattccacccacacccgcaaatactggagttcaaattataacttaccccagtctacacaatcagggaaagatgagtcctcaacctttccgacctccaaaacctgagaaagaactagtcttcccttttggtagttacctagttggtt

SEQ ID NO: 17430 - DNA, 420 bp, Setaria italica
  Peptide Sequence Number=SeqID_83404
cttgggctgcatcagaaggaattcagtacgaggacttaagacagctctgtgctgatcctagagcaagagccgctgtcctggctgacatggattccattggaaaggaagcgcagctaagaggttttgaatttgctaaatctgttacccttgttgccgaaccattcacattggaaaatggtctcctcaccccaacgttcaaggtcaaaagaccgcaagctaaggcatactttgcaaaagaaatctcagatatgtatgcgcaactgcaagaggcagagtcagctaggtcgaagctataattttcagaaaaacggccgaagctatataatcgcttgtgtaattatcaggaaatagccatactggtggatggtgcaattggtttttcaagatcacgaaataagtcaatcttttttactgacaaca

SEQ ID NO: 17431 - DNA, 2467 bp, Setaria italica
  Peptide Sequence Number=SeqID_83405
aaccttagaggtgaacgtgcagaccggtacacgttccactttccagtttgcaacttctcaggttgataagtagatatcctgacaatccagacattggaacacttcatgataattttgagtatgcagttgatacttttagagattgtagatacctgggaacaaggatcagagctgatgggacaattggagactacaaatggatgacgtatggagaagctagcacgagcaggactgcagtaggttctggccttatttatcatggagtacttgaaggtgcacgcattggtctgtattttataaacagacctgagtggattatagttgaccatgcttgtgcttcatattcatacgtatctgtgccactttatgacactcttggtcctgatgctgtccaattcattgtgaaccatgcagctgtggaagttatattctgtgtgcctcaaactctaagcattctgttaagttttgtagctcaaatgccatgtgttcggcttatagtggtagttggtggaaacgatgcaaatatgccttcaactccgggaaccactggagtgcaaatcataactttctccaggctactcatccagggaaaggctagtcctcaaccttttcgtcctccaaaacctgaagatgttgccactatctgttacactagtggcactactggcacgccaaagggagctgttatttctcatgagaacttaattgcaaatgtagcagggtcaagcctgaacattaagttttacccctccgatgtgtatatctcatatctacctttggctcacatctacgagagggttaaccaggttgcattgctgcactgtggtgttgcggttggattctaccaaggggataatttgaagctaatggatgatttggctgctttgagaccgacagtattcgcaagtgttccccggttgtataacagaatttatgccgcaattactaatgctgtgaaggagtctggtgggctgaaagaaaagctgtttcattctgcatacaatgccaagagacaagcaatcattaaagggcgaaatccatccccaatgtgggacaagttggtatttaacaaaataaaagctaggcttggtgggcgtgtgagactcatgagttcaggtgcttctccactgtcagcagatgtcatggaattcctaagaatatgctttggtggtgaagttattgaaggctatggaatgacagaaacatcttgtatcgtaactgcgatggatattggtgataaatcaattggtcatgttggatccccaatttcatcttgtgaggtgaaacttgtggatgtcccagaaatgaattatagttctgatgatcaaccatatcctcgtggagaaatttgtgttagaggacctacaatatttcggggttactacaaagatgaagtccaaacaaaagaagtcattgatgaagatggttggttgcacactggagacataggtctgtggctgcctggagggcgtttaaggattattgataggaaaaagaacattttcaagttagctcaaggagaatacatagctccagagaagatcgaaaatgtatatgccaaatgcaaattcattgcccaatgctttatatatggtgatagtttcaactcttccctagttgccgttgttgcagttgaaccagaggttttgaaggcttgggctgggtctgaaggaatccagtacgaagacttaaggcagctttgtgctgatcctagagcaagagctgctgtcctagctgatatggattctattggaaaggaagcacagctaagaggttttgaatttgctaaagctgttacgcttgttgctgaaccatttacattggagaatggtctcctcaccccaacattcaaggtcaaaagaccgcaagctaaagcatactttgcaaaagaaatctcagatatgtatgcagagttgcaagaaacggagacagccaggccgaagttgtaattgcttgtgtaataatcagaagtgttaaatacaggcttacaggagattggattccacaattatttcttctagatcatagaataagttgaatcctctgactcgggaaataatggttcctgcaatggtcaggagaagacttgtacgagacggaggcagtgcttgttgcagatggtatctacgccgctgctgatggcaggctagccgcagctcctgtagcggcagccgcagctgcagccagcttgccgagcaggctgaatatagaaaaaacgttctgcacaacgtagcatatgtactacaaatgtaacagtagcactgaagtcagtttattgcaaactgtacaaggaatctctctttggatcgtatagcgaattcagtattttcttcttctttctctgttgacagttcagaattatgacgtgctgcatagcaagttgattggaacgagcttataactaacgaaaaggaagcacggtttctgttttgaataagaattatgcaagattaaaaccaaaaaaaaa

SEQ ID NO: 17432 - DNA, 1549 bp, Setaria italica
  misc_feature (1547)..(1547): n is a, c, g, or t
  Peptide Sequence Number=SeqID_83406
aagggggagtaggagcatcctccagccgaacacaaaccagatcaaaacttttgagaggatggcagtgcagatcctaaggcgccatgagcccttggatcgtgtattgaagggactttgcccagtcttctttaaaaagtaaagtctgtagtgtcttcataacattgtaatctggatccaacttgcgttgccagccctcaaggactaatgtagtcaccataacagtgcaaacattgccatcgatgttcactttgtgacgtcgaacttgctcaagaagctggtgcatacactcagctgggtggacagcgtcaccctcagtggtgccccaaaaggagaatgatcgctcaacttcctcaatgaaagctttcggatttggacaattctgctgttttgacaactttaaagtactttctgcagctgtacgaccatctcggcgagcaacagccttgaaaaactcaagtaaattcacacggtcattacttgaaagttcagcggtcattcctacatcaaggaagactacatgtggccttgactttataagggtgttatttgagttttttggttgtacaacacggactaaaatatttccagggtgcatatctgcatggacgaaattatcaaccagtagcattttcaagagcgcatgagtgccaatatgggccagagcacttttaattcgatcatgtccctcaaggtcatctacatagtgtgaaacactctctccatgctcgtaagtctcaaccaaaacagcaggatgaacaagtggataaagaggtcttgggaaagacacatccttccatcttcggaagttgtagataaaccggctcaaatgagcagcttcccttgcaaggtcaacttgagacatcatgaagacagcaaactgttgcacactctcatccagacgcaaccaatttaatgtggggatatatctagaaattttcgctactgcattaatgatactgaaatccctccgtattgaatctcctacaccaggatgtcttacttttactgcaactgttacacgctttgtctgctgattgggataccggaatcgtaaaacagctcgatgcacttgagcaacacttccagatgcaacagggttctcttcaaagttctcaaaaatgtcagatagcttccgaccaaaagctttctcaacagttttcttggtatacttaaagctgtgagctggtgcttttgtatgcagctttgacaactcagtgcaaaggtcacttgcaaacagatcagggcgtgttgcagcccattgaccccacttgataaatgcaggacctgccagctccaaagtacgatgaacaagtcgaagccatgttttcctatacttactgcccagagtctctgcaaatggggccatcagtatactcggagtgaacagcaatgccaaatatattgatctgaggattataataaccatctccactgccgaatatatcaaagaggtgatataaatacggccatcctgagctcgctcacgtattgggtagtactctccatctgcagatgtcttctgagctagctacttaccctcctcccgnta

SEQ ID NO: 17433 - DNA, 812 bp, Setaria italica
  Peptide Sequence Number=SeqID_83407
gcgaaagcaaaaccaaacaaaaaggccaagcaggagcggcgtgcctccgaccggcgctgtcggagtccaccaccgccttggcctccgcctccccccacaccgggcgcgggatcgaccctcctcgatctgcgcccggcgaatccaaccgggctccccgccgcaccagcattgggccccctcccgccgcgcgccgccgccggccccatcgatccggctctcgtggggcagggctgggacctcgaggggacggggggcctgatcctgctttctgtttggatttcgctttcccctgtggggctcggttgctggtgtggttgcccaggaggaggaggacatggatttggcatcggtcaacgaggagctggccgagatcgacggacagatcggcgatatcctccgcgcattgcagaatggattccagaagttggacaagatcaaggatgccaaccgccgcagtagacagcttgaagagcttactgataagatgcgagattgtaaaagacttatcaaagactttgagcgagttagcaaagatgaggcagggcgtactgatccggatactgcaaaaatgctgcatgacagaaagcagtcgatgatcaaagaattaaactcttatgttgctcttaagaaacaacatgcaagtggaaataagcgaattgatctttttgatggtcctagtgttgaagatggctatggtgaagaaaatgtcctgttggcatcaaatatgacaaaccagcagttaatggatcaaggcaatcaactaatgaatgaaactgatcaagctatcgcacgatctaaaaagactactgtcc

SEQ ID NO: 17434 - DNA, 390 bp, Setaria italica
  Peptide Sequence Number=SeqID_83408
atcgtccaggttcttgaagacgcactccaactcctccgtgccagcgccatcgtcaccggatgctgtcggctcccctcccctacacgcaaaggtaggggcggctgagaacaagtcggcactggggctggccggtaggatctcttcggtggcctcaagcctcgagcacggctcctcgtccgcccgggcgccgtgggagctcggatccaagaggcccatggacttggcgaacctctggcggcgctcctggacgctgcacgggtccctgacccagacctcgagcagcgactcgtcaaagaggcacccgtcgtcgcgacgaccggaactcgccggcgacgagacggacgccggcgacaggacctccctcgagtcaaagaactcctcttgctctta

SEQ ID NO: 17435 - DNA, 711 bp, Setaria italica
  Peptide Sequence Number=SeqID_83409
acttgcaggagttaggaaagatagctgagcttctcacagcatatggacccatcaagtctaacttcccaaccaaatatagaaggatgtcaactgaaagctcattaataaatatatcaacctgctttaagtgaaagaagaaacggatgggcatctttccatacttagtaactggatctggggtaaagaacctagatcgaaagaatgtataggaggcgataggagagataaggtcctcccacagatttctccgtgcatcgaagtactgccccgagactttaaatgaacttagaatcctgattttggatgggaatatttgtgtaacaacacggatatcacttatgcaggtttggacaagagggaaaacattatcagtatcaaacacttcatgagtgatggtaaaaacaattttgtcaacattgatgattacatgttgagaacttgcgccactcgccaatctatcccttacagaaaaaggaacgtcatcttccacatctaaataagtgttattatccaaactcatgtggggaacaatagattcatcgaaaatctgcactttaaatggatttcctggcttttttcacaaactctagcaagccatcaacaaatgcaatgccataattgtatttcttgttgacaagatggtatgaacttcttggtataaccttgtaagattttccatcatcaccatcgtcatcaaattatcaagttaca

SEQ ID NO: 17436 - DNA, 459 bp, Setaria italica
  misc_feature (345)..(345): n is a, c, g, or t
  Peptide Sequence Number=SeqID_83410
tcttgtcttcctaattgggttacgtaaggtctaacccgttatcttccggatggatgccatgatgctgatgagtgcaagaatagtccatgcccttcaggaggtgcttgccacaacactgtaggagggtacaggtgttcttgtccagtaggaaggaagtttaaccagcgaagcaatacgtgtgaccctgataccacattaataacaggactcgcaatcggcttttttcttgtcgtaattttctcctccttcggatacatgattcttcagaagagaaaactgaaccaagttaagcaagaacattttcgacaacatggaggcatgattttgtttgagaggatgagatcngaaaaaggtcttgctttcacggtatttagtgaagctgaacttgtaaaagctacagacaactacgataagagcagaataattggaaagggaggtcatgggacggtctacaaaggg

SEQ ID NO: 17437 - DNA, 943 bp, Setaria italica
  Peptide Sequence Number=SeqID_83411
tacatggtccatctgacaacataccaggaactaatgaaaataaaaacatagaaggcaaaaatcaattccgaaaactaaagcctcctaaggaatatagatgcagaatacataataattccattaagtacaaagaaattctcaaaattgtacatggtggtctatctctcaaaaattcgatcccaggtcaccaagtgtgtgcgcgtgcctttcattcttcgatgtgcgaagcatggtgaacagatatcagccatgtgccattaactttctcgaagatgttggtggcgacttgctttccccaagttcttcctttgttcttcaccacctccaagcatgtgacgtaaccaaggttgccacggatgtgaacctctatgttcctgagatcaatactcagtggaaactcataatctgcattgcaaaccatctcccagctctgcatgaccacatcataaccagatattcgacctgcagcagggtgtattacatacacatggtcacccttagcccagatagagtacatcgcagcaatatctccattcctgaaggcactgtagaaccgtgcatttgctgcgagaagtgaagcttcagcatcctcatggaggatgcgtagatcatcccggatctttgcggcacgggcataatcttcttccgctatagctttgtccaaattagactgaagagtttcttcgtcaaccaacatatcctcagttttttggatgtccatcagactccccgcttttaacatgcacaattttgcatcttctcaaattggaatctgcaatttgaatccctgcaaaggttctgtccgagcagcttcgtccgacacagagtcgcgtagtggcgaagctggcgctgcctgggaagaaggccgtctcgcggagccccacggctgcagacggccgcaaccacgccctagcagccgtcgccgctgacatcgccggaaatt

SEQ ID NO: 17438 - DNA, 485 bp, Setaria italica
  Peptide Sequence Number=SeqID_83412
tttctttagtttattttgtcagatgagaaggttcgttctctcgtaagtacaacgtaaatcagccaacttgtgttacaggcaacagtgatgggaattgggagctgcggccgccgaagttgctcacgccacctgggcagcctgatccaagaatgttcggcattaaactagtcaggggcaacatgaaacacccaaagtggcttgcatatattgccacgcactgtgatgcatggcttattcggatctccttcttcctcggtgccaatttggggactcaagcaaggcagcacttgtccgctttgatcaacagtctgcaaactattcatgaagcttttgtcgctagtgacacatatcaccgcatatgtcatctagagaaaatgaatgtggagatcgaggatgaagatgaaggctgtggtacggagccgacgtctgtgcaagctgtggtaaccattaccgtaggaatgggttttggatctgttgcgatgagt

SEQ ID NO: 17439 - DNA, 816 bp, Setaria italica
  misc_feature (22)..(22): n is a, c, g, or t
  Peptide Sequence Number=SeqID_83413
aatgaaaatacctgtaactgcngaagatgcttggcacgcatgttcaagagaaaactagatgctgatggagatgctgaagttactatggatgacagttctggtgatgtagttgctggtgaccctgaaaaacctgcttttcttgaagaacacatgaatgaggaaaagggtgatgttgctgtttcagctcaagaagattcttatattgttccttcaccttcagaagtcgttgatacttcagaagaacaggcagcaacctgtgataataatgatcaggttccctcatcagctgaattcgagttgtgtgctgcccattcaatgtcagaagaagttggcatcctagaagagcatgtagaaacctgtcatgatgctcagatccactcttcagtacaagcagattcatgcactactcttctttcagagtacaccaaaattgcagaagaacaaacaccaacttctcaagacaaccaaatgcacgcgttccagattcaaaaatcaataaaagatacatcactgaagccaagaattctccatttaaatgatgctgatgtttcagttgacactgatattgtgcaagaaagtgactttggcaacctgaatggcttcgaagtagatccaatccacgaagcagagttcaactatgtgaaggatatattcaagaagtcgagcttcagcaatgaaatactacttgatgaatggtacgcacagaatatcggagctctccaagaagaggattgccaacactacgaagctgctgcagcagcatgtgacttcactgatatgtctactgatcagttgcttctgttttgattttgacta

SEQ ID NO: 17440 - DNA, 995 bp, Setaria italica
  Peptide Sequence Number=SeqID_83414
caaaagtagaaaaaggcaaggggagcgcaccttccgttttaggaaggtgaagaggggaactgaggagtcgggagagcgagagccagaaggggatcggccggggagaagatggaggagcgggagaaggtcgtgtgcctggccaagctcgccgagcaggccgagcgatacgacgatatggtggaatttatgaagaagcttgctaggatggatgtggatatgaatgctgaagaaaggcatttattctcagtaggtttcaaaaatactattggggcaaagagggcatcatggagaatcatttgttcacttgagcaaaagttgacaagtggtgatcaggctggtgtgatgatagatgcctacaaaaagaaagtagaaggcgaactaaggaaggtttgcaatgaagtactgtcaatcatcgctattcattgccttcccttggccagttcgggtgaaaatgttgtgttcttttataagatgaaaggggactactatcgttacttggctgaatttagcactggaactgaaaagaaggctgctgctgatcagtcacttatggcataccagcatgccatggttgtcgcctccagtgaactctcacctgctcaccaaatcaggcttggccttgccctcaatttttcggtcttcttttatgagataatgaactctcatgagagagcttgccaagtggcaaaacaagcatttgatgaggctcttactgaaattaatgctgctggtgagggggtttacaaggatagcacacttatgatgcagcttctgaaggacaacttagcattgtggacatcagaattaactggaggtgaagcatcaaaggataatgacatcgacatggagggttgattgagatgcatgtggagttactaagcagcgatgctcgcgaacccgtgtcctctagtttttctgcaccggaagagccttatgtattcttttcctgcagtttctcttcctctctttggccatcgtttggtctttggagtcag

SEQ ID NO: 17441 - DNA, 726 bp, Setaria italica
  Peptide Sequence Number=SeqID_83415
agtcccctttcctgcaacagtttaggaggatgttagacgatggtatttttttctcccttggatgcagcatgtttggaacatggtagatttgttgtcatcctggtatgctgcttgatgggccaccggtttataaaaaagcatcaacttcagtcactgaattttcatgttttttctctattttcagagcttgccaagtggcaaaacaagcatttgatgaggctcttactgaaattaatgctgctggtgagggggtttacaaggatagcacacttatgatgcagcttctgaaggacaacttagcattgtggacatcagaattaactggaggtgaagcatcaaaggataatgacatcgacatggagggttgattgagatgcatgtggagttactaagcagcgatgctcgcgaacccgtgtcctctagtttttctgcaccggaagagccttatgtattcttttcctgcagtttctcttcctctcttttggccatcgtttggtctttggagtcagttaccctactaagtgtttcagtgtctggactggtgaccatccaccaagctttggtgatattttgggagcttggactggtgaccacccagctctgatgttctgttgcctttttcggtgctttgagaggcatctttgttcaccgacgactgtctctcttatcaatgcattaaggatttgcccttccattattaatcttgttcaatgactgaagcggtct

SEQ ID NO: 17442 - DNA, 381 bp, Setaria italica
  Peptide Sequence Number=SeqID_83416
cgccgctgcacgatggactcccacagcgagtccatggacacgtcctcgtcgtcgtcggcaccgtcgccgccgggcctgttgggctcggcggccgtggcggcgaaggctgcgagcgtctcctcgcggttacggcgtatgtcttcatcaggctcgcgtgccgccgccgcgaagaccgccctcgcgctcggcacgacctcatggccggccggtttcttgcgcacgcgggggcggtcggctctcccggccgccctcgcctcccggtcccggggcatcctcctcctcgacgccggcacttcgaccgcacgacgggcgctgctgctgcccgcgtcggagaaagcagcctcgtactcggacgaggacgtgtagatgctgctatccgac

SEQ ID NO: 17443 - DNA, 335 bp, Setaria italica
  Peptide Sequence Number=SeqID_83417
tttttttttttccttgcaacatccaattcgaatccccattttagtcgaagaatcgcacaccttatgcaacacaaaaatatttctttgcaacatcaacaaaaaacctaccattttcagatcgatttttgcaacattggcatacaggaacatcaacatctcaaactatcctttgcaacatcaactcagagacttgtcgaagtgctcgctaggcatgtagcgcatcagctcttgaggcctagcttgagctcaccagggtgcttgcggttcaatttgtagatggaaccgtcagtaggcatgagctctcgcagctctactgtgccaatcccaacttgata

SEQ ID NO: 17444 - DNA, 794 bp, Setaria italica
  Peptide Sequence Number=SeqID_83418
cgccgcggctggcccgcggcggccggcggcgcggagggcgagaaggagcggctgctggccaacgagaggtacctgtcggagatcatgaaggagaaggcgtccacggcgagggaccggcggcgggggcgcgtcgccgtgcggcggccgcacctggagagcatcaccgaggatgacttgtaatcaagcaaggtgtcttgtttccattttccccccctcctctccaccttttctcctctcgtccatttctttcggttttcattcctaccggagtagtagtggtagtttcttcttggctttctcttttgttaattcctcctgctttgcctgccctttgggctttatttttttgccctcttttccccggcccgtctcctttagagcaccaccatcatcgtcctcatctcccctgctcacctcctttacaaggtgaatcatgtctttgtgaagaaaaagatacgatttttgctatgttccttctctttacagtacatgattaggtgatgaagtgtacagtaccaactctagtaattttcatattgattctgttttcgaatttgtgagtaaatctctagaaaaaaaaagagaagtgtaaatcgcatcaatagatggatcttctgcacttcctttctgctcaacatcccaagctctattgcctacactaggagctccaaattctattcatttcttctagaaagtggagcagtagtgtgctactctgctaccaccagctctaaccttgatattggtgcgctccgacttgtaaaaattcacctagaaaattttagaattccctc

SEQ ID NO: 17445 - DNA, 2044 bp, Setaria italica
  Peptide Sequence Number=SeqID_83419
atcatgcgtattgctattgagcagaaatttctccatctccctcaccaacctcaaagcaaggcgatatttatctgataggactgcagagtcaacaagttgcaagcatctcattgacaaatagtcatatcgatccacacgattgttggggacaaggtcacttggagggcgtcccatcacgtgcaactgtctaaaatcctttttccacctatcaacaatatactgtggtggaatttcacgaaccagctgaaacttgagcgttgagagactatgcctgcataggatcccactgaattggaaacccccacagatacacgttatatccttttcgtctgcattgtatgtcactgcaaaaatcgtactcatagtccttttaccatcttcaaggaaaatacactccttgacattgaacgtggagataggcccatcaacaccaattaaagatacatggcagtacattatggcttcaatctcatcctggaacttcttgaacatattgtgggtgtatacctttgagagctgctcttccatatagaattttgatactggtggacgttgcttatgaaatgtctcaaaatctgcttgggcctccttctcatatttgctctgcagagccaatctcatacttgccaagaaattgcttcaaggtggtttttaaatccacatatccatccaaaaaacggagtgacagtttcatttctttgtgtaacagacattcctgcccagaacgtatctttaatgaagacaggaacccatgaagctcgacattcataaagtgatcttaaccagtcattgccctgaagcccattacatgtaactaaagcattccattctccttcaaactcatctatggttaacgaatcatagacagccttatgcattgccttgttaatagctctgtactccgacagcccacttaaccgctctgcagccttcctcattatctgaaacaagcacattctatgacggactccaggaataacctcagttacagcactttggatgcccctacaatagtcagtgacaagggcctttggaagattgccggacatgcatgctatccaagctttaagtagccatgaataggtttctgctgtttcatcagaaagcagggcacaccccatcaagacagattggccatgatgattcaccccgatgaatgttgcaagaggcatatcatgtttactaaccacataagaagtatcaagcgtgatgacatcactataatactcatacatggctcttgaccgcgcatctgcccaaaaaacattcctgatacagccttcatcatccaagtcaatgacattgaaaaagttagcatttttggcctgcatccgagtgaagaaaagtctaagggcctccgaatctccaggctggagcttcaaacggcccctctccacaaaactgtggtgcttgctctcaccaaacaaaagctcctcaagttcccccaacttatccatgggcatcttacttggctcttcaacaggcatagccccaggaccacccatacgcatccgcctctttgcagggccagagagctgcttataagagttcaagaaccttgccattgctgggctcactggatgattgtgatcaaggttcgccaactctacatgcaacaacttgtctccccacaacttcacccggatcttggctgggcagttagtggtcgatgaggcccgtttccggaactttggctcataacgtggccgccctcctttgcagcacataagctcgagatataagcaagttccttcttgtgagaatgaggacctccttactgagacaccaaagccaacacggcgggcatacttgcggtagaaccggttgacttctgcatgattattgaacaccatgccaacttctggaacaccaatatcctccccatcggactcctccatgctgggatccagcgcgttgagatcccggcgccgagcccggcgggattcttggactgtgcgaacggctcctccacctccatcgccatcatgtccaaagttatcatttgctgcccgtgacctagtatcacgccagaacaagttacccc

SEQ ID NO: 17446 - DNA, 1082 bp, Setaria italica
  misc_feature (1)..(28): n is a, c, g, or t
  Peptide Sequence Number=SeqID_83420
nnnnnnnnnnnnnnnnnnnnnnnnnnnnaggttaagaacaacattgtatcatttgtattgatttctgtagtacacgatggagtatagctattctaaattacatcagtaaacgaatctaccattatatggttgagagaaaaacttcgatgcaacataaatctctcgtgcatttgtaaacacgtaggaatgcaagtccaaccagctgttacaactcccaaaggaatgcaccgactgcctaattgtgtacaataactggtaaacagaaaaaaaaaatctggagcatctgcactcaggcgtataagcattcgacataccttaataagcctctttctttctctccaactgcaacgtgaaaatgaggcagcgactgatcatcctaggtaagacaacatttcacagaaatggccttgtatcaagatcatgttcctatacaactgtaatcttgagaagtataactgaacagaaatatagacataaggagatgatgatcccagctacaaaattttgatatagacgattgttgtctctactgggaataaaagctgacttcaagatggttgttagctcaaacactctgtaagatataagaaggtatattgctgtgacaagcataaagttgagcatcggataacccggaatgaaagataaaagccattttggttgcccatttggcatgctagacctgagccaaatgtggatctgagagatataggtctctagtgtaatcttgccgagccaggcaaaaagagtcaatgaggcactcctcagctgctgggtgcaattacgtaaagcaatataaacagttataggaatccacgatgtgtaaggatggtacttgttgtacgtaagtttgtctagcttgtaaatatattcataccacaaataaccagccaccacagaagtggtaacaatggttcccttgattgacaacctaaccttagtttcagattcttcaagcttttccatccacctttcaacatttggatggaagtaagcatagatcatcccgattaattccaaattattaacgtattctaagtaccggtattcggtaaattgtcctacttctattgtctaaagta

SEQ ID NO: 17447 - DNA, 1158 bp, Setaria italica
  Peptide Sequence Number=SeqID_83421
gtctctactgggataaaataggttagttaagactacaaaactcaaacactctgtaagatataagaaggtatattgctgtgacaagcataaagttgagcatcggataacccggaatgaaagataaaagccattttggttgcccatttggcatgctagacctgagccaaatgtggatctgagagatataggtctctagtgtaatcttgccgagccaggcaaaaagagtcaatgaggcactcctcagctgctgggtgcaattacgtaaagcaatataaacagttataggaatccacgatgtgtaaggatggtacttgttgtacgtaagtttgtctagcttgtaaatatattcataccacaaataaccagccaccacagaagtggtaacaatggttcccttgattgacaacctaaccttagtttcagattcttcaagcttttccatccacctttcaacatttggatggaagtaagcatagatcatcccgataatccaaatataacgatcaagaccggatcggaaatgccactcatgcaaaaggggtaagttcgcttttgaaggttctgggtctttgtatcccagcagaaatgtaaaaggcctccacaaaagctcaaatacaccaggaatctcccatatcaagatcaccactaagaagcaacccacaatcttcatagccatcacagatggtatctcgttgtatttgttgaacagaccaaggcaaccatataccataagtgtaaaaagtgtgtgcattgggcatatgtaatacagcatgtaatcattatcaaggactatgcaacaaaaggccacgaaaaaattgagcctccacatcatctgagcaaatcgtgccaggctgaagtcttttttaatgtaatagtacgagaagtttccaaacccagtcatccagacataagcagcaatgaaaatgcggattgcattgtagatttctgtggcagcgaaatagtggtacattaaaaacaagacctgcatccaacctttccattcctcagtttgatggcggttaaggtagagtatggatttccctgaaaatgctgatttttcattgagttgtttaagtgaaagtcaaattagacttagtaacgtacttaattagtaattagtaagtaaaggtaattagttaactaagtaaattaagtaaa

SEQ ID NO: 17448 - DNA, 427 bp, Setaria italica
  Peptide Sequence Number=SeqID_83422
gccgccaccgcctcgacgctcccgcttctcaactcctcggtccccgaccccgccgccgtcgtcgccgacttccacagcaaggtggcgacttcgcggcggcggatgcaggaggccgggggaggcgccagcagcggcgggtgcatgacgggcaaccccatcgacgactgctggcggtgcgcggggacggactggcgtcaggaccggcagcggctggcggactgcggcatcgggttcggccgcaacgcgctgggcggcaagggcgggccgctgtacgtggtgacggactcctccgacccgggccccgtgaaccccgtcccgggcacgctccgccacgccgccatccaggaaggcccgctctggatcgtgttcgccgccgacatgaccatccgcctcaacgaggagctcctggtgaacagctacaagacca

SEQ ID NO: 17449 - DNA, 1355 bp, Setaria italica
  misc_feature (1287)..(1355): n is a, c, g, or t
  Peptide Sequence Number=SeqID_83423
tccgcccacacattccgcgccatcctcactgcccgcgtctcctcggctttctgcctccgccgtgctcgccgctcgcctattaggccaccgcctccaacagtccccacggtcggtcgatttcggtagcccagaagccgaacagctcgtcggccagaagcctaacagctcgtgtagcgagtgtccaggacgatggttgggctctcggaaggggagaagcacttcatccgcggcggcatcgcgcaggacattcgcaccgacggccgtaggcggctgcagttccgggccctctccgtcgagaccggagtcatcccacaggcgaatggttcagcgcgtgttagattgggtgccactgaaatcatcgctagtgtcaaggctgaattggggaaaccaagcattcttcaccctgacaaaggaaaggtttccatttttgttgactgtagtcctactgctgagcctacatttgagggtagaggttccgaagaattgtctgctgagctctctgttgccctgcaaagatgcttgctaggtggtaaaagtggtgcaggtgctgcaattgatctatcatccctaattgttgtggagggaaaggtctgttgggatctgtacattgatggacttgtggtcagttctgatggtaatttactggatgcgctagctactgcaataaaggttgctttgagtgatacaggtttaccaaaagttaatgtttctcttagtgctgcatcggacgaggaaccagaggttgatgtaagtgatgaggaatttcttcaattcgacacatccagtgtgcctgttatcattacattaaccaaggtgggtcggcactacattgttgacgctacctcagaggaagaatcccagatgagttctgcagtgtcggtatcagtcaataggaatggccaaatatgcgggctaaccaagaggggcggtgcagggctggacccaagcgtcatcttcgatatgatatcagttgccaggcatgcgagccagcagttcatagctctcgtggactcgcagatagctgctgctgaagctgatgagtgaagaaacaaaatgaagagcggggaggaggttccaatacaaatgtgctcaatcttaggggctgcttagaagagaatgattgttgttggaatgtttaggatttggttcaagtatatgccagtgaatccttaggatttggatccaaaatacctttacaaacagtagcatgttgcctgggtgcttagaagaaacagcaactgatttgcaaagttttggtgatgtggaggatattccaggacccaaatnnnnnnnnnnnnnnnnnnnnnnnnnnnnnnnnnnnnnnnnnnnnnnnnnnnnnnnnnnnnnnnnnnnnn

SEQ ID NO: 17450 - DNA, 659 bp, Setaria italica
  Peptide Sequence Number=SeqID_83424
ttttttttttggtagcagcagtgcagtagagatcactggcgcattatatccgacgagttttattccacgagcattcatcgagcggttgtacagactacagaggggctatagataggtcagacaaatttcaacaagtcaccacacgtacgcccaaactctccaagctaacaaacaaacaaggtggtcagtgatcagaattcagaatgaaaatgaaacgatttgtgttgacatcttaccaaatacacatcactctagacccactaacaactcgaattccaatcaaccaagcacagcactgtatacttagctacagcacgcacggatacgtacgcgtatacagtacacgtacgtaacgtacttgcgctctacgggcgcaaagggaagaagaacagcttactctgaatctctgatcccctccccttccacccgtgtactcctccaatccccgaaatcagagaccatactccgtcgccggcctgtcgatcagtgcgtcggcggcgagggagggtccggcgacgggttcatgccgccgcgggtgttggtgttggccgtggggggcccgtagtccatcagcgtgtacaccatctcctccggcagcagcctcccgcggaggcccggcgcgcgccgcccgtcgtgccgcaccgctcgcatcacccgca

SEQ ID NO: 17451 - DNA, 2371 bp, Setaria italica
  Peptide Sequence Number=SeqID_83425
tgttctctagtttttgtttttgtttttttttttttcgaaaaaaaaaattcagattcatttaactgtggtgacctggttgatattattctttcttcgatgagcccaacattttctccctcatcttggttgagctaacaaccaaagcgacgaacagcatcttcctctttcgttctgtacaggctagctactactgagactagtagacttgagatgacatcgtgtacacaattgcagacgagcctatacagcatctactatgatttttcgggcacagacgacaggccgtccgacccgtcgtacttgctctgcgcgggcgtcgtcctcctggaatgccgcttggtcggcacgagcacctcctcctccatccacccatcgtcgtccaccgtcgagtacctgtcgtcgtcgtggtcggtgcccttgaacaccgggtgcaggtacgagttggccaggtacgccttcaggtcgaagttgggctcccgagcgcgttccagggtgtccttccgcatcgcctcctgcagcgggttcctcacgaatgctggctcgtagcggtgcttgcaatacttgaagaaccagaaggtcagcacaggaagaacaaggagcacaggcgtcgcctcctccaaaccttttgtactcagcagtcccaggagcagcagttgtgatacgatcaaagccgtgataatacgcccatgaacacttggccagaactgcgccccgctctcatattgctgattgtacacatttattatctggtggcggtagacaacataagcgaacccaaagaataccaatataaaaggaagcaggagtggtgtcaccgcagcgtaaacaaggccaagcaagaagtacagttgtattctaggttcgcatgagtcaaagcagatgctgccaggatccattgcctcttctctgtccttttcagttttaaccaagaaaaagttcttcaggtggaagaatatcagtggcttcagtctcaatatttcaccagctacaccagcccaaccatcaaccattacgtatgttatgaaaaaagttgccttcattggaacggaaaaaccaatgagctttggtatctcatttgctgacatatggatgtatttttgaagctgctccaaagcagatcctgcaattacactccccaaaaatacattgaagaacaagaatatatagtacttagatgcagatcgccgctccagagatgactgtgatatcagtccttcaaacttagacataaacatcagtatagttggaagcactataaggaagatcttcaaaacaattccaggaagaagcccttgaatgaatgatttaatcaatggtaattcaaccaagggctttagaaatggaagtgctttctctattccttcaaggttcgcaagagactgtacgaatgttattggaatgacataaaagaagttaaggaagaagaatgccacagcaattatcagcctcctgactgtgagggaaacaaaagggatggacagattattccagtaaacatcacgaggttctggagcccattcagtcaaccagactgttggattgctggtttgttgggtctgagcacagactgctgcaccccaacgggagcgaaatgaaacaaaggctgctggcacaactgactttggatccttcatgacctttttacgctcttcagcttcttccttccctatcttctcaatctctgatttgtaatagtcaatagcatcgaccttggagccgaagcatccaagaaagccagtcttggtggtaggcctctctgatggatttctttcatacttgagtcggtaataatcgagccaattttgcatcttcttcttcttttcaaccagatcagcaagtttatttgcattgtaaaccacctggtgtcttagataattatcaggatgattgacaaggaagaaatgttccacaagctcactgattgattcatcaggatcttgtggtatattccgcacaaggacagtgaactgatctggtcggcgtttctctgaagcaagaaagcgcagcctcaacttggcgataatttgatactccttcaacaatatatagcaggtccaaaatgtgatggcataagccattaccaagtgagctataaacctctttgacccattaggtatattggatattgaaagtttgtcaatatcactgtggactacttttttcatgccatctagtgcatcattgaaccaattcactgggaccagaacaagaaaagccagagccgtaattggaacaaatatcttgagccctgttaggtatatccgtagatagaccacagaatcaaggcctgcatggttgatcagctcatcctggggcatcttgagagcagccggcatccaagtttaaaaatttcaagtatgatcttgcgtct

SEQ ID NO: 17452 - DNA, 493 bp, Setaria italica
  Peptide Sequence Number=SeqID_83426
cctcgtacggcagaacaactcaatcctgtcgcaggcttccagtattaaactaacaggcgctccaaaaaatatcctaacccagttcttcaacccaatgacagatcctgaaaaataagaaagaaaaagagatatactctgtcatttcagatcaatttaatgtagattgagcatgccagcatgaagaaacttgtagaatatcaagctaaccaattacaaatgttcagctttaagtacccagaccatagcacttgacataggttagataaacaatattacaacaaatttagtgaattataccaggcagaaccaggacacattcttctttgatcaattcacgagcaaaatccatgtcatcagcaacaccgtgtaaaattgaagtgttgatttcaaccatcataaacattgagccctcaggctttgagtagcactgcagggcttcaatctggttcactcttctgtacagagtgtcagctgcagactcaagcaggtgaac

SEQ ID NO: 17453 - DNA, 1213 bp, Setaria italica
  misc_feature (1)..(49): n is a, c, g, or t
  Peptide Sequence Number=SeqID_83427
nnnnnnnnnnnnnnnnnnnnnnnnnnnnnnnnnnnnnnnnnnnnnnnnnttttttaaaagaaatgctatacatgtacaccatttcctgaaattttgtgtaaccttttattcagctatagacaataatctgatagattttctcagattttatatacaaacctcagattttgtaaataaagaagacatcttcttagaaaatagaattaagccatatacatgttactgggctaacaaaaaccctacttcctggcttcagtaccttgtcaaaattttcagtcattttgtttgatcgtcctcgtacggcagaacaactcaatcctgtcgcaggcttccagtattaaactaacaggcgctccaaaaaatatcctaacccagttcttcaacccaatgacagatccaggcagaaccaggacacattcttctttgatcaattcacgagcaaaatccatgtcatcagcaacaccgtgtaaaattgaagtgttgatttcaaccatcataaacattgagccctcaggctttgagtagcactgcagggcttcaatctggttcactcttctgtacagagtgtcagctgcagactcaagcaggtgaacaacattctgatggaactcatggtgttcatttgaaagaatctcaggaactgctgcctgaactatggaggcagggccagaagtcacattcagcagcatctcggttgctgttctgacatgcttgagtgcaccattagggtcacagaatgccaaccaaccaagacgccatcctggaagcatgaatctctttgacagagctccaatgctgataacaggggcgatgtgtgcgaaggaggccattgggacaaatttgctgccaccaaagaccatatgtgcatatacctcatctgctatgactgggatccccaagtctcttgcagtttcagtaatctggagaaggtggtgtgcagagtacacggcgccgcaaggattgttcgggttgatgacgacaatggccgccgtggagccgtcagccagtgcgcgcaccatggcgaggtcggcctcccacccacgccgcggcagcaggtcgtagaaccgaggcttggcacctgcgatctcgcaggcggcctcatacggcgcgaagcctggccgcggcaggaggatgttggcccccggagccccgccgagcaccgtggcgatcgcggtgatggcgcctgtgccccccgccgtcatgaacacgtcgg

SEQ ID NO: 17454 - DNA, 656 bp, Setaria italica
  misc_feature (1)..(1): n is a, c, g, or t
  Peptide Sequence Number=SeqID_83428
naacggaccacgtttcccctagcgttggccgtagtcctcctgtgagacgagagatggttgattttgataaccccactcttgagcaaatggttcgacactggtattctacttgttttctaaccccagtgttgagtcatttgctcatccttagtctcgctttgtttgagcaggtcgaggcctggagaacacgtggcttattgattccggttgctctcgacacatgaccggtgatcacagatggttctccagcctcaccccggtgatgaccaaggagtacatcactttcggggataatagcaaaggtaaggtgttgtctgaaggtgttatcaaggtgagtgagaatttcatgctcaagcgagttgctctagttgattctcttggtttcaatttgctctctgtgtcgcaactgcttgatgatggttttgaggtccgttttaagcaagggacctcaaggattttagactctcgaggtgatcttgtgtgtatgatcgtccccgagggtcaagtgttccgagttgatttttccaagtcatttggtctctctcggtgtttagtggctggctcatcttctgaactttggaaatggcataggagattgggtcatttgagttttgatttgctttctcgcttgagtactttggatcttattcgtggtt

SEQ ID NO: 17455 - DNA, 1116 bp, Setaria italica
  Peptide Sequence Number=SeqID_83429
actcctccttgattttttttaaaaaaaacttctgctcatccatatgaaacaacacaagagctacttctagcttgaagctaaacactagattgaatgaatacgaaagctcttgcccagtctgccgatcaaggttggaccttccttggacgatagacgatatatcctagcagctttcttgtggtgagcgaagtacatatgccagcagccaccttttcatgctgtccggcaaatgcgcaatgccgttgtgtatatagcggtcaagaacccattttagcaaatgttatctccctgatggatgatgattgccgcggcaggtgcattgctccttgtcttgcttcagggcctgcagctcgctctgaagtcctctgatgtgatcaactgctaagtccagcatgtccgccgtactcgtttgcttgtccatgttaggcacaagggcctgcagcttcctgagcttctcgctgatccttgttcttcgctcccgctctgcaatgctcctcgggtgcgtggcacatccacgcttggctcgtactctgaatggaacctgatcttgctgcatctgcaggtatttatccatgcccgacgtctccttcgtcgcgccaaactgtaattcatagttactaaggctggctatgatgtcatcattgttgtgtattcctgcattgcttgccgggttggagaacacaatagaatttgaatcctcccatgttccaattgagaacccattagaggagcgtgctacactgttggtggtgatgttctcttcagagtggccactaccatacacattattggtgagatctggaattccatcctctgagatatgagagagggttccttgtccggctaggttcatgggggacttcatcttcttgtgataactactcgttgcatggtgaacatcaccaccaactccaactccagctcttgcactaggaaaaccgttatccacgacgggactggagaagaaccccggcggcgagctgctgcgccgcggcagcggcgccgccgccgggccgccgtccagctgcttcccctcaacgccgaactggtggtagcgatgatgatgcatcccttgcccgtgccccagcgagatctcgccatggccgccgtaccgct

SEQ ID NO: 17456 - DNA, 585 bp, Setaria italica
  Peptide Sequence Number=SeqID_83430
aactttaccagtacctggtttctccgtaaattgaaccctaatcgtctctgcaaggaaagtgaattaccatatgagaacaataatcagacaagaatattcaatttgaggatcagttgtccaatgcatgaaataactactgatcaggggatggaaaatggattgcccattggattgattgaggatccaaagaaacaaaaagaaagcatctacccaatataaaacttgcagattagatcatttacagaataattcacattggtaagatgaaatgagtcgatttacaaagcataggaagatcgtgcagatccatccatgtttatcactacctctgacgcaaaatgaatttcattttagctaagactgcacagatcaaggaaagaattgttcttatatatgatattttgcaattacattaagattgccttctcgtcaattggacaattagataatgttacaaatcatagtggagaggaaaccatattagaattgagttgcatagaaaatgggaggcaacaggcactgaatgccaaatttggcacaaaactttatatggggacattacgtacaaggcctaataaagtgtac

SEQ ID NO: 17457 - DNA, 491 bp, Setaria italica
  Peptide Sequence Number=SeqID_83431
caattaaagatgcattctggatctctgacgaaacctttttattttgtggctgcggatacacattgtcatcctgtgcggctatgcccaagtgcccaacagaagcaggctgtctactcttcactccccaccaaggtcagcaagaagtccttgtaatacccggaggtgtcgccgacgatatcgctggtcaccgtggtcttgaacctgactttgtactcctctttgatcttctccatgccgatgtcggccccggacacgatcgccctggtaagtgtgtcctcgtccgttccaaatcctaagatggagtatctgatagcctctgcaaagtgcttttccggcgatgtcaggcaccagatggcgctcctgaggatcttggagaactggctgctgctatgcttggcgatgtcctcgtcgatgtcggcgccgtggtctcgctcgtaccgctggaacgtggcccgcagctggcgcttgctcctcgtgctgacgatccgtat

SEQ ID NO: 17458 - DNA, 291 bp, Setaria italica
  Peptide Sequence Number=SeqID_83432
gacgaagcgaaggatcctccaaatctcgcttgcgtttgcggcgtggtgtctccgtccccggcaccggcggcgtgatggcggactgggacgggatcccggagcgggagcggcggcagatggaggagatcctgcagctcgacatggaggagctcaacgtcgaggtggtcgacgaagacgaggaggaggaggaagaagagcaaggtgctggcaacgaggaggacgacgacgtcgatgccttcctcagagctaatgatggagatggagtggctagcacctctggacctttcacta

SEQ ID NO: 17459 - DNA, 421 bp, Setaria italica
  Peptide Sequence Number=SeqID_83433
aaaagaaaacaaaattaagaaagaaaatagaagaatctgttcagatatcttgttaaagcagttcagcatatttggaacttaaactgaaaagtgtaggataatttcctgccgggagttggactgccattcttgcttgctttcctaacgacggtaaggattacatgctttactaatgttggtaaggaaagatatgtattgaggtttcattacaatgcgcactactttttttgacaaacattttcccatatagttcagggctgaagtgtatgttattgtttttgtcaattgcttgtacactaatcattgcattttatgtatttgtgtggatcaacaggaattgctatgccactaggattcttaggacataagattttgttatctttagatatattcttctgtgcacatttggtccgtgtaatcc

SEQ ID NO: 17460 - DNA, 341 bp, Setaria italica
  Peptide Sequence Number=SeqID_83434
tggatgccgctacggattagcgtgccaccctctcaagccgagcccccaggagcttcgtcctcgagcaccaagttactccgggacaaaatgaggctggttttctggccttggatttcgctattcttcacttttgttgcatcatcttggagtttgagttcagatggccaagctcttcttgctctgtcgaaaaatctcatactaccaagttccgtaagttctagctggagtgcttctgatgcaactccatgtacatggaatggagttagttgcaataaaagaaacagagtggtttcccttgacctgtcatcatcgaaagtttcaggttcactaggacctgaaat

SEQ ID NO: 17461 - DNA, 466 bp, Setaria italica
  misc_feature (414)..(414): n is a, c, g, or t
  Peptide Sequence Number=SeqID_83435
cagaaatttagtaataacctaaaacaacttcaacaaatctagaaagcatgccaatggcaactcaatcttcatctgaagcacttaaagaggaagagctacttgatgttatgttattgttatatcatctgggcatctcaccaaattttaggcaggcgttttatttcatgtctcagcagtcacaatccatttatttactggaagaaactgacaggcagatacgagaaaaatcatgcgcagagcaagtaaggcgtttgaaagaagcccggaatagctatcatgaggatttggtggattgtgtacgccattgtgtttggtaccgggccactcttttctctccatggaagcaaaggggaatgtatgcaacttgcatgtgggttgtggagcttcttttggtccttagtgactcaaaaaccnttttccagtatgttcctgagttctatgtggaatcgctggttgattgtttcca

SEQ ID NO: 17462 - DNA, 270 bp, Setaria italica
  Peptide Sequence Number=SeqID_83436
tgcagtttgatgttgagcttctttcatgggtgaacatcaaggatatttgcaaggatggaggcatcttaaagaaggtgttgtctgaaggagaaaaatgggagaaccccaaagatcctgatgaagtattcgttaaatatgaggcaaggcttgaggatggaactgtggtgtcaaaatctgatggtgttgagttcactgtgaaagatgggcttttctgccctgccatatcgaaggcagtcaagactatgaagaagaatgagaaggcattcctta

SEQ ID NO: 17463 - DNA, 397 bp, Setaria italica
  Peptide Sequence Number=SeqID_83437
tgctgcttcagagactggatctcgccggcagagagcacgaaggttctcctgctctgctgagtgacgtccagtgcggaaggcgacgaacgtggcctaagcagagggagggctggcgcgaaaacgcatgtcaccgtggcggccagttcgtcggccttggggtgccgaacgccggcgcggtcgaacgtcggcggcgggaggcctgcggcggcgagcgatccctcacgcgccgccgttgaccacgccttcatgaactgccacaccgcgtggccgtcggccaccgcgtgcagcatggacacgccgaccaccacggcgcgaccgtggccgtcctccccggcgggcctcgtggcctggacggcgaggagcggcgcgggcagctgcgcggcctcgatctccggga

SEQ ID NO: 17464 - DNA, 392 bp, Setaria italica
  Peptide Sequence Number=SeqID_83438
catgtgtgaaggataatcgccaaagaatatcggatccagaaaccactccagctcaaaagactgcgctcgtcgtgccgccagaatgtcctccgtggtgttcgtcagcggctcataccagtacatgctgggcgcgtacccgcccagccactgctccgcgccgttcggcacctgcaacagcggcgactcgcaacgggagccctacgccgcggcgcacaacatcatcatgtcccacgccgccgccgtccgcaactacaaggaaaactaccaggtttctggatccgatattctttggcgattatccttcacacatgcgagagatcctaagatccaacctaccaacgttcacctcggaagagaagaaactactccaatacaagtctgatttcatcggg

SEQ ID NO: 17465 - DNA, 369 bp, Setaria italica
  Peptide Sequence Number=SeqID_83439
agtgatgatcgggggagatgtaagaacaccctgacaatcggccttcttgcatacatttttacctgatttttgttcataacttcatatacggtaaagctcacgaaaaatgtccggtttgtgaaccttgcagaccgcgctcggcggcttctatgttgtcccacaagccgtggagcctgctatcatgtatgtcaaccagaggtacaaggacacgcccgtgtacgtcagtgagaacggttactcgcagtggagcgatgtgggcagggaggagctgatcaacgacgtcgagaggctcaactacctgcagggctacgtcacgcatctgtccagagcaatcaggaacggggcggacgttgtcgggggtactttctt

SEQ ID NO: 17466 - DNA, 1932 bp, Setaria italica
  misc_feature (1911)..(1932): n is a, c, g, or t
  Peptide Sequence Number=SeqID_83440
cgaagccggagctccccgcacacccaccgatagcgacaagaggggagagctagcgggaagcgccgcgtgcgcgcgcgagatggccgcggcgaggggcattgccgccgtggcggcggcgttgatggtggtggtggcggcgctcgcgccggccgcgcgcggtgtggaccggagcgagttcccaccggagttcctcttcggcgccgcgacgtcggcttaccagatcgagggcgcgtacctggaggacggcaagagcctctgcaactgggatgtcttcacccacacgcacgttgggatcaaggacgggcggaacggcgacgtggctgacgaccactaccatcgctacatgggagatgtggagatcctgcaatcgctgggcgtcaacgcgtacaggttctccatctcatgggcaaggatcctaccaagaggcaggcttggcggcgtcaacccagatgggatagccttctacaaccgcctgatcgatgccctcctgcagaaagggatacagccgttcgtcacactgcaccatttcgacatgccgcacgagctggaggtccgacacgttggctggctgggcgccggaatccgggaggagttcgagcactacgcggacgtctgcttccgggcgttcggcgaccgggtgaggttctggacgacgttcaatgagcccaacctgttcaccaagttccagtacatgctgggcgcgtacccgcccagccactgctccgcgccgttcggcacctgcaacagcggcgactcgcaacgggagccctacgccgcggcgcacaacatcatcatgtcccacgccgccgccgtccgcaactacaaggaaaactaccaggcaaagcaaggcggctcgatcgggattgtgatcgccatgaagtggtatgagccgctgacgaacaccacggaggacattctggcggcacgacgagcgcagtcttttgagctggagtggtttctggatccgatattctttggcgattatccttcacacatgcgagagatcctaagatccaacctaccaacgttcacctcggaagagaagaaactactccaatacaagtctgatttcatcgggctaaacctctacacggcgatctacgccaaggactgcatccattccccgtgcgacctcagcacctacgaagggaacgccctcgtcttcgccaccggcgaaagggatggagtgatgatcgggggagataccgcgctcggcggcttctatgttgtcccacaagccgtggagcctgctatcatgtatgtcaaccagaggtacaaggacacgcccgtgtacgtcagtgagaacggttactcgcagtggagcgatgtgggcagggaggagctgatcaacgacgtcgagaggctcaactacctgcagggctacgtcacgcatctgtccagagcaatcaggaacggggcggacgtgcgggggtacttcgtgtggacgctcatggacaacttcgagtggacgttcgggtacaccgtcaggttcgggctgtaccacgtggacttcgacacgccggagcggacgcggacccctcggatgtccgcgaggtggtacaggagcttcctcacgggatcctccgccggggccctgacggatgaagcgcagcaggggcggagagcggactcgtgacgcgcgcgtggtgcgtaaaaatgtcattggtgtggtattaggaacacggtacggggtctgctgcatagcgtggtgttccagaaggcctggaactcactgatgtttgtgtatacgcgaaactgggccggaagaacacggagcatgctgtactactgctcatggtgaaaagctttcgaatctgtgctaaagcagggagcagctaatgatgggcgcatgtaacatgttcagacttcagactacgatcatggctatttcaggcgcgagcgagtaggggnnnnnnnnnnnnnnnnnnnnnn

SEQ ID NO: 17467 - DNA, 179 bp, Setaria italica
  Peptide Sequence Number=SeqID_83441
catacatgcactcatgtctgatggacctgttccttcgtctctccttgagcgtttgagtttggtttcttcgtttaatctggcttggtttgcaataaagcaggggttgtttattgcaaaccaagccagattaaacgaagaaaccaagccaataaacaacccctgctttattgcaaaccaag

SEQ ID NO: 17468 - DNA, 288 bp, Setaria italica
  Peptide Sequence Number=SeqID_83442
ttcgtctctccttgagcgtttgagtttggtttcttcgtttaatctggcttggtttgcaataaagcaggggttgtttattggtctgttattcacaagaaatatttaggattagaaggtcctactgtaatcccaaggcaagatgtaatctttagactttagtaatatatttgctggtatgcttctgaaacatgattttactctgtgccatgctgtcaaggatcacagatttaacgtctttttaaggccaacaaaaaaaaaaaaaaaacaaaaacgtggaacgaaccaccg

SEQ ID NO: 17469 - DNA, 818 bp, Setaria italica
  misc_feature (763)..(763): n is a, c, g, or t
  misc_feature (778)..(778): n is a, c, g, or t
  misc_feature (787)..(818): n is a, c, g, or t
  Peptide Sequence Number=SeqID_83443
tgcttcactccatcaccactccaagagttctcaaatcgccaagcaatggccagcgcggtcaccgccatggccgccatagcctctttcccggctccaagaagcctccagcaggctccggctccgttgcagctccgccagaacgccgtgtcgttcgtcgcacggccggttcgggcgcaccgccggctggtggccgtggcggccagctcgccggcgacgccgccggatctctccaacaaggtgtccgagagcatcaagcatgcgcaggaggcgtgcgcggacgacccggtgagcggcgagtgcgcggcggcctgggacgaggtggaggagctcagcgcggccgccagccacgcccgcgaccggcagaagggcgccgacccgctcgaggagtactgcaaggaaaaccccgagactgacgagtgccgcacgtacgaggactgagccgggcgagtctcttcctggctgccgccatcgctgtcacgtgatctacctaagctagcttggttagagtggcatgatggcaacatgaagacatgagtgcatgtatgatggacctgttccttcgtctctccttgagcgtttgagtttggtttcttcgtttaatctggcttggtttgcaataaagcaggggttgtttattggtctgttattcacaagaaatatttaggattagaaggtcctactgtaatcccaaggcaagatgtaatctttagactttagtaatatatttgctggtatgcttctgaaacaaaaaaaacaaaaaaanaaaaaaaaaaaaaanaaaaaaacnnnnnnnnnnnnnnnnnnnnnnnnnnnnnnnn

SEQ ID NO: 17470 - DNA, 362 bp, Setaria italica
  Peptide Sequence Number=SeqID_83444
taaaaattaccagaagttgactactgtgtgaaggcatatccaactttaataattctcctctgtacttaaatcaaacaggaggcatggaacaaatttaactctgaagagctcttctaaccagccacatgaatgaacatacccatcagcgcctgcacaaggtactcgagaagaagctcccaagctggagtggcttgcagtcgatcgggggaaagcatgaagcagaccaagcaaaaccaaaactatggctatcgttgttctaatcaccattgcttgtttaatacccccagtttttcttcccatttgtatgttgattcaattacatctcagtggcatgcgcggaagcccaagctggacctcatcca

SEQ ID NO: 17471 - DNA, 2868 bp, Setaria italica
  Peptide Sequence Number=SeqID_83445
gccccgccgccgccgacgaccaagcccgccccatcgccatcgccctcattcgactccatcttcgactcctacaaggagccctcctccgccgcgcccccgccgcccaagccgaagcactcgtccatgccggtgtacgacaagccggtctacgatgacgacatcttcgacggggtccctggggttaagagctcctcggcgcggtacgaagacgtgttcgggggcacccagagccacgcgccgcctccggctttcgatgacctgcttggtgggtttgggaagaagtcgcaggggagggaagaggtggaggagaagaggaagcccaagcctgctgctgcgtccgccgggttcgacgatttgatcccaggctttggcgggagaagctcgccgcgtcaaagggagactgttggtgcaaaagaaaagaaggtttccatgtcaacatctaagccagccgctagcatggcaagtgacccctttgttgttcttgaaacaacttcatcatcagcccatccattcacagatcccttggatgaattggctaaacctgcaaaataccaagggaaaagccatgaaggtactagcgctgacagcagcttgtttgaggatccaagcactttcaaccaggcttcaaaatcagaacctttgtttacctcagaggtgaacaatgtttcgaaagataggaatgactcgagcagagcccgaaactcaaatcctgtacaaagtttccccaaaaggaactctgcccaacaaccttctgtagaggattttgaaaatatctttcctaagtcacagtctgccagatattctgatgttcatgttgacattggctcagagaaatacagtgggaatggtataaatgatcagtcacctagatctgatgaatctgaagatgagatatggcttacagtttctgagattcccctcttcacacagccaactagtgccccaccaccttcaagaccaccaccacctcttgcaattaagcaaaaacatggatcaaaatcaaaaagaaaagatggtgataatctacggcggtctaggaaaaactatgaccatcaaagaagttcatcaaatcaggctggtgtttcttcagtagatgaactagaagattttgccatgggcaggtctcagaatgcacatgcttttaatgaggaagaatttgagagaagtacagcagcagcagcatctgcagctgctatgaaagaggccatggataaagctgaggcaaagttcaaacatgccaaggaagtacgagagagagaacgtgatgcaaagctcagaaatagagaacatcaggaacaagatactgaaccaaggtcgtatgcccaggaccgtgaggacaaagagagaaaggaaagactagaacaagagagagagatgaggcaaaaggaggaaaaggaaagagagcaaagaagacttgaagaagagagagaacatgagcgacagagagaaagagagagagctagacaagcagtggagagggctacaaaggaggcaagggaaagagcagctactgaagctcgtgcaaaagcagaaagggaggcacgccaacgtgcagagcgcgttgctgtgcagagagctcaacaggaagcacgcgagagggctgcagtggaggctaaagagcgagcagagagagctactgcagaagcaaaggaaagggcagctgctgaagctaaggagaaagctactagtcaagccagggatagagctgcagcagaaagagctgctgtggagagagctcagcaagaagcgaggaagagagctgaacgagcagcagtggaaagggctgctgctgaggctcgggaaaggcaggctgctgaagctcgggaaagacaggctgccgccactgcggctgcagctgcaagagaaaaacagagtaaaccagatgaccttgagtcattcttcggtatgggtgcccgagctaatagtgctccgaagcaaagggctccaacagtggattctatgtttgatactcaaacgcaaaatagagggacttccacttcagcatcaatgaaaaaggcatcatcgacaacaaatattgctgatgacttgtctgcaatatttggaggagctcctacatcatcagatgaatttcaagaaattgatggggagagtgaagaaagaaggcgtgccagattggaacggcatcaaagaactcgtgaacgggcggcaaaagctttggctgagaagaatgaacgtgacatgcagcaacaaagagaacaggctgaaagacataggattgccgaaacactggactttgagattaagcggtgggctgctggaaaagaaggcaatttgcgtgcattgctatcaactttacaatacgttctttggccagaatgtggatggcaacctgtatcccttactgatttgatcactgctgctgctgttaagaaagtgtacagaaaagcaacattgtgtatccaccctgacaaggtgcaacaaaagggtgcaaatctccagcagaaatatattgctgagaaggtttttgatctccttaaggaggcatggaacaaatttaactctgaagagctcttctaaccagccacatgaatgaacatacccatcagcgcctgcacaaggtactcgagaagaagctcccaagctggagtggcttgcagtcgatcgggggaaagcatgaagcagaccaagcaaaaaccaaaactatggctatcgttgttctaatcaccattgcttgtttaatacccccagtttttcttcccatttgtatgttgattcaattacatctcagtggcatgcgcggaagcccaagctggacctcatccagacatccagtaggtgtatattagtgcccttgttttgtactatttatcctgggctgtatgtaccggcggaggcgggtggcggggc

SEQ ID NO: 17472 - DNA, 1920 bp, Setaria italica
  Peptide Sequence Number=SeqID_83446
tggtaaaactattcttcttattttctttttacaggtaggtaactttgttgttcatttctgatggaattcgtgaagggccactgttctggcattgatggcacaaactccgataagaaaatcaagaaaaaaggcgtacgaaagaagaagaaagtttgtctggtggtaaaccttcaaagaaaaagaaacgagaaggtgaagaggaagctgatgggaggaatggtgtggaggatagagaaaaatattttgactgtgacttgatggataacagatatatatgtgctgataataagaaaggaaaattccccaaggaacgaaccaaccttgagcctgctgagaggataaatggctgtgtatcggaagatttggatggagtatctctcagtgaagtgccaaatcctacagatgaagcaatgattaccacaccatctaaaaagtcggtaaagattgctgatggtgatagtactgacatgaaggcttttaaaaagacatcttctattaccaagaaaaaagcaactcccaaggaggactgcaaagtcaaatcttgtggtaaacaggagtctaaaggagacacaaaaccacgaaaactgacaatgaaaccaagtaaggatgagctgagagaagctgtctttcttatcttggatactgcagactttgccacgatgacctttggagatgttgtaaaagaagttgacaaatactttgggaaggatctgtttgagagaaagccactaataaggtccctgatagaagaggagctctttaggctaacggaggaggccgagaagaaggaattggaagaggaggaagtagcagaagcaaaggctagagctgagcaagctgccaaggaaacggcacaggttcgaacagttgaatctggtattgacaagcgaaatgcacttcaagctggttcagatggtaaaactaaagacagttcaaaggacacaaatgacagtcctaatgaaaaaggcatcaatggtggggcttctgtgaagtctgctgttaagagaaacaacagtaatgctgctgaaggttcacaagaccacaaagccaatgctgatacacaaaatgaagacatccatgacgaattaactaaggatggagagggtgaacaggctgcgcccattgtaaacggtgatagcgccatacaaggttcaagtgatgatgaagctgagactatgaagaacagcaatgctcaagccctagaaggttctaaaaatgacaatgtgaaaggggctagcaatggagaaaacaatgtcactgaagactgtagaaatgaagaaggcaggggtcagaatgttggcagcaatgcagaaactggcaatggttgtgaagctgaagaatttaacaatcgtggaaatgatggatgtgcagaacacacagatggcaaagctcaggaagctaatcacaatgagaacagtgcaaatgtagaaatccatggtgataaagacggcaaagtaaaagaggggtatataagtgcagaacaaagtcaggcagatgctggtggcaatggtaaagctgaagatgctgatcacaatgcaaacgccaaagttgatgtagattctgtcaagaatggtgctgctgagaatggaaggactgatggcgatgtgaaaggcaacagcgacagcgcggttgaagaaagcccagtgtgatgagatggatgtaggttgtaaaagaaagttgatttgagatccagcttatgcagggcttcttgtatcagtagaggttacaactgatggcctaactcttgtaggatagcgagtcacggaaagctgaggtctggccttggagaatagttcggttagtcagttagaaacggtcagttatgtaaatccagctgggcgctgttgtatgagaaacttttgatgggcactgaagcaagaaattaacggaaataaggaacaaatctgttagtgaaagttt

SEQ ID NO: 17473 - DNA, 392 bp, Setaria italica
  Peptide Sequence Number=SeqID_83447
ttttttgacacgaggaactcaccatgaatccactaattgctgctgcttccgttattgctgctggattggccgtagggcttgcttctattgggcccggagttggtcaaggtactgctgcaggacaagctgtagaaggtattgcgagacagccagaagcagaaggtaaaatacgaggtactttattgcttagtctagcttttatggaagctttaacaatttatggactggttgtggcactagcgcttttatttgcgaacccttttgttaatcctaaaaaagaaaagagtcctttagattagatacttttttcttttttttcgtactattgggattttgcttctgtaattccaagtatatcaatactttactcctatttattatattattccggg

SEQ ID NO: 17474 - DNA, 532 bp, Setaria italica
  misc_feature (1)..(36): n is a, c, g, or t
  Peptide Sequence Number=SeqID_83448
nnnnnnnnnnnnnnnnnnnnnnnnnnnnnnnnnnnnattgtacaaatccatgatgtcaattgcatcaaccaaattcattcctctttcagtctttctcgtgctcaagtttgttcaagaaacaacatgcccgctcagcaaacttgaattgcttcccaaaattgcaacctcgcaacaacaacaatgccaataccatcgcagtgcaattaatcgtatgaggacaatggttagcaggttaggttagcacaccagaaatgtgctttgagcgcacatgaatctcaagagtaagttgctgagccaagcctcgaacacgccgaggagagcccccgcgacgatgtcgaggacgtagtgccggccaaggagcaccctggacgccgacgtcgcggcggcccagaggaagagcgcctcacggggctggaagccgccggcggcgaggaaggccgcgacgaggaaggcgcgggaggagtgtccgctggggaaggaccagtggtcggcggcgacggcgacgtacatgtccttggcgttgtacgccggg

SEQ ID NO: 17475 - DNA, 492 bp, Setaria italica
  Peptide Sequence Number=SeqID_83449
tttcttgccgtcgactcgtcggccgcccccccaacttcgggattccctcctgcctttgccttcgattccattgcttgaggacgtctcaaacaaatcacccttggggagttcagtgtgcctaagctgatatgacgccggcagagcaccacaggaaattttgtcaactgaatgaattttggtgaacttcggagccaaaagaaaaattctgtccaagggtaaattagcagagcagcggtaaagtgctcaaggcaagatgcttgaggatttcttcactcttaccgagatgaaggatggcatttcaactgctgcaagaatcgcggagcttatatctgagatccagaagctaaaggatgctgctgagattaacacagccgacatgataaggcaatgttctacggctgcaaacacattagcatccaccaaaaacgaagagtgtcttcaacatttcgttcagctcaacggtgttggcttcctaaaccattggcttcagga

SEQ ID NO: 17476 - DNA, 548 bp, Setaria italica
  misc_feature (42)..(42): n is a, c, g, or t
  Peptide Sequence Number=SeqID_83450
tcgctgccttccccgctgttcagttgcctgcaccatcgttgngctcaacgaggggggtgaggagctgcatccatgtccggatcgatcgatcctcggctttggagatgcagaagagtgagatgctatctccaagttcaagtcgcaagagcagagctcgcaggaaaaccattcctctttgctacagcaggaaacagagaaacttcatggagatattgataagatgaggagtgaacttcaaggggatgggggtacgacggctagatggctccgatccgacccggagtccatagcgacggccatataaataaaagggaatagacgagagagaaggggagttgcgagcagattcaatccaccggtgttgtttcgcaggtttcgttcgtctttcggagaagtcgccgtatccatccgatttgcggtggtggggcatggccgcggcacttcaatgcctggtgaggaagatggcacgcgcaccaccgtcgcatcatcctcgactctactcggggcttggtcgctcctcccctaccccgtcctccccaccgccaacc

SEQ ID NO: 17477 - DNA, 744 bp, Setaria italica
  misc_feature (711)..(744): n is a, c, g, or t
  Peptide Sequence Number=SeqID_83451
gctggagtcgcagggcgtgccgaccaagcaggcggaggccatcacctccgccatcacggaggtcctcaacgacagcctcgagagcatctccgagtccttcgtctccaaggccgagatgcagaagagtgagatgctgcaggagtccaatatctccaagttcaagtcgcaagtgcagagctcgcaggaaaaccatttctctttgctacagcgggagacagagaagcttcgtggagatattgataagatgaggagtgaactgaaatatgagattgacaaggtcactgcagggcagcggttggatctgaaccttgaaagagggcgcatacgtgacgaacttgccaagcagaatgaggaaactactgagcttaccacaaagcttgacaaggaaattcactcactgaaggcccagctggaggcagcaaagtatgatgtcatcaaatactgcataggtaccatcgtttcgatatcagctgtcggactcgccgttctccgcatcgtgatgtgaagcaagcgagcgaatacgttctttcgtttacccaaattcatccgtggaagcccgctagaagaggataggttctgattctgttcctagtttttggaggggacaaaacgtgctcaggagaaatgttgtaacacctggtagggagatgttgctcaaacttgtaaaaattcattgcctgcggaagaaatgcatccgaaatggttcttttnnnnnnnnnnnnnnnnnnnnnnnnnnnnnnnnnn

SEQ ID NO: 17478 - DNA, 317 bp, Setaria italica
  Peptide Sequence Number=SeqID_83452
ttgcgcgcagtggaaggccccggcggcggagacggcgagcgagcggtggaaggcgtcgggcgtgacggcgaggaagggcgtggggcgcggcggcgcggcgtcgtcggcggggggctcgcaggcgttgtagacgagcacctcgacggggccgagggagaggacgccctcgaaggcttcgcgcacggaccgggcgtcggcgcagtccacccggagcgcgaacacctgcgccttggcctcctgcgcgatctcctccgccagctgcgacagcttctcagagtagctgggtgctcgccggacgggagagaagaacgctcgga

SEQ ID NO: 17479 - DNA, 1117 bp, Setaria italica
  Peptide Sequence Number=SeqID_83453
caagatcatcttcactgcaagaatccggatttatcttcaaaccatataaacagaaaaaagcctggtccaaggcactatcaagacatgactgtatctcatccaattctgaatcttcctcatcctcagagttctgcttactgtcattaaccgatggttcatccaccatactgtcttgtgctccgacattttttggaactgcgtcttcttcaatcccatttgaattaagttgagattttagtttcacgtctagtgccatgagatgtttgattgcaaacttgaggaatgtcccttcctccccttcaccatcctttccggaacagcagagcccatactcagcaagcaaatcatggagtgcgactattaagttaacctgagttttgatggatattgtaggatcaaggtgctggagcttgcaaaatgcaatagctgcatctatgagacaggaactttccagctggtcaacctgataggaggttccagagcatgagagttttcttgataggattatcttgacagcagcacacatgattgtcaggagcaatgattgaatatcaccgacaatagaaactagtgagctccagccatcttgcccatcagaattatcacattgatcaataaagtcttttgctttactggcatttcgagatacatctttgattgcttccacaacattttctagccggttccggttcattgcttccacaaagtccatgttacttgaaccttttccctttgggggtgtaacagacccaaccatgccagctgccacagttagaacttgaatttttcttcgatgggagtcaagatatacctggatgttcattggttttgccttttcacatgcagatattaagacatccaaggcagacaactcaagtgagatgacattctcactttctctttgtggaccatatgcatttccaacatagacatctttggtggaaagcaaaagtggaggtagcaatttcatgaactctgtatgagttattttgttgatattctcatcattattccaaagtaaagattcaagcctgatcaagttaatttcacggagaatcctatctgttgtcagtgattttacaagcttggtgtgaggtagaagaataacatctccaca

SEQ ID NO: 17480 - DNA, 1258 bp, Setaria italica
  Peptide Sequence Number=SeqID_83454
tctcgatggaggacgaggcaatgctgctgaatctagtgacactcaaataaaaaatacagtctaataaaatcaaacaccatagaaggtggaaaataaccaggataaaagcagttcattggacacgttacctactacaatatactgctacagagatattctttgatgatggaaatgcaccagtatttcttaatttttcctcccaaaatgatgctaaaagtgttgggtctctcttggtttccctgaggaatgatgctttgttccccaaaggaactagcagagataagaacagtttgatctcctttgttgacagaaaggttgcacttgaaatggctgagagtgctagagaaagttggagaagaagagaaataagcaactttgagtatcttatgattctcaacactcttgctggacgatcttacaacgatttaactcaatatcctacatttccttggataatagccgactactcctcagaaaagcttgattttaacaaatcatctacttttagggacctgtcaaaaccagtaggtgccttggatgcaaagcgctttaaggcatttgaagatagatatcttaattttgttgatcctgatataccaagtttttattatggatcccactactctagcatgggaattgttctttattaccttctaaggcttgagccttttactgctttacaccgcaatcttcagggtggtaagtttgatcatgcagatcgtctgtttcagagcattgaaagcacatacaggaactgcctatcaaatacaagtgatgtcaaagagcttatacctgaatttttttacatgcctgagtttcttgaaaattcaaattcatatcaccttggcataaagcaggatggtgaacctttaggtgatgttggtctccctccgtgggcaaagggctccccagaagaatttatttatatcaatagagaagcccttgaaagtgaatatgtaagctctaatctacataactggattgatctcatatttggttataagcagcgtggcaagcctgcagttgaggcagcaaacatattttattatttaacatatgaaggtgcggttgatttggagaacatggatgatatgttgcaaaagtctgctattgaggaccaaattgcaaattttggacagacaccaattcaaatttttcggaagaaacacccaagaagaggtcctcctataccaattgcgcatccactatattttgcgccacaatcgataacagtgacttctgttgtccctaccctact

SEQ ID NO: 17481 - DNA, 318 bp, Setaria italica
  Peptide Sequence Number=SeqID_83455
agtcgtgaatggcaggattgcagggtatggtatctcaccaaatcattcatatgactcacattctcaaggtgagcaattgtatttttggtgtttatggaacgtgagacatttgatgttgaattttgtgttaaaagcttataattcccttttttaccagcgccatcaagtgggttaccgagtagaggactaagcaacggtacgtatgagtatagtagacgtgtatttggctctgttatgaatgatgttagccgtcgagctaccagggaaccagttccatacccgtcctactagcatgtgagctccagtgactgtaacttg

SEQ ID NO: 17482 - DNA, 572 bp, Setaria italica
  Peptide Sequence Number=SeqID_83456
ctgaatatgatactgtactttactggttcaggtccttgctcgtactatatttatgagtattggcaaaagtctaagctctgaaattgttgcattttttgacagatctctgggcaagacaaggttgacaaaccctcctcaaatggcaatatgcctgtaactcctaggttaaaccctataccagcaccaaagcctcctcaacttatgcggtctagtgatactccttcgtcacagcatacagtcgtgaatggcaggattgcagggtatggtatctcaccaaatcattcatatgactcacattctcaagcgccatcaagtgggttaccgagtagaggactaagcaacgagtagaccgccgaagccattatctgttgtctcagccatctgtaaggttatctctgtactcaccatttaatgcctgtgaatatggtttatggtggtagggcatatgcttatcttttgggttgttcttacattgttgtggagttgtgtctgctggttaggctcctctcgtgccctagtgatcaaggctccactaatatgattgtactagaattaccatgtctagttacatg

SEQ ID NO: 17483 - DNA, 1930 bp, Setaria italica
  Peptide Sequence Number=SeqID_83457
acatcctgcagtattggacagatgaagtaggatggcacaccaccaaggtcttctgatactgatttaaatgacaatgaacatagcatcaccgaagcagacctatacattggttcaagtacagtccaaacctctgtttgcaggtcaggacgatttttccttcttattttacagcatctcaaacccaacccagccaactgctcagcatacatggcaggccattcaccagcagatgaatctaatattgcttgcaaacaacccttttccatagcctgttgcacttctttcaatagaccaaatcctgatcttccagtcaaaaggcgtaggagcacgatgccaaaagaatatacatcagataggggtgtcaggtcaccagagataaggtattcaggatcaatatacacaaaagaacccttcgggtgggtatgacgatatagagtagttgtggccttgaactgatcagttaatatttggcttacaccaaaaccactgagtttagctacattatttccatcaagaagaatgttagatgctttgaggtcactgtgaacaatgctatgaggcttattagaatggaggaaaattagtgcagagcaaatgttagaagcgatgcgggtacgcaactgccaactaagaggcttggaattatctttgcaagccagacggtcatccaagcttccatttggcatgtattcgtaaacaagggcttgagcatccttgcatgctcctataagagtaacaaggtttggatgcctcaccctactgagaatttccacctcttgactgaactgcgactgtgtctgtgtagtttcaggattcaacttctttatagctacgttggtgtgccgaagaaagcccttgtatacacttccatatacactttctccaatcttcattgagtggtcaaagtcgttagttgcttccttaatctctgagtagggaaactctgttatgtgcatcatcccctcttcagttgcagtagactctcctttccttgcacgtagcgtttctgtctctctcagcgctttgtcccgctgcaacatcaaatccttgattatacggtcagcatgttcacctctcttctccaggaccattctttgttcacgttccccctgaagttccgcacaaagttcatcaacccttactgtgaggctctcaaattcttccattattgttgtaagtttttcttccagttcattcttttgtttcatttcgcggaagtatgaattttcggaggcttgtgctttctgtaaagcctcaaataactctcgttccgctttcacatgtctgcatttctcttcataagcttcttgccttgcattctctagctccctgaggatattctggaaattatagtagggctcacaagattcttcaatattgtccttcccactgatgtataatgggtctgacttagtcctttcaatctgtggttccccgattgatttgcatagccatgtgtttgcaacacaccacatttctgataaacttgctgatttctccactgaataatgtctgaccccagagctttgtctgcattcctgcatttcttcatggctaagctgaacagctttccaacaatacctacggtaaatcagtgttcctttgcaaataaaccaaactttgcacaaaggatgtgcttgttgttctacgaatcgtgctttcctggacttcagagtcttcattttctttgtataatgcttatcagctgctgcacccataacaagcgtggtaacatgatgctcagaaatgagctccactagtccctgtgcaacatcatctgattcaaccaccaacttctcagcatgtatctttccttgtgcgcataagtgtaggtattgatccaaactgtcattgactctttgtagctccatctccttgtatgcagctagctcctgctcctcaacctgggcagcaggaaccctggcaccca

SEQ ID NO: 17484 - DNA, 764 bp, Setaria italica
  misc_feature (24)..(24): n is a, c, g, or t
  Peptide Sequence Number=SeqID_83458
actatgtcgtaagtgcatatggcncaaaggtttctatagctgaccttactggcaagactgtcggcctgtattttggggcacactggtgcccaccttgccgtgccttcacgaaacagctcatggaggtgtacaatgaactgaaaatcttgagacctagaagctttgaggttatcttcatttctatagaccgcagtaaagaggaattcgaagaaagcctaagtgcaacaccatggcttgccatcccttactctgacactgctaggcaagagcttacaagaatattcgctatcaagggcatcccagcgctcctgatacttggtttggatggtaaagttctaaaaacagatggcaggacagcaatctcaacttacggtgcaacagcattcccattcacagaatctagagtttctgaggtgaatgaagcactcaggaaggaaggagacaagctgccacgccgagtgaacaatccacgacacaggcatgagcttgagttggacatggctaaggcctatgtctgtgatgaatgccagcagaaggggaggtactgggtgttctcttgtaagccatgtaactttgacctccatccctcctgtgtaggagcaagtaatgcagaaagcatctaagatatgtatatagttaaaagtatgcagttttagcatcaatgtagactgacaaaatggttctattgtactctaaagtctaaaggactcgatgaaagcaatggacaagagtccttcgctgaatgcatcaactacatggtcaaa

SEQ ID NO: 17485 - DNA, 671 bp, Setaria italica
  Peptide Sequence Number=SeqID_83459
ctgatcatattatggcaatggagcttcttagtgctgtcaaatctgctggtaatctggctgcttcaatatttttgaagccattctgctttgagggacaaaggcggcaagtagaggcagctgatttgattggcaaacttcgaacatgctcaaactttcacattgttattgaagctgattcattgcttgagacggaagtggaaactcttgctgaagctttggaaagtgccaataatgctgtcctgtcaactattagcatgatatctatcatgatgtctggttataataagatgttctggagttcccttaatgcacaaattaaggaagttgatcctgaggaagtagccaagctactacgaagctatggcgaagctagagttggctttggtgctggttataacatccagtcagcaattaagcaggctgtcttccactgtccatttcttcgtggtggcataaaggacttgaacaatgtggtttttcctctcccttacaactgctcgtgtattgtctgaaagtgacatgatctccattctgcacatctttcgtcgagtcactgggttcagcaaagacattatattttcaagaaattccgaaccagatttagagccaaaactgatagtagtttctcttctaactatccgaaccacttattgtacgtaaagttgtttgta

SEQ ID NO: 17486 - DNA, 494 bp, Setaria italica
  Peptide Sequence Number=SeqID_83460
attgattaacagaaacaggtctgcatatgccctaatagaggtagaagaacccaaatgatacacagccaactccaaacagtggatgagctcaagaccatgggcccaacaagagccaacagtttaagagccgaagaccacatacgtagggcttttccaaccacgatcaatacttgacatatgagagttaaatcccaaatttgcaaataccattagaaacaaggctcttgaaatgctagatagaaggacatgaccagtttatacatcgtggcactcaacaagtttgttctactcaggatgttgaaaacaccagaacacgcaaggacgatgtatgatacctacaatgcttaacgtacaactgcacaaatgctctgatggagtatctacctcattgataactacaatgtcctacttatctttcttgggttattgcaaataagttgtcatgtgcctacacattgtgaatcctgtaagaggcacaggaaaatactgaacag

SEQ ID NO: 17487 - DNA, 2169 bp, Setaria italica
  Peptide Sequence Number=SeqID_83461
ttttttttttactaatacaaccaaagaaaaccaacatagcattccacacatatatatacaaagtaggggccaacacagtccaaactgatacacgagtacacgactgacagacatcctcttgtgcctgcctagcataacctctgcatctgccaaacctatggagctgtaacccagctttagagaaacctgaaattcctagttacaacttctaatttcaggatccccttcaacttgcggtgacgatttagatgataagctaaccgttggattagattgcttgtgtgagcatgggagggttggaaactgaacacagacaaacaaaatactaagtaaaccaagtagtagtggtttacagggtcttctatattaatagagttcaggatagagtcaggatgaagtcttggaaacatgggatggaggccaaaatacgatgaaacatgagcttcttctaaggaaatgtcaacaccatgctgaagatacgactaatactctgttcttccatccaaggtaaaggacaccatctctttcctcaagactgtaacagctgttgtaactacgcaacagagtgttgatggtgttgttcaccactgaactcagcgggtaaggcctaaatccagccattgcaaatcttgccttccattttccaaacagctcatgcctctcaactctttcaggaccctcacatgcgattaaattaacaatatcccttgcaacacagtgttgttctgcgctcatccgcctcctgtcatcccttgggagagcaacatctatcgactcaaacatggctgtatagtagttgagagtttccatgtatctcgggaagaatggagctgtgtttgtatttgactcctgctcaacaagagtaacaaccctaggattgatgctcttgatcattcttataatcctatcccgatgattttcaatgcttacgctttcatcaggaacatgatgcagctgataggcaaaattcacaacaataatctccccgggtcttacagcaagatgctcaagctgaacctcatggctagcagctggaacggcattgaactcaaagggaagaccacatgactgagcaacactatgcaatctcctcccaactatatcaagcccaccccctctggcataagcagaatttgagtcatcaataccagtgattctaatgtatggtggacccccaggccttgcagcaagggcctgtatcagagtaatccattggctcccctgagcaatttggaaatcaatgatgtgaacaaagttctcacccttaatagcctcggcaatagcaccatttgctgacatataaccaaacttgtagaatgggcagatctcgtaaaggagatgcatgtatgacatgagctcagagcctgtaggttctttacatttcaaagatttatatagcatactgccagaggaagaaagtcttgcaacaattccttccaacatatatgctccgagtctttgcattggatctccggatacagatacgagctgacctagctcagatatcagcagttctgttgcaaagacatcattctccgcaacagccttaccacatgctatgataacttgcttcaagtctcctgcatcaattcccagaagttgtctccagttgtctggtctcaattgaacattggcttgtaagaagctctcagggctgtcagaagtaatgtccaattcaggtccaagaataacattctctaactcttttaatttaatctggagatctgcaacttcagttagacaggaagcacttgggggagaactatatgtgtgatctgagtggccatcatgctgagacagggggctcccacttaaaggggaaatgctgtgagaagatgtggagctttgtgcaggataaataccatttgctgacgacgattccagagtgcagtactgtgcttcaaatacttgggtgttagaactattaatcctctgtgatccatcatcaggagaagagtagtgatgatctagattattttgcatcgcatgaaacctaccattttctcctacaggtgctgagtcactgtagtatggcatttgagaatcatttgtaaattttgtacggatggttagaagccctagctgacatactgccctttacaaacttgtaggcaaaaacttagacagggagcagatcctgtcatctttgtcacaattgtatatagtgtg

SEQ ID NO: 17488 - DNA, 1608 bp, Setaria italica
  misc_feature (1557)..(1557): n is a, c, g, or t
  Peptide Sequence Number=SeqID_83462
caggtaatgtgtcttagcaagattgtgcgaaaggcggtagctagctctaggtgacactcgaggtgtcacaagttgacacttcatagcacgatcattctcactcagagctggaagtttggacgcatcggcgaactgtctctaaacagcgcatgcaggttttggcaggcatcactgtctaagttaaccaatactagctatattacaatggctacactgtgaagtgtcacagctagttgaatgccaaagctctacggtcgccagcaattcaactcgtgaggaccaaggctttggtagagaggcaccgtactgaaatctgtggcagagaagcacgcagcaacccaacagactacaaggtcatattctgctgctggagccattcctggatggcagaacggagcgcgcggttgggaatgagctcctcgtgttcaagtcgcatgttggtcatcggagacgtgtcatggccttcgagccagctcctgatggcctcggcttcgtaggtgaatccgtccgctgcgatatgtggatcgttcatgacatcctgaaatataggacagatgaaatatgatggcacaccgttttcatcagacactgatctagaagatgaggcagaaggtatggttgaagcatccctcatcgcctcaactactccccacaccacgactgaaagatcaggacggcacttgcggctcggctctgtgcaactgagagcaaggtgcgccaactgctgggcgtacacatcaggccactctcctgctgaggtatcaactactgagttcaggtcgcctttcaacatggcattctccacaatcttctttataccatcaggaggctttcctgtcaaaaggcgcaagaccacaatcccaaaagaataaacatcggactggcatgtcagctctccggtggcaaaaaaattctgggtccatgtactgaagggttcccataggatgcatggtgcgatacatggtagtgttgttggtgctggactggagcaggtggcgagagataccaaagtcactaagcttactgactaaattaacatcgagaaggatgttagcaggcttcagatctccatgaacaactgggtgtggtttattcttgtgcagaaaggtcaatgctgaacaaatctcagcaataattcggatgcgagtttgccagggtagagtgcgccttttttctgcacacacaagaaaatcttcaaggcttccatttggtaagaactcatatacaagtgtagatgactctgagcaggctcctaacagagttacaaggtaagggtgcctcactctactcaggatagcaacctcttgctcaaactgtgattgtccctgtaaattatcatgtttcaaaacctttattgcaactgtcatgttccggaggatacctctgtacacacatccaaacccaccttctccaatcttaagcgaactactgaaattttcagtagcacactccagttcagatgacgaaaactcacagtgcattgatgtaaccaatactgaaagcatctggcctcttttctggcgtaactcttgaacttcacggacagcatgatccctntcgtgtagcaagtgatcatgctctgatagaagccgttcatattgtcctctg

SEQ ID NO: 17489 - DNA, 768 bp, Setaria italica
  Peptide Sequence Number=SeqID_83463
ctctcctctctttcacggaatctggtacacctcgcttgtggccatcagcgcttgaacgatgagtttctacacgctctgctgcagccaatcaacatatgcgtcatgtttcccgatttcttcatggatctccaaacatggccagcatcagtggagttaaaggtgaggagctgtgctgtgaggatgaagagtgctgggctgcagaggttcctggttatcccatggatgatgtagaccctatggatatacttccaaatagtagccaccgtgacggttctatatacagtggcacgcctagctgttaaagagactatcgtattgcggaccgtaatgagactcgtcaggaggcaatggcgttttcagatccacaggattgtgacaacatcaatggaacctgctggttacattcaactcgtcacatgttgcaaattttttcatttaagttggctaacattcctgtgaagcgtggcccagtagaattgtatggatacatagcagcacgggatacgctggatccgttacttaattatgtcatcaattttagcagggatgatcccatcatcgtcgagcagggttctctcatcaacatgtctggtccgaagcgagggatccaattggttgacacaactctaatcgaatatgacatgaagatcaagacaggtggacatgaaagcgaagatctacagctgatcgatggcgtatcactcgtagatgatatggatacgtggaattgcagcccattcacgtggcgcattgtctattggttggtct

SEQ ID NO: 17490 - DNA, 812 bp, Setaria italica
  Peptide Sequence Number=SeqID_83464
cccgtcagccgcggggtcccagcccccccacctgacacgcccgcgaccgcgactcctggaggattgcggcgcgtttaccgtgctgcggtgcagcagttggatcggcaaatgtggcgtccaggctcttttggagtactgcgatgcggatagccttaaagcggaaggtgagtaaacaactctttatcttccgaaagatagataggattccccgagccagatgccgtcaaacttgtggccgcggtttctctgtttctcccccctctctcgcttgccgggccgctaggcaggcaggcagggcttacgagaggcgtcggatgcggtgaacggtggatccacaaccccagagcaccggtgaaactcaccccatccccccaccacaccgctcgccgccgccgcgcactcagctgtgaaaagagaccgccgatcgagatggtgcagatgcgaatcctcttgcgctcgattcttggtgctctccgacgctccaacgtcgccacctcccctgtctcagctcaccgcctcgtctcttcctctcgacctctcctctctttcacggaatctggtacacctcgcttgtggccatcagcgcttgaacgatgagtttctacacgctctgctgcagccaatcaacatatgcgtcatgtttcccggtgagctttcttgttctcatgctaaagtttgtgcctttagttggttggtatagaatgggctggattgtgaccaggtttggatctgttcttatgttgatttttgaaggcagaaaaggggcccagaaatagaaagcggatgatatcttgtttgttttgtcgtttgga

SEQ ID NO: 17491 - DNA, 1185 bp, Setaria italica
  misc_feature (1164)..(1185): n is a, c, g, or t
  Peptide Sequence Number=SeqID_83465
ttttcagatccacaggatttgttgtactaactattctaattggtaaccttgtcttggtttactatttctaacttcgttcacatgttgcaaattttttcatttaagttggctaacattcctgtaagcgtggcccagtagaattgtatggatacatagcagcacgggatacgctggatccgttacttaattatgtcatcaattttagcagggatgatcccatcatcgtcgagcagggttctctcatcaacatgtctggtccgaagcgagggatccaattggttgacacaactctaatcgaatatgacatgaagatcaagacaggtggacatgaaagcgaagatctacagctgatcgatggcgtatcactcgtagatgatatggatacgtggaattgcagcccattcacgtggcgcatgcatggtggctgtggtgcgatcgacataactgcttcacgtcttaactttgcggttgaggcgaccgtggaagtcgccatatcacaagtgcaaagcgatttcagtatgtgcctcagttgttttaccagtgggttacatgaagaaatccggctcttcgatggtgctattgctgagtcatgtggcttaaagaggtcagtgattgctgtagtgatgggtgctcagatggatttgaagttcaaggtagcctcagtcttatgcatccctggtgaacattgttgttcctttaaggcgaccaagcatgggcgtgctactcaagagataaagactgattttgcgttaattacagtgaaggtgacttggtcgactttggactgatgggatctaggcttataacttttccatctaagcttggcacggccagacttatgtggcaagaacattggcctaacagccttagattgaacttagtcaacaacaaaaaaaaaaggtgaggtctgtgatgacttgtgggcttgtggcagcaatcaaacacttcactaacaacatttcagctgtctactgttagatctggcaactttgggttgtaatcgaactagtgtaataaggagatatttagatactaattaggagtattaaatatagattaattacaaaatcaattgcatagatggaggttaatttgagagacgaatccattaagtctaattactccatgatttgacaatgtgatggtacagtaaacatagtaagnnnnnnnnnnnnnnnnnnnnnn

SEQ ID NO: 17492 - DNA, 1381 bp, Setaria italica
  Peptide Sequence Number=SeqID_83466
tgtcttaaaagttttgttgtccttttagttggtttggtatagaatgggctggattgtgaccaggtttggatctgttcttattttgatttttgaaggcagaaaaggggcccagaaatagaaagcggatgatatcttgtttgcgttggatgctgaaattaattatttatatttatgctctttgtgatagatttcttcatggatctccaaacatggccagcatcagtggagttaaaggtgaggagctgtgctgtgaggatgaagagtgctgggctgcagaggttcctggttatcccatggatgatgtagaccctatggatatacttccaaatagtagccaccgtgacggttctatatacagtggcacgcctagctgttaaagagactatcgtattgcggaccgtaatgagactcgtcaggaggcaatggcgttttcagatccacaggattgtgacaacatcaatggaacctgctggttacattcaactcgtcacatgttgcaaattttttcatttaagttggctaacattcctgtgaagcgtggcccagtagaattgtatggatacatagcagcacgggatacgctggatccgttacttaattatgtcatcaattttagcagggatgatcccatcatcgtcgagcaggttcaaatctatacttctcttattcaaggaataagtctagtaatatcccatcatcagagcaggtgccagcttgaactaatctgctgctgccactgttcacgttgggtaacagcactgtgcatagtacaaggctgcacgcgtttgggcccttgggctcttgttgggcaatttacaaaatctggacatgataacaaccaactactatgccaagttttatattgatttactatgaaaacagatctaacttatgaatctaactatcatatagtccaaataaaatcaaatgtaatagttctgtactcttggttgctaacaattaaacctcacaaaattgatttcatttgattataggtgcacatgaacatgcatagcatgaatgattccatcactccaatctttcctcttttcattgcttacatgcttatttactaatattcgggattcaaaacacatcaaataaatggcagggggcaattttccctctctaaccctgttatgtgtttgctaaccattcagtttgatacgcgacaaagatcttggtcatcagttatagattagatgcctataactaaagtctaaatattgttacaagttaaacatcataagagaagctttaggtatttcttacttttatttgattctgtagggttctctcatcaacatgtctggtccgaagcgagggatccaattggttgacacaactctaatcgaatatgacatgaagatcaagacaggtg

SEQ ID NO: 17493 - DNA, 432 bp, Setaria italica
  Peptide Sequence Number=SeqID_83467
cctccccctagcaagccgaacggcgacggggacggcgtcgcctgctgctggaacccgaagggcgagggcgacggagtcgcaccaaacgccggcgtcgaggatggcgcgccgaacgccgaggtcgacgagggcgtcccgaaagccgacagcccgccgaacgctgggcttgaggatgcggtcccgaacgcgggcgtcgacgacggcgtcccgaatgccggggtcgaagacggggtcccgaaggcgggcgtcgacgagggggtgccgaaggcgggcgtcgacgacgtcgcaccgaatgcgggtgtggaagaaggcgtgccgaaggctggggtggtggagggggtcccgaaggccagggtggaggagggggtcccgaagaggggagaggaggatggggtcccgaacatggcggcggcggagatcgccggcggcgag

SEQ ID NO: 17494 - DNA, 243 bp, Setaria italica
  Peptide Sequence Number=SeqID_83468
gccatgagttcctcgccgccgtcgcgggcagccgccagggcgtacgggtgctgccaccgcctcctgctcgcttctaccaccgtgccggcgacgagcggctgcgctgggcgcgcacgcagcctcacgctggctctccgctgcctcccgattgctgggcacaggctgaggagtcgaagggttgcgtgccaagcgatgacggagaccgagcccgaaggcaatgacgacgacgaggagaaagaagtt

SEQ ID NO: 17495 - DNA, 471 bp, Setaria italica
  Peptide Sequence Number=SeqID_83469
ttcctagtactggggaaattggagcagtttcagatacccttcaacatgcatgtaccatcaaacagctaattgatgagagtgacgatggcctctgtgcacaacttcatgaggattactatgctgatgtgagttctccaatcaaagtgaacctcctgtttctgaacagcattcttatactgcttctgcttcaatggatcataataggcataactggttccccgaggggtgccagttgcataatagtaatttgtgtggattggagtccggtgactgcttagcccaggccttgccagttggaagcagcacagatggagctctgatcagtgccatatctcagtacaagcagccatcagcacacatggaacatgaagcaaagaatcaagttggtctgccaaaaaatgttcttcctaggactcaagaagcaagccctccatttccagatacgtgtaactgcacccagaatatggccag

SEQ ID NO: 17496 - DNA, 1082 bp, Setaria italica
  Peptide Sequence Number=SeqID_83470
tcttgaagtcgggcagagtgagtgacaccgtcgtctgaggctggaaccccacggacgccagcctcggcgacaggatcatcgccgggctcggccgaggcgacggcaccgggtccctcttccttgacggcgagccgctgagcctcggcgagaggttaacgtgctccagcgccctggactggaggtcctgcgggtagtcacgaacgcaccggatgcgtgggcccgttcccgtcgaccaccggcacatcaggtggttcttgccgtgctcagaagcatcaccgttcgccggcggctgctctgaactgtgcgcctcttgttcggtgtcagtgtgagagtggatgtcagcgtcgtcctcctctgcttcactcatgtttccgtcgtcggttgtccggcgaacatcgccgtcgaccacctcggactcactcatctgctcatcggcagctgcggccgccgtggcgtgatctgtcccgttggtgtcgtcggacacagtggcgttgggctgagcgtcaggtttgctcagcaaggggtactcgtcgtctttgtcgattggggatttccttgacgtcggtgaggtcgacgccgttctcctcaaggtaccggatgaactctctgaagttctcttcagttggaaggtagtggccgctgtacggccatatggccttgaggattccttctttgacgaccaatcttccggcagatgttatggccccaccagctaggaaactcgagtgctgaaatgatcctttcttcttctgtccaacatagagcgccttggtggtgctgaggacgaaaatccacttggaatcatccaaagtttgaacaaaagctccatttttcttgtacactagttttccactctccactacaacttcatactcttgtctttctttcggtccaaggtacttgatgcactggctctgaagtttactcctagggcatttctcaaggtttacttctttgccttccccaatgtccaaccaataaaagaagggttctgtactctcgctcttggaccagacatcataatagatatgcaaattgtgcccataccgatgcctcgggtcaatagcttcgagccagtgctg

SEQ ID NO: 17497 - DNA, 408 bp, Setaria italica
  Peptide Sequence Number=SeqID_83471
cttgttggacagcacttcccggacaagcttggggtcactgaggatcactctcggtgttgggccgccccataacatcgaaaccttaccgtgttccttgacggtgttgtagaccagtggatccacacggctgctgatgccgtgcgacagcagaggcatcggcttggtccgttccgcagcgaggagacgcgcctcctccgccaggtcgccggaggggaagcggtaggcggtgccgcggaggccctgcgcgcgtagtgctcggcccagcctccgggggctgagccatgcccactccagcgaccgccaggtgagccacagagcaaccagggctccaagaacgtagaacaactccagcaatgcgtcgatcgccatcgctttcaatttagaaatagaaagactagttagttagga

SEQ ID NO: 17498 - DNA, 1795 bp, Setaria italica
  Peptide Sequence Number=SeqID_83472
acgagtttatagtggcacaatacagacaggacagacagtgagggtccttggagaaggctattctccagatgatgaagaggatatgactgtcaaagaggtgaccaaattgtgggtttatcaggcacggtaccgtgttgcaattagtaaagcacctgctggttcttgggttcttattgaaggcgtagatgcatcaatcatgaaaactgctacaatatgtcccatgaacattgatgaagatgtgtacatatttagacctctgcgtttcaacaccttgcctgttgtaaaaatagctgctgagcctcttaacccaagtgagcttcctaagatggtggaaggtcttcgtaaaatcagcaagagctatcctcttgctattactaaggtagaagagtctggagagcacactatactggggactggtgagctatatctggattctataatgaaggacctcagagagctttattcggaggttgaagtgaaggtagcagatcctgttgttacattttgtgaaacagttgttgatacttcttcaatgaaatgttttgctgaaacacctaacaagaggaacaaaattaccatggttgctgaaccactagagaagggcttggcagaagatattgagaatggccttgttaaccttgattcaagacagaaagaaatcactgacttttttcgccagcgctaccagtgggatgtacttgcagcaaggtcgatatgggcttttggacctgacaagcagggtcctaacattcttctggatgacacactttcagttgaggtggacaagaacttgctcaatgcgatcaaagattctattgttcaagggttccagtggggtgctagagaaggtcctttgtgtgatgaaccaattaggaatgtgaaattcaagatcttacatgcaaacattgctccagaaccattgcaccgtggtggtggtcagataattcccacagcacgtcgtgttgtctattctgcattccttatggctaatcctcgccttatggaacctgtgtattatgttgagatccaaacaccaattgactgtgtctctgctatttacacggtgctatccaggcgacgtggtcatgtaacagctgatgtacccaagccaggaactcctatatacattgtcaaggcatttttacctgttatagagtcttttggatttgagacagatctcagataccacacacaggggcaagcattttgtgtgtctgtattcgatcactgggctattgttcctggtgatcctttagataagagtattgtccttcgccctctggaaccagcacctatacagcaccttgcccgtgagtttatggtaaagaccaggcgaaggaaggggatgagtgaggatgtgagcatcagcaaattctttgatgaggccatgatgcacgagctggctcaacaggctgccgatctccatattcagatgtagttccagagcatgatgggatgtgcttgcttgacaaagttgtcactcttgagaagacgcaaatgggtccttggctttttgttacttacactagttgcagatgggaagctagaaccaccctactctcttcggaagttccaatcgcaccaccatatgctgtcatttgcccgggcctgttgccccctggattgcagattctgattccaggatatcatgtagggaattatcattataggattgggtaccatctaccgatcattgtatgtacgatttctgtagcatctacatcatctaactagcgcgacactgcgagatttcactgtagcaatggcatttttggggatgtagagctgaagtgag

SEQ ID NO: 17499 - DNA, 546 bp, Setaria italica
  Peptide Sequence Number=SeqID_83473
acaagggaacaagcagcaccaacaaccacctcaacaacagcagcagcagcagcaaatacaaatgcaacaaatagttgttacagagagctgcacagcagcagcaacagcagcagcagcagcagcagcagcagcgtagagatggttctcttcttaatggtgctgcaagtggattttctggaaatgatcctttaatccgacaaaatccagctactgcgaattcgatggcggccaaaatgtatgaagagaggttaaagctccctccccagagagattctctggatgaggcgtcaatgaagttacagcaaagatatggagaaaatgctggacaagtaattgatccaaaccaagcattattgaaagcagctgcaactggacaatcctctgggcaaattttgcatggaactgctagtggtttgtcaggcactccgcaacaagttcaggcaagaagcccacaaccgcctacgacagaacagaatattaggaccgagatcaatccaatgttgacacccagaactgcaggcactgagggttcattgattggtctcc

SEQ ID NO: 17500 - DNA, 466 bp, Setaria italica
  Peptide Sequence Number=SeqID_83474
gaaattgactgcagattttgagctgctgtcatcagagcgaacatgaatcacgccgtgtacagaacgtgactgaccatgctgacttgaagcatttttaactgaagcagatgcagccatacttgaacggttgtttagctgagagcacaacttctttgcaaacatcacaaaatttgtgttctccataaccaaaccagtagaacccaactgcagcacaccccgcggtagcacaggaataatcgcaatagtctgaatgccaactctgaactgattgttcatctcagcagccacctcggaggagagctcgtgaccattggcagtaccgtggacgatccattgatgattgccactgaacgcagcacggcctacggtcccttgtccaacgacatgaatctccgacgccataactttgttgacaagcgagcagatggtgtcagcagcaggaacagagcacccggtgtcactgggc

SEQ ID NO: 17501 - DNA, 259 bp, Setaria italica
  Peptide Sequence Number=SeqID_83475
aattaaattaaatgctgaaaagaaagctttattgagaagctggatcattgaatcaaatgctgaaaagaggttatatgatccaccttctcaataagtgatcatgaattgtttagttgtagtttatagaaatttcctcacttcgaaagagcaatgttctttaggaacaattttgaattgaaagttggaaacattcttccagcctctacgaattcatatattacctggaaataccaaagcatcattatttttcatctaattg

SEQ ID NO: 17502 - DNA, 1207 bp, Setaria italica
  Peptide Sequence Number=SeqID_83476
ggttcgccatccagaatgccaccgatgtgcagtccaagaagctcgccattccgtcgaacacctaccgggcggtccttgaggtgttcgtttccttccactccaacgacgagttctggtacaccaatccgtccaatgattacattcaggcgaataacttgtccaacgtccctggcaatggtgcattccgggaagtcgtagctagggtggatggtgaagttgtcggcgctgtttggccattcactgtgatttacaccggtggcgtcaacccacttctatggcggccaatcactgggatcggctcattcaatctcccaacatatgacattgacatcacaccatttttgggcaaactcctggacggcaaggagcatgattttggttttggggtgacaaatgctcttgatgtgtggtacattgatgccaatttgcatctatggttggatcacaatagcgagaagacaacagggagcttgctcagctatgatgctgctgggttggaccttaatgtgaactctgaattcaatgggttagatggacaatttgtgacaagcgcaagtcggcacgtctctgctactggatgggtgaaatcgtcatacggggaggtcaccacaaccttctaccagagattcagatataaaaacagcaatgtgtttagaaagaatggcactgtgcaaatcgtgaaccaaacgatcgatgcaaagtccggcatttttgccaaggatgctactactgtgctgctatctgaggaacttcataagattttcccactgtatctttatactggaaccacagataaagtgggtgatgagtactcgttggattcacttgtcaaattgggcatcaatgagaagaagacctctggtgggaagatgggcttcttgtacagctctctgcagaatgcacagtcggcacgcggcattatgagggtgaagaagaatttagtggtcagtggattggggaagacccatcaggtgtataagtatgtgggaactgatggatgctatttcagggacgtgagcagcaggaactacactgtacttttcgatcgctctggcgattcttgctcaaaaggggcatatagcagggccagcacgaagttgaacaatcagtcagcaagaagaaagttgctggtgaacaaactgtaaagcaagggaaatatctaaattcgtccatgtttcagtttactttgcttctccaataaagattg

SEQ ID NO: 17503 - DNA, 389 bp, Setaria italica
  Peptide Sequence Number=SeqID_83477
actaagagtgtaacagggctgcttgctctttactcaactactgaagttacttttaaacattgggttttgatttttcaataatagggttttaacactgaagttgcatgtccctttcaagatatgctgtatcccatactagctctgctatattgacctagtcctgcctttgtcggtgtgtcttattcaggatttattgtttagttcaggagaaggaaaaaggtgcgcatatgaacttttcttgaaatcgggtctcatattaggcagtgtgcattaatgattgatgccatttctcaaaattctttctatttaactcctatttcttatggtcccgattttgacattgtgtattggtgcattcatatccttcttttagcatttcatattttcat

SEQ ID NO: 17504 - DNA, 1479 bp, Setaria italica
  Peptide Sequence Number=SeqID_83478
acccccagaatccagcacggtagtcataccagtattcgccaggataaattggcccagctatcttcctcagccttcctgacagcacgatcagagatgggatagccattaatgaaaacctttgctctgccattgcccatgccaccattaattttaaagctcttctttatcaggctggagaaaaaagaatcacccgattttgtggccctcgggtggtcaacatattgacccccatcacctggatcttgactgtactcgggatcatcgtactcatcatctgacaggtctagcacgcttgctacaggtacgtctttcactgtgcttggcttgaaactttcagttaacacacccttttcgtgttcagatcgggtacttctgcttcctttgcctgacccgtcaaccactctctctgatggagaatatacaaaatgatcgcgaagaggtaaacttggaacacgggtagccacttcagcatcaggaggaatgtccctagaaccagagttcttctgtgaatttgatcttgctgggctttcatcatcttcagaaatgctggcagaagatgatatgcttcgcattttatctgcttcacttgaatttgagggtagatctttttcctgagagcaatggctgcctacagaaaaactataagacggaagcagtctctcatcggcagtgtgtccattacttccttggccattgttggggcaatttttactcccaggcgataagtgtgaaactggtgtaggtgctgaaacatccagcctgcttccatcaagtctgaccacaattgcatgtgagcattgtattcctactaacttatactcatcttttcccagcgagagagacttcttgggaagctgcaacacttcgtagcaattgtagcatatggtaaaaggggcaccattgacaattggttcacatctctgtgcgggctttttactcagggtggccctcatgtgattgcgtcgcatcagaccattcatacctcttgaattgtagttctgtgcaccaaacatcactggaccttctacagggtacaagctaggattgttcataaggtatggtgccctgcaatggttgaaaccaagtggagccccatgaacaggtaggaattcacggtggtaacaatgtaagcaagagcaagcaggctgatggtagaagccgtcatggtgataagagatcagagggtcaggatcatactgtccatggaaataattatcaaagtttctccatggatatggaccaacagggtagctaggagcccctatgtgtgcgacaggttccccgtatccatgaagatcttgctgtgcagtcattgaaggataagcaggaggtacaccaggtgtgtgcccattcaaggatggtgagcgctgcgagccattccgttgcaactgaggtgaaccataccgcagtcgactcagacgctcattaggattgtaagagcttgcaggatccaccactctacttgtcgaagcacctccc

SEQ ID NO: 17505 - DNA, 419 bp, Setaria italica
  Peptide Sequence Number=SeqID_83479
ctcgtctctgtgacttccagttcagggtactagcccagccgtcttgcggaatgtctgggacttgattcgtctaagttccaatcaagattgactgagtctagcaatcaagatacatctaccatgctgctatctgtaatcgatgatgaagatgagagatatcgtggatgtgaaccactgcgtttatcatgtccaagctgttctggtacctttgactgcccccctgtatctagtctgattactagtgctagtccgacaagtgtatcagattcggatgaagcaaaagatgctactgctaatttctggcgtcgaatgcggtgcccaagatgcccagataacgttgatgattccaggatttcccctcctgtgctcgccaaccagatgaaaagacaggctgataatttcatcaacatgtattataa

SEQ ID NO: 17506 - DNA, 280 bp, Setaria italica
  Peptide Sequence Number=SeqID_83480
gaacagagcccccattctgagttctgacctgagtcgcagctgcaggctcgcagcattgccccacgcgcacgcgcacccgaacatggccgctccgaccgccgctgccgccgccgccgacaccgccaccccgcctcctccaccgtcggcggaacccgcggctgcacccgcaccggatcaaaaggtctctcctcctcctcttccccctcagcccgacgcgcccgcgccgtccccggcgacagcgcctgcagccaccccccgggcctcgcctgccggaaccccc

SEQ ID NO: 17507 - DNA, 750 bp, Setaria italica
  Peptide Sequence Number=SeqID_83481
accatggtttgcgctcaggttatgggtaatcatggtggtgttacagttggtggtgcgaatgggcattttgaactgaatgttttcaagccaatgattgcagccggattacttcgatcattgagattgttgggggatgcttctgtgtccttcgagaaaaattgtgtcaggggtattcaagcaaaccataagagaatttcacaacttttgcatgagtctctgatgttggtgacatctttgaaccctaaaattggctatgacaatgctgcagctgttgcgaagaaagctcacaaagaaggaaccacattaaagaaagctgcattagaccttggagtattaacggaagaagaattccatgagctcgttgtcccagagaaaatgattggcccttctgattgataacccaatgctagctatgtttctagaagcattcatgctgccacatcagagtttcagtggttgcctgtggtgtcagaattcatgatcctggcctaaccgtaaataaagcaaatcaagtttcaaatcattgttagttcctcaccccattggagacatgattttgtacggcccatggtgcctgagaagacaatattcattcgtgttaaaaatagggagaagtgtactttgattaattggaagagatgctttctctttctctctctctctttgacgtcggaacaactttcttatatttaaacctatacattcacaataatatattataatattggatatatggtggcttaaatataa

SEQ ID NO: 17508 - DNA, 447 bp, Setaria italica
  Peptide Sequence Number=SeqID_83482
agaccgcgctgcgatcggggaggatacccgcccgcccactgaaacgtacccatgcaatgcatatccgctccctctctcttccttgccttatgtgagccgagccaatccagttccatcccatgatctcctcctcccccggccggcctcctcgcgtatataaacggggcgcacgcacggaaccctgatcggggccccatgcgttgcaagctgctcgatcgtgccgccgctgcttcagttcggtagatcgtgatgggaggagatgctgcttgcgaggcggtggtgacgctccatggccgacggcggcgaggggaggttgtagaaggagaccgatgtgacggcggctgggtggcggccgggaccgagacgatgtctagcggatcgtcgacgtcgagcctcaccgacgaagaggaggacggcgacggcgcgacgtcgtcctcccggccggat

SEQ ID NO: 17509 - DNA, 746 bp, Setaria italica
  Peptide Sequence Number=SeqID_83483
ccgacgccgccctcgcctggctccgcggcgccgtcgcgggcacggacccctggctcgccgcgcacggcgacctctcccgctgctacgtcatgggcagcagctcggggggcaacatggcgttcttcgcggggctccgggccgccaagggcggcgccgacccgtcgtcgtcccctgccgccaccgccgccgtgcgggggctcctgctgcaccagccgtacctcggcggcgtcgagcggacaccctccgaggccggctccgaggacgacgccatgctgccgctggaggccaacgacaagctctggagcctcgcgctgcccgtgggcgcggaccgggaccacgagttctgcaacccggccaaggccatgccgccggaggccctcaccggcctgccgcgctgcctggtcactggcaaccgcgacgacccgctgatcgataggcagcgggaattcgcgcggtggctgcaggacagcggcggcgtggaggtcgtcgtcagggcggaccacccggggtcccacgcctccgagctcttcgtgccggagagggccgaggagctgttcgccgccatgcgcgagttcctgtccgccgacggcggcgcgcgttgacctggtggcgctcctgttccgttgaagtggatcggtgtgtagtgtgtacgcatgtgtgaccgtgggcgataaaggcaatagttactgtttttatgcgtcgtgctggagaaattatgtcattaatactgtcattatctgtaaaaa

SEQ ID NO: 17510 - DNA, 1165 bp, Setaria italica
  Peptide Sequence Number=SeqID_83484
aataatgggcaatacaggactctgccaccatcctttacaaatggtagacctacagagagtgctcgttatacatttggttcaggggacatgatccatcctcatccaagttcttatacggctgtacgccatgattctgcaaggggcctttctgcttcgaacagagttgacagtgtaggggtaaagcacgacagttctacagtagctgcaaatgacaataacaagagggttcttccatcttttttctaatgggaacacatcaaaatctatgcatccagatgttgctagtgcgacacgcaagctcccaccacttttcgccgatagaaactcacaaagtttgggtgagcacagaatgggaacaaacacgaccaatggaaatgcgcatccttcatcttcaaggatggcaataggaagttttaatgcgagtaatacccagaaaaaggttgatgatgatgatgttattgtatatggaggtcccagcacacatagggtactgccttcatcgttgggtgtcaacaattctaataacagtgaagttaacgcctttgatccacaaggtcgcttgaatccagaaaatagacttttggattctgatgagagagcagtatatcaagaagccctgcagcatattagtcgggaaaaaagggaagatgatctgcctgagggagtgctaacagtatctcttcttaagcatcagaaaatggcattagcttggatggtttcaaaggagaatagctcacattgtgctggtgggattcttgcagatgaccagggccttgggaagactgtgtctacaattgctcttatacaaaaggagaggaatcatcagtctaagttcatgtctgttgattcagatcgcttgaaatctgaagcactaaatcttgatgaagatgatgaaggggaacaaactgtgaacaacgaacccaagaatgaccaaggggctagttcatcgtcaacagctgctggcactagcagtgttgagccatgtgtgagtcaaccaaataatgttccggataaaatggccgcaagcaaaactgaacgcaaaaggaaagctaaagcatgcacatcatccgtatccaccacgcggtccatgacaaggccaactgcaggtactcttgtagtatgccctgctagcgttcttaagcagtgggctaatgaattgacagac

SEQ ID NO: 17511 - DNA, 1222 bp, Setaria italica
  Peptide Sequence Number=SeqID_83485
cgctcttccaagtaatccacacggggcgagcacagagagcagccagcagataattggcaggctcccacgcaggagttttttttacccatgctgctccggctgaagatcgtcggcgtccactcggtggtggtcccgggcggccacgaccatggtgccaccttcgcggcggcgccacggcggcgcagccggagcacggcggccggcgtggcgaggcggacgaggagggtggtggtgaccatggcgctgaaggaggagccggagagcagccgcagcggattcgccggcggcgggccgagctgggaccccgggctggagatccaagtccccttcgagcaacgaccggtgaacgagtactctgctctcaaggatagcgtcctgtactcgtgggcagagctgagcccagggtccttcttcctgcggctgggcggcctgtggatgatcaccttcactgtgctcgcggccccgattgcagccgcgagcttcaatcccggcaaggacccactcaagtttgtgctggcagctgggattggaactttgctcttggtgtcattggtggttctcagaatatacctgggatggagctatgttggtgataggctgttgtcagcagtcgtgccgtacgaagaaactggatggtatgacggccaaatgtgggtaaaaccaccagaggtgttggctcgggacaggctcttgggatcttacaaggtaaagccggtgatcaacctgctgaagcagacgctggtgggcaccggcgcgctgctcgtcggggcggtgtcgctcttcgcgttcgccgctcccgtcgaggacttcctccactccatgaaccaacctccctccgctgcgtcgtcgaagccaagcttgaggagggaggagctgctgcggctgccggtggaggtgatgcaagacgacgacctcgccgcggcggcggcggaggccgccgacgggcggccggtctactgccgggaccgttactaccgggcgctcgccggcgggcagtactgcaagtgggacgacctgctcaactgatgactaggagtattgactactagcacaacaccgttgggatatatccgcagtttgccacttcgatatatgcttaaagacaatgtatctcgtaaggatgaaaattttgtgacgaacttgctggatgtgtaatggatagttcgatccttccttccaaacggtcgaattaacactaaaaaaaaaaaaaaaaaaaaaaaaa

SEQ ID NO: 17512 - DNA, 431 bp, Setaria italica
  Peptide Sequence Number=SeqID_83486
atttgcagtgatatcatagatacctcatcaccatcagcacagtatcccttcaaaaaatcttcacaaacaggtgctttcgagttcactttcacatgcctatagggacaggctgtgttggtacaaagccctcgtagaaagtaagaacaatctggcattcttcaggaagaacctgcaggacagatactcatgatggaaaaaaaaaatcaaaggcatgatcagcagaagaatcaagaagaaatatcttaccttgtgagtcagtttgcagctagtattagaacacaagcctttaagaaatttagtacaaatagccaccttagctcggtcatgaatgtagggacacttgccaccagattttttacactcgccgaagcgagtgaagaattgacaatattgctgcttctttgccaagcgtgttctaacagtgtgcaaac

SEQ ID NO: 17513 - DNA, 1551 bp, Setaria italica
  Peptide Sequence Number=SeqID_83487
ccctcaaagctaccagatcctggtaacaagaacaggagggcacaaccaagacggagctaagttacacgtcagacagcagtacaggtgatgttgaaggctagagagacgccgttcaaacatgagagatggattactttctttggatttctgaccagttggttacctttgttaacacgcacatatctgcttacaaagacagaacaagatttcatgatttttgttcgtagttaagagttttttgaagggatactgtgctgatggtgatgaggtatctatgatatcactgcaaatatatcctggcttttaaatttctatttccagacctttaccctaattggagagtaggtaggtgcatggtttttctggatggatgtagcataaagccattgcttccgcttagttgttagtgttgacaatatctcaagaaaaaaaataatgtaactaatgttttttatgtatatttttctggcatgaaatgttttagggagtaaaaaaatgtcagtccacgcctttttagttccttcaatttggatcatctaatttagtttagtgttgattcttcgtagctaaatagatctgaaagattgtgaatagagtaagcctttttttgggagacctaagctggaaaagcatgttgtctcccactgagaagtgcaagcatggctctgctttaaaacagagtctgttcaccttttaaactttgggatccttagactttacttttacatgttctgaatcacgaccactaatcttttcatggacttgaaacaatctctgttacaagcagtgtcgtaaaaagcacagctatgtatgccctgtctttgaggcaacaggagagtgcccgcaagaatcaagatgcaagcttcatcatcctaagaagaaaatcaaatccaagagaagcagagtagacacactccaaaccaacagttgggcaggtattttgacacaagtattggtcatcgaagaggggcaagggtagtttcttcagaggaagaagagagacagaaacgggagcaagtctctggtgatgacttagctgacttcattgaccttggtgccgatattgaagtcactggagatgtggatacttcagatgacatacagctgatggaattggactcacgaaatctcaagatgcgggctgacaatcttgaagcactaatcaagccacttcggatcatgagaaccgcaagagtttgacaggttctttcattgtactaggtacagctgcagtgttattactgtgtcaaggcgataatgttacactgtacatgaagacttgaagaggctgaggcgctgactggagtttgtatctcttgaagactggcttgtacagggcggtcagtttttgcatggttgaaggtttcattttgttcgtcatgtatatctcttaggaaatatatagggttcatatgcagtggtagagctgtgagagttgcttgctgtaatacctgtgttttttcaacattacccatagttgaatgtaacaaacagtcatttacagttagacagaaagaggtaaattggataatttcctaattaatttttaaa

SEQ ID NO: 17514 - DNA, 1857 bp, Setaria italica
  misc_feature (484)..(484): n is a, c, g, or t
  Peptide Sequence Number=SeqID_83488
ttaagcatcgcttcattttccactaccaaagctgccctcagaatgttggtcaagagagagagagagagagaaagaaaggcccacagcaaagtagtttaagacaaagatgctgtccacgcaatatagttgaaaaagtagtcaccaaagattgtaggcaaagcaatgtgaggtcatcatagaaaatgcaggagaaaggtgttcacatctcaggcttcagaaagtgaagagtggtatactaagtggaatggtcatctgtaagactataactagatatgcatagtttgtccttgaatctttcaattcagttaatgttcatgaacattaactgaattgaaagtagaaccattatatgcaattttcaatcaagttccagcatactagagaattttggcatgttaactaaatagcaacaaattggttaaaaggcacagaagcaagtgttttacataatatgttacctctgtgtggtctgtccttggccacngcccgcatcttgagatttcgtgagtccaattccatcagctgtatgtcatctgaagtatccacatctccagtgacttcaatatcggcaccaaggtcaatgaagtcagctaagtcatcaccagagacttgctcccgtttctgtctctcttcttcctctgaagaaactacccttgcccctcttcgatgaccaatacttgtgtcaaaatacctgccccaactgttggtttggagtgtgtctactctgcttctcttggatttgattttcttcttaggatgatgaagcttgcatcttgattcttgcgggcactctcctgttgcctcaaagacagggcatacatagctgtgctttttacgacactcatcaccatcagcacagtatcccttcaaaaaatcttcacaaacaggtgctttcgagttcactttcacatgcctatagggacaggctgtgttggtacaaagccctcgtagaaagtaagaacaatctggcattctttcaggaagaaccttgtgagtcagtttgcagctagtattagaacacaagcctttaagaaatttagtacaaatagccaccttagctcggtcatgaatgtagggacacttgccaccagattttttacactcgccgaagcgagtgaagaattgacaatattgctgcttctttgccaagcgtgttctaacagtgtgcaaactccatcgaactttctcacttgcaagcatgcggattactttctttggatttctgaccagttggttacctttgttaacacgcacatattcattgcaagttgatggcaccctggaatctgaagatgctctgttgctatttcttaattgattggcagcaacagttgcagagtattgatcattccttcccttgttacggatagactgccgatttctcttttctcttttctttctttcaacctcggcaactgccagcgtagcttcctcattaaccttttgagaatgtttctcaagggaccttgaccatttcaaactcgatccgcctatgcttaacactccagatttccgaagagagaatccatcagtcgacacagtataaatggtacttctcttccttgtttgcaatacttttcgaaccatccccaaagggcttgtattcaacaacgatggataactgcttctgaagttctggcagaacatttttcttttccatggaagtatacgagggaagaccttcatatgactagttcccacaaaagatttcctccgtggatgctgtccactaagtgtccacacgtgagagaaacttcccacagtatttgttgtcttaagagctgcatttagaaaagattacacaaagtggttggaggatgcaaacattagagatttattctcacctgactttatatt

SEQ ID NO: 17515 - DNA, 308 bp, Setaria italica
  Peptide Sequence Number=SeqID_83489
gcgagctctagctgcgaacaaaacaacttcagcaaatccacccgtagtctccgagctcataaacccaaccaaccgacgaaaatgtcgctggttaggcgcagcaacgtgttcgaccccttcgccgacttctgggaccccttcgacgtcttccgctccgtagtgcccgcggcatcacctgaccgcgacgccgccgccttcgccgccgcgcgcatcgactggaaggagacgccggaggcgcacgtcttcaaggccgacctccccggcgtcaagaaggaggaggtcaaggtcgaggtggaggacggcaaccg

SEQ ID NO: 17516 - DNA, 404 bp, Setaria italica
  Peptide Sequence Number=SeqID_83490
gatggcgcccaagcccagcagcacggacgtgccgaacgacaggagcgccgccgtgctccgcccgaacagcgcctgcgcgatgcgcccgccctccagccgcccgatcgggagaaggttcagcgacgtcaccacgatgcccaggagccccgcgaaggccagggggtccacgggaacgcccacgccctccaccgcgttgggaagtacgttcccgagctcgtcggcgtaggggccgatcgccacctgcacgaacgacagcagcgggttgttgtagaagaactccggccgcacgaacagggcgttctcgccgccgttgaagctgccgtcggcgatgaacgcggagacggccagcacgacggacgtgatgtacgcgctggccgtgcgcgcgacagggatgtcgaagaggg

SEQ ID NO: 17517 - DNA, 437 bp, Setaria italica
  Peptide Sequence Number=SeqID_83491
tcttaattcaagccacacaatttacataaatagttagctcattggccatgcatagtgtagagtaagcctatcaagtagaaataattcatgagtagaagatggtgattatgcacaacaatagacaggtcctgatcaaacaggaaacaacacatggatatggtagcattagatgtctcttccgtatgcaaatgacaatgcagtatttccagttcgcttattctatactgtcccgtttgaaatgatttgcatgtcctggtcaaggcatggattacaaacaggtgccaagcaagaccttatacaattcaacagtggagacacacatacaaaggaatgcagaacatccaatccacagaaatttaaaggctagcacatgacttgatcaaaatgaggcccataaaaatatgcaatattagttgtgtacctttaggagccatttg

SEQ ID NO: 17518 - DNA, 1035 bp, Setaria italica
  misc_feature (971)..(1035): n is a, c, g, or t
  Peptide Sequence Number=SeqID_83492
ggccggtcccgcaccccgccccttccgcccctctctgggcctccctctccctggtcgacggggcggcccccggctccgtcgagcccgcaccggcgtggcattccccaccgaggcctccgccgggcgccgcctcctcggcgtcggcctccggaagaccagcgtcctcgggctcaagtccatcgaagtctacgcgttcggcgtgtacgcggatggcaacgatttgaaacagcagctggaggagaagtaccagaagttctcgggctctgaactgaaggaaaatgctgagctgatcaatgatgcgctagagcacgacatacggatgacggtcaagctgcagattgtatatgggaggttgagcattcgctcagttcgcagcgcatttgagaagagtgtgggaagcaggcttcagaagtttggtggacaggacaccaaagagttgcttcagagctttgttgcaatttttaaggacgaatacaaattaccaaagggttctgtgattgaactttcaagggaatcaaaccacgtgcttaaaataagcattgaaggcgaggaagtggggaacatccagagcaagctcttgtgcaggtctctctttgatctctacattggagatgagccctttgacaaaaacgcaaaagataatgtccaagaaaatatagctagcattcttaaaagttaaagctgtttatatctgtgcccaatgttcttttctgtttgcttctatttctggacttgaacctccttgcataaaggaggcagaatgaggagctgttgggcaacccaaatacatcaagaaagtctgggcatccatgccgggttgaatcctgttgttcagattaccggtaggtgtatattctcgtagcaacaccgagtctaaaaagagctgcttgtaggcccattttgctgactgatgggcagatttccggatggtacctcgttagttctctgctgcctgctgggctcgtagaaannnnnnnnnnnnnnnnnnnnnnnnnnnnnnnnnnnnnnnnnnnnnnnnnnnnnnnnnnnnnnnnn

SEQ ID NO: 17519 - DNA, 240 bp, Setaria italica
  Peptide Sequence Number=SeqID_83493
ttatttgggccatggttcttgtgacgaatggtggtctatttatagcaggatggccagtataccgccaaggcgctatagtgggctcgtgagggttcacgacaatgctcttccataccgatacggctctacagtgttcacgtgatgctcggtctgatcttcaagtactgatgagcaatactcccgtgaagttgcttagatggtgcagtactcccgtgagcaggcatctttgtcgcttacgta

SEQ ID NO: 17520 - DNA, 1383 bp, Setaria italica
  Peptide Sequence Number=SeqID_83494
agcaatcagatttgagatttgtttgatactacgtggggagcgtgaaaattagttgcaaaacttgtcgtagcacagttccaacgaatcgacaggttttacacaaacagaaacacatctctgctagagttcatacatggcaaaaactccacccacagggtgcaggaggccaaacaactacgagtctttcttgggcgccttcctcttcatccggctgaacggccccaccgtctggtccatgatgtacatgtagatcacctggctccacgacctgtacgacctgaggctgtcgtagtactcgggcgcgatctccttcaccttgtgcagcctggtgccggggatcctcgggaagtcgtggtgctcgttgtggtaccccacgtgccatgtcatcaggttcaggggcccgtagtacgagtaggtctcctggtcggggctgaagacgtagtgctccgagatgaagtggcccgccatggggtgcatgccgccgccgacgaacgtcgagaggatcaggtacgccagcgacttccagccgtagaggtagaccaggccggcgtcgagcgcgacctggatggcgaggttggtgaactcccacagccctgggggcttcggcttcaggaagagcggcctcagcgcgtagaagaagagctggagcaccacccaaacggatttgctgacggcgttcctcacagcgtgcgcctcggcttggctggggacgtccatgtcgatgccatccacgccttggaaccggtggtgctccaggtggtacttttggaatgttatggacatggggactccgatggggaggtttgcaaagatgcctagccagcgattcagggatggggttgtgaaggcgaggttgtggctcagttcatggattgcaaggaacaggttgtggtttagaaaggagccgaagaagtaggcgactgtcagaagcttcaaccagctggcatctcggaggaatgtggcagtccacagctgaagtgaaacgaccacagcaatcttgaggaaggcccacggatccgggccgaagagctccttgatctgcgggtacttggccaggatctcccggcggcgcgacgcgtgcggctcgtccgtgtacgaccagaagaagtccgttgccatcaccccttcgtccgcctccatccccgcgcccattgctccctcccctccctctctccctctggccccgcgaatggcggcggttcgcgggcgcagcagcggcaatggcacggggtggcggccgaatgcgggtgggtggattggattcgtcgcctccttttcccacgggcggcgcgaatcctgtgtgctatctttgctgatggaagtatctcccgtcccgtctatgggtgggaggcgtgcagcggcggagggggtgggagagatttg

SEQ ID NO: 17521 - DNA, 1507 bp, Setaria italica
  Peptide Sequence Number=SeqID_83495
cagatcattacgatattaaaattagtatagatatgtacatagccatgcagtcattaattaatcaatttacagtcatttattgatgcttctctagtcaaattcactcaaaaccatagtctttactatgttgcagggcccgtgatgtccaagtttactactgctttcagggagctcggaacatacaaggaactccttcgttctcaggtcgagcatatgcttagtgatcgtctgtcacagttcattaacatggatttaaatggtgtgaaggattgtcggcgacgtttggacagggctgcagtggcttatgatcaggcacgtgaaaagtttgtgtcagtgcgaaaagggactagagcagaagtcgtgacagaacttgaggaggatctgcaaaatgccaagtcaactttcgaaagatgtcgctttaacttagtacatgccctcgcaaacattgaagcaaaaaagagtatgagttcttggaatcaataagtgcagtgatggatgcccatttgagatattttaagcagggatatgagctactgggtcaaatggaaccattcattcaccaggttctaacatatgctcaacaatcaaaagaaatggctgtaagtgagcaagataagcttgcaaagagaattcaggagttcagaactcaagaggaaatagcaaatgtgagaatggctagcaacgtagacacgtctactagcggtgatggtatccatgttgttggtcttcagtcctacaaaacgattgaggccttgatgcactcaactgccaatggcgaggttcaagttattaaacaaggttacctatttaagcgccctcaaaatacccgaggagaatggaagaggagattttttgtccttgacagccatgggactctgtactactatgggaataagggaaagtcgcaaggagtggcatcacagcaaacagctggtgaaggagccggtgtttttggtcgattcagattcttgaaccaaagagcttcatctcagggtgaagattcaatatcatgtcatacaattgatctcagaacttcaacaattaagattgatgcggatgaaaatgatttaagattttgcttcagaataatctcacccattaagacattcatgttacaggcggaatcagtggctgatcaaaaggactggatccagaaaattactggagttattgcatcactactaaactcaccattcccacagcagctgtcatatggtaatccagcaacagaaagtaacagatccacgagttctgttgattctttatctattgaagataacaagagttcagagggacatgatgatatattcaaccttctgaggaatattcctggaaatgacagctgtgcagagtgccgttctccagatcctgattgggcatctctaaacttgggtattctatttgcattgagtgctctggggctcacaggaatcttggtgtgcacatttctaaaggtttcgtattcctttaagtatttagtattgttgtaaagttctttgggttagtt

SEQ ID NO: 17522 - DNA, 1509 bp, Setaria italica
  Peptide Sequence Number=SeqID_83496
atgaccaactctggataatcatagtaataataaagaaattatgcttggtctgcctagtttgactccattttactgcgttttacatgtacatgtatatgttcaatctattgataattcaagctatggtactaattttgttataactcaccattcccacagcagctgtcatatggtaatccagcaacagaaagtaacagatccacgagttctgttgattctttatctattgaagataacaagagttcagagggacatgatgatatattcaaccttctgaggaatattcctggaaatgacagctgtgcagagtgccgttctccagatcctgattgggcatctctaaacttgggtattctgatttgcattgagtgctctggggctcacaggaatcttggtgtgcacatttcaaaggttcgatccttaagattagatgtgaaagtctgggagccagtaattatggatttattccatgcacttggaaatgattatgctaattccatttgggaagccctacttccaaaagaagatcaaggaatggacgaatcaaatggagctattcttttcattgaaaagcctaaacctagtgatgctttttcaataaaggagaggtatatacaaacaaagtacgtggacaaacttctttttgccagagacaccgatcaggttaccattgatattttggaagctataaggacaaatgacgtgagaggagcatatcgaattcttgcaatagctgaagtgagtgctaacatgacatatgatgctttgagcaaagatgtccatcatgttcagccagtgacagacaagagtttacttgatccggtttcttgtgagataattagggactccgggaaaccagaaggttgtttacaaggttgttccttactgcacttcgcgtgccaatatggtcatccagtaatggtggagctgcttctactttttggtgcggatattaatatgcaggacttccatggacgttcaccattgcatcattgtgtccaaaagaaaaatgatgatctcaccaagcagctgctgaagaggggtgcaagaacaactattaaagatggtggaggtctgactgctttggagagaagaatggagcttggagctataactgatgaagatttattcatattatttgtgaggtgatgttgcgagaacaatacagggatgtagcaggtgatgttgcgagaacaatacatggatgtagcaactagccatctgtacctgttagcattgtaccacctaatttagtttctggaatgaacacgatttctacaccttaagacaaatgacttctaccttaccatgatacatcttatctgacttctgcacttggctatgtttgactgtaaattctattgttccacgtgaccacatctctggtctgtacaacaattataggcaatatacgataatcattcctctgaatgtgattgttgaggtttgagtttctgatgtcaagcatataggaacacaataaaaaaaaaagaaaaaactaagaagaac

SEQ ID NO: 17523 - DNA, 496 bp, Setaria italica
  Peptide Sequence Number=SeqID_83497
attccaacagttgtttggcaacctcccgaactagggcaattgggaatgagcggtaattgtttttccgcagaaaatcatataagcttggtccaagcctctcaaagacaatacagatatggttacgatagtcaaaccagttccgaatttgaacacaactggatctactttcatcgtatttaccaagctgctcgagcatgccaatttctatcattgcagcatccctgtacttcttaatgcccctgatgatcttgatagccaccatttctttcctttccctatcccaacactccagcacctgaccaaaagtaccttcgcccattttcgcattgatcttataacgaggtgtgagattatctccaacagcaaaaacataatgcccaagtctagtgcaatctctcagtggaggggaaccatcacgaggctgcccttggttaagctgagaggaaacaataccacccgaagagagacccaacgccactgcacttatggcattcac

SEQ ID NO: 17524 - DNA, 467 bp, Setaria italica
  misc_feature (376)..(376): n is a, c, g, or t
  Peptide Sequence Number=SeqID_83498
agccagatgttccaagttttcatgagtctggaatagtgcctctcccgtgcaaagctcaacaagaatacaaccaacactccagatatcacatgggtaactccatccaagtcctgaacagaagatccacgcaatcgtaaaaaggtaaccaaaaaagggctcaactaggataagcttttcactagacaagatagatacccagtataacttctggagcccggtaatgcctagtggataccacataactctgatcctgttggtcataggtagtgctaccaaaatcaatcaccttgattgcactagacttgggcagccgtttgtaataggatccctcctttggggatcgggatgaaacctagcaattgaccggaaaaaaacncaatcagtacaatatattactgtcaaacttagccagtacaccagaaataacaaggcacagacaaaaggtaagcatggctagatcaattaag

SEQ ID NO: 17525 - DNA, 618 bp, Setaria italica
  misc_feature (6)..(6): n is a, c, g, or t
  Peptide Sequence Number=SeqID_83499
tactanactagaatacaataacttacaagacaagacccttagacaaaaggtcaatcaaatcaccggcagactgatccacattttgcatcaccagattctggagcctgggcagtttcatcacagctttcatgctctcccgtgaagtgcaaccctccggccaattcagacgtccttttctgatgtattttctcagattggcgatctgccctcttaagcatatggtatggcaaaggtccaaacaccctctccatcatagccagatgttccaagttttcatgagtctggaatagtgcctctcccgtgcaaagctcaacaagaatacaaccaacactccagatatcacatgggtaactccatccaagtcccagtataacttctggagcccggtaatgcctagtggataccacataactctgatcctgttggtcataggtagtgctaccaaaatcaatcaccttgattgcactagacttgggcagccgtttgtaataggatccctcctttggggatcgggatgaaacctagcaattgccggaaaaaacacaatcagtacaatatattactgtcaaacttagccagtacaccagaaataacaaggcacagcaaaaggtaaagcat

SEQ ID NO: 17526 - DNA, 677 bp, Setaria italica
  Peptide Sequence Number=SeqID_83500
gtaccaaacaccctctccatcatagccagatgttccaagttttcatgagtctggaatagtgcctctccctgcagaaccttggtaactcaaatcccctgtacttgtggtacatggctaatcaaacaaggcccaataacataccgtgcaaagctcaacaagaatacaaccaacactccagatatcacatgggtaactccatccaagtcctgaacagaagatccacgcaatcgtaaaaaggtaaccaaaaaagggctcaactaggataagcttttcactagacaagatagatacccagtataacttctggagcccggtaatgcctagtggataccacataactctgatcctgttggtcataggtagtgctaccaaaatcaatcaccttgattgcactagacttgggcagccgtttgtaataggatccctcctttggggatcgggatgaaacctggatctactttcatcgtatttaccaagctgctcgagcatgccaatttctatcattgcagcatccctgtacttcttaatgcccctgatgatcttgatagccaccatttctttcctttccctatcccaacactccagcacctgaccaaaagtaccctgatgtattccagagacacgttcagttatgggcataactcccaggagttatgtatcaatggtttcagaagatg

SEQ ID NO: 17527 - DNA, 856 bp, Setaria italica
  Peptide Sequence Number=SeqID_83501
acaaaatagttaagtacaaaacaagggaatagttgttgaaaggaataatcatcttcttcgctcaaatccttctgtgaagaagggatgactcagtgcttcctgtgctgtatgtcggtctgctggatcatacttcagcagcccttgcaaaaggtcaatcaaatcaccggcagactgatccacattttgcatcaccagattctggagcctgggcagtttcatcacagctttcatgctctcccgtgaagtgcaaccctccggccaattcagacgtccttttctgatgtatttctcagattggcgatctgccctcttaagcatatggtatggcaaaggtccaaacaccctctccatcatagccagatgttccaagttttcatgagtctggaatagtgcctctccctgcagaaccttggtaactcaaatcccctgtacttgtggtacatggctaatcaaacaaggcccaataacataccgtgcaaagctcaacaagaatacaaccaacactccagatatcacatgggtaactccatccaagtcccagtataacttctggagcccggtaatgcctagtggataccacataactctgatcctgttggtcataggtagtgctaccaaaatcaatcaccttgattgcactagacttgggcagccgtttgtaataggatccctcctttggggatcgggatgaaactttgtaatcaggcactttaatgtactccggagaaacaagaagaatgttctcaggctttaaatcagtgtgtatgaggcgcaattcatgcataactgcaacacattacagagagagggtaaatacataaacatccaataagaatagttaagaataattacggaa

SEQ ID NO: 17528 - DNA, 492 bp, Setaria italica
  Peptide Sequence Number=SeqID_83502
tgatgatcttgactagccaccaagttatgtaccaaacaactaccaagacaactccagccaaaagtaccttcgcccattttcgcattgatcttataacgaggtgtgagattatctccaacagcaaaaacataatgcccatccttatcatcttctctcagtggaggggaaccatcacgaggctgcccttggttaagctgagaggaaacaataccacccgaagagagacccaacgccactgcacttatggcattcacaacttcttggccacaaagtccaagctgaacctgatgcatctcggcggggccgacgtcccaccccagacgctgccgcttgcgcgggcggcggtccagaggcgcgcgcggcatctcggcgatgcactccatggcaggacggatctagtctctcccggaacgaacgaaccctcgagtcggcggctagccggaggcggcggcggttggcgtgcgggcgaggaacacgcaacgcaattgcgac

SEQ ID NO: 17529 - DNA, 1772 bp, Setaria italica
  misc_feature (1720)..(1720): n is a, c, g, or t
  misc_feature (1757)..(1757): n is a, c, g, or t
  Peptide Sequence Number=SeqID_83503
cttcatttcaactacgtacagactgatctacatatacagatgctctatagttacaaaaagaaaagaccaactgtcagctaaatacgaagccaaatgttagtcaaacagggatgttgttgaaaggaatatcatcttcttcgctcaaatccttctgtgaagaagggatgactcagtgcttcctgtgctgtatgtcggtctgctggatcatacttcagcagcccttgcaaaaggtcaatcaaatcaccggcagactgatccacattttgcatcaccagattctggagcctgggcagtttcatcacagctttcatgctctcccgtgaagtgcaaccctccggccaattcagacgtccttttctgatgtatttctcagattggcgatctgccctcttaagcatatggtatggcaaaggtccaaacaccctctccatcatagccagatgttccaagttttcatgagtctggaatagtgcctctcccgtgcaaagctcaacaagaatacaaccaacactccagatatcacatgggtaactccatccaagtcccagtataacttctggagcccggtaatgcctagtggataccacataactctgatcctgttggtcataggtagtgctaccaaaatcaatcaccttgattgcactagacttgggcagccgtttgtaataggatccctcctttggggatcgggatgaaactttgtaatcaggcactttaatgtactccggagaaacaagaagaatgttctcaggctttaaatcagtgtgtatgaggcgcaattcatgcataaatgctatgcattccaacagttgtttggcaacctcccgaactagggcaattgggaatgagcggtaattgtttttccgcagaaaatcatataagcttggtccaagcctctcaaagacctgctcaccattaatccaaattcaccaacgtttaagcaccatagggggtatctctttgggtcagttcataattaccataatctaacaaagtacttacaatacagatatggttacgatagtcaaaccagttccgaatttgaacacaactgcaaaatagaccagcttatatatacaagcaatcttatgaatgtaaagcgcacggaagagtgctaactgaaccagagactaacctggatctactttcatcgtatttaccaagctgctcgagcatgccaatttctatcattgcagcatccctgtacttcttaatgcccctgatgatcttgatagccaccatttctttcctttccctatcccaacactccagcacctgaccaaaagtacctgatgtattccagagacacgttcagttatgggcataactcccaggagttatgtatcaatggtttcagaagatgcatccatccaaactgaccttcgcccattttcgcattgatcttataacgaggtgtgagattatctccaacagcaaaaacataatgcccatccttatcatcttctctcagtggaggggaaccatcacgaggctgcccttggttaagctgagaggaaacaataccacccgaagagagacccaacgctgaagcgcggaggctgctccacaccctcaccgctcgcgcgaattccgaggcgccgctccgatccgccctccccaccgcgaccgcgcgtctccctagggttagggctccgctccctcgccctcgcactcgccctcgccctcgtactctcctcctcccgacgcggccccccgngcgcgcccgccacgccatgagggtccacccggcccgnggaagcggaccatcg

SEQ ID NO: 17530 - DNA, 1608 bp, Setaria italica
  Peptide Sequence Number=SeqID_83504
tccctctttccgtccgttactttcttagtttttttgtttttttgtttttagtttttatttttaaaaattgtatattaccatctactcatattttgtcacaaacaaaactttcgaccaaagacaaccaaaaatcaaactacatcaggatttgggggtcaactggatccatttgacatcccttatgatacaacttcatcagttgacactgtttcaaacaacgattgagacaacttcatttcaactacgtacagactgatctacatatacagatgctctatgttacaaaaagaaaagaccaactgtcagctaaatacgaagccaaatgttagtcaaacagggatgttgttgaaaggaatatcatcttcttcgctcaaatccttctgtgaagaagggatgactcagtgcttcctgtgctgtatgtcggtctgctggatcatacttcagcagcccttgcaaaaggtcaatcaaatcaccggcagactgatccacattttgcatcaccagattctggagcctgggcagtttcatcacagctttcatgctctcccgtgaagtgcaaccctccggccaattcagacgtccttttctgatgtatttctcagattggcgactacatgcaaggattaatgagcacacaacattgaccagacctcacaacactgaagctcaagactatattgatatggatcatagacatgaacatactctgccctcttaagcatatggtatggcaaaggtccaaacaccctctccatcatagccagatgttccaagttttcatgagtctggaatagtgcctctcccgtgcaaagctcaacaagaatacaaccaacactccagatatcacatgggtaactccatccaagtcccagtataacttctggagcccggtaatgcctagtggataccacataactctgatcctgttggtcataggtagtgctaccaaaatcaatcaccttgattgcactagacttgggcagccgtttgtaataggatccctcctttggggatcgggatgaaacctggatctactttcatcgtatttaccaagctgctcgagcatgccaatttctatcattgcagcatccctgtacttcttaatgcccctgatgatcttgatagccccatttctttcctttccctatcccaacactccagcacctgaccaaaagtaccttcgcccattttcgcattgatcttataacgaggtgtgagattatctccaacagcaaaaacataatgcccatccttatcatcttctctcagtggaggggaaccatcacgaggctgcccttggttaagctgagaggaaacaataccacccgaagagagacccaacgccactgcacttatggcattcacaacttcttggccacaaagtccaagctgaacctgatgcatctcggcggggccgacgtcccaccccagacgctgccgcttgcgcgggcggcggtccagaggcgcgcgcggcatctcggcgatgcactccatggcaggacggatctagtctctcccggaacgaacgaaccctcgagtcggcggctagccggaggcggcggcggttggcgtgcgggcgaggaacacgcaacgcaattgcgaccgaac

SEQ ID NO: 17531 - DNA, 336 bp, Setaria italica
  Peptide Sequence Number=SeqID_83505
gccttttacttaagtggatgagtgcgtccgtgcatggattatccaatgacagattactgaaaacaaattagtaatctttagaacaagtagaatttgaatttgctgtttagttgaaccgggtatacttccaagtgactgcttaattacagctagctttgtcttcttgtcttgtgttacctgaatttttgttcaactgaaggtagggtagctttaataggaagcaccagcaagttcttttcttattgttcacttttgctaattgcattgtgtgtttctgggcttctagcaattaatcctgcaataatcatgccccagtttgtttactaagagacaact

SEQ ID NO: 17532 - DNA, 1158 bp, Setaria italica
  misc_feature (919)..(919): n is a, c, g, or t
  Peptide Sequence Number=SeqID_83506
ggtcttttcacatatacaggtggcagggttggcatgaaagtcgcctcttcctggtgcgatttccatgggctctcccatatatcctttctggattattcgcacctgcgcggagaatgcatcccatgacatatttcccctcttcataaataagggatagagttgtttagcatttggccggattgttcgcttgtggccaaaatatctccttcgcccagacagaattttggccatgttaccaatgttgttagccacaaaagcatcactttcatcacagacaatgaaatcgattgcagccatgcgagatgagaacttcaagaatggagcaagctcctcttggcttgacagtgattcttttgtatggaaattgggaaaaagcgctttgaggggtgctaaagtatcatcccctccatatatctcaccagaagcaacataaatgtggacatcacttctgtagcctaatgccctcaacatcagccctacctcctcaggagttagtggacatctaccttgccttcttcctttctccgggtcacgtatatgcaaggttctccatcgtctacgtattgcagctaattctctcctctccttttctccaccaccataatagcacccagaaaaggcgagcatatcaggttcaaatctcaggtgaagagcaataaaatatctgctcttttcccgcattcgctgtattagctttttacccaattcttgtatctgatcagtaaatctcaaagcatgataattgactctgcaacgcagtttttgcaggtcggtgtccaacttatttgagagcctatagtcatatttagtcattcgaataacatgcttcttcagaagtgccggtaagacacggttcaagtaacaccgcggagtacattttcgggggacacgcattttataaggtttcatggctttaccncctttttctggaggctcttttataattttgacatcctttgcaagaaatgaaatgaaccagtccatatcaaagatttctgaaaaattgcttgaatctttccagaaagatgtttgatccagtttgggaacaacaagtgtagcgttcaaaatacgtgcagcaactacagcgtcaactattcctgttctctgctgattgagacctccacttgtaacaacaatcaagtatcgctctggctgtgt

SEQ ID NO: 17533 - DNA, 657 bp, Setaria italica
  Peptide Sequence Number=SeqID_83507
ccacgcagcgcctgtcgcaccggcaccggagaacgacgaggagcacaacaaggcagagccagaggcagaggaggagcaagacgagtccatcagtttggacgaggcgtacgcgctggcccggcggctccgcgcgcaggagctagcctcaccgccgtcaccgccaccggctcccgctaccgcaacggtgacggcgcggacgaagaagccagcgaggaaggtggtgccggatgggatcagccggcggcgcacgaaagcagaggaagcgatggagggtaaggcggagctgaacgcgcgcgcggagctcttcatccggcagttccgggaggagctcaagctgcagcgcctcaactccacactcagctacacccacgcgctccgctcacccacggcggcgcggtagccgccggcgtgaccgcctccgcagattggtcggatggcttgatcagtatgctctgttcgagtagaatagatggagtcatttgttcagacggacatgtgcgatcaagcacacacagttttggattattgttttttctttagtgtataacatcttgttcgcccagctcagaattacgactatgagtatctccagcagtcctccgataaatgtttcacaataactagttaatagagatatcacttctaataaaaaaaaaa

SEQ ID NO: 17534 - DNA, 309 bp, Setaria italica
  Peptide Sequence Number=SeqID_83508
ccccccctccccccctctccaccgccgccgccgccgccgccgccgccatggtggcgctcgcctccctctcgtctctctgcccctgcggcgtcgctcgtcgccgcgccgcctccgcctccgcctccgcgtctgcctccacctccacctccgtctccatctcgtgctgcgcggtcgcgatcccgtcctccgggaaagggcctcaggaatctagaacaccgcggaaaaagttgagaagaaccgagggagccactaaaagcttggaagattcagtcaagcgaaagctggagcagttctatgaaggggtgatgg

SEQ ID NO: 17535 - DNA, 349 bp, Setaria italica
  Peptide Sequence Number=SeqID_83509
tacaaacaacgtcatacaagaatgctggtgatgtcctccgtggggctgtcctgcagccaaagcgtgcggtagacgaggtccgacttgaagtactccgggcagacgaatcccacgcagttgagtacgtgggtgatcccgttcttccgaaggatgtcacgattcttggcgacggcatcccctccaaggtagacatgctcggcgaccttggagcactccttgtcgaagaaagcgatctggtccttgcggccctgcatccggagcgaggaaaggtccagccggaggccctcagagccaatccttttcccgaagttacggatccgttttgccgacttcccttgcctacatttcg

SEQ ID NO: 17536 - DNA, 374 bp, Setaria italica
  Peptide Sequence Number=SeqID_83510
cctccggtggctggacgcgcagccggaccgcagcgtcgtgtttctctgcttcgggagcaggggcacgttccccaagagccagctcgaggagatcgccgtcggcctggagaaatccgggcagaggtttctctgggtcgtacgaagccctcccggcgccggcgaggcactagacctcgacgcgctcctgccagccgggttcctggagcgcaccgagggcagagggctcgtcgtcgggtcctgggcgccgcaggtggacgtgctgcgccaccgcgcggccggcgcattcgtgacgcactgcgggtggaactcgacgctggagggcgtcacggcggggctgccgctgctgtgctggccgctgtacgcggagcaggaga

SEQ ID NO: 17537 - DNA, 1214 bp, Setaria italica
  Peptide Sequence Number=SeqID_83511
gccgccatcactcggagctttgccggaaagagaggggcgctggagataacgcacgcgcagccaaacacgacaccaccgagcgagcgggcgagcacctgcgagctcctccccggagctgcacctagttagaaagggctagctgcgtgtggtcgatcggcatgggcgacggagcggcggccgtgccgaccagcaggttccgcacgatctgcgtcttctgcgggagcagcgccggccaccggcaggtgttcccggacgccgcgctcgagctcggccacgaactggtgcggaggggcatcaacttggtctacggcggcggcagcatcgggctgatgggcgtgattgcgcggacggttgatgctggtggctgccatgtccttggggtgattcctaaagcgctcatgccaatcgagatttcaggtgatagtttaggaaagtaggttgtagctgacatgcatcagaggaaagctgagatggctcgccaatctgaagccttcatcgctcttccaggtgggtatggaacaatggaggagttgttggagatgataacctggtgccagcttggtattcatgacaaaccagttgggttggtgaatgtggatggttactatgatccgctgatcgcgctgtttgaaaaaggcgcaacagagggtttcatcaatcctgactgtaagcaaatattcgtttctgcgccaactgcaagcgagctgctgacaaagatggagcaatacacccggttgcaccaggaggtagccccgggcacgagctggttatgtccttgaaggcggcgcacgggaaaggctacgggaaaggcggcgcaccggcagcactccatctactgaacctgaaccgaagctctccactgatgatgcatttgttttcccccgctatgtccttcaagtccccaaaaccactcaactaggtaccggcgatttcttgtctgaatctatcaagaaatcgacccctactcgtcgccattcgcaattcgaagtttgattgctcggttatgtaagctactgtcctactcctctttcggtgtgtggtccttgtggaaacggaatctggccggggcagcacgaaagcagcagctcagctccgtcctgccccggcgacggacgtcacaggtgagcgaccaaactgattgggcttgtactcattgctggagcctttcttttaggttaaaaaacgatgatgatgtgaagaataggaataaaata

SEQ ID NO: 17538 - DNA, 644 bp, Setaria italica
  Peptide Sequence Number=SeqID_83512
atgcatgagccacataggccatgaaaccatgtatgtttcaaactccattagatcgtaaacttagctaaacttcgagtaatcaccgtagaattgctcttcactgtccgtctcctgctcgatttaagcacaaggtccgccattgtgcatgaactgtagtgaagtcgagttcatgcgtatgttttgaatatcttcttgcatgtttcagttcatgtgagtgccctcattaaaagtttggagctttattttttttctgaagtactatttgtttgatcacaacaaacgttttcttttcattaatcaggacacgtgaaaaattgtaagctggatagctttagtgattaatatgcttagggttcctttttttatatatgaacatagttctaaatagcgggctaagaaggtttagcagttggattctaaaacagctaatagccggctatgaggctatagtgggcaatagcagctaaattatacgcgagcacaaatagcggtaccggagctatagccggagtttataaccttgtatatgaaggatcttaagaagaattcaaggttataataagcttcctatatattgataatgagaacccaaatagttttcaaatatgctttgttcagatgtagacatttaatattcttcagtt

SEQ ID NO: 17539 - DNA, 1995 bp, Setaria italica
  Peptide Sequence Number=SeqID_83513
cccacggtatgtgggctaatagtctgaaagctgatgattatcaagctctcctttgaccgtggatggaggagatcaggttgttttctctacaaaacctgagatggaacgaacatgctgtccctcgtatacgatacgcttgaaggcaaatgatttcatttgttccaaagagcatggtcgtgtacttaaaaagatgcaaaggttccttgatggtgaacttgatccacaggttggaattccacaatgtaaggcaagccctacaaaacgcacgctcagtgaacctttgaattcacctacctcaaaagtatccaaggtatcaacaaatgagtttcaagcagccacatgcccaaatttcttgaaagaagatgagttcatccgttgtttgtcaagtaaaatcaatgaggcaatcgatacatgcttccaaggagggatactaggttctacggttcaactcccaaaagctgttgtgaagactgttaaacctcaggtcaaaaagaaagtaggagaagcagcgcaagagcataaagtaggaggagtgatagatttggtgtatacatgcaatataagtttccagatagtggctgcagttcgacgtgcattgcctaaagaaaacggtgctaatcaaactgaagtactagcagatctttctccaaattctgttgcagaaaagctggccatgacaacggaatgtcttggaggactatctggttttgaagtaaaggcttgtaatgggcatcttaatttctattctgccaccaatccagcaatgcagaaccataccggtgttgtacctgctcaagcttcagacgactctagtaggtcaaagcagagctctgtgaacaaaatttctgcaaaacaacctcaaaaaggaaaagcctggagattaggatgagcacatctcattttgatcctgaggagtttgctttgtaccgaaagtatcagacaaaggtgcataaggagaagacagttacggaaggctcgtacaagaggtttctagtagatacaccaatcatatttgtccccccaaagagtggtgatgatacagttccaccatgtgggtttgggtcttttcatcagcagtacaggcttgatggaaaacttgtggctgttggtgtagttgatatccttcctaaatgtttgtcaagcaagtacttattctgggatcctgaccttgctttcctatctcttggaaagtatacggctctgaaggaaatagattgggtcaagacagcacaggaacagtgtcccagccttcagtactactatcttggttactatatacattcttgcaataagatgagatacaaagctgcttatcgaccatcagagcttctgtgtccagtccgttacgagtgggttcgctatgatttagccaagcctctaatggacaagagtcaatattccattctatctgattatgctacaatgcaagatgaaaccccccagcctcagatctgtggcccttcagatgactcttcagcaaaagttgaccatcacgaatctcccagcgatgaggatgatgaagatttcaacgactatgaatcagaaatgatggttgatgaagagttagttgattcagagaaagcggatacaactgagagtgattccagcataaaggacattgaaaatatcaccctagacctcaatggttctaaagttaaatataaggaccttcagcaagtgtttgggccaatcgagagggtacacctcaatgcgctagacgggcaactgagcagatacgccaaagttgttgggaaggagctatctgatcgaatggtgtattgcctctcttgatatgcagccgtgcccgagaggctccgtgagctatgaaaggtgaccgtgagagagtcgtactcgatcattcagaaagaaaagtccaactcggtactgttgcagtgttgcttatgcccaccggctatttcttgtaaaagatgcgaagagctcacagtcgatgctgccatgacacattgtctaggtaaacaaaaaaaaaaaaaaaac

SEQ ID NO: 17540 - DNA, 875 bp, Setaria italica
  Peptide Sequence Number=SeqID_83514
gcgggatttggcggggcctcgtgttctggtggacgagacgatggttgggttcgctgggaagaggaaggaactggagcaggtggttgacggcctctccgacttctccctctccggccccgccgccaagagccgcagattggatcctgggctcccacctattatggaagaagaaccaccagctccttccatggcatttcagatgctgggagagaaaatcaatggtgttaacatgcccagtgtagaagtcatgatggaaggtgtaacgtcacatcatgtgcctagtgaggacatggcacttgttttatacaaaccggtggataaccctggcatttcaagctcatcattcatagtcagttcagacttgatacgtggtttaaagagccatgctttcaatcaagtgaactatcatgagctggaggacgaatctccggagcgtagcaacagcttggctctagttccttggaaaccaccacaaatgcctgtaagatctgactgggttgctgctgagccagagagcacgcaaaattttgaagtgcctatggaggccgatgagactgaagtaacttctatggattttgaggaagcgcctgaaccaacttccgggggtttcgatgctgagaacgttcaccagtggcaacattgcatgaccccgccgtcattaccaaatccatcagcccatgttatgtggtcaaggtgacaagaaccgggaggccctgtatactgtgtattaagaaatcctctaataggcttccaggagctgtgtaggaaaattgagtatgaaattgagtatgcgtagcatgatacttcagggcatatgctgatcttcccggttaatgttagtgtcggttgactacttgttacaggaaaaaaaaaaa

SEQ ID NO: 17541 - DNA, 302 bp, Setaria italica
  Peptide Sequence Number=SeqID_83515
gggctcctatactagagagccatcagttcggtgagcgagtcgattggcaccgatcgaggagagctactagttggcagtagctagggcgaggatgcagcagggggatccgacgatggagggcagcggcggcaacaaggagcagcagatgcagatcgtgtgcgtgcggagcgcgtcgacgggcgatcaggaggcggagtggacggcggagcaggcgtcgtcgcggtcggcgctgtcgctgttcaaggagaaggaggaggagatcgagcgcaagaagctggaggtgcgggacaaggtgttctcca

SEQ ID NO: 17542 - DNA, 781 bp, Setaria italica
  misc_feature (96)..(96): n is a, c, g, or t
  Peptide Sequence Number=SeqID_83516
aaagatgggaatttgtgtttgcatcctggacattttctgtgttgtttgtttcttcttaatatatgacatgcagctctcctccattgcaaacctttnggggaaaaaattctgtattgttagaccataattgcgttgatcctatcagttagataccaaatttcattgcaacccaaccggttcttctatttcatggtgttttattgctttgggtgatggcttgtggtcagaaaacatgtagataagtagtatcatgtccatgtgcaaagtaattcccttgctgcatgtggttgcttcattatgtaagactaattttattttatgatcagatccaggtagtgaaaatacataataagatcaaatcttgcttttccagttcgcttggacccaaattttgaagcaggttatccaggtagttcaggaggaaattatcatagtgattgttagtgagcctgtgacgtcaaatgtaaaatcgaacaaataagaacgtaaaactatgttctgccttacaacagctcactgaagaactaagggattattctgagattaatatgaatgtggatatttgataagtgcatttgaacaaccaagaatcaagaatgcaccactggtggactaggaagcattgatctaacaacatgtggattaacagtcaaatatgccctgggccctggatactaagaggttgctgattagtgaatatagattgtaatcaaagtattgcggtctaacagtcaagggcagagcatcacaatatggccataggtggccatcgcccccccca

SEQ ID NO: 17543 - DNA, 489 bp, Setaria italica
  Peptide Sequence Number=SeqID_83517
ggtgtcaatgcatatgtgcacctagggaatccatgctgtttaataaactgcaaatctacttccagacacatttgtagtttgaaatgctcttccatgctcccctataattaatagtttcatctagataactaatgatatttatattctataataacccaaaaacacaaacagacaatggttagttaaacttgcctccacatacagaaaaaagggcatgctgtcaaagtaaatttaataatcacattatgaaaactgctactgttagcagtgatgaagcttggcaaagatagcagggggggccaagctatgaaatcaaaccaaatacacattcaaattgatgctttgttagtgcactttcaggccgaatctactgttttattaagggaagtttgggggtgggggggcatggccacctatggccatattgtgatgctatgccctgggccctggatactaagaggttgctgattagtgaatatagattgttaa

SEQ ID NO: 17544 - DNA, 399 bp, Setaria italica
  Peptide Sequence Number=SeqID_83518
ggtgacatgtactgcgagtaataatgttgtaagtttctgttctagctacgcagagtgctcgtgccttttctgtgaatttgaataggaacataattatagacagttgtacttgaaaaatcattttccagcaccacatctttatgctattatgtttcttgtctcctttgactgaaaaaagatcctcctttgactacagaaatattcagtttcagcatcctgagctgccaatctttcagttacacctcaagtgcttgattttctatctaaccttgataaattgttctcttttcagtgctataagcacatatgtaaatgtcactgacatatcgccacgactctccgatcacatacctacaaccaatcgcaataagatgctccatacaagatattctcttaacc

SEQ ID NO: 17545 - DNA, 737 bp, Setaria italica
  Peptide Sequence Number=SeqID_83519
tagctgtgctggcgttaggacctctctgcttgttcatcgtttttgttgtgctcagttagttgctcttcttgtccttttgcacctcacctttcatttcattcctttgcatggcaagggacataggttctgtctagttcagtgagtgacattttaccgagcttaatcatcgccctcctattcttcttccgttctcctcggtggcagctcatggcacacagcaggagctcatgacatgcgagttcagatagctcatcagtgttcttggtgattgaagcatagtccagcagccattgaggacccaggactagaggcgctcaaggaaagaggattcagtgcagaaacaccatcttctcatcagcaacaccgacactcaagaagtgctataagcacatatgtaaatgtcactgacatatcgccacgactctccgatcacatacctacaaccaatcgcaataagatgctccatacaagatattctcttaacctccctgaccaattgcccgagcatcgcatcatcaccagtgcagagagaactgaaagaactatttcaaagtctgttgcagacttgacctgggagatagcagtccttgaggaggaagttgttcgcaaggaactgcacctgctgtccttatacagagccgcatttgatcaatacctcggcgtctctcctcgtgcttctgctctggtggagaaagaatcgcaccgtcaacgcggcagaaagaccactgacgagggca

SEQ ID NO: 17546 - DNA, 290 bp, Setaria italica
  Peptide Sequence Number=SeqID_83520
aggactgggttggtcagaggaagacgtcaattgggtctcagctctggtggaattgggaggttgatgatgctcattacaatggatggaaggatctagtcggcgaccttcgacgcagcggcattagaatgatgacttactgcaatccttgccttgtaccaatggatcagaagccgaacacgaagaggcacctgttcgaggaggccaagaagctgggcatcctggtcagggacgagtccggcgagccgtacatgatgcccaacgacggcgttcgacgttgccatgctcgactt

SEQ ID NO: 17547 - DNA, 986 bp, Setaria italica
  Peptide Sequence Number=SeqID_83521
gtggatggtgtgtggcatgcagatgggcatgggtagcgcgctggagacgctgtgcgggcaggcgtacggcgcgaagcagctgcacatgctgggcgtgtacctgcagcgctcctggatcatcctcaacgccttggccgtgctcatgctcccgctctacctcttcgccgccccggtcctgcgcttcttccaccaggacgccgagatcgccgccctcgccagcaggttcgcgctctacatgatcccgcagctcttcgcctacgcctgcaacttccccatccagaagtacctgcaggcgcagggcaaggtaatggccatggcggtcgtctccgccgtcgcgctcgtcttccacgtcgcgctcagctggctcctcgtggggcccatgggaatgggggtcgtcgggctggccgtagcgctgaacgcgtcgtggtggttcgtcgtgctgggccagctcgcctacatcctcatgggctactgccccggcgcctggaacggcttcgactggctcgccttctccgacctctacggcttcgcgcgcctctccgtcggctccgccgtcatgacctgcctggagttctggttctacatgttcctcatcgtcatcgtcggcaacctggagaacgcccaggtcgccgtggcggcagtctccatctgcacgaacctgttcgggtggcagatcatggtgttcttcggcttcaacgcggccatcagcgtgcgcgtgtcgaacgagctgggcgccggccgcccgcgcgcggccaagttcgcgatcctggtggtgctcatgtcgtcggtggcgatcgggctcgccttcttcgccgccatcctggcgctccgcgacgtctacggcgcgcccttcacggagagccccgaggtggtgcgcgccgtggcgaggctcggcgtcgtcttcgccttctcgctgctgctcaacagcgtgcagccggtgctgtcggggtcgccgtcggcgccggctggcagtggctggtggcgta

SEQ ID NO: 17548 - DNA, 2198 bp, Setaria italica
  misc_feature (1)..(24): n is a, c, g, or t
  Peptide Sequence Number=SeqID_83522
nnnnnnnnnnnnnnnnnnnnnnnnttgcaagaacgctgaggatacttgtatagctgtatgatctgacattagtcacagaataagtcccgagttctgtttccaaggttagtgacacgaatacatggtacgtctcctgaaatttgagcaattaaggggaaaaaaatctcaacgacagatgtctagaaatgaaggaaatatctacacgagctcaattacagatttccataaactgagtataggaggaacattcatgtctcattcatgtactactttcggcactcttttttctttctgctgtctaggaagttctccactgcaactcaatttgtatctgaccatttttcgagtctatgagatggtacttctcattaatccgcttgttgctgatcacgtctgcaaggctgatatcaatgtatcccaaagtttccttgccatgtatcagccctttctttggggctttacttaggacttcaacatgtagtttatcattcacaggaggctcctcacacacaaactcaaattcatcctcccatcgtggatccctattcttcttgatgacctttgttttcttctcatcgcctttgaaaattatttttgcatatgggtttgtatggtgcttcccctcaagatcttgagcttcgtgaacaataacataaagcaagccaccaccagctggagtaccatctggagctttctctaccatatcagtaccctctgtgccttctttctccatatcttcttccttgaaaggcttgtatgtaagctctagagtaagctgaccacgagacttctcattttgtacatcatttggatccatggtcttaagcaagtcgagggtagtaactctagtctcatctgctgggaggtcttttaataggacccggttcatgcccatcttttcatgttttccaacctgttcccagtcaaagacattgacttcaagagcctgagtttctggatctgtcacaacaaatttgaaatcttcattccaatccggattgagattgctgcgctttacagttgtttttttggatggaagcttgtcatctgacatcttaagtttcacatatgggtctgatttacccagcagatccttctttcgcagattttgggctcttacaaccttcacaagtagaattccaacaggttttttcgatgcttttgaggggtccattataggtacttctaatgtcttcggccacaaatacatgctcgctacttgcttcttgatggtctcctgaacaaatctgtaaagaccaggaatagccattacatctgctccaagaagttttagcccaaagtcaacatgtggcttctccatgagagagacaaggatttttgcaaagcaaggaaatgtaggcaccaatggcttcagagtaatacgaggtgaagcaaagacttgtagatccacaatctggacagttgctttcaaaccataagcttttacaacaacggtgacatttggatttgcagcccatttaagagatggttccattatcagctcttgctcctctgtgacgtatactttcatcccttgaaaagttggcggtaagctacccaaagtaagagtttcaaactcaacagagtctatcttatattttgcagtattctcagcaataatcggctttgcgatatcctgtgcagttctgcagatagccttgttaagatagggccacatcaactccaagaacctgttcagccaatcaattctatcatagtcaggattcttgacccacaaaggaatttcaggaaggatgccctccaaagattttgaatcatattccacaagcggacgaactttcacttccttgacatcatttggctggacgtagatgaagagaaagtacccaataacaataccagccgagaatccaaagccaaatccagagaaaccaagcactgtgctgactacacccatcttggattctgtccaaaaccaccgaggagtctgggcggggtggcgctacgcgatcgcaacggtggctaatccctcgctgatccggggcgcgagtccatggaacgctcgtcggactcggggctccggcccgggcggcggcggcggcgaatttttttcccgaagctggattaggccggcgggggcggaggaatcgaatggttttggtgtggggaagaactaactacaacaactagaagatccaaggtgggttaacaatgaatccggggggagcaagacgacc

SEQ ID NO: 17549 - DNA, 778 bp, Setaria italica
  Peptide Sequence Number=SeqID_83523
gtttatactcaattagagcttgcatacttcagaacacaattagcttttttcccttaaagttatttttccgttacatcataaatactcctatgtacagacatttacaaaacctgaacagactctacacccagtcagagctctcaaggtcccttgtaagagcccacaatctgctccaagattagccacatcctaggacgaggaacatcctctgcatgaatcaataagccatgcgtcatcactctcagaaaacaatggtgagcaagtcatcatcatgtgcagctcgtgctattttacatgagaatcataggggtagaagatgttgtccggcgtgacgagaggcagcttctcgatgtacataaacaggcgcctgatgttctctctggtcaccgttgccatgtcaactatgtctcggcagtcggtgaacatccacagatcaccggaatttactcttttgaggctatcccgacagaaggggcaggactgagatcttgaacgcctgcaaccaagatagataccacatggttcaatcaacacagctgctttatctatatctttgcagtagatagttcagtgaacgcatgtaattcatacttcatatatatcatacagcagaggaagctgtctcttggagctcaggcaatgaggctactcaacaattggctgttcaggaccttactgggtctctgactctaagagtattattaggaacatgcaatggaaaggagcagagagtattttcttcattttgcaaatttcatgtaaggagttactttagtct

SEQ ID NO: 17550 - DNA, 869 bp, Setaria italica
  Peptide Sequence Number=SeqID_83524
tttttaatactacaaattaagaagacttagacaataacttcagaacacaatgctttttccctaaagttattttttccgttacatcataaatactcctatgtacagacatttacaaaacctgaacagactctacacccagtcagagctctcaaggtcccttgtaagagcccacaatctgctccaagattagccacatcctaggacgaggaacatcctatgagaatcataggggtagaagatgttgtccggcgtgacgagaggcagcttctcgatgtacataaacaggcgcctgatgttctctctggtcaccgttgccatgtcaactatgtctcggcagtcggtgaacatccacagatcaccggaatttactcttttgaggctatcccgacagaaggggcaggactgagatcttgaacgccattggcggtagcacttgatgcacatagcgtggctgcaggtgggtagcaccaccttgctgttcatctccatgcaaatgccacattcttcctccctctcaacatcgatctcagaaaccggcctcttgctctcatcctcgtctctccttctgtatctctctgtacagaccgccttctgcctccggtcatcgacatcgctgatccccttgggcagttgcatgagggaggggaatataacagcataaaattcccttatgcttgctttcctctcatgtgtggacatggtggtactcccatctacataaaccttgtagattaggatcctgagcaggccaagcgcgccggcgaggctgcaatcggtccactggacgaggaagaggaagaactgcgcggcggggctgtaggacatgcgcatctggaggcaggccccatcgtagtccctggagaaatccg

SEQ ID NO: 17551 - DNA, 645 bp, Setaria italica
  Peptide Sequence Number=SeqID_83525
ttgaactctactcaaggctcttgtcgtcagctaattatgtaacgagaaggcaggcaatgaagttcctttcagaatttttactggaggctcctaactctcaaataatgaagcgatacatcgtggaagttcgttttctgaatattatgatcaatctgctaaaggattcaagcaaaaatatcagaatatgcgctttccacgttttcaaggtatttgttgccaatccaaacaagcctcgccctataattgaagctttgctagagaatcgccgagaactgttgaagctactccacaatcttcctacaagtaaaggtgacgatgaacttgatgaggagaaagacctgatcattcagcaaatccagaagttggcatgatcatcaacgcaaaatcttcaagttatcggtcagcaatggcaccatgtccgtttcgagtgctttcagcatctgtcaaccatactaccaaagggtcggaaaacgtgtatatcgcactgcatgcatgtagcctccaagagctattgttttttggaggttttgctgttggtctcaggagaccgtggcaaaggattgtcctgttgaaggatttgcagttggtcttgggaggccatgataaagggttacagggaaagagagagacagtcagacagaggtg

SEQ ID NO: 17552 - DNA, 1642 bp, Setaria italica
  misc_feature (1618)..(1642): n is a, c, g, or t
  Peptide Sequence Number=SeqID_83526
attacgcccattgctgccgtcggccggccggcgagtcgactgggaaaatcaccgaggcgagagcgagatgtccttcttcttccgcatggcgtcgcggctgcggccatcgacgccggaggaggtggtccgctccatcaaggactccttcctcgcgctccacaccaggacccacgccaaggctctggaagaggttgagaaaaacgtttcatccttgaggttgttgatctctggtgatggagaggtggaaccaaaccaagagcaggtcctgcaaataacccttgagatttgcaaggaggatgtcatttccctcttcgtccagaatctaccttccttgggttggacagtaagaaaagatctggttcactgctggtgcattttgcttaggcagaaagttgatgaaagttattgctgctttcagtatattgaaaaccatctggagcttttggatttccttgttggttgctacaagaacgtggatattgcattgaactgtgggaatatgttaagagaatgcattaagtacccaacactagcaaaatacatattggaatctggtagctttgaactgttctttgagtatgttgagctgccaaactttgatattgcttctgatgctttgaacaccttcaaggatctgcttaccaagcacgaaattgtagttgcagaattcttgggttcccactatgaccagttctttgaactctactcaaggctcttgtcgtcagctaattatgtaacgagaaggcaggcaatgaagttcctttcagaatttttactggaggctcctaactctcaaataatgaagcgatacatcgtggaagttcgttttctgaatattatgatcaatctgctaaaggattcaagcaaaaatatcagaatatgcgctttccacgttttcaaggtgtcatcttttaagtgtacatacagatatatgtggccgtgcatttgaatggcccctattaaccatttcctgtgttcaaacaggtatttgttgccaatccaaacaagcctcgccctataattgaagctttgctagagaatcgccgagaactgttgaagctactccacaatcttcctacaagtaaaggtgacgatgaacttgatgaggagaaagacctgatcattcagcaaatccagaagttggcatgatcatcaacgcaaaatcttcaagttatcggtcagcaatggcaccatgtccgtttcgagtgctttcagcatctgtcaaccatactaccaaagggtcggaaaacgtgtatatcgcactgcatgcatgtagcctccaagagctattgtttttttggagggttttgctgttggtctcaggagaccgtggcaaaggattgtcctgtttgaaggattttgcagttggtcttgggaggccatgataaagggttacagggaaaagagagagacagtcagacagaggtgcacgcacgagagagagttttctttgagagaaagagagaaggtgtcaccattgtaaataaagttgtaatgtggtgtgtgctgtcagcagattcagagtatgtgtaattgcttgtactactttgaaaagaaatatctagtgcttccagaacttctaagaccatgcaaagttctattggaaaaccaaaaaaannnnnnnnnnnnnnnnnnnnnnnnn

SEQ ID NO: 17553 - DNA, 237 bp, Setaria italica
  Peptide Sequence Number=SeqID_83527
atctgggccatgttgtcgatcgccgtcagcgtgccgccgatgccgaaaacggagatgacgaagagcaccagcatctccacgctcaccagcgcctgcatgatggagtagtcctcgcccagcgccggcggcctgaacatgttggtgatgcagcccatcccgccgccggcgcacaagggcggcgatgcctcgccgtcgtccttctcggtagcggtcgccgcctttggctcctcgacggcg

SEQ ID NO: 17554 - DNA, 707 bp, Setaria italica
  Peptide Sequence Number=SeqID_83528
tggcctcggcgtcgtacatgcgccccgtgacgatgacattgagcacgtaggctccggcggggctggcggcggagccgaagttgaagagcgaggagtagtacttgaggccgaagacctcggagatgatggcgaagagcagcggccactgcgcgccgaagcagaagccgatgatgaccgaggcggcgtagagcgcgtgcggcacgccgaaggcgatgaggaggtggccgatgcaggagacgaggagcacggcggtgagcggcagcggccgcgggaagcggtagcgggcgaggacggcctccgaggcgtacccggcggtcacgcggccggcgtagttccagatgctgatcagggagacgaaggtgttgatgctcttggatgggtagcccagggattggccgatctggcccatgttgtcgatcgccgtcagcgtcccgcccacgccgcagatggaggccacgaagaggaccagcatgtccacgctcaccagggcttggaggatcgtgtagtcctcgccgcgcgccggcggccggaacatggtcctcacacacccgccgaacctccccaaacaagatgaggaggtcgacgtcggcggcgccggctgctgctgctctgttttcttggtgtccgttgacatctgaatgttgtcgttggcggcgccggcgacggtaatggtgggcggcgggccggcggcgaggagggcggcgtcg

SEQ ID NO: 17555 - DNA, 344 bp, Setaria italica
  Peptide Sequence Number=SeqID_83529
ttgcgtgtctcagttctcctctcttccgctctgtgaattccacgccccgtcacccgaaagcctccgatccgatctccgaccctagcgttgccgtcagtctccatggagccgaagcctcccacgccggcatctgggccgttgacgccgcggttcaggctggggaagcaatcgtcgctggcgcccgagtgcggcggcgagggcggtgccggcaccggcgcgggctcggcggaggggtccgccgaggcgaacggcgtcatgagcttccagctgatgtacctggcccacgagggcaacgcggaggggatccgcgagctcctcgacggcggcgccgaccccaacttccg

SEQ ID NO: 17556 - DNA, 1496 bp, Setaria italica
  misc_feature (1460)..(1460): n is a, c, g, or t
  misc_feature (1468)..(1468): n is a, c, g, or t
  Peptide Sequence Number=SeqID_83530
ccgtgcggtgcggtctccttcggtggcggtgcgcggcgcgtgacgcggggaggtgtgtgcccgcggcccgcgggtggaggtcgtcctcggccggcggcggcgatggtggcgatccgcggcgcggaggcggtgtccgtcgcgctcctcttctccttcgccttcatctgcgcccgcttcctgctcgaccgcctcgtctacaagccattggcagtttatcttttcaataccaaagcttctaagttgatgaatgatgaggccaggcaagcaaagattgtcaagttctcagagtccatttggaaacttacatactatgcttctgttcaagcatgggtcctcatgataatgaagcaggaaccatggtccttggataggatgcaatactttgatggctggccgaatcaacccgttgcgagaaccttgatgcttttctacatgtgccagtgtggattttatatctacagcattggtgctcttgttgcttgggaaacccgcagaaaagattttgctgttatgatgtctcatcatgtaataacatctattctaattggagtttcattcctgaccggatttttccgaatcgggaccatcattctcgctctgcatgatgcaagtgatgtgtttcttgagactgccaaattatgcaagtacacagaaaaagagctgggcgctagcttgtttttcggtctctttgctatctcctggctcctgttgcgtctgatttactttccattttggataatcaaaagctctagctaccattccatcgcattctttatgaagctggatgaattcccaacagctctttactacattttcaacacgatgcttctcacattgcttgtgttccatgtgtactgggggaaactcatatgcatgatgataatgagacaattgaataataaaggacaggttacagatgatgttcgatctgattccgaggacgacgagtaatagggagattcattcttttgacatctgcaacgtgtcatttgttcctgatacttttctatgcctgcttccagaatagtttattttggtcttggcgagtttgggcatggataagaaagcttgatctctgtatattgccttgtgatatcaaacgtggctagaccgagaatggagcaggtcctatacatgacgggtatagctagcagcttacttgaaggatccttcaaaaaaattttggttcactttttcgatatgggaaaagacatgagagggagtttccgtagctttttcccgaagcatactgacccctctgtaccatgttcagtatacttcacctgtgagtagatttagttctaattcatggtaataaattgattcttttgatcgcgagtaaatctcacttgtatcttaaatgatctcatgtgatgtgcattgagcatgcagctatataaaggttttgaatagtgtagtctgaacgtttgtgaactaaaaaaaaaaaaaaaaaaaaaaanaaaaaagngacgtaacgtaccgaaacggaacgaacc

SEQ ID NO: 17557 - DNA, 407 bp, Setaria italica
  Peptide Sequence Number=SeqID_83531
cctccttccctcccttcccctacaaagccgcgagaagcggcggagacgaggactaggaggaggactacccttttgcgcctgggcccctcccgctctgccgcattcgcgtccccgacccgctcgagtaggagccatgggcctggaggaggcggggcgcgccgccgccgccaccggcaagaagctcgcgctggcgagcatcagcttcgcggacgtccgcgtgggcgccgccgggggcgccggatacaaggacgacctgctcgtcgtggggctgcccgtgcccaaggatgacggcctcgacgtcgtcggggacctggccgtcaggctgccggatgtaggcgccgccgtcaggacttttctgaggaatagagaagttgcggaattcgtcagtggagcaatggctggggcaa

SEQ ID NO: 17558 - DNA, 872 bp, Setaria italica
  misc_feature (845)..(872): n is a, c, g, or t
  Peptide Sequence Number=SeqID_83532
gttgagttccctgatctggttgtggagtcccctgatggcggggctttgcatctgcctcttgttgcgcctgctccagaagatgatggtggtgaggctggtgttggtgtaattcctgatgcttcattggtctgcctttcctttcgtgcaagctcgcagaaaatggccgaatcatggagctcacctttcctggatgcattcggtgctgacaagaacattcatgtttatgaggtctcatttatagattcttggctattatcatcgagtcctgtgagacaagcattcctgaaggtgatgaggaaatcaaacaatcctcaaagacatattgtgtatgcttttggggaccattatgacttccgaaagaagcttcagattataaaccttctcaccgggtacatatacctgattgatcgccaaggaagaataagatggcaaggctttggatctgcaacacaagaagagctgtcatcactaacggcgtctacctccattttgttagatgacaaatgagatgaggcggctacctgttttcttttcttgtaactttcgggggatgaaattttgtttcataccagtttcaaagcgaccattcagcaaattgaggcaccttttcacagcagttaataagcatggggtgtctggttttctggtatccaatcacacactgtaaccacatgggttgtttgaggatacagcatgaatgttctggtgtcaatgatttccttgccttgtgtaactgttgtctggaacgcaaatcctaacttctgcgattaataagactgctgacctgagtacatggtttggtatccttgtactaaaccttagattatgcaaaaaaaaaaaaaaannnnnnnnnnnnnnnnnnnnnnnnnnnn

SEQ ID NO: 17559 - DNA, 756 bp, Setaria italica
  Peptide Sequence Number=SeqID_83533
cgcagccgcagttgattagattgttagcgcgaatgagtgacttgtttttctcgttgctggggtaatcagatggtgaacaaggaggccatcgagaaggagaaggccaggcttaaggatgagatgagtaggggctacttcgcggacatctccgagatccgcaagaaccaaggcaagattgcgactgcaagtaaggccatcatcccagaggctgatgctgttgagttccctgatctggttgtggagtcccctgatggcggggctttgcatctgcctcttgttgcgcctgctccagaagatgatggtggtgaggctggtgttggtgtaattcctgatgcttcattggtctgcctttcctttcgtgcaagctcgcagggaatcatggagctcgtatgtgagggactggtcagctgcttttgcttgataaaccctgtagtttacatcagcttggtttgcaaccatggtggtgtgcactaccaaactagtttggtttccattacatttgcaaaattctaccgctacacctcttaagttaatgtatacttcagtgtttttaaggcgttgcctaggcgacaaggtggtggtggctcgcctcgcctaaggtgtcgccttagcctgcctaggcgattaggtggtggtggctcgcctcggctcgcctcgccttaacgctttaaaaactatggtatacttgcttgatacatatacctaggatcatatggattttgaccggatatgctttggtttatgtgtatctgtgac

SEQ ID NO: 17560 - DNA, 2100 bp, Setaria italica
  misc_feature (2079)..(2100): n is a, c, g, or t
  Peptide Sequence Number=SeqID_83534
gtccggctgacgaacccgcctccggcctccttccgccggtcggagcacaccagctacctcgaaggccctcgaggcctccggcgtcgccactccctggtggtgccgggttggcgccagactgaagatccatcgggacttggaatcgaccccttttcctgattgtgagatcaaatgccagaagcccagaacttcagctacttacttgttgcttaatcatggacagctctcagaatcaaccattaccacctggtgttggaacatggtcacaggcacctcccaatcacccaccacagttcaattctgacccacagtcttatcattctccatttgacactagacatgacactgctagtggcaacaatagtgatagtgcagcaggcattgaatcagctgtccaagaggctgttcttcatgcacaggacgttgagacccagcaagtcatacaaaatcaaagatatgcaaacacaacaagtgaacctacagcatatggggaagacttactttcgaaccgccgtgaccctaatgcattgaaggaacacttattaaagatgacagctgatcatcgtgcagagatggcaaacaaaagggggaagccagttcatccaaacaatggcaatgttgaaattggcaatggctatggtgtaccaggagggggtgcttattatgctgcgaacttgccaagtactcaaatgaataaacctagagatgaatctgataaagcaaaatgtgcaaacgatctccctgattttttgaagcagaggttaagagcaaggggaattctcaaagatgagacaacaaataagaatagcatgaatacacagaatgtggattcccaagaaatccagaacaaatctgggcaagagttgcctcctggttgggttgaagcaaaggacccgaccactggtgctccttatttctacaaccaaagcactggagtgagtcaatggaatcgtcccggtggtgctgtgaataccatgcaccatcaagtttctccatccttgccagagaattgggaggaggcaattgacaaatcaacaggccacagatactattataatacaaggacacaggccacacagtgggagcctcctactcctgtgaacgccattgctacacctcctgctcccaccaaaactgcagtagagccggtcgctcaaactgcagatatttggaactctcaaatgcagagatgtttgggctgtggtggatggggagttggtcttgtccagccttggggatactgcaatcactgcacaagggttcaaaatcttccttttcaacagtatccatcttacccaaacaatacgatgcactctggtggtaacaatgctcccaaaactcaggggaatgttggagctaaggacagatcaagctcaaaaccaccctttgggaaacagaacagaaaagatcatcgcaaaagaaatcgcccagaagatgatgagcttgacccgatggacccaagttcttactcagatgctccacggggtggctgggttgttggtttgaagggtgtacaaccacgagcagcggatactactgcagctggacctttgttccaacaaagaccgtatccctcaccaggtgctgttttgaggaaaaatgcagaagtagcaacccatggcaagaaacgtggtggtatggctcctataacaaaacgaggagatggcagtgatgggcttggggaggcagattagtcttttgataaactgaaattgttgtgcaatcagagtattttctgtgatttggtttctggagctgctgaaccatcggtgcgggtttggagaaaatcaagagaattgtgggcagccaattttcaagaggaaactcagtgcagctcaccaggttctgcagctatattatagcaaactcactgggcctaacaggctagagagagtagtgcgctctccccgttttgtgtaaagtttgtaaacgttgcttggaatatgtagtaagtggaaagagacagtgattcgtactagttgtttacgtaatgctcatacaaggaatcaaattttctggagagacgagccatccttttgacttgagtttaatctgcaattgactagttttgtttggaannnnnnnnnnnnnnnnnnnnnn

SEQ ID NO: 17561 - DNA, 1238 bp, Setaria italica
  Peptide Sequence Number=SeqID_83535
gttatcgacttaggatcagttcatggcacatttgttgcaaatgagagattaacgaaagacaatcctgttgaacttgaagttggacagtcacttcgctttgctgcatcaaccagaacctatatacttcgaaagaacacagctgctctattcccaactcctagccttccatcagatgtcagtttgccatctcctccagaccccaatgatgaagatgctgttgtggcatacaatacaatacttaaccgctatggtattagtaagtctgacctatcgtccagttccaaaggttcttcaggaggttcctctggtgcaaacgacaataaccatacagttgaaagacccttgaagagaagtaaaaagttgagagtatcatttagagatcaggttggaggagaacttatccaagtggttgggatttcagatggtgcagatgttgaaactgaaccgggccctataggtgtaaaggaaggtagccttgttgggaagtacgaatctcttgtgcaggttactgtcataccaaaaggaaaggagcaaatttcaccaaaagaaagtgcctccccaagtggggtaacagataagctacaagaggtgcttaaaaaagttaagagcacaacaagaagtggaatttacgatgacctttatggggattctattccagcaaaagtgggctcttcttgggcctacaaatcagatgatcagtcagataaagacaaagccattgaggagaagacacatagcttgaatttgagcatgagttcaactgatgacagtgatgacttgtttggtgactcataattcagcattttcaaggaatacaaccaaatggattcttcagaaattcatgtgggagttgtttgtttgtcaggggcattttgctcagttctacatggttgtatcctgctgcaagtcaaggtatgtgaaatcctccccccctgcagtcagagtctgttttttcttgcaagaatgcctgctgatcttgtaacaagattgaaaacaggacacaaagttcttatggttgttgaattatgtaaaactcctgaaatgtgcaactgtatttgcaatgtgatagttttaaatttttttgggtagacttgcttaggtactgagcatgaagttttgtaggatataagctaacccttctatagttcgcacagctccaaattactggaagttcatgcatgctcgtctgggaagaatgtagctagaaatattttgtcatgacaaatgtgtgcagaagc

SEQ ID NO: 17562 - DNA, 273 bp, Setaria italica
  Peptide Sequence Number=SeqID_83536
gggcgagcgctcgtccatccgccactccggcgtccgcgccgcttgctgggcctgcgccgcggcggatggaggtggcgcgaggctcccgttggtggacgcgataactgagcggagccgccgcatcggcggcacgtagactccgctggtgctcatggcggcggaccgggggtccatgggaggtgggggttagtcgcgccggggctaggattagggtttctggagaggaagagaggggtgggcatggtcagggggcgggccggcggaagttgcgga

SEQ ID NO: 17563 - DNA, 391 bp, Setaria italica
  Peptide Sequence Number=SeqID_83537
ccgaaccggcccggactcgaacactgagctggtcgtgtgggcggcgccaatggtgaacaccgggcgcttcgtcatcctcgtcctcgcctaccgcttcctggtacccctcctctcagctgaaccggaccacaccaccaccagagagtcgtatgtcgtctacatggggagcccgtcgggcggcggcggcggcggcggcctggaggtgatgcaggcggaccacctgcagatgctgtcgtccatcgtccccggcgacgagcaggggagggtggcgctgacgcagagctaccaccacgcgttcgagggcttcgccgccgcgctcactgaggaggaggccgccgcgctctccgggcacgagcgggtggtgtcggtgttcaaggacccgcgcgctgca

SEQ ID NO: 17564 - DNA, 493 bp, Setaria italica
  Peptide Sequence Number=SeqID_83538
ttttttgtatttttttttttttaaggaactccaatttctaatttcttccagttgaatacacagatcacaaagccacacacaacgacaccacatcaggagccaccccatctacagatctagtaccacacaaacattttacagcatggctccactaatggagtctctctaagctttcttgggggacttggcggccttcttcggcgacttggcctcctttgcgccaccgctggccgccttctcggccgccttcttgggcagcagcaccgggttgatgttggggaggacgccgccgtgggcgatggtgacgccagccagcagcttgccgagctcctcgtcgttgcggatcgccaggagcacgtggcgcgggatgatgcgcgtcttcttgttgtccctcgccgcgttcccggccagctccagcacctcggcggcgaggtactcgaggacggcggcgaggtacacgggggcgccagtgccgacgcgctgcgcgtacccg

SEQ ID NO: 17565 - DNA, 438 bp, Setaria italica
  Peptide Sequence Number=SeqID_83539
ggcggggtacattttcggtgctcgaccgagggtggatctgccatagccccctccccacgcttcgttcctgcgcgcgccttctcgctatgagtgtggcgctgtaagggaaggaaggtgagaggcactgggagcaggaggagaggagcagctgcctcaccatcgaggcggagcacggagggggatggctggtggcctcactgccccgtgcggcagagggtagtgtgacgcgcagtgaacgaagtgggccggcgaaaaggtggacggggatggccacatcgaacgggggggagctcccctgccaccgccgcttgagcccgagagcacaacgagcagcagcaggaaaggagggccgtcggcgtccccgggctcctccgccgcggatacctcgccgccgccagaccccgatcccacccgagcccggggtcctcctctcgtgta

SEQ ID NO: 17566 - DNA, 271 bp, Setaria italica
  misc_feature (229)..(229): n is a, c, g, or t
  Peptide Sequence Number=SeqID_83540
ctcttccgccgctgcctccgcctctcctcctccgaatccaagtccgactcgctctctgactccgcgctggacctcgagtacgatgactcggattccgactccgaagacgagccggagctctcgctgcggctccggctccgacgccggcgccgcctctccttctccttccttcgccgcttccgccgctcgcctgagtcctcaccggagctctcactcccctcctcctccnctcctcccgtaccgccgttccgtaccttcgtccgccggtcgg

SEQ ID NO: 17567 - DNA, 1825 bp, Setaria italica
  Peptide Sequence Number=SeqID_83541
tttttttagcaatctcaatggcatgccaccaaggctatgtatccacaagaggggctatgttgttctggctccatcgtagccccagcaaccttctagtagtacaatgcgcccagagccatgcctgttctgttagctcacaacagctgtaacatctctcactgtgactggaagccgactcgcatgctctccccggggggtcagtcaagcagagccaattagctcagttccatggattaatgtacacaatctaccaggccagctatattagtctacgctgacggaaccctttgctgaagtgaggctgcatcaacttcacatacaaaccattcaactgcaccagcgaatcatgcgatccctgctcgacgatcctaccgccattcaaaaccacaatgttatccacatgtttcatcatcgctgccctgtgcgcaatgagaatcgttgtcttgttccccatgatcaatgtgtcaagggcttcctggaccaccctactcgactcagattcgatagcagagctggcttcatcaagcaataaaatgggtgcattcttcaacaccacgcgagcaatagcaatccgctgcttctgcccaggagtcaaatccaccccgcgcattcccacatgcgtgtcataaccatgaggcaggctgctaatgaagtgatgggcattagcgatcctggcagcttctttcatctcagattcagttgcattgtgccttgcatatattatgttttctcttatggttgtcgaaaatataacagggtcctgaggaaccaaccccatgtgactccgcaaccatctcaagttgaacaacttcaaatcacggccatccaacaacacttggccagcagttggatcatagaacctctcgatcaaagaaactatcgtgctcttccctgaccctgatacacctactacggcaacagtttgtcctccattgactctgagactaaaattactcaagaccgtcatctcagggcgcgtagggtagcaaaaatcaacattcttgaactcaatgctcccatacacattagggggtttcaggccactggcatcatctggatcaatcttgggtacacgatcaataatttcaaatactgaggtcagggatttccggcgcttcagaatataaggggcaaggccaaatggttccaccagtgaaaaagtcgcaaaagagaagacaatgtattctttgagagcagttaccaaactaagatggccatccttcacagcagcagctgtataccacaacagaagtgcattgcacgcgaaaagaaggaactgagagaagccaaaggcaaaaccaatgcccattccatgaataaagcttttcgtgagaatatctccaagctgcaatctataaagttccatgattttgttaccagcacagaatgccaccacagtatagatattcctcacagcatcttcaagaaccaaagaagctttcctgtgcatctcctggattcccctggaaaagccagaaagccacattttctgtgcaaccgcggaaatgataaggatgggcaaagttgccagtgctacaagagcaacacgccattgtagtaacataccgagaagaagtgcgacaaaaatggctgatgtccttcgaatgaatatagacagcctgttgctgaaagcagcacgaacaaatgttgcatcattcgcaagtctcattgataatatatctgcactattgtcttcatcatcaaaccagccaacttcattgcgcaaaattgctgaaaacatcatccttcttacacgctcagtcattttctctcccattataccaaaatagaagtgctgcaagaagttagctagtacagtgattat

SEQ ID NO: 17568 - DNA, 690 bp, Setaria italica
  Peptide Sequence Number=SeqID_83542
tagtcctattcctactaggtattctaatttcctattgttcctttggtagtctaacttgggtactacgagagccctgaaatggccatgtaaagcattcctcaaggactctttatgagctatattatgttttcccttggtccctaataaatcatcatcagaaccatcaccacaatcatggttaacatcttcaaagaccttcccgtcacaaacatcattgtcatcatcatcatcatcatcatcatatttcaaaaacccattttcaaggtcatcgccctcatcctgaggtggtggaggataccagatgtgtctactctcaaaatcaactggctgtacagcatccttattctgctcatcatcacgagggagtgaattcaaaaagctagaatcgacatcatctgatacccggccagaattccaaggataacaaggagaatgggcacccctcctggaaggaggactcgtgtctcctactcccagttttttgataggactatctaatgggcttgatgtccccaaccgaaaggtgtacatcctactgatacttgtgctcactgaatccgtgtcagaagtgtcttgagaaaactcactctgcggggagaaataccggtccgagtcctcaccatcatcgtacccaacgctcctcggcgtcccaaaccgaagaggaccagagaccatcaacgggttatcccc

SEQ ID NO: 17569 - DNA, 833 bp, Setaria italica
  Peptide Sequence Number=SeqID_83543
cagtctcaggcctcttagaagaatcgtgcacccaaggcgcttgggcaaccatcaaaaacattagtgtcttgtaatgttttttgtttgacatccttggtgatgaacattctgtgactctctcaatccaaaatgtttggcaatgtccgaccattgtagaagtgacattctcaacggatgatgcaatttgagcacctgtgcagcgtgatattctttccaagagtgatctcttgacattcaaaactaaagaaatatcttttgaaagaagctgttgagcatccaacggtatacttttctccactagcaagacatgagggtgttgggcttctatcttagcaacagcattcttaaggtactctttttcctgttcaagaatgctgtttatcgatgctagtttgtttgcaactttctggtgttccagtgctcctcccaaaagaagcaacctagggttctcatgttttgacaccatgcgtttatgttttacattcttggagcaaacaacacctttaatgaaagcactatcatttggatttcctgatgctacacatttgactttaacataatctgtgggatccatgctaccacctttgcttgtgtctggcctaacaaaggttgctgcctgccatgctaatgaggccactatgtctgaccagccatccacaggatcaattccatgtccttggagcaactgggacacgagagccctgaaatggccatgtaaagcattcctcaaggactctttatgagctatattatgttttcccttggtccctaataaatcatcatcagaaccatcaccacaatcatggttaacatcttcaaagaccttcccgtca

SEQ ID NO: 17570 - DNA, 270 bp, Setaria italica
  Peptide Sequence Number=SeqID_83544
acatgagctctaattaatgttgtatcttttttctttacaacattttttcgttacatgagctgtaattaatgttgtatcttttttctttacatgcgccctgattaatgacatagaaaccatttctttcttggagctacgcctctatggtcttggagctgcacttggtgtagaggtttaaaccacttccttacaaattttagactccaaaaatcgaggagctgaagctaacaagctgttatgtaagtgtggggacatggactgtagaattaa

SEQ ID NO: 17571 - DNA, 1907 bp, Setaria italica
  Peptide Sequence Number=SeqID_83545
caaaaggtccaggcgaaagcggaggaggagcgggagctgaagcggttacgccctccgactccgtcaactggcatcacacgagcgagcaagatgggtggcttcgtggaccccttcgttccagcgccggcgtggcctcaggacatggtgttcactggcacatcctggtcaggcagcgcttcctctcttgctgactcagcagggacatacttggcagctgcaccagatgaagacacagagtttcacctccagaacaggtccaagcctgtgttcttgaacggcaacgcgaaagagatcttgtcgtctgtggagctgcacgagcagttcttgcaagcgcagttgcaggacgacgtgacgcagggcctgaactttgaaatggacggtgctctcatggccagcacgctgggctcggtcctgagcacgccctctgccatatcacttgccgacagcgctcctgtggtgtgcagctccaatgacagcagcggtagcgagcagtccggcctgccgcagttcctcctgggagagcagtctgtgccatctgctgcgtggccgtcaactttcatgcagattccttcgttggttggggaagaaacatcgaagagcttcggcttcggtgcggtttgcaatgatgatcttctgcgtgaggcctgcgctgcagatgggaagaactatccacagctaggcaacatgccctctgtaccactgcagctacataatgatgttgagttcaacactggaaagatgctctctttcgctccgggtcctgggcagcaagtgaatacaaactttgaggatctgcagatcagtcaaaaggaattcagcagtctgcatcacctgaacctctcctcgctggtttctgggcagctttcatcgtttaatgctacaggagtagcgcataatcctaaacagtccaatgaagtcagcagtggaaagaatggattgaatgcgccgccgttcatggctcgatcagaagtgccgaatggcagtgggattgctgcgaatggagctcccaagccacgcgtcagagctcgccgaggccaggccactgatccacacagcattgcagagaggctccgaagggagaagatctctgacaggatgaagaatttacaggagctcgtcccaaactccaacaggactgacaaggcatccatgctcgacgaaatcatcgactacgtcaaatttctccagctgcaagtcaaggttcttagcatgagtaggctgggcgcaacggaagccgtcgtcccgctcttgacagagtctcagactgagagctcctccggtggtctccttctgtccccgagatcaggcaggcagcaggcgggcaggagcagcctgctcgggcagtccgagctccgggacggtgcgtctttcgagcaggaggtgatgcagctgatggagaacaacatgacgacggcgatgcagtacctgcagagcaagggcctgtgcctcatgccgatcgcgctggcgtcagcgatatctgaccagaaggggacatcctcggaggctgtccggccggtaaacagtggtgccacggacgaagaagatggcgccggcggtgagaatcatgatgcgaaggagatgctgcgcgggctgaatgcgtttggcagtgcgagggagatgaagtccagggcctaagcggctaacaatcaagccatcctaagcttagatgcctgacagttcgtgccgtgttctactggttctttcttgcgacttgtagcctggagcctgaaccaagcttacatgtgctatatctttcttcttcttctcatcatcacaagaacgtatgattaatccgtccctaatttggattatcttgatcggtcgacgcagctctgtttcgactgtgacttgtttacgcggtgcatcacaaaaaggacaaacttaaactttgttcaacaaaaaaaaaa

SEQ ID NO: 17572 - DNA, 642 bp, Setaria italica
  Peptide Sequence Number=SeqID_83546
cagggcggcgcgaggccaaagaaggcggcgaacctggagatgaggtaggagaagacgctgttggtgaggagcagcgcgatgaggatccactccagcagcgcgtacgcgagcacccgcgcgacgcagttgctcttcttgcacagcgccaccgccatgggcgcctgcgacaccatcttcccgctggccggccccttggcaacccgccttctcgcagccgggcaacccacccttggcaaccgagagggacgccaacctcgcagccgggctttgccgtggaatccaaggaagcacagaacagtgccttccgcccccgaatccctcctccagcgacacaaattggattggagcggagccggagaacgcaatccaagcgcgattatttagtggcaagtaaccactacaagaactccgcttccggatcaaaaaagaacaaaaaagagggaaaacaaactctgcacaaactccctcctccctccccgctactactgcagattgcaacaaagacgagtatttttttacacaagcaaaatcaaaacggggaccgagaacgggatcggaaatccaaaaggatgaaagaacgaaatctttacagggagaggatgtgggggcggggggactagcgatagtgacgggattacgagc

SEQ ID NO: 17573 - DNA, 702 bp, Setaria italica
  Peptide Sequence Number=SeqID_83547
aaaacatttaacaacttccagacattatcaccaggtcaacaactcaacattgcaacgcaatttaacaataaataacactactccggtgacacttacgacgcaacacccgatcaaaacttacgacacaatattttctccagattaccagctgctagaacaaagaattacagacccaaaattgactctgttacaactgctgccgcacacgagtaacaaaattaaacaagctaatatatttagcagatgaattcttttaaccatcaggttgcaaaatgccagtgaaacgtggccttgcattggattaatttgccagcgcactcccattggtcgtttcagatccttcttcagattcttttgcagcttcaactgcattgggcttttccaagctcttagcacgggcttcaggtagttgagtattgtcattctcctctcctgcaagtggtgaacccctcctcccaaaggacctcctctccagtggtgcctcccacaccttcatcgcctcaagtttctcatcaatcttcctccagtcctcccccttctcagcaagaacctcctcacgtgggcgagcagctccaaatgggttggaagatctggttcttggttgaatctctagcttctccactataggctcttccttcctccagtcctccccctttgcagcaaggacctcctcacgcgggcgggctgtgccaaatgggttcg

SEQ ID NO: 17574 - DNA, 689 bp, Setaria italica
  misc_feature (1)..(23): n is a, c, g, or t
  Peptide Sequence Number=SeqID_83548
nnnnnnnnnnnnnnnnnnnnnnntttttttttttttttaacaatgtgaacactatgtttaaatttcaaaggggtcctggaagagtcaccaaaaactattttaaacaacttccagacattatcaccaggtcaacaactcaacattgcaacgcaatttaacaataaataacactactccggtgacacttacgacgcaacacccgatcaaaacttacgacacaatattttctccagattaccagctgctagaacaaagaattacagacccaaaattgactctgttacaactgctgccgcacacgagtaacaaaattaaacaagctaatatatttagcagatgaattcttttaaccatcaggttgcaaaatgccagtgaaacgtggccttgcattggattaatttgccagcgcactcccattggtcgtttcagatctgcaattgaaaattgaattttttgctccattagagattgtccaaagaaatatgtacatccaacgaaagttcaaatgcagaaacagacaaacaaatcatatgcaaactacaaggaaaatcaataaactttagcatgtcagataatgcatcatggcaccaaccgacttgtaatcatgaaccacttccaacacccaggaacaaagtaatttgggggacatctattgttgaaaaataaaagcagtcagcttagaccacaaa

SEQ ID NO: 17575 - DNA, 299 bp, Setaria italica
  Peptide Sequence Number=SeqID_83549
ttctatcgctccatcccaggtcctactgtactctaaacaaattcaattcctcatttctcaatacaataccatcatagtccactatgtgcaaattggcatagtgcttatcgcactacctttactgtacattagtgctgtgtgcacttcgatatactcaagttgagttgctctatcactgcaggtgccatatactggccagcactcatcatagcaactcttgcggttgtagttgcaagtcaagcaaccatatctgctacctactcaataataaagcaagctcttgcactgggtttgttttc

SEQ ID NO: 17576 - DNA, 2103 bp, Setaria italica
  misc_feature (2023)..(2103): n is a, c, g, or t
  Peptide Sequence Number=SeqID_83550
tagaagagatggctagagggacatgcatataagaggaactgtcttcttattcttgtcctcattggtacatgtactgccattggagatggaatccttactcctgctatatcagttctttctgcatcaggtggcataagggttcagaatcagaacatgagtacagatgtggttgtaatcgttgctgtggtcatattaattggcttattctgcatgcaacactatgggacagataaagttgggtggctctttgcacctctagtgctcctttggtttattctaattgggagcgttggggtagtgaacatacacaagtacaacagttctgttctaagagcgtataatccggtctacatcttccggtatttcagacgagggaagtccgagatttggacatctcttggaggggtcatgcttagcatcacaggaactgaagcattgtatgctgatctatgtcacttccctgtactggctattcagatcgccttcaccctagtggtgttcccatgccttctactggcgtacactgggcaggctgcttacattatcgaccacaaggaccatgtagctgatgctttctatcgctccatcccaggtgccatatactggccagcactcatcatagcaactcttgcggctgtagttgcaagtcaagcaaccatatctgctacctactcaataataaagcaagctcttgcactgggttgttttccccgtgtcaatgttgtccatacatcaaagaaatttctgggacagatttatatccctgacatcaactgggtacttatgattctttgcattgctgtaactgctggattcaagaaccaaagccagataggaaatgcttatggcactgcggtggtgattgttatgctagttacaacattccttatggtcccagtgatgctgcttgtatggaagagtcactggatccttgttgtcatcttcctcgtgctctccttgacagttgagctcccatactttacagcctgcattaataaagtggaccaaggtggatgggtcccactagtcatcgcgataaccttcttcattatcatgtatgtgtggcatttctgcaccgtgaagcgttatgaatttgagatgcacagcaaggtatctatggcctggattctgggattagggccaagccttggccttgtcagggttcctgggataggatttgtatacaccgagctggcaagtggcgtcccgcttatcttctcccatttcatcaccaacctccctgccatccattcagttgttgtatttgtctgtgtgaagtacctcccggtatatacagtccctgttgaagaacggttcatcatgaagaggattggtccaaagaactaccacatgtttcgctgtgttgcaaggtatggatacaaggacatccacaagaaagacgaagactttgagaagatgctcctcgacaggctctttctcttcgtcagactggagagcatgatggatggctactccgactccgaggatttcaccatgatggagcagaagcctgagaggtccaccagagcactgctggctgagaaggctggaagcaacacgatgagctcgattggtgacatgagctactcatcacatgactccatcatgccggcaaagtcacctttgacagggaacagcctgacaaggtactcgagccagacattcggcgatgagcaggaattcctgaaccggtgcaaggatgctggcgtcgtgcacatccttgggaacacggtcgtgcgggcgcgcagggattcagggatcgtcaagaaggtggctgtgaattatgtttacgccttccttaggaagctctgcagggagaacagtgtgatcttcaatgttcctcatgaaagccttctgaatgtaggccagatatattacatatgaacatttttttcgttcttttgttcagggttcagaagtgagtagttctgagctgctggaatctgtagggcaggtgaacactgtacatgatcagtcctagagtaaagcttcattacttcaatagtcaaaaaaaaaaaaaaannnnnnnnnnnnnnnnnnnnnnnnnnnnnnnnnnnnnnnnnnnnnnnnnnnnnnnnnnnnnnnnnnnnnnnnnnnnnnnnn

SEQ ID NO: 17577 - DNA, 486 bp, Setaria italica
  Peptide Sequence Number=SeqID_83551
cctttgccacagaattgatgtgttcaagtgggatcgtcttctcgctgagatgcttattcaagaacaagcaagcccatagataccccgcccttccatacagcaactcatttggtactttctcagtgattgttatctcatcaaaggagctcagatactgggtgaccctcagctgatcgtcgcaatgcttggcaatcaccgctccaagagcgcagacaccggccctcccacatatgaatgtcaagaacggtaggccccgcgacgcgtcgtcgcaggcgtggacgatgtcggcggcgagggcgaggtccccgcggtcgccggtgacccggaaggacttgaacagcagcagcgccgtcccgagcgcgcccgtgtagagcgtgtagtccgtcacctgccgccccgccttcacccacgtctcctccaccaccttgtccttgagacggcgcgcggcgcggaggaagcgatcggagagcctggcgtacgggagcg

SEQ ID NO: 17578 - DNA, 291 bp, Setaria italica
  Peptide Sequence Number=SeqID_83552
tcatggggatctggtcgaattgggggaagctgtaggtattattgcgggtcaatcaattggggagccagggactcaactaacattaagaacttttcatactggtggagtattcacagggggtactgccgaccttgtacgatccccctcgaatggaaaaatccaattcaatgaggatttggttcaccccacacgtacccgtcatggacaacctgcttttctatgctatatagacttgcatgtaactattcagagtcaggatattctacatagtgtgaatattccgttaaaaag

SEQ ID NO: 17579 - DNA, 384 bp, Setaria italica
  Peptide Sequence Number=SeqID_83553
cttgacagacggcgtggcttcctggtcgcgttcggcgccatttccgcgagtttaccgtaccccgtcctgttccggcaataaatcctcgccgccccctctttgggcgaaattcctcgacgcgcgtcgatctcgatttctcgccaccgtccggctatattcgttcattcgtccgtccgcgcatctctgccggcacagccacaaccaccgccgccgccacctgcctgtttggtaggaatcggagccaggccgcgcgcccatggccgtcgccgtttgcgtcaccggcgccggcggcttcatcgggtcgtggattgtcaagctcctcctcgcccgcgggtacgccgtccggggcacctcccgcctcgcagatgaccccaagaacgagca

SEQ ID NO: 17580 - DNA, 1053 bp, Setaria italica
  Peptide Sequence Number=SeqID_83554
aaatagagcaatcaaacaagctagaagaaaagctgagtggggtcaaagctggaaaacaaagaggatgaagaaaatttggagcaagataagtctaggaagtctcatcagtctcctattcacatctatgcacttcgacttcttgaggacaacagtaatgcatccaaatgtctgtcattagctgaggcaccaccaactcctgacaggctaaatgattttggcattttgaaagtaccagatcaactttcagaagcaaatctcttttacggtgtagcacctggtgcaatgcaggcatacagggagtctatggagcgtctctttgtttataacaagcaaatgggtaacactgtactcaaggatgattatgagccatcaacatatgcctctgtttcagatgtacctgtggaaaatgtatatggagacgatgaaggcgatgcacgcacctatttactgcctggagcttatgatggtggtttggcatcaaaatcaagtcacaaaaagaaacaccctgtgacgcagaggatgaatggcacaaggccatatgaaattggttctgacatgccttatgaaccattcttggaaagcaaaccaggaaaccaacaatttgtatcaaatggcaaacgaacaacagacttcctttccattcctataaaacgcattcgcacagcagctagacagcgggttgcgagtccatttcctgctggagtttctgggacccctcaattcacaagtaaaacggacgcttcaagtggagacacaaactcctgtcaagatgatcaaagttcattacatggaggatcattttcccggaagaatgcagatatagagtccacagttgattttgacagacaattgttgtatgatgctagcgaggtgtctacaaagtctaaaaagaagaaaaagcctaagcacccaggacacaaggcaccactaagtgtggctgagtcttgttccttgatggcacctggaaagggcacatatgatcctagacctcaggtcgatttggttactcaatatgagcagaaggattatgtgaaaaagagaccggagattcat

SEQ ID NO: 17581 - DNA, 412 bp, Setaria italica
  Peptide Sequence Number=SeqID_83555
gtggggcagcttgagttcttcaacgggcaggcccccgacggcgtgaagagcttcgggagcgcgctgtgcatggcgtccatctccctggggaactacgtgagcatcatgctggtgagcgtggtcaccagcctcaccgccggggagcggcggcccgggtggatcccggggaacctcaactcgggacacctcgacagattctacttcctcctcgccgtgctctcgctcgtggacctcgccgtgtacatcccctgcgcggtgtggtacaagggaatcaggctcgacggcggcgacgaggtgaggaaggcctccgcgcacgtttaaacactgggcctgggccttttgctggtgtgctggtggctggtttcattgagagagacggacgtgggctggcccgtataggaaataaaatgcc

SEQ ID NO: 17582 - DNA, 881 bp, Setaria italica
  Peptide Sequence Number=SeqID_83556
gtactagctagcaggcggcaagatccaggcaccatctttctgctgcaggggtagggcttggcaggcaggcgccagagatctctcggttcccgtgccaatgcagctcttccaaggggagaagccggcccacgacttcctctcgctccacaccggaggaggctcgtcgtcgccggtgcagcactccacccaaggatacgatctgggggtgcaatcttcgctgaagcctctgaagatgggcaagcggcgcggcggcggcggcggcggcgacggagcgatcggcatggcgccgttgggtctggaggcggactcggagaagcatgccctgccgggcggtgtcgggacgttcagcatcaggcaggtgccatcgactacccagccgagggggcaaggcgtcgtcagggatgcatttgcgcccgtgcttcatggctccagaacggagggcacgcccggagcagaatctggagccagggctcacagtggcccggccacaatgtggcaagattcgggcatcgatcaaagatccagagcaacgagaggagaggggagaagcagcggcagcagcggtgatcaggggccaagcactccgagatcgaagcattccgcgaccgagcagcggaggaggaccaagataaatgacaggcttgaaatacttcgtgaacttctgccacacggtgaccagaagagggacaaagcgtctttccttctcgaggttatcgaatacataaggtttttgcaagagaaagtccaaaagtacgagtcaggccacccacaaaagaatcacgaggattcctccatgccatgggcgaaagtttactacagatcatgctaggaaaaacacagagaacattagtcaagtccagggaggaggattatcagccccc

SEQ ID NO: 17583 - DNA, 431 bp, Setaria italica
  Peptide Sequence Number=SeqID_83557
cctatgatcatgtgaatttgagtgagccacagccatctcaacattttataattacatcatggcatgaacctgccataaggacacaaatcttgaattctattctgttgcagaacagttgatacattacatggaatttgacaagggaagtgtatttttaacaagtatctctataatgctcttcttcaggcttgaaatacttcgtgaacttctgccacacggtgaccagaagagggacaaagcgtctttccttctcgaggtaagcagagcatcaactttgccacggcagtcaggcgatctcataatgccttgttgccctaattttgggacaatttcctccttgctgcttgctcaatcatatgcaaacaacattgtaggaactagaacactttgcagaatgaattatgctatagaagggggaaaaaactaagaaa

SEQ ID NO: 17584 - DNA, 654 bp, Setaria italica
  Peptide Sequence Number=SeqID_83558
tgccgaccacagtccaagcaaacccaaatctcactttctcagcctttgcctgcgccttggcagcagcacctttggaggcacctcctttcttcttcttcccacctttctccttgtttccagccccgcctttctttctgggggcatcctcccggcaatgctcacacgatgcagcatgcttggaagacaagatctccaggaggaccctgtccaagtgggcagtgtcacggctgtagtggccgcaatgctccctgccactggctgacgcagttgcttcttctgctgcgtggcttgtgtcctgcgatgctgcatcgctgggtccaacatctgaggatgaggctgaaggaccccgttcctgcgctttccgcaggttcttgggcttagccttcaccttcttccccatcaatactgaacaggtgtggaatcagctaggggcgtgcggggtttcaaaaccccccaaatctctccctcagtccctctgcaaaacaaactgcaaccacaagttgtgcagttgatcttgcccccaagaagaagaaccaacgaaagaagaaatcgaatcaagcccggatggatctgctctccactacagtccagcaccagtagaggacgccggcgacgcccctcgacttgataaggcttcggaggaggagagcctgc

SEQ ID NO: 17585 - DNA, 1211 bp, Setaria italica
  Peptide Sequence Number=SeqID_83559
tcttgccgggggaatggtgttcgcttcgttgctgtgctcgaagcacctgtcctcgtcgctgcgccggtgtactttatgtatttgttccgacattattgctgtggccgaggtgtcgtgaaggggttaggaaggctggtgttgatgggtgctggagtggctgctgtttttgccgcagcatttgcacccttcgtgtactatggacagattcaacaactctttagccgattgtttccctttggtcgaggcctatgccatgcttactgggccccaaacttttgggtattctatataatatttgacaagatccttgcatttcttcttagaagattaggcttcaatattgccatacctgaagcttcatttaccggggggcttgttggtgattcatctcctttcgctgttcttcccaaggtcactccaattactacattcttaatggtcattcttgccatgactccttgtcttgtcaaagcattctctaatccccaaccaaagcatattattagatgggtctcatatgcttgcacatgtggatttatgtttggatggcatgtacatgagaaagcatcacttcatttcaccattccgcttgccctaattgccatggataacttgcacgatgccaggcattacttttttctgtccatagtttcatgctactctctgttcccgctgctgtttgagaaccaagagtacctgataaaggtgatgctgctgttgacctatgctgccctcatgtgggtaggttttacgtcccattttgctgcaaactctgaccaggaaggaaagaaagtaaatcggtcaggcagtacagtgaagaagaatagcttcattggatggattggtttaagctatcttttgggaattgcagctatagaactgtggtctcaagtatttcaccatcttgtattaggtgatagactccccttcctacctctcattatggtgtcattctattgtggtgttggaatgatgtactcctggttgtggcagctcgtatatatagtcagacatacatgatatataaccagcgatcaatagaagcattcacttgtctttcttgggttgagactaactgcgatgacatactgcctggaatgatgcattgaacaacattgtcacgactgggaaggcctcttcccatagtttctgatttcattgttcgtgagtaaattttggagatgtggtgatcgtgccatgatgtaatgttt

SEQ ID NO: 17586 - DNA, 524 bp, Setaria italica
  Peptide Sequence Number=SeqID_83560
ccaaaatgattggtattactgcctacttgtgccgttgacacttcctgtcataatcgtggctgtctatctgcattggcttagcatgaagatgttcaaaacatgcatgaagcaatatttctgtggattttatggaacaagtatgcagctttgttccaatttcagaaactctggagcacgatgaggatcaagatttgaagatactctggagcattgtgatgtggttgctaagaaactgtatgtgtttatggtccaatgtcaacctggagataccaaaatctgtacaaggagcaactatctttgccgggcgtgtataaaaaagttgtgaattgcaagtttgctacgttgtacccttgtctactccctggatgccgaagaagacagaacgtgctgcggaagacctgaacaatttggtgtcctggttgagtgttttctgctttttgtagtcaatggcgtgaatgtaatattttacatggttgaaacatctttttgcctgcagtatggaggattcacggttcgactaaaaa

SEQ ID NO: 17587 - DNA, 870 bp, Setaria italica
  misc_feature (793)..(870): n is a, c, g, or t
  Peptide Sequence Number=SeqID_83561
taacgtaaagtaaaggtgcggttagtggtggtagctgtatctctcccgcatattctggtactgagttggcatggagtagagagatccatccggacttgtggctgatctcttcttttgttggtggcagatttctttttatcccctgtctccgaagcactgaaaggttcgactgatatagggactaggaagccctgcgcatcactggcgaaaggggttgattcagagatgcgtttctctaaagaagatctggttgggtcagcgtttatggcttttggcgttactttgtttgtgggtttcttctacgctgctgttctgtccaagctgcttccaccgtatgaaaataggcttctagctgccgtccaaaatgattggtattactgcctacttgtgccgttgacacttcctgtcataatcgtggctgtctatctgcattggcttagcatgaagatgttcaaacatgcatgaagcaatatttctgtggattttatggaacaagtatgcagctttgttccaatttcagaaactctggagcacgatgaggatcaaggtagtttatctgaaagtgtcatgtcaagttgtaaactgtagtgttacacagtccctagtttgtgtttgtcagctccaatgtgtagcttgattgtgcttcaatcagaaatacccattccttccatatgaacaattgccgccaagtgctaagtatatatattgctaaatgtacggactgtcatattataatatttgaggaggagatcggtacttattttcaaatcctaaaaaaaaaaaaaaactaaannnnnnnnnnnnnnnnnnnnnnnnnnnnnnnnnnnnnnnnnnnnnnnnnnnnnnnnnnnnnnnnnnnnnnnnnnnnnn

SEQ ID NO: 17588 - DNA, 768 bp, Setaria italica
  Peptide Sequence Number=SeqID_83562
ttaaattgcagtattgaaatctgtgctataacccaaaccgctcctgccttaatagtattttcaaatggcaggaggacaaacaacttcctaaacacaatgacactgcctctggaaaactgtcaagccaatgcatagaggaatggctcgatgtgcttgctgaatgctgaacgcttccaagtgctctggaaacgtatacaagttttctatacacttttcatttggagttcagtaaagtaaatatttactaactgctgccttattgtacacacattatacaagcacattagtgcagcattaccttattgcttcaaactaagttcccaaaagaacaagagaaatctgtttaacataatgtatctttggttctataatcccatggtatgcacagctagagcaaccagaagaacactctttctgttgccaattcattgccatgctatctagagagaacactcgatcaagcagctgcgactgtgggcggcggcgaccgcagcggcacggctctggccttgagcggccgcttcatgacgacggtgaactcgagcttctcggcgaggtccacctcctcgccgtcagcctcgcgccactcgaactccctcacgaggttggccacgaagtactcgaggtgcatcagcgcgagcgccatgccggggcagaccctccggccggcgccgaacggcatcatcttgatctccttgctgcccgtcaggtcgacgtcctccccttcccggccggggaggaaccgctccggccggaactccgacggcg

SEQ ID NO: 17589 - DNA, 589 bp, Setaria italica
  Peptide Sequence Number=SeqID_83563
ctaaaaccaaagaaatttggctgaatttcgtctaaaatggtacctttaagatggtgcaaggagaatgtaaatttcatagcaccttgagcccaaacaatcgttcttttaatcgtgttcttctcaacccatgctttcatcagtcactggcttaagaagtggtaccagcactattttgctttcgtgacagcaccatgagattgaagttgatggaatcgggaatgttgtgcatgatgcccttaacgatagatacagcatcctgtagtaaacttttagaagaagaggagccatgctttataggtccatccttcattccatcaagctcattaagtgttccattaacagctacgaaacaaatgtagtgctcttccacaacatcacagagctctgtgacaccatcactggcggccaataggtgagcccttgccatggcatcatccttctcaagaaacaaagcacgctcgtgtgggtccatgctagcagttgatttgaagaataagtccaagcatgaattctccactaaattgattcctgaagatgaatttccaacagcgtggatcagagcaatagttccacaagcatctatttccct

SEQ ID NO: 17590 - DNA, 450 bp, Setaria italica
  Peptide Sequence Number=SeqID_83564
gaagaacgccaggctggagaggtacgtcccccgcgagggcgccaccgccgtggcggcgcaccaccggagggccaaggtccatataagcagggcggcatcgggcgaccggcaggtgatcagcctggtggtgatggtgatggtggagtgcgacatcgtggacctggtgctgcacgtcctcgagtgcctccggtggatgagcggcgtcagcgtgctctccgtcgacgccgacacctactcgccgcaggcgccgctcaaggcccgcgccaacatcaagctgcacatcacggacggcgactgctggaacgaggcgctgttccacgagacgatgaccaagaccgtgcacgacgcgacctcgttcccctcctcatcctcctgcgccgccccggcaccgctcgtggccgcggcctagtcagcagcaggcccgccacgtaagcccctgccacctcggtt

SEQ ID NO: 17591 - DNA, 233 bp, Setaria italica
  Peptide Sequence Number=SeqID_83565
acactgaacgtatactagacacatacatagtactagaagtacatctgtagtgtgtcccatatccaccccagtgaaagaagatatgtcatatcttggactccagagatgctcatgcctaccacccggccatctactccaaaaactggtgagccgcacgcgcccggaccggtgccaaagtcaccactaattaaatatttggacaatactgcccaaattagtggcagtaggaccga

SEQ ID NO: 17592 - DNA, 1482 bp, Setaria italica
  Peptide Sequence Number=SeqID_83566
gctcgtgcaagtccgcgctggacattgttatcgaccacgccaaatccatggttgccgatgaggacgccctgcagcgttaggtacagcgcgatgtggccatcatcgctgacgagttcgagatgatgagatacttcctcatgacgaccggagaccaggaccaagatcggggctgggtgaagcaggtccgcgacctggcctacgacgtcgaggaggtcctcaagagcttcgccgccaaggtggaccaactggagaagccgtcccggtggcgcatcccccgcatcctctgtgagcggcgcagggctacccttgaggtgaaggcgctcttggcaagggtcgcggaccaggcgtttgctagcaagaggagcctgtacagccgcctcgtcaagggctccgacgccgaccatgccacccaagcggtggcggagcagtctggcatcttctcggcgatagctgccatcgaccaagcaaggcgtgccgctgctgcgggggcggacgactcgacggtggacctcctccggctgatcaacgacggggtcaaggacctcagggtgattgtggtatggggaacaagtttccatcttggcaacacttctgccgtcaaggaggcctatcgtgacggtgggtgtgaacatggaaatgcaaagtttggctgccgggcttgggtcagattggcaagtgcctccggtcaggatgaatttttaaggaatttggtaagccaactctccgctgatgtaaccggagatcagcgtgacctcgcggaattgaaggaaatggcgacggaaattttgagtgagacaaggttcctgatggtcatcgatggcctatgctccatagctgactgggagtggatcaaagcctacttccccgacaagaagaacggcagccgaatcatcgtctccacgcggcaagttgaaattgcaagtttgtgcgcggagcgacattaccaggtttcagagctcacgcagttggcacctgatcaggctctttacttgttccaccataaggctaaacctcaagatgattcagccaaaaccatctccaactcgagcccaatggtatttgctgacgaatttgtctctgggaggaacgaagaaatagccaaacttctccaattaattcgtcagggacacaactaccccggctgcgaggtgatttcagtgatcggaatgggaggtgttggaaaaaccactctcgtgagaagcgtctataaagataaagaacttgatagcttgtttcaaaatcgtgcttggatcactgtgcaacgtcctttcagtgttttgtcttcccttaggagcattgctcggcaattgtatgggccaaatgcaggtcgggagattgaaacggtgggattagaggaaacgatcgacgagattactaggctcctgtgcgcggggaagtgccttattgtccttgatgacctaacatctaccgcagattgggatttgtttattaattacctggaaaaaactgcggtaattgtag

SEQ ID NO: 17593 - DNA, 1235 bp, Setaria italica
  Peptide Sequence Number=SeqID_83567
atgctgataagattctattttgaccacaggaggcagctttcagagtaaaaggcatgtatcacaagactttgacgtcagctaccccataaggccattggccatattaccagaaagacagaaacattactaaagttacagtacgtccaataattggtgctatttaaagctatagccttcatccaccactcacctaatgtaacttggaagactcactgaagcaccggagtgtctctcaatcatgacttttggtgcacatgcttgaattaggtatttgagtaaacatcaatctcgatctgaagtcgagtcccagtactgtacaaacagtacaagcatgactggatctgtgcttaaaaccaccaaaactgtaccacagaaaccaaaccactctctaccaccaagatctaaacttttggcctgcggaattcaaaccagatctcgtagtggttaaacaacaagctatcatgagtgtgcttccccacatattcaagccccaattttgcaagctgccgtgtgcactcatcaccacccagtcttgagcaaaatttaatgttatgcgacacaaaaatccggcctctctgcggcctcagcttccctgcaagcctctcaagcccagtccaaacaagcttatctggaatatggaggaaaacagcacttgcgtaaatgagatcatacatgactgtatccccaaacttgctgaaatccatatcctcccctctcacaatcatcggccgcttatacagcagcccctgtgctggcagctcataccgcagcgcagccatgagagacaactcgtccctctccaggcaatggaaccttgcagcatctagataccgaatgaaatgaagaccaacacgaagcgtcccacacccaatttcaagaacctggtccgtgggcgtgagtgcagaggcgttagcaaggaactcgaagacatcccgtccaccagcccacggttcaccatagttgctgtggtgctcttccacaaggagctcaccggggcatggcagcgcggtgtgattgcttgcctcttcgtccggatagtgagagatcccatggtgcctgttgatgtcgaagagctgctgctctcgagtgcggggattgatgcccttgcgcaggcggtgccaggcgtcgtgggaggccgcggcgccgccggcgaggagggagttggactcgagctgggccttgagccaggcgacgtccgcgggggaggtagtgacgggcgcgggggaggcggttgg

SEQ ID NO: 17594 - DNA, 298 bp, Setaria italica
  Peptide Sequence Number=SeqID_83568
atctataaatcgagttcgcttcgatctggatcatatcctgacatggtagtggcagccgccatggcagtgctgctctgctcagccgccatgtcgccgtcgccaatgcgtcggcggcctcaaccttgagctgcctgtgccggacagcccgagggagctgtcggtgtagcgtcggcggcagtggcaccatggcttccgctcttctccggcggcggcggtggcggcggggaccctggagagagggaggaagggggatctgatccgtggtgtttcttctgtggcttcgcttctgcagggcaag

SEQ ID NO: 17595 - DNA, 274 bp, Setaria italica
  Peptide Sequence Number=SeqID_83569
gagagatgcagggcgaataggagtacagggtggtgttctggtccccacccaccatagacgaggtcaccggcgccgtcacaagcatccaggaggtatttgagaatccttctggtgtgtattcagatacaaccgacagacaaacagcactgctgtccacctcaggacattcatctggcaattcatcaggatcagatgactggattgaacctgctgcctatgttctcaactcaactgctcttctttcaagggaacataggaatgttttggatgcttt

SEQ ID NO: 17596 - DNA, 324 bp, Setaria italica
  Peptide Sequence Number=SeqID_83570
ctacgacctcatgcgtaaggtcgtggcgaccgtcgagacgctggaggacgcgtacgacattatccgtctcaattcgaacgttgatctagcgtctgcgaaggatgatgcctgcttcgttacgctggcagagcagctgaggagtggggagtttgatgtcagagcaaatgctttctcagtggtggcgaagagacggggagaagggtgccttgttcttcctaggctgaacttgaaagttgttcaggaagcgataagggtggtgttggaggttgtatacaggcctcaattctcaaagatatcacatggttgccgcagtgggcgagggta

SEQ ID NO: 17597 - DNA, 1076 bp, Setaria italica
  Peptide Sequence Number=SeqID_83571
taacgctctctccaagacacggttcagcaatcacagagagaaagctccggtaacatattaacaatcgaaaccaaaacaagcaaccacacactaatacttcatcttcagcgataaaaagggattgaatctgaagtcggtcggggcgctcagggctgttctaggcttcttgtggaattccagcatccctgggcatttcagcatcccccatgttctctttatcctcctgtgtaatctccattaccacatcggcagtatcttgatctggactgacagccaaagcctcactatctccattgctaacttcctgttgacccttggcctgtttcttggttttcttaccagcagtcttggcaactacttcctttgcagtggtgtttctggctggattcctgttgtaggagccgctgacccttgcatcaggcttcgccttctgaatgttctctttctttcctgcttccttactttcagttgcctcagagttcagtgaccttggcttcaggtttccattgggtgacacattggtggtagtgcgagcagccttgtcagactttttaggttgctgtgagggctctgcagagatcttcagcttctcaaaatcctccacaatatcataaacttgaagaatgtcctttactgggtcctccaattctgttgctagaccatgccgggcaacataggacttgagttcttccctcatccggtccagaggctcacattctgattcaagagcaagcttaaagaagcctaaggaaactgagtgcttggaagcagcctctgccagcctgatctgtgtcatccagtacgagattgaggagagcgtgctgaacttgcgccttgcagtggacatggacacttctgatgttggagtatcaaaccttccctggctgtctgatctcttagaccgaatcccagacagcggagtaacagttccagaaggagttggccttgggctagctcctggcttagtttgtattgagtgcctccgtggaggtttggctgatttatccttcacagaaaggtcaaggcacatgctcttgctgacatctgaagatggttttgcccttcgcggagcggag

SEQ ID NO: 17598 - DNA, 1071 bp, Setaria italica
  Peptide Sequence Number=SeqID_83572
cttggtgttgtttcttccagattcctatcgtttacactgttgtattgttgtatcaactctaaggtaatctaatttctatggatatcttcccttgaaactacactcgtcacatgcccacgctgcaaaacagtcgttcagagttgagacgaaccagcattcaaccacgcaacgaggacgcaccacagcaagaccaagcggaagcagccttgtaatcacccaaaccaagtaactgttgcatatctgttatcctatatgaatgtaccactctaataaagttgcctattccttatgggttcatgcagagcacactacaccagaacctggcaagcatgccctgatgtcctggcacccgcacaacagtctaccattgagcaagtctgtggattggaacacgccccctccatcacttctcttgtagtaatcaaccgcgataaaattagcccatcgattccctgctgctccataacatgtattcaccatgtcagtaagactttgggaatgctgtagacacgcagtaaactttatagggaccgatgggaagtagttcatgaggaccagcgatttagtcttgtcgctaagaggtgcagattcagcacgattggagcatttcccagcatccatcccatcatcaccataattgttctcaaccatgaagttccactggtaagcaattccttcggtactctgctttgagctgatggaggtgaacaccaggaggcgctggttgcttgcaaccatgtcactgacaagaggccagtcctggccattctgtggcattttcgacactgggaaccagtacttcagcaggccagaggtgttgaacacgtttgtcagtccattcggtgcatgaacatagtcttccaggataattgtgacgatttcagatggattggctgaaagaaatgcctcaatttcctggaaggtatccaatgctggttcaaatgcagtgaaatcattgcatttccctccacttgagtggcatagccatacatctcctttgaagtcatatgtgtctagcataagtgcccgaacgccattatttaactggtcagtgacagtatcctcctggtt

SEQ ID NO: 17599 - DNA, 418 bp, Setaria italica
  Peptide Sequence Number=SeqID_83573
tggtaggtagagaatgcagtacttgtgtgtgggagtgattttggcgaatcggaggcaacacttaatttttgggctccgaaaattttccagcccaacccagtcgtaaaacgtacggacaaactctgcaagcccatatatggttataaaaagatgctatcctacgaggcccatacgggcaatatctaacgtccagtgagagattggtggaaatggcaaggcccagtctctggctgtttcaaactcgcgacgcgtcgctgcgggggagagccggaggcggcggccggccgccgccgggggagtccgctccttgctcagctcaaggacgctatggtgaaacgactggagaagccagagagccatcgccacgacccccagcctcgcatcagggaaggcaggtctggcgcccattcaggcacgc

SEQ ID NO: 17600 - DNA, 496 bp, Setaria italica
  Peptide Sequence Number=SeqID_83574
catcatgcattttcgaccaccggcgcctgtaacgcttgcaggagcagcagtacctggagaagcgctgcttggacctccggcaggagccctagtgcctggagaagctgtggcagtagcaccggcgcctctcctggaaatcaaagagggcctcctcgatttcttttgatgtacaccttgcttctctgattgatgcatcctgaggctctcttcgagatcgatttgggattaatttggtcaaatggggtgcgtggcactatgagtttggggaagatggaattataatggatcagtcaacctccgagcgggagattggagggggaaagcctctgcgcggcagattgggcgggaaactgaactgggcgcacgggaatttctagaggaggcaggagctcgcagttgtgcgggagggagagctcgcggctgcgcggagaacggcgacaggcattcgtgggcagggatttggcgcgcgcgatggccggtcgcggagggcagccgc

SEQ ID NO: 17601 - DNA, 278 bp, Setaria italica
  Peptide Sequence Number=SeqID_83575
caaacatggcacactgcacagagaaaatctgtttctagtagaagtaaactgaatatagctgcatcaatgttattgcttgaagttccatagatattttattgaagcaaattctatgtggagaatttcacgtgtttacactagatgagtatgaccaaaacgagagagactcaatttttttcagtgcaaaatgcttgacatctttgttgtccaaattagatttctctttcctaaggacaacgcagttctgtatgcattcactatcatttgtctggctacca

SEQ ID NO: 17602 - DNA, 517 bp, Setaria italica
  Peptide Sequence Number=SeqID_83576
agaatgtgctgtctactaccaaatatggcatgtaatggttttaacccaaacactctagatatcatgaggaataaatgtggcagtccttttctctattttgtacatttaattgctttgcaacttgtaagacatgtaaatgaggtagaaacctacgactacaacagagtccagttagcatttgtacaagcatgccacaaattcatatagtcttatagcaacataaatttggatgcaaaatgatcacaaatgctggaattctttgacaatccttgctaaaatagttgctgagttgctgacaaactaatatggtgcagttgcgtaacaaaaagcacacacactacaaaaacagcgcagatatttcaccctttttttgcataatgcaaactagttctaggcaaccattcatgccaggggtggacccagaattagcctagggcccgggctgaaatgtttcagtctgtatgcaaaacaacaacgaaaccgacaacttcctaaccctaaactcactgaaaatgat

SEQ ID NO: 17603 - DNA, 504 bp, Setaria italica
  Peptide Sequence Number=SeqID_83577
ttacgttttaatttaaaagtttttactatccatcattttgattgcctctactaggtttcaagctcttttactagatgttgctaaggtctgagttttgggtgcatactattctggccacagatctgttggtgcgttcagattagattgttgacttgtcttttagtgaagatctcgagaagtagaacagtattcggtaaaaatattgggcttcctgaaatactaagacatgatgagcgaagtagtggtctgattctgactagtaagcctggctagctggtgaacctatcgttttaacctcccagttgattcctgaaataagtttcctgcatgttccctgtttctggtatgttatacatctgaaataaagaggtaggacagtatatcttttacaactagaaataggtgctgttcttttttcttttgaacaagaaaggccatttctgctggtgactagtcatagcttccttccagctttggttatgagtatgtctcatatttatcttt

SEQ ID NO: 17604 - DNA, 564 bp, Setaria italica
  Peptide Sequence Number=SeqID_83578
ggccgggaggagcgcctcgcaggagcgcagcacggtcaccgcgctcggcagcgcgcggaggccggcctgcgcgaggaactcgtcgacgcggcgggccaggtccgccgggtgctgcatgtcgaggaacgccgcggcacagcgtagcgcggcggcgttgcgcgcggtgatctcgaagttggcgccgtagcagtaacgcgccgccttctcgaacgcgtcggcgccgcccgggagagcggagaggtcgagctcgacggcggcggaggggtccttggtggccgccgcgacggcccggcggatgtagccgcacctgggcaccatcaccgccttgtggagagcgaagatggagtcggcgatgcggatggtgaggtcggcagggatctcctgggacgaaacccactgggtgatcctgtccatggcggaagcagagattctgctgcagcagctgttggatggcggcggcttgtatgagaggaacagagagcaggtcagagcatgagctgcagagctcacgctggagcgactaggaagactaaaggacaaaggtagtagacgacgaagactaac

SEQ ID NO: 17605 - DNA, 416 bp, Setaria italica
  Peptide Sequence Number=SeqID_83579
ccgtcaactgtaatattgatatcatgatggggatgattgggatgcatttcagcttcatgcgtcagcgcagccttggcttgctctgcctcctccttgctagtaccatcacatcgcaggtaagcctcgaccttctgcagcgatggcaggtttcccaggcccaagtcgagactaccgtcattgcaggcaattcctcagcaccaacaacgaatcccgcgaggataccgaggttcttattgtacacctccagagctagagagcggagagctggcaacctcccgaggatttcgagatcagcctgatgtagctccctcacggcgatccatagattggtgaggtccagaagaagcgatggattcacccaagccggcagtgttgaaaaccaacagcttccttgtgtatccaatacgcggagattg

SEQ ID NO: 17606 - DNA, 251 bp, Setaria italica
  Peptide Sequence Number=SeqID_83580
tacttgtgaaagattgcactcctctaaatccagaacacgtaaaacgcggcagcaggcaagaggcggcactagagaagcagcagctggaaagacaacaactgaccttgcatgtttcatgctgaaagtagcttgagccatcacatgactttcctggccattttgaagggacaaccttcgaatcgtatttgacggagaggtgccttccatatccatattacttagtacagtaacaaaattttcttcccttatca

SEQ ID NO: 17607 - DNA, 248 bp, Setaria italica
  Peptide Sequence Number=SeqID_83581
atgtagttccctcacgtcgatgtatagctgggtgaggtccggaagaagtgatggattcacccaagccggaagtgttgaaaaccaatagctgccttgtgtacaaaatacgcggagatgtcgaggggcgacccaggcatccaatacgccgatgttgcatggaccatgatcatccatgataaatagttcctccatcttttgtagtttgcataggcactccaccagcttgttgttgggctcggtgaattgaa

SEQ ID NO: 17608 - DNA, 249 bp, Setaria italica
  Peptide Sequence Number=SeqID_83582
gacttgggcatgggaaacctgccgtcgctgcaatatgtcaaggctaccatcggtgcaggcaattcctcttgcctcccgcagataaaaccgccagatcacaagctctctgacccttggcatagctccctgttgaaataccactggccacacaaattgacagaagtaacaggttacaaggcacggaatggcaccgagcaccaacaacgaatcctgcaaggataccaaggttcttgttgtccatcttcagag

SEQ ID NO: 17609 - DNA, 258 bp, Setaria italica
  misc_feature (35)..(35): n is a, c, g, or t
  Peptide Sequence Number=SeqID_83583
acaacctttggcgtcaactgcttgctccacctccnccttgctagagccatcacatattaggtcagccgtgacatactgcagcgatggcaggtttcccaggcccaagtcgagactaccatcggtgcaggcaattcctcttgcctcccccacataaaacgtccagaacataagctttctgagccttggcattgctccctgttgaaataccactggccatacaaattgacggaagaacaacaagtactttaactaaaggta

SEQ ID NO: 17610 - DNA, 249 bp, Setaria italica
  Peptide Sequence Number=SeqID_83584
tgttctgctccagcctccacgtcaggagccaccgcttcatcttccggcgtaaaatgtgaatgtagtcctctctaattttgataaaatgtgagggatgattgggatgcatttcagcttcatgcgtcagcgcagccttggcttgctctgcctcctccttgctagcaccataacgtagcaggtcagccttgacatcctgcagcgatggcaggtttcccaggcccaagtcgagactaccatcattgcaggaca

SEQ ID NO: 17611 - DNA, 285 bp, Setaria italica
  Peptide Sequence Number=SeqID_83585
tttcttccgggacctgagaaatacctgtccgccgaagtcccaagtacctcaagtgatgtaaattcccaaggcacttaagcatactattaggttgtaaaagatcgcagtcctctaaatccagaacacgtaaaactcggcagcagtcaagaggcggtggctctagagaagcaaaagctggaaagacaacagctgaccttgtatgttgcatgctgaaagtagcttgagccatcacataactttcctggccattctgaagggacaacctcctaatcgtatttgacggag

SEQ ID NO: 17612 - DNA, 408 bp, Setaria italica
  Peptide Sequence Number=SeqID_83586
ggattcacccaagccggcagtgttgaaaaccaacagctgcctagtgtattcaatacgcggagatgtcgaggggcgacccaagcatccaatccactgatgctgcgttgactaggatagaccatcataactagttcctgcatcttttgtagcttgcataggcactccaatagcttgtcgttacactcgtccaattcaatggacagttgcctcagttcagttagctggcccaactcttctataatgtttctggtggagtcatcaatgcgtaaccatgacaggtgttcaaggcatgtcagatttccaattccgtttggaacttttgtagacccgtcaatgtataggtacatcaactttcttagctggacaacactcgaaggcaacctagaaattttgttgtaccatacatcc

SEQ ID NO: 17613 - DNA, 400 bp, Setaria italica
  Peptide Sequence Number=SeqID_83587
cctcttgtgtaaaccttagtctctgacagtccatggtccatcacttcaatatgaaacataaagatgtatatcatggcggggatgattgggatgcatttcagcttcatgcatcaacgcagccttggcttgctctgcctcctccttgccagcaccatcacattgcaggttagcctggacatgctgcagcgatggcaggtttcccaggcctaagtcgagactaccgtcattgcaggtaatacctcttgtctcccgcacataaaacgtccagaacgcaagcgctctgagccttggcatagctccctgttgaaataccactggccacacaaattgacggaagtaacagcttacaaggcacgagaatgcatcagcaccaacaacgaatctctgaatgatattgtgg

SEQ ID NO: 17614 - DNA, 182 bp, Setaria italica
  Peptide Sequence Number=SeqID_83588
tatcatgtacacgacagcttgatatcatatcatttctattatgtattggttggatcatgcttctgtttataagctcattgaagtaactctctccgagttcaaataggctcttccctgctttttcacattggataaaaccttcacctatccacatccatatcaaacgttccttcctgatttca

SEQ ID NO: 17615 - DNA, 378 bp, Setaria italica
  Peptide Sequence Number=SeqID_83589
atccaaccaattcatgatcgttttgatgatacgatatcaagttgtcgtgtacatgatatggtgcttgatcttatccgctccttgtcgagtgaagaaaactttgttactgtactaagtgatatgggaggcacatctccgtcaaatacgattcgaaggttgtcccttcacaatgaccaggaaagtcaagaggcggcactagagaagcagcagctggaaagacaacaactgaccttgcatgttgcaagctccatgtagcttgagccatcacatgagttttctggccattctgaagggacaacctctgaattttatttgacggagatgtgcctcccatattacttagtacagtaactaaatttttcttcacttgacaaggag

SEQ ID NO: 17616 - DNA, 449 bp, Setaria italica
  Peptide Sequence Number=SeqID_83590
gaatgccacaggtccaatagagcccgtaacacgcattgtaccaggcatggaaatgaagaagcaccaataatgagtctccagattccgagattctcatggtttacctcaacatctacaataaggtagaagagccggcaacctcccaagactttcaagatcctcctgctgtagcttgttcagttcgatagataggaaggataggcccagaagagagaatggatttatcaaatacgacagcttagatgaccagcagcccatcagttccaatctattgagatgtcgaggagcaaccaaggcatccaagtcgcattcaccaaagaccgagatagaaagagactcgatatgttgtagcttgtgtaggcactccaccagatgtatcctgaaactgttgttctgtagagtgcggcaatcaactacccagccacccttaatttccacagatggcccag

SEQ ID NO: 17617 - DNA, 894 bp, Setaria italica
  Peptide Sequence Number=SeqID_83591
acccgggaagacaaggtaggaattaggacaaagtccgtggataaaataagtccactcagaattttgtcaaaacaaatcgaggtccagtgaggaaattatttgcacttaataatgttgtggtaatgcttaagtggttgtggccacgtgcatgaacatttaattaaccctatgcagacttatagtattgtgaacagagggcataaattatcagtccaaaaaagttcatatgtataaattggcgaaaggaatgctttcgtaccttttgtcttcaaggaattctgtgagtgcttctatgagtcgcctctcatccaatgtttcttcgttgatgctcttgccaagatcatatagcaagcctttgtacagtttcttcaggtcaggagtttgagaaacagaaacaaaagcacagcaatcgaatcgtgctctaatatttactattactacttgtctatttggtctaagtagtttgtctttcccagacctccaaatccaacaattgaaactatcttgccttgattcttgggaacttcattctcttctatcataatcttgctgattaactcatcccttgcctcatcaatgccaacaagctcttccacctccatatccggagcgaataaacaagggcgcttatcaacaccatcaccaaggctgacctcatacctgctgcgccgctcgtgcacctcgatgacacagcttttgatccctctgatttctgtagcaatcttacgacgaatcttaggctgcctgaaccatttgagggtcctagcaatggcttccttgaagctatgctgttcggtcgtcttccaccccttgcactgcatgaataaatttgtcaatattgtcctctatatcgtaggacatctctctcactttcctagcccagatcttgtcctg

SEQ ID NO: 17618 - DNA, 519 bp, Setaria italica
  Peptide Sequence Number=SeqID_83592
taaaattaggacaattaggtaagctcataatagctaaatgacaaaatctttctcatattctccacatctagattattttgcggaccagtactaatagaattgtacaccttgtaccactccattttatttcttgctttgcaagctagcaaactagccgccaatcgtaattatagctaatggcacaccagcacatttcttcaatattttgtaagatacttcggccagctcctcatgacatttttcttctgcttcattgttatctttgttcccactaccaaatattcttctatacagtagttttcgggagttatttaaagaaagaggtttcatgttgtaagcacccccagcttgttcagcaacacgagaaatacgggtggttgtaataatagtgtatccaacatcattatcaggcaaagcacatctaatccttttccaaactgatatatcccatacgtcgtcaacaacaacaaaataccttttgtcttcaaggaattctctgagtacttctatgagccgcct

SEQ ID NO: 17619 - DNA, 370 bp, Setaria italica
  Peptide Sequence Number=SeqID_83593
ttcaccagaggtgacaatgatatttagattctggattttttgcagcttgcacaggcactccaccagagatttctccaagctatccatacactcgacgtggcaggaaatacctaacaccctcagttcagttagacaataaattatttctatgtctgtggagtcgtatatgcctatctgcgatagctcctcaagagatgttaggcttgcaatcccatttggcactctcgtatccatgtcaatgcataggcacatcaactttcttagctggacaacactcgaatgcaacctggaaattttattgcgccttacatccaatatttgtaggaaccgcaggtttcctatttcttccgggacctgagaaatacctgtc

SEQ ID NO: 17620 - DNA, 482 bp, Setaria italica
  Peptide Sequence Number=SeqID_83594
gcagtcctctaaatcaaaacacgtaaaactcggcagcaggcaagaggcggcactagagaagcaactggaaagacaacaactgaccttgcatgttgcaagctccatgtagcttgagccatcacatgactttcctggccattctgaagggacaacctcctaatcgtatttgacggagatgtgcctcccatatcacttagtacggtaacaaagttttcttcacttgacaaggagtggataagatcaagcaccatatcatgtacacgacagcttgatatcatatgatctaaaccatgatgtattggttggatcatgcttctgtttataagctcattgaagtaactctctccgagttcaaataggctcttccctgctttttcacattggataaaaccttcacctatccacatctttatcaaacgatccttgtcaatttcataatcttcaggaaacatgctcaaatataacaagcaagtccttaaatc

SEQ ID NO: 17621 - DNA, 689 bp, Setaria italica
  Peptide Sequence Number=SeqID_83595
ccgttttgggtcactcttgttaggcctgtcaatgcataggcacatcaacctttttagctggacaacactcgaaggccacctgaaaattttgttgccccttacatctaatatttgtagaaactgcaggtttcctatttcttccgggagctgatcaatacctgtctcacaaagtcccaagtacctcaagtgatgtatattcccaaggcacttaaggatactagcttgtgaaagatcgcaatcctttaaattccagaacacgtaaaactacggcagcaagtaagatgtggtactagagaactagcagctcgaaaggtggcaacaactgaccttgcatgtttcatgctgaaagtagcttgagccatcacatgactttcctggccattttgaatggacaacctccgaatcgtatttgacggagatgtgcctcccatatcacttagtacagtaacaaagttttcttcacttgacaaggagcggataagatcaagcaccatatcatgtacacgacagcttgatatcatatcaagtaagctatcatgtattggttggatcatgcttctatttataagctcattgaagtaattctctccgagttcaaataggctcttccctgctttttcgcaatggataaaaccttcacctatccacatccttatcaaacgatccttgtcaatttcataatcttcagg

SEQ ID NO: 17622 - DNA, 642 bp, Setaria italica
  Peptide Sequence Number=SeqID_83596
cctcccaaacaagttgatagaacatgtgcttgagtaatttttccaggtcaggtgtctgagataccgaaacaaaagctgcgcactcaaattgtgctgtaagctttttatacaccacattagcaagagttgtctttcccaggcctccaaacccaacaatggaaattatcttgtcttgctgcttggacgacacttcattgccttccatcagaatccgaattatctcatctcttgcatccgcaatgccaacgaggtcagtcaccttctcgtactgataaagtaatcgagggtcgattgcgacatgcttagctacattactgtttgataacttgtaccgatcatgccgcttggccacctcttcaacacggctcttgatgtctctgatttcagtagcaatgccatggcgaaccttggcctttctgaacaaaccaacacttctatcaatgaactgcttgatgccacgcagcttggcctgctcattatattgccctctccacggaccatgaatgtgtcaatattgtcctctatatcgtaggacagctctctcaaatccttggcccaaatcttgtcctgaatgtcaagctggtcagccggtgtgttggagactttctcaagagcacccttcatgctctcgagctcagcttg

SEQ ID NO: 17623 - DNA, 467 bp, Setaria italica
  Peptide Sequence Number=SeqID_83597
ccaaggccctgaaccactgagacgatacaaggcaactagatcaggggcgcaggtgacagctcagtccctttgcaatgagtaaagtaaaacggtaatatgactacagagggggaaaagttagtcagggattacaatcatatccactgacaatgtcatcctacactctcgcaacgaaatgccataacagttgatgcacagctgaaacgatcaaagctcagacgcatgtgtgcagcattcactgtttactcacaggttgagggtgtctggtaaagctcatggccgagcagtttaacctgtgcatgcgtggcgaaacagagggactttgtcatccgctctgctccagcttccactccagattccggcatattctcttatattcgtcgtcatctcttagcacctcttataatatggatacaatgatagggatgattgggatgcatttcagcttcatgcgttctagtcgtcta

SEQ ID NO: 17624 - DNA, 622 bp, Setaria italica
  Peptide Sequence Number=SeqID_83598
atgattgggatgcatttcagcttcatgcgtcagcgcagccttggcttgctctgcctcctccttgccaacaccatcacgtagcaggtgagcctcgacattatgcagcgatggcaggttccccaggcccaagtcgagactaccatcattgcaggcaattcctcttgcctcccccacataaaacgaaaagaacacaagcgttctgagccttggcattgctccctgctgaaataccactggccacacaaattgatagaagacacagtatacaaggcaggggaacgtaccagcaccaacaacgaatcccacaaggatacctaggttcttattgtccacctttagacctagagagcggagagctggcaacctcccgaggattttgagatcggcctgatgtagctccctcacagcgatccatagacaggtgaggttcggaagaagcgatggattcacccaagccggaagtgttgaaaacagacagctggatcgtgtattcaatttgcggagatgtcgaggggcgacccaggcatccaatccgccgatgctgcattgatcacgatagaccttgatagttagttcctgcatcttttgtagcttgcataggcactccgacagcttgtcgttc

SEQ ID NO: 17625 - DNA, 618 bp, Setaria italica
  Peptide Sequence Number=SeqID_83599
ctcgacaatctgcagcgctggcaggttcccaggcccatgttgagactaccgtcattgcaggcaattgtctcccgcagataaaaccgctggagcacaagcttttgagccttggcattgctccatgttgaaataccactggccacacaaattgacggaagcgacatcttacaaggcatgggaacgcaccagcaccaacaacgaatcccgcaaggatactgaggttcttcttgtccacctccaaaaatagaaggcggagagctggcaacctcccgaggatttcgagatcggcctgatgtagctccctcacggcgatgaatagcttggtgaggtccagaagaagcgatggattcacccaagctggaagtgttgaaaaccaacagctgcgtagtatattcaatacacggagatttcgaggggcgatccaggcatccaatccgccgatgctacattgaccaggatagaccgtgataattaggttctgcatcttttgtagcttgcataggcactccgacagcttgtcgttccactcttccaatcgaatggacagctgcctcagttcagttagctggcccaactcttctataatatttatggcagagtcatcaatgtgtaaccatg

SEQ ID NO: 17626 - DNA, 994 bp, Setaria italica
  Peptide Sequence Number=SeqID_83600
acagtacattctcatttttcctctcaatgtggatccaggaaaaacgatgtcagtattgcctttgcatttttcaattaattccaaattctaacgcacagaacttggtcaattaagagagtaaaatatgtttcgaggatcaaggtcctttaaaattcttattgtctatatgtacccatatctatctctctattttttatctatattttcttcttcgccatcactgtgccagcgctgatgcctctgctcatcgccgctgcagcatagtcagctgatggcagcgccgtccagtagcatccggaaaaagataatctgtatgaaggtgcaagtacttgggtttcaacccggacagcgggctcgtctactgctgctgcggcccaatcctgcatctacaaatgttaccatggacttcttgatgccttgatccgtatgatttagcaactgaataatgaacaaatcaaatgtctgcaagtatggtcgatcaactgaatacatactgccgtccatgcttacggctcacaagatgattacgctcacaagctgcaacattaacccaaaacagccaaagccctgaaccactgagacgatacaaggcaactaggtcaggggcgcaggagacagctcagtccctttgcaatgactataataaacggtaatatgagtacagaggggtaagttagtcagggattacaatcatgtgtgcagcattcattgtttactcacaggttgagggtatctggtaaagcacatggccgagcagtttaacctctgcatgcgtggcgaaacagagggactttatcacctactctgctccagcttcaccttccggcgtaaagtcttcgtcatctgtaattttgattcctagtcgttgagggatgattgggatgcatttcaccggcatgggtcagcgcagccttggcttgctctgcctcctccttgctagtaccatcacatcgcaggtcagctcggacatctgcagcgatggcaggttttcgag

SEQ ID NO: 17627 - DNA, 1087 bp, Setaria italica
  Peptide Sequence Number=SeqID_83601
actattgtagtccagtcaatgtataggcacatcaacttgcttagctggacaacactcgaaggcaacctggaaatttcattgacccttacatccaatgtttgtagaagctgcaggcttcctatttcttccgggagctgagtaatacctgtccgacgaagtcccaagtacctcaagtgatgaatattcgcaaggcacttaaggatactattagcttgtgaaagattgcagtcctttaaatccagatcacataaaactcggaagctggcaagaagcgggactagagaaacagaagctcgaatgatacgaaatgaccattcatattgtgagatccatttaaattttgccatcacatgagttttttggctattctgatgggacaacatctgaatcgtatttgacggagatgtacctcccatattactcagtacggtatcaaagttttcttcacttgacaaggagcggataagatcaagcaccatatcatgtacacgacaacttaataacatatatgtacgatcatgaattggttggatcatgcttctgtttacaagctcattgaaataactctctccaacttcaaataggcttttccctgctttttcacataggataaaaccttcacctatccacatccttatcaaacgatccttgtcaatttcataatcttcaggaaacatgctcaaatatatcaagcaagcccttaaatgtgatggtagctcataatagctaaatgacaaaaatctttctcatattctccatatctagattgttttccagaccagtaccaacagaattgtacacctcgtaccactccattttattcttgctttgcaagctagcaaactagccatcgtaataattgctaagggcacaccagcacatttctttagtattttgtcagatacttcagccaactcatcgtcaggacattttactatgtcttcattgttgtctttgtttccattaccaaatattcttctgtataataattttctggagctttcaagacaaaggggtttcatcatgtaggcaccaccaacttgtttggctacctttaaaatacgggtagttgtgataattatgtatc

SEQ ID NO: 17628 - DNA, 1558 bp, Setaria italica
  Peptide Sequence Number=SeqID_83602
ccgaaacagagacagtgaaaagaatatttgaaataaggggtcggaagaacagctgaaggccggctggcacaccttagtctctgacagtccatggtccatcacttcaatctcaatcataaagatatatatcatcgtggggatgattgggatgcattttagcttcatgcgtcatcgcagcctcggcttgctctgcctcctccttgccagcaccatcacaacgcaggtcagccacgacatgctgcagcgatggcaggttccccaagcccaagttgagactaccatcggtgcaggcaattcctcttgtctcccgcagataaaaccgccagaacacaaggcgtctgagccttggcatagctccctgttgaaataccactggccacacaaagtgccagaagtaacaacttacaaggcacgggaatgcaccagcagcaacaacgaatcctgcaaggataccgaggttcttattgtccacctccagagatagcaagcggagagctggcaacctcccgaggatttcgagatcggcctgatgtagctccctcacatcgatgcttagcttggtgaggaccagaagaagcgctggattcacccaagctggaagttttaaaaaccaacagccctgtgtactgaattcgcggagatgtcgaggggcgacccaggcatccaatccaccgatgctgcgttgacagctgataatgataaatagttcctgcatcttttgtagcttgcataggcactccaacagcttatcgttccactcgtccaatcgaatgcacagctgccttagttcagttagctggcccaactcttctacattaatgtttctggtggagtcatcaatgcgtaacactgacagctgttcaaggcatgtcaggtttccaattccatttggagctcttgtagactcgtcaatgtataggcacatcaacttttttagctggacaatactcgaaggcaacctggaaattttgttgtcccttacatcaattgtttgtagaagctgcaagttttctatttcttccgggagctgagaaatacctgtccgacgaagtcccacgtacatcaagtgatgtatattcccaaggcacttaaggatactcttagcttgtgaaagattgcagccctctaaatccaaaacacgtaaaactcgacagcaggcaagagacggcactagagaagtggcagctggaaagacaacaactgaccttgcatgttgcatgctgaaagtagcttgagccatcacatgactttcctggccattctgaagggacaacctccgaatcgtatttgacggagatgtgcctcccattttacttagtaaagtaacaaagttttcttcacttgataaggagcggataagatcaagcaccatatcatgtacacgacagcttgatatcatatcatctgaactatcatgtattggttggatcatgcttctgtttataagctcattgaaataactctctccgagttcaaataggctcctccctgtctttttcacattggataaaaccttcacctatccacatccttatcaaacgatccatctcaattttat

SEQ ID NO: 17629 - DNA, 813 bp, Setaria italica
  Peptide Sequence Number=SeqID_83603
gcagtaaaaatcttacgatgaaacaaaacggtaatatgagtacagatggggaagttagtcagggattacaatcatatccactgacaatgtcatcctacaccctcgcaacgaaatgccatattggttgatgcacagcagaaacgatcacagcagaaagcattcattgtttactcacaggttgagggtgtctggtaaagctcatggccgagcagtttaacctctgcatgcgtggcgaaacagagggactttgtcatctgctctgctccagcttccggcgtaaagtcttatattagccgtcaactgtaatattgatatcatgatggggatgattgggatgcatttcagcttcatgcgtcagcgcagccttggcttgctctgcctcctccttgctagtaccatcacatcgcaggtaagcctcgaccttctgcagcgatggcaggtttcccaggcccaagtcgagactaccgtcattgcaggcaattcctcttgcctcccgcagataaaaccgaaagaatataagctctctcagccttggcatagctccctgcttaaataccactggccacacaaattgatagaaggcacagtatacaaggcatgggaacgcaccagcaccaacaacgaatcccgcgaggataccgaggttcttgttgtacacctccagagctagagagcggagagctggcaacctcccgaggatttcgagatcagcctgatgcagctccatcacggagatgtgtagcttggtgagatccagaagaagcgatggattcacccaagccggcagttgtttgtaaaacctaactagtcttt

SEQ ID NO: 17630 - DNA, 2230 bp, Setaria italica
  Peptide Sequence Number=SeqID_83604
aggcatccaatccgccgatgctacgtcgaggttcgcacgtgatatgtaggatctgaattttttgtagcttgcataggcactctgacagcttgtcgttccactcgtccaaatcaatggacagctgcctcagttcagttagctggcccaactcttctacaatgtttctggtggggtcatcaatgagtaacactgacagctgttcaaggcatgccaggtttccaattccgtccggtgcacttgtaaacgagtcaatgtataggcacaccaactttcttagctggacaacacttgaaggcaacctggaaattttattgtcccttgcatccaatgtttgtagaagctgcaggtttcctagttctttcgggagccaagcaatacgtgtccaattaagtcccaagtacctcaagtgatgtagattcccaaggtacttaaggctactattagctcgtgaaagatcgcagccctctaaatccaaaacacgtaaaactcggtagcagtcaagaggcggcactagagaagcggtagctggaaagacaacaactgaccttgcatgttgccagctccatgtagcttgagccatcgcatgactttcctggctattctgaagggacaacctccgaatcgtatttgatgaagatgtgccttccatatcacttagtacggtaacaaagttttcttcacttgacaaggagcggataagatcaagcaccatatcatgtacacgacagcttgatatcatatcatctataatacgatgtattggttggatcatgcttctgtttataagctcgttgaaataactctctccgagttcaaataggctcttccctgctttttcacattggataaaaccttcacctatccacatccttatcaatcgatccttcttaatttcataatcttcaggaaacatgctcaaatataacaagcaagtccttaaatggcacggtagctcataatagctaaatgacaaaatctttctcatattctccacatctagattgttttccagaccagtaccaatagaattgtacacctcataccactccattttatttcttgctttggaagctagcaaactagccatcgtaattatagctaatggcacaccagcacatttcttcagtattttgtcagatacttcggccagctcctcatgacatttttcttcttcttcattgttgtctttgttcccattaccaaatattcttctatacagtagtttttgggagttatttaaagaaagaggtttcatgttgtaagcacccccagcttgttcagcaacatgagaaatacgggtggttgtaataatagtgtatccaacatcattatcaggcaaagcacatctaatcatattccaaactgatatatcccatatgtcatcaacaacaacaaaataccttttgtcttcaaggaattctctgagtacttctatgagccgcctctcacccaatgcttcgtcattgatgctcttgccaagatcatatagcaagtcgttgtacagtttcttcaggtcaggagtttgagaaacagaaacaaaagcatagcaatcaaactgtgctctaatctttttgtacactgcattggcaagagttgtctttcccaggcctccaaatccaacaattgaaactatcttgccttgcttcttgggaacttcattctcttgtatcataatcttgctgagtaactcatcccttgcctcatcaatgccaacaagctctttcacctccgtgtactgggcgaataaacgagggtccacagttacaggcttatcaacaccaaggctaacctcatacctgcggcgccgttcatgcacctcgatgacacggctcttgatctctctgatttctatagcaatcttacgacgaatcttaggctgcctgaaccatttgagggtcctatcaatggcttccttgaagctatgctgttcgaccgtcttcctccccttgcactgcacgatatattggtcaatgttgtcctctatatcgtaggacatctctctcactttcctagcccagatcttgtcctggtcgtcaatcttgtctgctggtgtcctcgagatcttctcggagggcaccttgcatgctctcgagctcagcttggaggaagatgatccctcccttcacctccttttgcagattgtactcgccaactagcaactcaaccgagcttgtgcaggaggcttggaattgcccctgtcacgatctccatggatttgtcgctgagcaag

SEQ ID NO: 17631 - DNA, 2335 bp, Setaria italica
  Peptide Sequence Number=SeqID_83605
ccaggatagaccgtgatagttagttcctgcatcttttgtagcttgcataggcactccaacagcttgtcgttccacttgtccaattgaatggatagctgcctcagttcagtaagctggtccaactcttctataatgtttctggtggagtcattaatgcgtaaccttgacagctgttcaaggcatgtcaagtttccaattccatttggaactattgtagtccagttaatgtataggcacatcaactttcttagctggacaatactcgagggcaacctggaaattttgttgtgctttacatccaatgtttgtagaaactgcaggtttactatttcttccgggagctgagaaatacctgtcttaaatagtcccaagtacctcaagtgatgcagattcccaaggtacttaaggctactattagcttgtgaaagattgcaatcctctaaatccagaacacgtaaaactcggcagcagtcaagaggcggcactagagaagcagcagctggaaagacaacaaccgaccttgcatgcttcatgctgaaagtagcttgaaccatcacatgactttcttggccattctgaagggacaacctccgaatcgtatttgacggagatgtgcctcccatatcacttagtacagtaacaaagttttcttcacttgacaaggagcggataagatcaagcaccatatcatgtacacgacaacttaataacattatgtcatcaagatcatattctggttggatcatgcttctgtttataagctcattgaaataactctctccaacttcaaataggcttttccctgctttttcacataggataaaaccttcacctatccacatccttatcaaacgatccttgtcaatttcataatcttcaggaaacatgctcaaatataacaagcaagcccttaaatggcatggtagctcataatagctaaatgacaaaatctttctcatattctccacatctagattgttttccagaccagtaccaacagaattgtacacctcataccactccattttatttcttgctttgcgagctagcaaactagccatcgtaattatagctaatggcacaccagcacatttcttcagtattctatgagatacttcggccaactcctcatgaggatatttttcttcttcttcattgttgtctttgtttccattaccaaatattcttctatacagtagttttcgagagttattcaaagaaagaggtttcatgttataaacaccgccagcttgttcagcaacatgagaaatacgggtggttgtaataatagtatatccaacatcatcattatcgggcaaagcacatctgatcatttttcaaactgagatatcccatatatcatcaataacaacgaaataccttttatttcgaagaaattctctgagtatattgatgagccgcctctcatccaatgtttcgtcattgatgctgtagccaagatcatagagcaagcccttgtatagtttcgtcaggtctggagtttgagaaacagaaacaaatgcacagcaattgaatcgtgctctaattttttcatacactgcattggcaagagttgtctttcccaggcctccaaatccaacaattgaaactatcttgccttgattcttgggaacttcattctcttctgtcataatcttgctgattaactcatccctcgcctcaccaatgccaacaagctctttcacctctgtgtactgagcgaataagcgaggatccacagtaacaggtttatcaacaccaaggctgacttcatacctgcggcgccgctcgtgcacctcgatgacacgtctcttgatctctctgatttctgtagcaatcttacgacgaatcttaggctgcttgaaccatttgagggtcctatcaatagcttccttgaagctatgttgttcagccgtcttcctccccttgcattgcactatatatttgtcaatattgtcctctaaatcgtaggacatctctctcactttcctagcccagatcttgtcctggtcgtcaatcttatctgctggtgtcctcgagatcttctcgagggcaccttgcatgctctcgagctcagcttggaggaagatgatccctcccttcacctccttttgcagattgtactcgccaactagcaactcaccgagcttgtgcaggaggcttggaattgtccctgtcacgatctccatggatttgtccctttgtggatggccgcttgggttctttcggatgcgggtgctcgccctgccttttcgtaggctgtagctatcgcctattgggaatggatgggcatgaagaagattgaagaacaagagtgcgacagctaggactcact

SEQ ID NO: 17632 - DNA, 2571 bp, Setaria italica
  Peptide Sequence Number=SeqID_83606
gtgcaacaatcaattcattatgtcataatagtgggaatggtacatacgctctgcaatagcgccaacaaaatcacgggtcctaccggcgcgccaaaggtacgccaggtttctagttaacccaaaaaataccttgtttttatttttcatcaaaataaacagccaaggccctgaaccactgagacgatacaaggcaactagatcaggggcgcaggagacagctcagtccctttgcaatgactaaaataaacggtaatatgagtacagagggggaggtagtcagggattacaatcatatccactgacaatgtcatcctacactctcgcaacgaaatgccatattggttgatgcacagcagaaacgatcaaagctctgagtctcagacgcatgtgtgcagcattcattgtttactcacaggttgagggtgtctggtaaagttcatggccgagcagtttaacctctgcatgcgtggcgaaacagagggactttgtcatctgctctgctccagcttccggcgtaaactcttatattcgtcgtcatctctgcatgcgtggcgaaatatctgctccagcttccactccagcttccggcttattctcttataatcgtcgtcatctataatttggatataatgatcgggatgattgggatgcatttcagcttcatgcgtgaacacagccttggcttgctctgcctcctccttgccagcaccatcacatcgcaggtcagcctcgacatgctgcagcgatggcaggtttcccaggcccaagttgagactaccgtcattgcaggcaattcctcttacctcccaggaccagaaatgaagcactttgagccttggcatagctccctgctgaaataccactggccacacaaattgaaagaacaaacagcttacaaggcacgggaacgcatcagcaccaacaacgaatcctgcaaggataccgaggttcttgttctccacctccagttttagaaagcggagagctggcaaccttccgaggatttcgagatcagcctgatgtagctccctcacggcgatgtttagattggtgaggtccagaagaagcgatggattcacccaagccggcagtgttgaaaaccaacatttgcgttctgtacgcaatacgcggagatgtcgaggggcgacccaggcatccaatccgccgatgctgcgttgaccatttaccatttgatatctagttcctgcatcttttgtagcttgcataggcactccaacagcttgtcgttccactcgtccgccaattcaatggacagctgcctcagttcagttagctggcccaactcttctataatgtttatggcagagtcatcaatgcataactctgacagctgttcaaggcatgtcaggtttccaattccgtttggaactcttgtatagtggtcaatgtataggcacatcaactttcttagctggacaacactcgaaggcaacctagaaattttgttgccccttacatttaatgtttgtagaaactgcaggtttcctatttcttccgggagctgagaaataactgtcttacatagtcccaagtacctcaagtgatgcagaatcccaaggtacttaaggctactattagcttgtgaaagattgcagtcctctaaatctagaacacgtaaaactcggcagcaggcaagaggcggcactagagaagcagcagctggaaagacaacaactgaccttgcatgttgcaagctccatgtagcttgagccatcacatgactttcctggccattctgaagggacaacctcctaatcgtatttgacggagatgtgcctcccatatcacttagtacggtaacaaagttttcttcacttgacaaggagcggataagatcaagcaccatatcatgtacacgacagcttgatatcatatcatctaaactattatgtattggttggatcatgcttctgtttataagctcattgaagtaactctctccgagttcaaataggctcttccctgctttttcacattggataaaaccttcacctatccacatctttatcaaacgatccttgtcaatttcataatcttcaggaaacatgctcaaatataacaagcaagccctcaaatggcatggtagctcataatagctaaatgacaaaatctttctcatattctccacatctagattgttttccagaccagtaccaatagaattgcacacctcataccactccattttatctcttgctttgcaagctagcaaactagccatcgtaattatagctaatggcacaccagcacatttttccagtattctgtcagatacttcggccaactcattgtcagaacatttttcttcttcttcattgttgtctttgttcccactatcaaatattcttctaaaaaataagtgttcgagagttgttcagagaaatgggctgcaagttgtaagcacggccaacttgttcagcaatattaaaattacgggtagttgtgattattttgtttccaacattatcaccaggcaaagcacgcttaatcattttccagtctgagatgttccatatgtcatcaataacaatgaagtacctcttgttctcg

SEQ ID NO: 17633 - DNA, 2989 bp, Setaria italica
  Peptide Sequence Number=SeqID_83607
tccgacgtaaagtcttatattactcatcatcatcatcttcaatatggatctcataacggggatgattgggatgcatttcaacttcatgcgtcagcgcagccttggcttgctttgcctcctccttgctagtaccatcacagcgcaggtaagcattgaaatcctgcagcgatggcaggtttcccaggcccaagtcgagactaccgtcattgcaggcaattcctcttgcctcccgcagataaaaccgatcgaacataagctctttgagccttggcataaccccgtgctgaaataccactggccacacaaatcgatggaagatacagtctacaaggctcgggaacgcaccagcaccaacaacgaatcccgcaaggataccaaggttcttattgtccacctgcagagatagaaagcggagagctggcaacctcccgaggatttcgagatcggcctgatgtagctccctcacggcgatggatagcttggtgaggtccagaagaagcgatggattcacccaagccggcagtgttgaaaaccaacagctgtctggtgtactcaatacgcggagatgtcgaggggcgacccaggcatccaatccgctgatgctacgttgatcaggattgaccatgatacgtaggacctgaattttttgtagcttgcataggcactccgacagcttgtcgttccactcgtccaaatcaatggacagctgcctcagttcagttagctggcccaactcttctataatgtttatagcagagtcatcaatgtgtaacaatgacagctgttcaaggcatgtcaggtttccaattccgtttggcactcttgtagactcgtcaatccagaggcacatcaactttcttagcaggacaacacttgaaggcaagctgaaaattttggtttcccttacatccaatgtttgtagaagctgcaggtttcctatttcttccgggacctgagaaatacgtgtgtcaactaagtcccaagtacctcaagtgatgcagaatcccaaggtacttaaggctactattagcttgtgaaagattgcagtcctctaaatccagaacacgtaaaactcggcagcaggcaagaggcggcactagagaaacagcagctggaaagacaacaactgaccttgcatgttgcaagctccatgtagcttgagccatcacatgactttcctggccattctgaagggacaacctccgaattgtatttgacggagatgtacctcccatattactcagtacggtaacaaagttttcttcacttgacaaggagcggataagatcaagcaccatatcatgtacacgacaacttaataacatacctgcacgatcatgaattggttggatcatgcttctgtttataagctcattgaaataactctctccaacttcaaataggcttttccctgctttttcacataggataaaaccttcacctatccacatccttatcaaacgatccttgtcaatttcataatcttcaggaaacatgctcaaatataacaagcaagcccttaaatggcatggtagctcataatagctaaatgacaaaatctttctcatattctccacatctagattgttttccagaccagtaccaacagaattgtacacctcgtaccactccattttatttcttgctttgcaagctagcaaactagccatcgtaactatagctaatggcacaccagcacatttcttcagtattctgtcagatacttcggccaactcatcgtcaggacattttactatgtcttcattgttgtctttgctcccattaccaaatattcttccatacagtagttttcgggagctctcaagacaaaggggtttcatcgtgtaggcaccaccaacttgttcggctacctttaaaacacgagtggttgtgataattatgtatccaccaacatcatcgggcaaagcacatctaatcgtatcccaaatcgagacactccatatgtcatcaataacaatgcagtacctcttcgtctgaaggagttttctggtttgatcgatgagttgcctctcatccaatgtttgatcattgacgttctttccaagttcatagagcaacctcttgaagaattccctcatgtcaggattttgagacacaataacaaaagcccagcaatcgaatttttccttgatcttttcatacaccactttagcaagagtcgtctttcccaggccaccaaatccaactatggaaactaccttgccatgctggctggacacaccatccccttccaccagaatgttaatcacctcatcccttgcctcatcaatgccaacgagctctgttgccttcttgtactgagccaacaaacgaggatcaacagcagcaggcttatcgacatcatcgatcttgtacctctcacgccgctcgtgcacctcgatgacacggctcttgatctctctgatttctgtagcaatcttacgacgaatcttaggctgcctgaaccatttgagggtcctatcaatggcctccttgaagctatgctgttcgaccgtcttcctccccttgcactgcacgatatatttgtcaatgttgtcctctatatcgtaggacatctctctcactttcctagcccagatcttgtcctgatcgtcaatcttgtctgctggtgtcctcgagatcttctcgagggcaccttgcatgctctcgagctcagcttggaggaagatgatccctcctttcacctccttttgcagattgtactcgccaactagcagctcaccgagcttgtgcacgaggctcggcagtgcccccaccacgatctccatggatttgtcccggtttgccggatcgcgccgccagccgctcgtcgccggaccgagaggttgcttgattcaagcttgctcggccgcaacacagctcaccgctcgcagccaccttggaagagcaccaagcggccgccttggaagagcacacgaagcagaggtcgaaggtggaagagcacacgatgcaaatgcaggggaaggtg

SEQ ID NO: 17634 - DNA, 3835 bp, Setaria italica
  Peptide Sequence Number=SeqID_83608
aacccaaaatacctgttttatttttcatcaaataaacagccaaggccctgaaccactgagacgcaactagatcaggggcgcaggagacagctcagtccctttgcactgaaaactgatgatgggtggttccttgcactgaaacagcaggctgcagtaaaaatcttacgatgaaacaaaacggtaatatgagtagaaagggggaagttagtcagggattacaatcatatccactgacaatgtcatcctacactctcgcaacgaaatgccatattggtttttgcatagcagaaacgatcaaagctctcagtcttggacgcatgtgtgcagcattcattgtttactcacaggttgagggtgtctggtaaagctcatggccgagcagtttaacctctgcatgcgtggcgaaacagagggactttgtcatctgctccgctccagcttcaccttccggcgtaaagtcttatattactcgtcatctgaatcgtaatctataatttggatataatggcggggataattgggatgcatttcagcttcatgcgtcagcgcagccttggcttgctttgcctcctcccggtcagcaccatcacatcgcaggatagcattgaatccctgcagcgatggcaggttccccaggcccaagtcgagactaccatcattgcaggcaattcctcttgtctcccgcagataaaacgacaagaacacaaattctctaaaaaaaatatttctgagccttggcatagctccctgctgaaataccactggccacacaaattgccagaagtaacaggttacaaggcacgggaacgcgaccagcaccaacaacgaatcctgcaaggatatcgaggttcacgttgtccaccttcagttctagatagcggagagctggcaacctcccgaggatttcgagatcaacctgatgtagcttaatcacggcgatctttagattggtgaggtccagaagaagtgatggattcacccaagccggcagtgttgaaaaccaacagctgcatttcgtattcaatacgcggagatgtcgaggggcgacccaggcatccaatccgccgatgctgcattgacccattataatgataaatagttcttgcatcttttgtagcttgcataggcactccaacagcttgtcgttccacttgtccaattcaatggacagctgcctcagttcagttagatggcacaactcttctataatgtttctgttggagtcatcaatgcgtaaatatgatagctgttcaaggcaagtcaggtttccaattccgtttggcactcttgtagactcgtcaatgtagagatacatcaactttcttagctggacaacactcgaaggcaacctagaaattttgctgccacttacatccagtgtttgtagaagctgtagatttcctatttcttccgggagctgaaaaatacctgtccgacaaagtcccaagtacctcaagtgatgcagattcccaaggtacttaaggctactattagctcgtgaaagatcgcagctcgctaaatctagaacacgtaaaactcggcagtaggcaagaggcagcattagagaagcagcagctgaaaaaacaacaactgaccttgcatgttgcaagctccatgtagcttgagccatcacatgactttcctggccattctgaagggacaaccttcgaatcgtatttgacggagatgtgcctcccatattacttagtacagtaacaaagttttcttcacttgacaaggagcggataagatcaagcaccatatcatgtacacggcagcatgatatcttatcaattccattatgtattggttggatcatgcttctgtttataagctcattgaagtaactctctccgagttcaaataggctcttccgtgcttcttcacattggataaaaccttcacctatccacatccttatcaaacgattcttcccaattatatagtcttcaggaaacatgctcaaatataacaagcaagcccttaaatggcatggtagctcataatagctaaatgacaaaatctttctcatattctccatatctaaattgttttccagaccagtaccaatagaattgtacacctcataccaatccattttatttcttgctttgcaaactagtaaactagccatcgtaattatagctaatggcacaccagcacatttcttcagtattctatcagatatttcggccaactcatcgtcaggacattttactatgtcttcattgttgtctttttttccataaccaaatattcttctaaaaaatagtgttcgagagttgttcagagaaatgggctgcaagttgtaagcaccgccaacttgttcagcaatattaagaatacgggtagttgtgattattttgtttccaacattatcaccaggcaaagcacgcttaatcattttccagtctgagatgttccatatgtcatcaataacaatgaagtacctcttattctcgaggaattctctaagctcgctgggaacatcactgcttatgttactttccgtcccgacaagttgatagaacatgtgcttgagtaatttttccaggtcaggtgtctgagataccgaaacaaaagctgtgcacttaaattgtgctctaagctttttatacaccacatcagcaagagttgtctttcccaggcctccaaacccaacaatggaaactatcttgtcttgctgcttggacacttcatcgccttccatcagaatccgaattatctcctctcttgcctcctcaatgccaacgagctctgtcaccttctcgtactgagaaaataatcgagggtcgactgtgacaggcttagctacattactgtttgagaacttataccgatcatgccgcttggccacctcttctacacggagtttgatgtctctgatctcggtagcaatcccatggcgaatcttggcctttctaaacaaaccaacacttctatcaatgaacttcttgatgccatgcaggttggcctgcacattgcacttgccacggaccatgaatgtgtcgatactgtcctctatatcataggacagctccctcagattcctggcccagatcttgtcctgaatgtcaagcgtgtctattggtgtattggagaccttctcgagggcacccttcatgctttcgagctcagattggaggaacctgatctcacccttcacccccttttgcagattgtactctccgatgagcagttcaccgagttttttatgacgcttggcagtgccccagccatgacctccatttctccgatgagcagtctggtcgcaatggagccttgtcgccgccggtgcaggctctccccgccgctcgtcgccggaccaagctcccttgattcgaagtcgctgctgcagccacccagctcaatgctctgtggtcgctaatgatgccttggaagcggacggtgaaggtaacaatgagcgcccgctcactcgctggtacaaccaccaaactcaatgcttgctggccgctgctggcttcgaagagaacgaaagagcccgatgggtatcgaagaagggaattattggatctctgcacgtcctgtaacgattgcccatgtgaccagtggcggatccagaaacgggcttcgccccgggcaaattaagagtcttccatgataaaaaaaggaccatacatgtcttcatgaattacaccacttccacttgttccgatgtcctcaattcttgaggcttacactgagtagtagcgggagtaaggattgccgctgccgcgtcaacacttccctcagggacaggctcctccttgcattgagtagcggttgcagcaggggctgggacgctaacatgatccacgattgactgcaccgaaag

SEQ ID NO: 17635 - DNA, 3284 bp, Setaria italica
  Peptide Sequence Number=SeqID_83609
ccaaaataccttgttttatttttcatcaaataacagccaaggccctgaaccactgagacgcaactagttcagtcgctttgcaatgagtaaaataaacgttccttgcactgaaaagtgaaaactcatgatgggtggttccttgcactgaaacagcaggctgcagtaaaaatcttacgatgaaacaaaacagagggggaagttagtcagggattacaatcatatccactgacaatgtcatcctacactctcgcaacgaaatgccataacagttgatgcacagcagaaacgatcaaagctctgagtctcagacgcatgtgcgcagctccagcatcaggcatatctgcttcatctcccggtgtagctgagtctcatagcagtcgtcatttgtttatttaagatacgagatgagggatgattgggatgcattttagcttcatgcatcagcgcagccttggtttgctctccctcctccttgccagcagcatacaggaaagcatggacatcctgcagcgatggcaggttccccagacccaagtcgagactaccgtcattgcaggcaattcctcttgtctcccccacataaaacggaaagaacataagccatctgagccttggcatagctccatgctgaaataccactggccacacaagtccaaggaagtaacagcgtacaaggcacgggaatgcaccagcaccaacaacgaatcctgcaaggataccgaggttcttattgtccacctccagaaatagaaagcggagagctggcaacctcccgaggatttcgagatcggcctgatgtagctccctcacggcgattttcagcttggtgaggtccagaagaagtgatggattcacccaagcaggaagtgttgaaaaccaacagctgctttgtgtttgcaatacgcggagatgtcgaggggcgacccaggcatccaatccgccgatgctgcgttgactaatcttgcccgtgataacgagttcctgcatcttttgtagcttccataggcactccaacagcttgtcgttccactcgtccaattcaatggacagcttcctcagttcagttagctggcccaactcttctataatatttctggtggagtcatcaatgtgtaactctgacagctgttcaaggcatgtcaggtgtccaattccgtttggaactcttgtacggtactcgccaatgcataggcacatcaactttcttagctggacaacactcgaaggcaacctggaaatttgagtaccgcttacatccaatgtttgtagaagctgcaggtttcctatttcttccggtagccaagaaatacatgtatcacgtagtcccaaatacctcaagtgatgcagattctcaaggtagttaaggctactattagcttctgaaagatagcagtcctttaaatccagaactcgtaaaactcggcagcagtcaagaggcggcactagagaagcagcagctggaaagacaacaactgaccttgcatgttgcaagctccatgtagccttagccatcacatgactttcctggtcattgtgaagggacaaccttcgaatcgtatttgacggagatgtgcctcccatatcacttagtacagtaacaaagttttcttcactcgacaaggagcggataagatcaagcaccatatcatgtacacgacaacttgatatcgtatcatcaaaacgatcatgaattggttggatcatgcttctgtttataagctcattgaagtaactctctccgagtccaaataggctcttccctgctttttcatatttgataaaaccttcacctatccacatccttatcaaatgatccttctcaatttcataatcttcaggaaatatgctcaaatataacaagcaagcccttaaatggcatggtagcttataatagctaaatgacaaaatctttctcatattctccacatctagattgttttccataccagtaccaatagaattgcacacctcgtaccactccattttatctcttgctttgcaagctagcaaactagccatcgtaataatagccaagggcacaccagcacatttattcagtattctgttagatacttcggccagctcctcatgaggacatttttcttcttcttcattgttgtctttgttcccattaccaaatattcttctatacagtagttttcgggagttattcaaagaaagaggtttcatgttgtaagcacccccagcttgttcagcaacatgagaaatacgggttgttataataatagtgtatccaacatcattatcaggcaaagcatatctaatcattttccaaactgatatatcccatacgtcatcaacaacaacaaaataccttttgtcttcaaggaattctgtgagtgcttctatgagtcgcctctcatccaatgtttcttcgttgatgctcttgccaagatcatatagcaagcctttgtacagtttcttcaggtcaggagtttgagaaacagaaacaaaggcatagcaatcaaattgtgctctaatctttttgtacactacattggcaagagttgtctttcccagacctccaaatccaacaattgaaactatcctgccttgcttcttgggaacttcattctcttctatcataatcttgctgattaactcatcccttgcctcatcaattccaacaagctctttgacctccgtgtactgagcgaataaacgagggtccacagttacaggcttgtcaacaccaaggctgacctcatacctgcggcgccgctcgtgcacctcgatgacacggctcttgatctctctgatttctgtagcaaacttacgacgaatcataggctgccataaccattcgaggaacctatcaatagcttccttgaagctatgctgttcgtccgtcttcctcttcctcttcctccccttgcactgcacgatatatttgtcaatattgtcctctatatcgtaggacatctctctcactttcctagcccagatcttgtcctggtcgtcaatcttgtctgctggtgtcctcgagatcttctcgagggcacattgcatgctctcgagctcagtttgaaggaatttgatccctcccttagcctccttttgcagattgtactcgccatctagcaactcactgagcttgtccaggaggcttggaattgcccctgtcacgatctccatggatttgtcctggtttgccggatcgcgccgccagccgctcgtcgccggaccgaggttgcttgattcaagcttgctcggccgcaacacagctcaccgcctcgcaaccgccttggaatcgcacgaagcag

SEQ ID NO: 17636 - DNA, 4092 bp, Setaria italica
  Peptide Sequence Number=SeqID_83610
catgcatgtaaatctagtccacaaagtcaatcatggtaaaagctgagcaggaatgcaggattatggcctctgccccactgcattgttttgggtacaatttactcaaacctctgcacaagttcatagctaatcctataattcaagtattataataattttatctagcaatgcaaacattactaactctcatcgggatccaatgatatataccagaaatttaacagagcacaatattattacaggttacagtttaaccgacaggttgcagaaagaaagaatgtgatagcatcatttacatatggaggttatgcaagttgtcacatttgtaataatccacgatgatggcacactttcggcaaacaaaaaaaagataacgacaaccacatcttttatcttcgtcagtgtatcttgaggctaggatgattgtgatgcattgcgatttcaatcctcagcgcagcctccgcttcgtccacctcctgctcgctggcacctccagagagaaaggaaacggtgacattccggagtgactgcaggttccccaggcccaagtcgaaattaccatcgcagttggaaatttctctcatcttcaacacagggaacgtgaagcaaaggcttttgagcctgggcatagctccctgctgaaatgccacaggtccaatagagccccgtaacacgcattgtaccaggcatggaaatgaagaagcaccaataatgagtctccagattccgagattctcatggtttacctcaacatctacataggtgagagccggcaacctcccaagactttcaagatcctcctgctgtagcttgttcagttcgatagataggaaggataggcccagaagagagaatggatttatcaaatacgacagcttagatgaccagcagcccatcagttccaatctattgagatgtcgaggagcaaccaaggcatccaagtcgcattcaccaaagaccgagatagaaagagactcgatatgttgtagcttgtgtaggcactccaccagatgtatcctgaaactgttgttctgtagagtgcggcaatcaatacccagcacccttaatttccacagatggcccagctcttttataatgtctgtggagtcgtggatgcataacgttgacagctcttgaaggcatgtgaggctcccaatcccgtttggcactcttgtccagctatcaatgcgtaggaacatcaaatgttttagctgaacaacagtcgacggcaacatagaaattccattgcctgttacatctagtgtttgaagaagttgtaggtttcctatttcttcagggagctgagcaatatgtgtgcgtcttagtcccaggtatctcatgtgaattaaatttccaagatccttaagaatgtaacgttgtgaaaggtggcaatcttgtaaatccaaaacacgcaaaagtcggcagcagtcaagaggcggcactagagaaacagaagctgaacacacaaaaactgaccttgcatgttgcaagctccatgtagcttgagccatcacatgactttcctggccattctgaagggacaacctccgaatcctatttgatgtagatgtgcctcccatattacttaatatagtaacaaagtttaattcacttgacaaggagcggataagatcaagcatcatatcatgtacacgacatcttgatatcataccatctaaactctcatgtaatggttggatcatgcttctgtttataagctcattgaagtatctctctccgagttcaaataggctcccccctggatattcacattggataaaaccttcacctatccacatccttatcaaaacatctttctcaatttcacaatcttcaggaaacatgcttaaatagagcaagcaagtccttaaatagcatggtagctcataatagctcaatgacaagatctttctcatattctccgcatctaaattgttttccagaccagtaccaacagaattgtacacctcataccactccatttcatctcttgctttgcaagctagcaaactagccatcgtaattatagctaagggcacaccagcacatttttctagtatcctgtcagatacttcggccagctcctcatgaggacatttttcttcttcttcattgctgtctttgtttccgttaccaaatattcttctatacagtaattttcgggagttattcaaagaaaggggtttcatgtagtaagcacccccagcttgttcagcaacatgagaaatacgggtggttgtaataatattgtatccaacatcattatctggcaaagcatatctaattattttccaaattgatatatcccatacgtcatcaacaacaacaaaatacctcttcttctcgaggaattctctgagctctctggcaacatcgctgctcttgttactttccctcccgacaagttgacagaacatgcgcttgagtaattcttccgggtcaggtgtctgagataccgaaacaaaagctgcgcactcaaattgtgctctaagctttttatacaccacatcagcaagagttgtctttcccaggcctccaaacccaacaatggaaactatcttgtcttgctgcttggacacttcatcgccttccatcagaatccgaattatctcctctcttgcctcctcaatgccaacgagctctgtctccttctcgtactgagaaagtaatcgagggtcgactgtgacaggcttagctacattactgtttgataacttgtaccgatcatgccgcttggccacctcttctacacggcgtttgatgtctctgatctcggtagcaataatcccatggcgaaccttggcctttctaaacaaaccaaaacttctatgcaggttggcctgctcattgcacttgccacgtaccatgaatgtgtcgatactgtcctctatatcataggacagctccctcagattcctggcccagatcttatcctgaacttcaagccggtctattggtttattggagacgtccttgagggcaccctgcatgctttcgagctcagattggaggaacctgatctcatccttcacctccttttgcagattgtactctccgataagcagttcaccgtagtttttttatgacgcttggcagtgccccagccatgaccgccatttgatcagtctggtcgcaatggagccttgtcgccgccggtgcaggctctccccgccgctcgtcgccggaccaagctcccttgattcgaagtcgctgctgcagccacccagctcaatgctctgtggtcgctaatgatgccttggaagcggacggtgaaggtaacaatgagcgcccgctcactcgctggtacaaccaccaaactcaatgcttgctggccgctgctggcttcgaagagaacgaaagagcccgatgggtatcgaagaagggaattattggatctctgcacgtccaaattaagagtcttccatgataaaaaaaggaccatacatgtcttcatgaattacaccacttccacttgttccgatgtcctcaattcttgaggcttacactgagtagtagcgggagtaaggattgccgctgccgcgtcaacacttccctcagggacaggctcctccttgcattgagtagcggttgcagcaggggctgggacgctaacatgatccacgattgactgcaccgaaaagctcccattgcagtgcttgtcgaatacttggaaagtgtgggtcgacccaagaagatcctcaatttcatctggctgggtgtaccactcatcatcatcctcgatctcatcaacaagctcctccgcagagacaccgaccagctcctcagccacctcacagaagatcatcaagttcattgttccagtggcatcttgcaccttcgtcttcagcttgtaccattgaattggtctcttaattgggccacatcggctgcacttgtatttccttggggccccgtacattgacttttggcagatgttgcatccaagataacaccagccacttctgcaatctatatctatcagggagactctgcacaaaaacgtggtatcctgaatgtgaggactcaacacgcatccctgcaaagacagcaacaactgaggcttcttggccttcctcgagcatatcctcagca

SEQ ID NO: 17637 - DNA, 668 bp, Setaria italica
  Peptide Sequence Number=SeqID_83611
actagccgataccattggaggtgggcttgccggcacagcaggtgagtgtggtggcacagctgctgtgggtggaacagaggggacaacttcaggcgggtaattcggtgcaaaggacagtgccacgcctggtggtggtggcatgtatgtcgatgccacaggtggctgcggtggccggaacgttgcagacggtggcaagtggtgcctcccatacagcctcctctgcaggactgctctgtctctcgcacatacaggggaggcagaggtgacctttatatcatcaacaaggccccagcgcacgagagaatggtgcagattcttgacggcgtgcaagaggcgaagccgcaggagctcttggccatggttgcaggttacaccacggcctacaacgatggccgtaatgtgctctgatgggtattgtgccagcacatgggtcctgagccaggactcagctccaagaaccgaggaggccaccatggggaggtccttgcgagcgactgatacatgtacacctgtttgagatggcccattgaggtgaacaagttgacgagcttcttgacctgaaacagcaagacccaaggaagggagcagaagggagccggagacgaggaacagcagcaagaactccatccctcttcctcggtctctcactcactcaactctccgctctc

SEQ ID NO: 17638 - DNA, 320 bp, Setaria italica
  Peptide Sequence Number=SeqID_83612
aggaggaggaggatgccggtggtgggggcggcgcggcgcggttccaggagcggaggctggtggtggtgctggtgctgccgtcccagccgatgtgcgccacgtgcttgacgtccgtgggaagcccgatcaccatctcccgctcctcctcctcatcgtcctcgtcgtacaccgcgaagatctgggacaggttcttgaacccgcggaggagccgcgccaccagcgactcccccttgcccgccgccgccgccgccggcggcctcgccgacgcgccgcccggcacgaccccgaactcaatcccttgcgggtgggcttcttgccgg

SEQ ID NO: 17639 - DNA, 300 bp, Setaria italica
  Peptide Sequence Number=SeqID_83613
ctttgtaagcatagctctaattaataatattacgagtctgtaatgagatgatgttagcatatgacaacatgtgctagctggaatttcatgctgaagcctcatgcgtatgacaataaaatgtaagtatgacttttgcagcgaatcaccatccatagtagctaagtcatgcccttgacgctacaaagaagcaccgtgaactaggaccgtagttctatcggctcttaccgtcggtcgtgcctggctcatcatctgggccatctcaccaatgaacgtcccccactcccctgcagactatcctcg

SEQ ID NO: 17640 - DNA, 611 bp, Setaria italica
  Peptide Sequence Number=SeqID_83614
tgcttgcccatacacatgatggcccttgcttggcccattgcagaatcctgaatcaagatcagactggaacatgtccacgaacagctgctgcagctcctcaaagctttcctgcctcgtcggtcgtgcctggctcatcatctgggccatctcaccaatgaagtcccccatcccctgcagactatcctcgtcatcctcatcatcatatactcccacgtcgtagaggaaccgcttgttggcgtcggagaggactgcacaagaacaatagcatgggagcccgggggctccatgcaataagtttaccaacaggctatattggtctgtttgctggtgttcagtttattagatgctggttagtcgttgtaacaggtgaagtggggtggtttgccaatatggaacagagcaggggggcggtgctagtagaaggaagattgagaccggaataggcgctctggatctcttggaacttctccttggcttcctccatgtgcttcacgctgctggaggaggagcatttgtccgggtgccatctcatggcgagcttccggtaagcgaccttgagctcggcgtcggagcactccttcttgagcccgaggaccgcgtaaaggtcgctg

SEQ ID NO: 17641 - DNA, 1060 bp, Setaria italica
  Peptide Sequence Number=SeqID_83615
tctagtagtggagcttctcctagccccttcacggtatctcaacagtttattggactatcatgtgatcattatgagttatgactactaaacaccatgaagggcttaggtccaaacatgtaacagggtccactaagtaacccaagatctacagccttcagccaatggataaaagcatagactaaaagttattgactaaaagaacttatttaaagaatgagcagccatgctggaattgtgtttcttccatagaccttaaaattccaaatccatgggaaaatttgtagtccacgacattggaaggaacaactgcaaaatcaacatctaggatagcagactgaagacatgcaactatacgatgctcatactatcaagcgaaatcaggacttctgtaactagtgataacatagccacccaattctttttatgacatctagagacctcatactttgcaggcgaatctacaggcatctggaatatgctcagaaagacacaaagcaccacaatcattttccaaaaaaagagaaggcataaaacaaaatgtcaaagcaaagtcattgtttataaacaatctcctatatcagatgggattatgcctaatcgtccatttcatgatcatcttcagaagtaaattgtatttacctacatagtaagtagctgtgattcctgccacatggcatcattatcaagcacagtaaattgataatgacgggtgcacttaccccaaaacaaaagccagcctggctctgacccaccccagcatccacaggtcttggaggtttccccgagtccattgctgatgaaccccgcttattgaagccattacatgatggcacctctgcgtccattactttagtaggcggaggaggagacggtgacgaggcaggaaagctttgaggagctgcagcagctgttcgtggacatgttccagtctgatcttgattcaggattctgcaatgggccaagcaaggccatcatgtgtatgggcaagcccaaaagtagaacatcctcaacctcaccttcatcatcaccgtctcctcctccattactttagtaggcggag

SEQ ID NO: 17642 - DNA, 457 bp, Setaria italica
  Peptide Sequence Number=SeqID_83616
cgaacgcgttcggggccgcggcggccggcggctccgacagcgccgcagcggcgcaggcggcggcgttcaagaaggccaacgagggcaaggcgtagagctaggcagggggtgtcgcgacgtgcgtgtcgttggaatgtgtttaagacgtggtgaactagctggaagtatttgttgggcgttgttgagttgatggttacgttggttgtgtccgagtcatcgagcacaaacttagtggtgtactcgttcgtgttattttgctgtgtttttcgtgtggatctcggtggatgaatgaagcaaaactactactgtcctagttgggttccaaagtctcgtactgcgaattcctgatgcaggcaacaaagctagttttaggaattaggagtgtttcttttgtgctgtgaatctttacgtgtgtgttaggctgttgatacatcatgacgttgccttgtttgaataa

SEQ ID NO: 17643 - DNA, 982 bp, Setaria italica
  Peptide Sequence Number=SeqID_83617
ccactgttgtctttttcagtccaccatcctgggtcaattgttgatcttaacttccactattaccttttcgatccatcatcatgggtcaattttgattaattccaggggtttcaatgccattcgaagaaggaatgtttctctaacttctctcggggcaaaagcaggcattgcgtgtgggtgtcggccatccaattccatcgctgcctctgaagaggatttgtgttcatttatttttccacgtgtgataatcacacggagatactctcgcaacccagtcaataccaggttttcttgtgcagcatttatctcggaaatatcttgatcacatgaaaccgagggatatgaacttctataatcgtttccaaatgtggtatcctgctcatcgcacattagtgcttgtgttgttggagatgcaggcctagaatctttagcagtgtcagaccaatgggagtccatttcattactgtttggtggatcactacatcctcttgtgaggatatccatccgggaggcttctgacaattgttgctgtttgcagttaccattgcttaactcaccattcacatggaattccttctccactgtagtcccatccactttattatcagctattgttgctgcagccattctgcacacagtcaccaattgcgtgacaagatcattgacctcactaaggtggatggtgtttgcaagtggagacctgtagattgggttatatgatttcgattgggaattggcagcactgtgcccatcaaatcctgtggaatagggtgcaagcagtgaagtgtctgcatggttaccctgttgaaattgtgtctctggcatacttccttcacctgtttatcctaatacctacggcatcttcacgagatctttttctccgcactggagaatggttgtatcctgatgatccaatggtaccattaattgctaccctagctgctttgttgagtttttattttcctattctagtattgctatt

SEQ ID NO: 17644 - DNA, 919 bp, Setaria italica
  Peptide Sequence Number=SeqID_83618
atccacgattcatccgggctcgaggagagagtgacgacttggaggtgggcagcaccgcagcagcctccgctcctcgtcctcgtcctccccacgcgcgcgcagatcccgacgccgacgccttgcgcccgacgactccagagtccacatccacacgccaagcgagggggtgcatgcgcatctagatccgcgccgccaagctgaccattcgagccaacgccatcttctccccgcggtacgggctcgggcgctgtcgttattaccgcgcgtagtcgtagcggaggcagtagcgggacgagcggacgggtggcgatggctgcggcggggaggaatgcgggcgtcctcgcgctcttcgacgtcgatggcaccctcacagcgccccgcaaggtggtgacgcctgagatgctagagttcatgaagcagctgcgccagcatgtgactgtgggcgtggtgggcggatccgatctggtgaagattaccgagcagctcggcaaaacagttcttactgattacgactacgtcttctctgaaaatggcctcgttgcacacaagaacggggagctaattggaactcaaagcttgaaatcttttctcggagaagacgagctgaaggaatttattaacttcacccttcgttacattgctgacttggatatcccaattaaaaggggtaccttcatagagttccgaagtggaatgattaatgtctctcctatagggagaaactgtagtcaagaagaacgtgatgaatttgagaagtacgataaggtgcataacattcgacctaaaatggtatctgtgcttcgtgaaaagtttgctcacttgaacttgacattttccattggagggcagattagttttgatgtatttccccaaggttgggacaaaacgtactgcttgagatatcttgaggaatttcaag

SEQ ID NO: 17645 - DNA, 902 bp, Setaria italica
  Peptide Sequence Number=SeqID_83619
ttagtaaagcgagcaaaatcaagttactaactactagaatacctgatttctctaggttctttgtatatgctgatcatacctattcttttgctttcgttaattcgcttcgttacactactgtggcctcgttgcacacaagaacggggagctaattggaactcaaagcttgaaatcttttctcggagaagacgagctgaaggaatttattaacttcacccttcgttacattgctgacttggatatcccaattaaaaggggtaccttcatagagttccgaagtggaatgattaatgtctctcctatagggagaaactgtagtcaagaagaacgtgatgaatttgagaagtacgataaggtgcataacattcgacctaaaatggtatctgtgcttcgtgaaaagtttgctcacttgaacttgacattttccattggagggcagattagttttgatgtatttccccaaggttgggacaaaacgtactgcttgagatatcttgaggaatttcaagaaatccatttctttggggataagacctacaagggtggcaatgattacgagatatttgaatctgaaagaacagttggtcatacagttaccagccccaatgacacagcacagcaatgcagatctctgttcatgtcaaattaatctccagcttatttgcgccatatattctttcacttcaaatttatcatgagcccaccaagtataagctaatggtctagcagatctttcttgactttttttgggggtacatttttcatgatggtcacatgcaaccatttttgcttcgaagtccaaacatattgtactacttaagattcacagattttcagactgcatgtatacacttggtgaaaataaatgagttacctatttttttaatgttaaaaaaaaaaaa

SEQ ID NO: 17646 - DNA, 491 bp, Setaria italica
  Peptide Sequence Number=SeqID_83620
cgccttgacgccgttcatgtcgacgtactccgcgggctcgtcttggtcacggccggcggattggtgcaccgattgcggtggcagtggcggcggcgagccgaggcctgcgcggccgcgcacccgcaggaactgctcgagcgtctcgaggagcttctcgtcgacgcgcttgacgtcggggaagtcggaggaccgcgcgacgccggcgtcgtcgcaccaggcgtagaaggcgaggagggtttcgatctgcttggcagcgccaacgtaggtctcgaacgccttgacgcactcggcgtactccatgtcgaagaagcggtcgagcagggcagcgagcacggcggagaattcatcgtagagctggaagctatccccgagcagcgggtagagcgcggcgagcacgacgcggctggtccgggcggcgcccgcggggcggcacgcgaggaagcggtcgagcagctgccgcagctggcgcgcgcggattaggaggccgtcgg

SEQ ID NO: 17647 - DNA, 669 bp, Setaria italica
  misc_feature (9)..(9): n is a, c, g, or t
  Peptide Sequence Number=SeqID_83621
ttttttttnttttttttttttgatttgaaatgcaaagaggcagctacatgtatagatcgtaaatcagcagttcagcacatcatctgtttcaggagcacacaagccacaactgacagagagcataatgcacattcctgaatcctgagaacaaggtatttgcattaattggtggtacaaaagtaacgagtagtctacaatggtggcaggcacgaagcagccgtctagcttcttaagacccgggcgcgaacttggtggcgtagacccaggcgttgtttgcgacggggtcgtcgaggtggtcgagcaggttctcgaggggccccttgccggtgacgatggcctgcacgaagaatccgaacatggagaacatggcgaggcgtccgttcttgatctccttgaccttgagctcggcgaaggtgacggggtcgtcggcgaggccgagcgggtcgaagtactggccgcccgggtagaggttgttgccctcgccgacgccgtcgaggccgttgatgcggaagccctcgacgaggcccatgaggatgacctggaagcccagcacggcgaggatgctctgcgcgtgcaccaggttggggttgcccaggtagtccagcccgccctcggagaagatctgcgcgccggccttgaaccacacgggctccttgaagtccacgcact

SEQ ID NO: 17648 - DNA, 453 bp, Setaria italica
  Peptide Sequence Number=SeqID_83622
ttttttttagcagataaaaaatattcaattgattgaaagtaagctatgtagagtgacatgttaagtaagtagacctaacagttccattcctcactcaaataaatctaacataacatattgctgcttataaagaatggaaaagagaacctaatgtacagaattgactagttgagctccctctccagcctatacactgaccgatgttcggaaaaattccgtacatgaatggatctgagaaaaaacaattcattgttgcagccctcgattccaactcagatctcttagtttgtaggaaccgctgcagagtattctttttcagtattgaaggcctttcttttgcactaagcacgacatgatatatcatctagcacgggcagttgaaggttgttttgatgagcggccagacttgtgtttccgcttctggttgcctgctgcagagtcagccaatggtcc

SEQ ID NO: 17649 - DNA, 1245 bp, Setaria italica
  Peptide Sequence Number=SeqID_83623
cgacgggctcgtcacctcccgcatgtcctgcagcctctacctcgtcttcgactacatggtccacgacctcgcgggcctcgccgccagccccgaaatcaagttcacgctgccccaggtcaagtgctatgtgcatcagttgttgtcagggctcgagcactgccacaaccggggagtgttgcatcgcgacatcaagggatcaaatctgcttttggacaacaacggtgtcctgaagattgcagattttggcctagcatcattcttcgaccccaaccataaacagccaatgacgagccgggtggtcacactctggtaccggccaccggagttgctgttgggtgcgacggattatggagttggcgtcgacttgtggagtgctggatgtatacttgctgaattgctggctgggaagcctattatgcctggacggactgaggtggaacagctgcataaaatttttaagctatgtggctctccaacagaagaatattggaaaaaatcaaagttgcctcatgcaactatatttaagcctcaacagccatacaaaaggcgaatagcggatacattcaaagatttccctcaatcagcactacgactgattgaaacactacttgcaattgatccagctgatcgtttaacggcaacatctgcattacaaagtgatttctttacaacggagcctcatgcatgtgaaccatcaagcctgccccaatacccaccaagcaaagagatggatgcgaaacgaagagatgaagaagctagacgcttaagagctgctggtggtagagctaatggagatggagcaaggaagacaaggacacgagaccggcctagggctgttccagctccagaggcaaatgctgaacttcaagcaaatattgataaaagaaggttaataacacatgcaaatgcgaagagcaagagtgaaaagttccctccgccgcatcaggatggtgcacttggatatcccttgggctgttcaaatcacatggagccggcatttgagcccccagatccttcttccttcagcactgtatttccttatgaaaaaggcgccgtgcctacctggtctggaccattggctgactctgcagcaggcaaccagaagcggaaacacaagtctggccgctcatcaaaacaaccttcaactgcccgtgctagatgatatatcatgtcgtgcttagtgcaaaagaagccttcaatactgaaaaagaatactctgcagcggttcctacaaactaagagatc

SEQ ID NO: 17650 - DNA, 830 bp, Setaria italica
  misc_feature (806)..(830): n is a, c, g, or t
  Peptide Sequence Number=SeqID_83624
catcctgaaattccaaacagaaggcatctggcactccacttttggccccagaaaatttttaaaattcatctttcccttggaaatttgttcagaggaagtgggattcgtttttgtcgcatgtaagggattgcccaactgcctggttatatattcagctttcgttgccaaagaaaaagggggcgaaagggaggaaggcctgcttcacctggtttcaggttcatgtgttgtgcgtgttaccaagagtgtacgcgtcgtgtgatttcagaatgaggatgctatcaaggtcttggagatctgcgtccctctttcctgtcatcgtctttgccttgttgttctcaacttcattcgcagggagacagtgcaatttcttgacggatcaagatgccctacgtcatcaaggagaggcagcaggggctgaacagaaggaagcagtagtgccactggtgcatggtcggatgctcaatgtcaagacgaatgattacggcagctatgacccttccccaaccacggacaagccgcacttcaagctcatacccaactgatcaaattacgtatcgagcttgccgcaatggagtggccgatgaggaatttagctgcttacatatgtgtgcctgacgtatagatagagaggtattcctaggcttgctaaaattattataatgacatttagtacctttttatagatgttgctcgtgctgtgttcagtagccacaaggagctgtcagtgttcattcggttgaacttgtcatatattgtacttaaaccatacatatatgcaagtaagtttttaccctgggaaaaaaaannnnnnnnnnnnnnnnnnnnnnnnn

SEQ ID NO: 17651 - DNA, 421 bp, Setaria italica
  Peptide Sequence Number=SeqID_83625
cctgagcccacttctgttgttgaaagactgaagacatgcaacactccatatgaatccagtaccagaaacttgttctttgaaagaggatggatcgaaacggctttctctgatttcagcaattccatgccgccttttgagttatgaccatcattttgaaatgtcaacaagaaagggcaatagcttcctgagctctgttttaatctcaaagttgtgagcttacgagtggaaacgtcatctccttcaccacctcccccatgactaccacgcctcactggcataacccacccgttcatcattccgttcttcttttgcaagctcttccttcctgcagccccgacaccttccttcttcccctccttctccttcccactcttcatcaagccacgcagggggaacaagcgcacgccgccagcctcgccga

SEQ ID NO: 17652 - DNA, 412 bp, Setaria italica
  Peptide Sequence Number=SeqID_83626
ccatcctcttcaaagaacaagtttctggtactggattcatatggagtgttgcatgtcttcagtctttcaacaacagaagtgggctcaggagctgccagaaagcaatattctgaaaatatacatacatgccgccttttgagttatgaccatcattttgaaatgtcaacaagaaagggcaatagcttcctgagctctgttttaatctcaaagttgtgagcttacgagtggaaacgtcatctccttcaccacctcccccatgactaccacgcctcactggcataacccacccgttcatcattccgttcttcttttgcaagctcttccttcctgcagccccgacaccaaccttctccccctccttcttacccccctacctcatctaacctaacttactaaattacttaactaatta

SEQ ID NO: 17653 - DNA, 586 bp, Setaria italica
  misc_feature (1)..(30): n is a, c, g, or t
  Peptide Sequence Number=SeqID_83627
nnnnnnnnnnnnnnnnnnnnnnnnnnnnnngtatggagctcttcttgactcgttctcactcaatttcttcaagaactcttcatgactctttcacataatttcttatatactcaattggatcattaattggatgttgtagagtacaagagcaaattacacccttactttcaagactgcaacatgcaaaaatatacatgtgaaaaaaaacacccaaccaacttctccaagtacgtgttgcttccttctgaaccccccttcgccatgatacaatcatattcttcgctgccatgcatccatgatatatacatgctccttgattgatatttgtatatcattagcttgcttcagtactcatcatatcctcctccggtgacaagaagagcggattattgattgattaataattaactaattagtagtactgatcctgcaccatgcttcggccttcggctatcggtcctgccttcctcatctaggctacggcaagtgtcttcctcggcggcggcctgccccggttgggcgtgcggtgggggctgtggtggtgagcctggcctcgccgctgccgctttacctgccccccgcctgg

SEQ ID NO: 17654 - DNA, 986 bp, Setaria italica
  Peptide Sequence Number=SeqID_83628
tttgttgcctcttctccttctcgaatatgtttatcttcttcaagccaaaattcgatgaactggaataaatatagctctctccacaacactacttgcaccattaccaatgggaccaaatatgtgcatctcatgagaggcacaacagtatgccttctcatcagaatccgactcgtctggcccagcacttcgtttatgaaagccatgctcattgatgttatactcacccaaggatctactaagtaaattaacagttccaccatcagaaactacgtaggaattgcaagtatcttccggaaggggcaccctggtactgacaccacctctgtccgggtcatcgaacagcaagggttgcagcttcttcttcagctcctccagcccagccatcagagcgtgctgagatcaggggcagataccccaagaatggagaagcacagccacgcaggcccgtatggccagatggggatctcgagcagagagtgggggtaggagaagggctgaggcagccccgactccccacaacctgcggtctcgatggagtatacggttggtagagaagctgttgacgactcgacgcgggcagcggtggccgggaaagctgcggcgtcggcgtgcggcgaggggaggcgacggattgtaagagcagctggagcaggacggtgcgcacgggaacagcacgggatccaggtgatgaagcctgaggatgcagccggctgcggcggtggcgacagccaacgaggggatgagtggggcggcgtgggaccccgggcggaggtctccgggaagccgccgccgtgctctcctcctcttctcgcgcggaatcccgggcggaggaactcggggcagtggttcccgggcggaggaactcgagggcgggggcgctggatcgcgggcggaggagctcgtgggcagcaagggggatctcgggcggaggtcagctaggcgaggagctgcgggcggagtgcgaggagctgcgggcgcggggtcgg

SEQ ID NO: 17655 - DNA, 217 bp, Setaria italica
  Peptide Sequence Number=SeqID_83629
cgtcatactcagaggaggacttaagaataataccagctctacaggaactcctggagcacttgcaaccagattcagtacgaaggtcaggaatgtggttgcaagtgctccaggagttcctggaatctcaacatcactgaagaaagcaataaagtggtattggtttattccgtcatactcagaggaggacttaaggataatctaggccctgtagagctgg

SEQ ID NO: 17656 - DNA, 1669 bp, Setaria italica
  Peptide Sequence Number=SeqID_83630
taagcacaaaaccccccaagcttctttcagatacatggaacaattgtacaacagattccatgcagacaagtacaggagtcccgcgaattcttcaactacgactaggaatcagaatgaattcacatgcctctgtatatatacctctacattcatcgcaccgtgtaggtcagccatactgatgtcaattgtcaagggatgctgtacaagtagatactgaccatcatgagacattgtcctggtaatgaaggcatggctgtaacatcaaacatgttatacagagggcagctgggcacattcaactcatctaattacagcccttgcccatcaaaatctgatcttacaggataatctaggccctgtagagctggtattattcttaagtcctcctctgagtatgacggaataaaccaataccacttgttgtttccaaaaacctgagcaaaattcctcttccggccaagatcatacttccagaatggagtagtttttttctcatatgcctcaattgttgttgtgttaccagaaacaagtgatacatgcatgatcataaaaccaaggacactcaaagtaaaggccagattcagtacgaaggtcaggaatgtggttgcaagtgctccaggagttcctggaatctcaacatcactgaagaaagcaataaagtggggcaataaggacagggtaacaagtgccgtctcaagaaaagtgtagagcaggaagagaaggaagaacttgtagttcagtgccccaacacaattcacaacccatacacaatgatgatccatcttaagcacgcatcttccacaaacagaacagtgatggcaccgaggtggctttagctggttacatttcctgcagtacctgattcttggactccctgtatcactgagagccatagattgctgtgaattcatgagatcactgaactctgcggtggacaatggtgcagtttcgccgctctcttcatcaacatcgggcctccaatttggtggaacaccaccagggtcagtaaacacaacagagaaatagctccagagaagcatggcaagcaggaagtggaagaggacgaggacgacaagcgcgacgagggcgtcgagcgcccctgtggcggcgagcagcaccggcccgtagttgcagaggacgagcgcgtagtaggtgacaccaacgatgccgaggacgaggaggatcatgacggagcccagcccccgcagcgccgtgcagaacttgaacacgttccacgccatcgccgtccccgatctgtgcatctccggctctccgcctcccaaggctcggcggcacggcgcccaccaaccactgccgaagcggcgtcgagaagaagaaaagcggggacaaccgcgccccgtaagcagccgcgttacttcgtttgcgggatactacctgccgcggcagagaattcgcccggtttctttccttcgtctagattggattgggattggggagggtcaggagactggctgcaagctcgaaatggagagcggtcaggagcgcatgaccgacccgctccaccacggctggattgctccgcctccgcgctagtccgcggatcaacgggcgtttggctatcctgcgcgtcgcgtcgcaccctcggctcgttctccctaacggttcaagcacggcagtcaccaactgcgcctgcgacttgttaaggcaa

SEQ ID NO: 17657 - DNA, 667 bp, Setaria italica
  Peptide Sequence Number=SeqID_83631
aagaacttaaccggaagaaccaatgagggggagtgtcagcagtaagaagaagaggaagatgttgagtaacgcctccactccaccacttactcccccgactctgcagcagcatgttccgtctactcctcagaccaatcctcttcatcaggttgtgatggcagtcgacgcagttacaccatcatcaggacatttcggacatgctggtttggacaaggagcaggtttctgtggcagttgggaggttcttgtatgatgttggtgtgccattggaagcagtgaattcagtctacttccagcccatgcttgaggctattgcatcggcaggagggaggccggaggcgctctcataccatgactttcgtggtcacattcttaagaagtcactggatgatgcgacgtctcggttggagttcttcaaggggtcatggacaaggactggctgctcggtgttggctgatgagtggatcactgataaaggcagaaccttgataaacttttcagtgtattgcccagaaggcactatgttcctcaaatcggtggatgcaaccagcattgtcgcatcttcagatgcactgtatgagttactgaaaagtgttgtcgaggaagttggcgagaaaaaagttgtccaagtaatcacaaacaactctgagatccatgcagctgcagga

SEQ ID NO: 17658 - DNA, 2367 bp, Setaria italica
  misc_feature (11)..(11): n is a, c, g, or t
  Peptide Sequence Number=SeqID_83632
ctttttttttntttttttttttactttttcttcaaagcaagcatttcccatgcaagttcgtgcccccatggatggatccctcgagcagccatcaatactgttagcagtcagttccttacaatctccttttttctttacagcagtaaaaacaaacaaaacaatgaccctttgcttaatacagtgcacaccataagattgcgtgctgctgatgctggtattagtatacaactcagcacgacgtccctaagctagctaccgaataataacaatgaaacctctgcaatacctgctgccaaggtaatcaagcacctccacaggtagcaaacaagtgatgatactaatgtacacagcaccggactgatggcgtgcaagtgcaacacagtaattgcgtttgtccaacaatatacacacgaactatctctttgttggattatagcttccaccacttcttgttctccatcgttttcgcaagctcctgcgccagggaagcaaagttttctgctccattctgaagctccgcggtttgctggcttattctctccagtttctcctgcctctgcatcagcttatcctttgcatgagccgcagctgctgccgcatccccgccaaatttatattttgttagaatttcctgcggagttctcattcttggtttaccaatatcgcttgacccttcaaatagcttctctctctcctcttctgctgttctcttgttcccgtgaaatgtagaggaggatgctgatgcctgggctactggtacttcatcatcaatttctatgtcatctattgacagttcttctatcgggtcatcaagattgggtattgatggttcaacaaatgaatctttcaagaaaattgactccaaatgttcgctgggggtttgcacagtgaagctttctctcatttttgcattttcttcagccttgcctttcattcctttaatgatgccaccaaggattcctgctgctcgattctgcttccttctctggtcagttgagaaactaatagctgcttccgcagctgctgcaagaactttgtcatgaaggcatggcagagattctggaatcctgaagtcattctctaaggccatgagagatataattccaaattcagatccatttaccagagtaatttgtccgtttgaggagctcatggatttatccatgcctgccttgtaactccatctcaataacgacatcaaggagctctcagcaacaatagctagatctggcacagaccttaattctatagtgccagtctgataagctaatatcaacccacaaattttgccatccatattcttgaaaactgctgaccagcaacaaggttttgcaagttttgtcttatgtagatgcttgttgtttccctgaaccaatggtgcaagggataacaaaagcaaaacatcctcacagcagaccagaagaagtgaatctgaaccaccattctgtgaaaggtgggaagcatttttcaggtgctttccaactcctggtgcttgctttttgtcaagatcgttgccttcttttcctgtctgaccttgacttccaattgtgtcctctgataattgggtttgcttctcatctgaagctccatctatgacatacatggaaatagcagatgattgcttcagatctaagatatgtgaatttatcatcacacccgttgtgcagtcaagtacagtaacacggccatcctttgtcaaggaaagaagaatatctctgagtaacatagcattttgaggactctctttttttgattcatctgcttttgcagcagatggcgcaacactgtaaatacccaaggaaacaacaggagagtttgttcctgatgcacaatctaccgtgaatagaattgatagctgacttagatctaacattgccacctgaccgttctgatagccagctgcaagtacctcccctgaagctgtaaataatagagatcgcactggggaatgtgatgccaaaaaggcaacatgacaatgaaatcctttcccttgatgaacaacatgaacttcttgcttagaatcactcacaaagtgaaagcttgaacccccagtgtgctcacgaagtttatagatgcgtaccaggccacttgttgtcccaacagccaaagtcatgtttaacgaacaaaaggccaaagatgacacagaagcatttgccccatccaaattaatatcagccacctttccatccaggacaaacattggcatcagaacaggaaatgttgcatcccatattctcacagaaccatcttgatatcctgcaatgtatagtcttccaacaccatgatcttcattcagtgacatctcacttggaaccccaccagtcaaaggccatttcatgttccctgatatgaatggtccagcatttt

SEQ ID NO: 17659 - DNA, 347 bp, Setaria italica
  Peptide Sequence Number=SeqID_83633
ttgaattaacctggacgtactagagtttgatgtgcagacctttttcttgaataaccaaatcacttggaataaattttccatgtgatctgcttgagcagattttggtttgcatcttaaattctgattccggtgtatttcagtatacctgaagtgacatatacctcctgattaggatccctacctgcaatatagtttcatgatgagatctagtaatattttcttagtatgcacagaagagctaggaaggataaccagtattgaatatgcgtcacctttttaaggaaaaacacaaggagaagcacggaaaggaaaaagacagggggaaaggagagaaaggaaaaggatag

SEQ ID NO: 17660 - DNA, 510 bp, Setaria italica
  Peptide Sequence Number=SeqID_83634
aaaggccgcccagtccaaacccgcagcccccagcagcaggccagcagccggactcggaggcagccgaggaggcgaccggctgaccgcagcgcggagagccagagacaaggagcgcgcaggcgcggcgcagccgccacagtccgcaccggaccccgtggactaggcgagcgcgcgggggagcctcgcgggcggcgggcggcgatgtcggtgagctgcgggctggagtgggtggtgtgcctggggtgcacgcggtgggcgtggaagcggctcacctacatcggcgcctacgacagcgagacgtggccggcggcggcccccgccgagttcgagcccgtcccacgcctctgccgcgtcgtgctcgccaactacgacccagacctcagcaaccccaagttcgcgccgccgggacgcgggtacgccgacgtcgaccccaagggcatcgtcaagcgcgccacctacgacgacgtcggcaaccggtgcccgccatacctcatctacgtcgacgaggcg

SEQ ID NO: 17661 - DNA, 558 bp, Setaria italica
  Peptide Sequence Number=SeqID_83635
cccgcaagccgccgccgtcgtggagggaacgcgacgggagaggcggaagagagatggcgaaatcgtgcaaggggttggccatggagctcgtcaagtgcctcagcgagactgactgcgtcaaggttcagaagaggccgtacaaggagtgtgccggggagaaggtgcccaacatcactagcgagtgcgtcggactgcgggagacttacttcaactgcaaaaggggccaggttgacatgcgagctcggatacgtgggaacaagggatactagctgtgtgccttcaatgtcctcatccagttttagttctagccattcatgtgatctgaggtgtaatgatgtcataatgtactctgtctgggttctatattattggtaggagactaactcagagcaaggatagcttcaattgatgagaggcgcatctcaatattggttgtttcctgtcataatgtagtaggtccacattttgtttgctatagaaggcagaaactcaaatcagagcacacgtagttttttccacttgatgagtcgaagtggtggatccagttgctgatgtgct

SEQ ID NO: 17662 - DNA, 1373 bp, Setaria italica
  Peptide Sequence Number=SeqID_83636
gcagcatccaccacctcccatggcgccgccgctcgccgtagttggccccgccttagccgcgccgagcttccgcaccgccctccccttccgcctacgtccgcggaagatcccctcttggcgccgcgcggccctacccaacgatgaggattactacttgatcgatgcggaggagtccattggggacggcttctccttcagtggagggaagtacggcgaaggaccaagcaagtcggacgagtggtttgctcaggggaaaatgatagatgcttacccagtatatggagacaaaggaaaggcaaaggaccccttctttggcctgacgatgggatcaggatctcaaccttcagatgatgtattcagatggttctgcgtggaggctgggaactcttctaatcctaaagtgcttttaattcatggcttgccatcacaggcgtactcttatcgcaacgtgctgcctgtactatcggacaaatatcatgccgttgcttttgattggcttgggtttggattttctgataagcctcaaccaaaatatggttttgactatacacttgatgagtatactgcgtccttggaatctctagtcaatgctgttgctcctgataagctctctattgttgtccagggctactttgctccagttgcagtcaaatacgctagtgaatatcaagacaaattgaaccatcttgttctagttaacccaccgataactgataaacatgtgagcctgccatctcccctggcttcattcagcaacttcttgttgggagagatattttctcaggatcctctcagagctagtgataaggtattgactagttgtggcccatacatgatgaaggaggaagatgctatggtgtatagaagaccataccttgtctctggttcctctgggtttgcactgaatgcaataagcaaggctatgaaaaaggaccttaaggcttacattgaatccatgagaagcatattaggaagtgattcgtggaaaacaaagacaacaatatgctggggcatgagagatcgttggctcagctatgatggggtggaagagttttttggtggcctaaaccagaagattgtagagctgccaatggcaggacaccatgtgcaggaggatcgtggtgaagagttgggcaatataataaaaagtatattgagatgaccacgaattgtgtggggacagtctctagaacatgccaagaacagttgcgctacgctggtgagtcaaaatgtggcaaagcagtttacaaaaaaaaaagtggcaaagaaaagtgaggctgcaccgacccattgaaggccaaccctccggctggataggtttattatgaaaacactacctaaagtgacgttctacatctttggacaacaacagc

SEQ ID NO: 17663 - DNA, 918 bp, Setaria italica
  Peptide Sequence Number=SeqID_83637
ctttcaaaaaaaatatttcatttatacttggcacaaaatgtcgatgcaattacagtcataggataaagcagcctgccacaccacaccacaccaggttgagctgctatctctctccgacgccatggagaccctcgccgcgacgcctcggccgctcttcccgggcgcgtccccggcggcattgatggcaacggcggcgagacggacgacgccaccggcccggcgtcgctgcgccggcgccgctcctgtcagagccgcctccgctgcggccgccggggaggagaagccggctgcggctccgaaggcagccgccgcggccggggatggcgcggcgcccaagaagctcctgaagaagaagccagtctactcgatgaagaaagggcagattgtgcgcgtggacaaggagaagtacctgaacagcatcaactacctgtcagtgggacatccacccttctacaaaggcctggactacatctacgaagaccgcggcgaggtcttggacatcaaaatctttgaaaccggagaatacgccctgatcgcgtgggtggggattccgacaccaccggcatggctgccaacttacatgctcatcaagtcggacaagctggactacgagaggatatgatggccgcggccggcctcgcaaggacctttttcagttaacagttctcagttcatccggcggagcacgcgccatcgccatgccacatgttcagtctgttgtactagatgcaaaatgccaacacagtcaagaggcaatctgccgttacaccacctgagctgaataataaggaagaaaggccaaagtgacgacaagattcaaatttatttgctgtactgcacttgttattatacaaaaaaaactcatattttgtgttggaaaaaaaaaaaaaacatgaatgtgtagcaggataggtacgg

SEQ ID NO: 17664 - DNA, 256 bp, Setaria italica
  Peptide Sequence Number=SeqID_83638
ccgccgctcctccggcacggcacgcggcggtagttcaccggcacgatcccggcgcggtacacggcgatggtctcccacgccggctgcgacatgtcgaagtggcggaggcgtcgctgccgccgtagaacgtggcgaaggcgggcgtccactgaaccgccgccgccgacccttcgaggaggaagaaggcgcacagggccagctggagcgcgagcatcttcgcctgcatgtcagtagctagccagtgtttgttttgtgc

SEQ ID NO: 17665 - DNA, 631 bp, Setaria italica
  misc_feature (625)..(625): n is a, c, g, or t
  Peptide Sequence Number=SeqID_83639
taaacgaaaaaaataaaaaataacaaacaaaattaaatttaacttaagttacaaagtaacaactaatacaagtaactaaggaggaggagtccagagaagaaaacgcctaggcgggtgctagattagcagcctcagcatagcgcagagcttcttcgcttcttcaatataaatcgaagaggcctcgcccgcggcgggttgcaccacccgccgttgtcgctggggaccgcgtagttgggcgggcagaggttggtggccgtcacggtcacggaggcgcccgcccggcaccaccgcccgtccgtctgcgagtcgcacatgatctggaagcactgcccgcatgacgcgccgccgctgaacagcgcctggctcagcgccgtcgtcgccgtgccgtaccccgtcgagtacaggttgcgtacccgcacgcgccgcccattgtgccggaggcgtcgctgccgccgtagaacgtggccgtgcccttggaccaggccgccacgacggccggcgccgcgagcagcgcggcgacggcgaggaagaccgctagaggtctgggcatctccattgccgccgctccctgcgtcacgaacagtaggatgatcaagtgaagatcgatcaaaaaaaaaaaaaattntaccaa

SEQ ID NO: 17666 - DNA, 436 bp, Setaria italica
  Peptide Sequence Number=SeqID_83640
cagagaccttttgccgctctcgagcgagctgcttcaaaacagagccctcctccggcgacgcgcacgcgctgctgctaaccgtggccggcggccggcgccggctagaactggttgccggagaaggtctggccgtagctccagccgctcggcgcggcgttggggcacgtgacggtgcggccgtcgctggcggtgacctggaacgacagcgcctggcggtcgagcagggcgttgctctgccagttggcgccccagttgtggctcatagactgccaccccgtctgcgaccccttcaacgacaccgccatcacgtcgccggcgccgccgacgttggtgatcagcaccagcacgaagtaggagtggccggagatggtgaaccggatgccgccctgcctcccgcacgccaccctcctgtactggacgggcaccacgccggcgc

SEQ ID NO: 17667 - DNA, 334 bp, Setaria italica
  Peptide Sequence Number=SeqID_83641
ccgtgacggtgatggaggtgcccggcttgcagtacctggacttacgcgcgtcgcaggcgatggtgaagcacgccccgcacatggcgccgttgttgaacagcgccgtgctcagcgccgccgtccgcgtcccgtaccccgcgctgtacaggttgtcgtacccgcacgcgccgcccatggtgccggaggcgtcgctgccgccgtagaacgtggcgaaggcgggcgtccactgaaccgccgccgccgacccttcgaggaggaagaaggcgcacagggccagctggagcgcgagcatcttcgcctgcatgtcagtagctagccagtgtttgttttgtgc

SEQ ID NO: 17668 - DNA, 421 bp, Setaria italica
  Peptide Sequence Number=SeqID_83642
aggccgtagttgggcgggcagaagttggtggccgtcacggtgatggagcccggcaggcacgacccgcccgcgttctggcaccgcagctcgtagcatgacccgcacgccgcgccgtcgttgaacagcgccgtgctcagcgccgccgtgttcgtgccgtacccgctgctgtacaggttgccgtacccgcacgcgccgcccattgtgccggacgcgtcgccgcctccgtagaacgtggcgtgcgcgctctgccacccgccgtagccgccagccgcggcttcccgggcgaggagactgaagaggaggaagagggcgccggcaacggccattgctaacaagtaccagataggagctaccttccgagcttggggagggtatcgtcgtctaaagctaaccgctctatcggctcgctttggaacaggaa

SEQ ID NO: 17669 - DNA, 780 bp, Setaria italica
  Peptide Sequence Number=SeqID_83643
ttttttttagcacaaattaagccgttcggaaggattaacttgataaggttcattacaaccagcacactttcacccccacaatacaaaacatctcatctcatctaaagaggttggccatcaccatgaggcccaaaacgctgattggcgggtgatacaaggcggccgccattaatctccaagccagcctttaccaccacttccaattccctagccaaaacaaccaaggaaccactcactctaggctcacaccagcacgaaaaaaacccatgcttactaggcctaaactaccggtaattcccaagaaccaatgctagatgcaccactcaagtaagcatggcgcttctcagcaagctccaattggggaggacggacaactactaagaccatcgactagtactactagtgcaactgcattgttgacgctgctgcggaaacggagaggtgttcagttgaactgggccccgctgaaggtctggccgaaggaccagccgcggggtgcggcgttgttggagaccacggagcggccgtcgctggtggtgacgcggaaggagagggcctggccatcgaggagcgtgttgctctgccagttctgtccccagttgcgggacatggcttgccacccggcggagcggtcgcccttcacggccacggagtgcacgtcgccggcgccgcccacgttggtgaccaggaccaggttgaagtaggagtggccgttgatggtgaaccggatgccgcccttcttgttgcacgcgaccctgcagcacgtagcaaacaaaaagg

SEQ ID NO: 17670 - DNA, 1488 bp, Setaria italica
  Peptide Sequence Number=SeqID_83644
gctcccgtggtagcaattcgccatatacttgtacagaatctttctgctcgtaaagcttcgaaatgacaactcacccgtcaccataccgcaccacaccacacacgtcgccatcgcaagccgataaggcggcgacagatcgacgacaaaaaggacacaactgaagattaaagcacaagcacaccatatataccgcataagtatagaccataaacaagcattgttcacggtcccaaaggcgcaatccccccacaaacatctcccaccccatgtggctctgggatcgcttctggggttacaatgtaacaacaaaagttacacgacaccacacacactcccctgcagctagccctacaataatcagccctgcaaggtctttttttctccttaacccaaggctacaacgatcactggtgcagaaaaataacttaatcctatcatcatcatcagagaaggaaaggcctaagcgggtgctaataagcagcctcagaatggccggcgggctcttcttttactacaacgaagaggccggtttccttccttctcctgtcgctcacactacgaatgcaaatcgatcctcgtcgtcgcgtacgggaataaacaaatactctacgccctgcatcgagcggccgcggggggcggctagaactggctgccttcgaaggtctggccgaacgaccagccggcgggcgcggcgttgttgctggtgacgcagcggccgtcgctggcggtgaccttgaaggagagggcctggccgtcgaggagcgagttgctctgccagttctggccccagttgcgggacatggcctgccacccagtgctggagcccttgatggacacggactgcacgtcgccggcgccggccacgttggtcaccagcaccaggttgaagtaggagtggccgttgatggtgaaccggatcccgcccttcttgttgcacgcgaccctgcggtaggagacggggacaatgccggccctgtagagcgcgatgcgctggaacacgggctgcgacatgtcgaagtgcgcgcgcggcgggttgcaccacccgccgtcgtcggagggcagcgcgttgttgggcgggcaaaagttagtggccgtgacgacgacggagcccggcaggcacgagtgtccgccgccccccgccgcgtcgcaccgcacctcgaagcaggcgccgcagctgaggccgttgttgaagagcgccgtgctcagcgccgccgtgttggtgccgtacccctggctgtactaggttcccgttacccgtacacgccccgattgtgccggacgcgtcgccgcctccgtagaacgtggcgtgcgcgctctgccacccgccgtagccgccagccgcggcttcccgggcgaggagactgaagaggaggaagagggcgccggcaacggccattgctaacaagtaccagataggagctaccttccgagcttggggagggtatcgtcgtctaaagctaaccgctctatcggctcgctttaggaaac

SEQ ID NO: 17671 - DNA, 1303 bp, Setaria italica
  Peptide Sequence Number=SeqID_83645
gttttttttgttttttgttttttttaaagttctagccagagcaatggcggccttgcggttttcaattccggcgcaaggccggtgcgagtacaagtacaccagcaatatgaaggttcgaaaataaatcacaattatttcttgttcaagtacactatcagtactaggaggaggagtccagagaagaaaacgcctaggcgggtgctagattagcagcctcagcatagcgcagagcttcttcgcttcttcaatataaatcgaagaggcctcgtctttcccatgcatcacgcacgcaaaacgcaaaaaaaaaaattatccaatgacgattaattaatagcttgatgatgatgatgatgatgatgatatcccggcctctccaccgtgtgtctccgctctggttgcggccggagctcgataggtcggagtcggagaagaacgaagaagctgatggatgaagagcacgcgtccgtacgtcttcagaactggcggccctcgaaggtctgtccgaactgccagccggcgggggcggcgttggtgctggtgacggtgcggccgtcgctggcggtgacctggaaggagagcgcctggcggtcgaggaaggcgttgctctgccagttctggccccagttccgggacatgggctgccacccggtgcgggagccacggatggagacggaccgcacgtcgccggcgccggccacgttggtcaccagcaccaggttgaagtaggagtggccgttgatggtgaaccggatgccgcccttcttcacgcacggcaccctcctgtatgcgacgggcacgatgccggcgcggtactgcgcgatgtggaggaaggctggctgggccatgtcgaagtgcgggcgcggcgggttgcaccagccgccgtcgtcgctggggaggccgtagttgggcgggcagaagttggtggccgtcacggtgatggtgcccggcaggcacgacgccccggcgttgtcgcagcgcagctcgaagcactgcccgcaggaggcgccgtcgttgaacagcgccgtgctcagcgccgccgtgttcgtgccgtacccggtgctgtacaggttcccgtacccgcacgccccgcccattgtgccggacgcgtcgccgccgccgtagaacgtggcgtgggcgctctgccacccgccgtagtcgccggcggcccggcgggcgaggaagcagacggcggagcagagcaggaggaggacattggcggttgccatcgcagcacagacgctgcctctcgagctagcgagcgagcgagctaaagcgagggagctgattaggatcgagagttgga

SEQ ID NO: 17672 - DNA, 437 bp, Setaria italica
  Peptide Sequence Number=SeqID_83646
aagcgaggaggcccgagctgcgagccgagaccgaggtccgggccagtgtcggggataaggccgagtggtttctctcatcattagctaccatgatcgtgagatccaggcgccggtcggtacacggattcggagactctcatcattggccggtgcagcaccttgtccttgtcgacgacgggaggggtctgtcattagcggaacagccgctgcggggaggccacacgcgtaggcgcttagcgcgggggcagcgtgattaggggtcggcctcggccgggccgggtccctggtccttgttgagcagcacccaacgtgcggccatgtgcgcgggggcgcggccggacacatcacgtggacatgggcctagcgagaggagacgcctcgcgcgccatcatcaatcggttggtggcgcgcggcctgtcagcggcgagccggcggtt

SEQ ID NO: 17673 - DNA, 1162 bp, Setaria italica
  misc_feature (1)..(11): n is a, c, g, or t
  Peptide Sequence Number=SeqID_83647
nnnnnnnnnnnataatgaacaaggcaggactcaaaactgaataaatatgattacaaaatagaacaacagtcactttccagtgcttaatccatcacctctggtggtgcttaatccatcaccaccagagcgattccacaagcacctcaactcaagccaacacttacaattacatcagcagttcaacattatcatacatacacttacaatcagaaggagcattatagtacaaggacctgcagccttgaccgtgcctcggcagctaaattcaggcgctcctcattagggttctctctcgcagccgcgagagcttcagcatatgtaatcctttcttgctctatcttctcgacctcaatcttgtcaatttcgctcgtcgattgaagtgcctctagttcatatgatgatggtatactaccatcataacagtcgcctgaaacattttccgaaactttttcaaataacgccatcaatgaacttatctcgaattccatattggacatatctccttgaagatcttcaacctttttatttgacgtcttcacctcccactccagtttctctaaagacgcttgtttgtccgcaagcataatctttgcatcatgcaactgagaattggtagatctgatcagagcttcttgctcagccacctggcgccttagctcatcaatggtcgcgtatgccacattcatctcattcactgagttctccgcgtacctcagggcctcctccttctcgagcaatttcttctgcaggtcatcaatctgctcgcgcaggacagcaatctcatccttgggtttattttctgcacccgacagagacaatggcgaaaccgagccattctcaccattggatccggggtacttttcttggctgcatcaccagggtctctccgttttttcgcggacacactctgtggcgacttcacgctcttcaaatcgctcgccttcttggccggcgccggcgtgtagacgagcgaggcgcggcgcgagtaggacgggttcaccctccggtccattagcgactcgacgaggggcaccatctcgacgaggttcttgaagagcacccgatctcctttcccgccaccgcccccctcgccggccgccccgccgttgccggcgccggcctccgccggctgcggattgtgggatcggtcgtgcatttcttg

SEQ ID NO: 17674 - DNA, 441 bp, Setaria italica
  Peptide Sequence Number=SeqID_83648
gttatctttgtaattgctttcagagattgaccagattttccatagtaattaatgaaaagcacatgtgtgtagccatttggactagggccatgaacattcatatggttcaagagctccagagcacgatcaaacatatcagctttcagaaacccagatattaaggagttatatgaatactgttcaggcgatatacccttttgcttcatctcctcaaaaacagcaaaagcctcatcaaccctcccaacttggcataatgcatctacaaccgcagtataagcaacaatattgtcattatacccatcagtttccattgcattccaaatttctatcaccgattgggggtcgccagagtcaccacacttgtctaagagagtaatgtaagtaacacgatcaggtttctgatcacttgctttcatcttccaaaacacatccttggcatca

SEQ ID NO: 17675 - DNA, 342 bp, Setaria italica
  Peptide Sequence Number=SeqID_83649
gatatcgccatctatttcaacagttaaatccaaaatacgttcagactgtgctgaactgacctgacactttgtgcatattatctaggggaaaaaaggaaacgattataagataatataaatatgcattttcttgtgaaatccgatgctgccactagaagtctgtagggcatggaaacgctgagtggtctacatgaagaaaaccttagattgtagatagcccccaaatattaactgcaccagagttgattcttcagctagcttatggacaccatttttctttgcttccttcacgctagcagattgcatagtatcaattgcataccttagaaattcatgagcatt

SEQ ID NO: 17676 - DNA, 377 bp, Setaria italica
  Peptide Sequence Number=SeqID_83650
tagtctatttgtaactatagcattgaacatgcccacaaataactcaaaacagctaaaataaatgacacaaacagcccagccaggacacggcctgaaatgtgaatcagatcagcccagaaaagtccacagaagcatacatgcggtccagccagcaaatggggctagcatacatgaggtccagcaataacttgccaacaagtcgggagcatgggctcaatagatctgtcggatgaagatcggattggctgtagttacttggtcagtgtagaaggatggcttctccccaccctcttccaaaacccctccgccaacctgaagcctgtgatagtactgctgcgcaaactcacctccctgatccatgtaatggcctgaggagc

SEQ ID NO: 17677 - DNA, 353 bp, Setaria italica
  Peptide Sequence Number=SeqID_83651
cccacaaataactcaaaacaagctaaaataaatgacacaaacagcccagccaggacacggcctgaaatgtgaatcagatcagcccagaaaagtccacagaagcatacatgcggtccagccagcaaatggggctagcatacatgaggtccagcaataacttgccaacaagtcgggagcatgggctcaatagatctgtcggatgaagatcggattggctgtagttactgtgacacacataaggtaatttttcaatcacctgacgcctagacagaccctaaaaagaacagaaagaataagaaagatggttgttagagttttgaagtgacatgatgcatcgaaatgaaaaaaataag

SEQ ID NO: 17678 - DNA, 2774 bp, Setaria italica
  Peptide Sequence Number=SeqID_83652
tttttaaattgcaaatggaataatcatatacaatgaaaaaataattaatagttctctacaaacccaggccccccctgccagtaaaatgcttggacaatcctcgaccttccaagaaaaaggccgcccctgtacatgtatacctacgctgttctgttatcttacagcttctactaaaactacgattacgattactactactgttctgtttaccttggtcagtgtagaaggatggcttctccccaccctcttccaaaacccctccgccaacctgaagcctgtgatagtactgctgcgcaaactcacctccctgatccatgtaatggcctgaggagcaagggttgaagctagacctttgccgcaagtagctcagctcatcttcctcgggtataaccgctgggctcactgggtgcatatgatctgaggctccaaatatgtaatcatactccatgctggccaagttcctggtgctgttagtgctatcgctgctgagagtgctgcttgaccctgcatcagagttgctgaacagcgaggagctgtcgcttcgactaaagcctggtatcgggtacgaccagccgtcggatgcttctgatgtgtatgtgagatggtgcactgcacgatccttgcacaagtttccaccttggtgcatgctcacataattgcctcctcccaaaggagttgattctgaatctgccatcttcttgggtttcttagcatgtgaggcaccttgattaatcattgcttttcttacagagtctgggacacgcggtgaacaccttgcataaagcagcatgtatgcacattttgacaggacctttttgagagaaacaggtttcaccttgctatcatccatctcgtgccactttccctgaggatccttcacataacatacataatgaccagagatggtagtattcataacatcatgatggacaaccacagcatacaagctgtacacaggactataatcatctgtttcacacatgaattgggacaaattcaagtgctctgggaacttgacatccttgctgatcttgccataaacaccagactgatatcttttcagcgcaattgtcagaatatttggtgcctctgatatcatcaacttctttttggcacgctcatatgacatgcatctgatgagaatacataagttcaagaagataggtacatagaagcaaaagaaggatcaactaaggtattgttaggctaaggattagacaaataggcaatgctaagtaatgcaagtgatcaccaaactcaactcctacaacaagtgaagttgctacaagtttagaaaccgacaatactatagttgaagatcagttgctaagttaaggtccttgattcagcattttagctcaagtttccttgactatgcaaggtgatatatccaagcaacatcataaaaatgcaagtgcacagcatgtagataagataaaccataacgtggaaagttcatctgaaccgcacctgctacaatggtatctattatcaccgtctaaaacttctgatgatgtaaaccgacgaagtgcaccttcaagggtattgatatcgccatctatttcaacagttaaatccaaaatacgttcagactgtgctgaactgacctgacactttgtgcatattatcttagattgtagatagcccccaaatattaactgcaccagagttgattcttcagctagcttatggacaccatttttctttgcttccttcacgctagcagattgcatagtatcaattgcataccttagaaattcatgagcatcttcttctctaccctggccaaagctagtaccaatctcattcagatgagatagtattccagtaggcgatactggagcttttccacacttgccctctgtcatgaccttttccaactcacacatgaagcaccattccattttagaacaatttcgtgaatgatatccttccaaaagatacgctgtaagtggtcgggtaaatgccaaacactgaagaacagcatttgcatagcagctattgccaaggttgcatagaccaaaaggatgcagttccaacttctcgaagttgtagagctcgatgaaatgtttgtatggaaaaagtgccaattctgttgcataatgtctcacaacttttatagctgtttgttgtctggcatatttcttctctgttgatgggttatttggcattactcctgaactctctgaccttgcacacagaccatgagagttatctccccttttagatgggttatgtgacaaacaatatgcactgctgtgagctgaagaaactttgtcaacagctgacatgcatggcgaatttctagaactttcatggttatctgcaccaagagcttgcttgttggattgctccagttcactctccaactcaatatgctggtcaggagtagtaagataaattttttcacaaacagcagtgtcatgaactttggcggcattacttgaagttgtaagccttgagcaatcaacagattctgccttcccagtaaactgagaatattctgcagggacctctgctgtattagatggcttatcagggggcatatccttaacctctactctagtcaccacattctctggtgcaccatcttgtctggcaccaagatttcgtggatgacattcatctttgtgtccttttctccagtgatctatctggcatttgaaggtgcagtacttgacgctcttgcatcgcttgcaccggagcgtcgttggcctggcgcacatcgcacagacacccttccccggcggagtggaggccgccaccgccacttc

SEQ ID NO: 17679 - DNA, 1759 bp, Setaria italica
  Peptide Sequence Number=SeqID_83653
gcctacaagttcaccgatgagatgcatgatccttgggccaagaaactgttcctgggatttgctcgtacttccgagttcaatggtcctagacaaccagctggtctccatcctctgatacaagaactacatactgatttgcccatacttgagccgatgctgcagctaccctataggatatttgggtcttctccgccgatgagtaattttgatccagctaaaatgctcactgattctgggaagctccacaccttagatatgctattacggcgccttcgagctgaaggtcatcgtgtgctcctttttgctcagatgactaaaatgttggacatccttgaggattacatgaatttcagaaaattcaagtacttcagacttgatgggtcttctgcaatctcggaccgtcgtgacatggtccgagatttccagaataggaatgatgtatttgttttcttgttaagcacaagagctggcgggcttggtataaatttgaccgctgctgatacagttattttttatgaaattgactggaatccaactcaagatcagcaggcaatggatagaacacacagacttggtcagacaaaagaggtaactgtgtatagacttatatgcaaagatactattgaggagaaaatattgcaaagagcaaagcagaaaaatgcagtgcaagagttggtcatgaaggggaaacatgtccaggacgatcatttgatgagacaagaggatgttgtttcattacttcttgatgacacacaaattgcacataagttgaaagaaatatccatgcaggcaaaggatcgacaaaagaaaagacgagcgaagggcatcaaggtcgacaaagaaggagatttaacactagaggacttggatgatgctactgcagaagctgtagatcaagataacgcaaccaacaaaaagaaaaagagctcacacaagaaacattcgaggacacatgataatgacaatgtggacaagaacggagaggcccctacaggaggtgatcttacagggagtggtcacgcagaaaatgaacaaattgctgaaccaaggcctaaaagatcaaaaaggctgatgaagggcatgagtgatgataaggaaccagctgctgctgctgatcatgagaaaccagcagatgaagtggaaaatcacacaggccatgaatatgatgatacagaagaggtgcaagacggagtgaaatctactgaatgagaagatgacaaccttggatgctaaatggcaagaagagaataatttatcacgctgagcttgggcatcagaaatgggtgcagatctggagccttctgtggtcaagaaagtatttaaccgcacacctcccataaggaaatcagcaaaatcggtgatttcgtcatcagtgcggtggcaataagctcacgaaggttgccttttaaaggcaaaggggttgccctccagaggtttgcatgcagtctgctctgcagtattcattgtgctggctgtgaccattgtgtacataagcatgagagatgatccagtgaccagcacgcatataaataattttgtgtaaagagcgtagctatctgtattgatcatagttttcgtgttgataactaaagaaaaggagcacggctggaaacatctgccgtggagtttgaacgtgtctgatcatttctgaccgtgcaggcatgcatgctaatggtaactttctctgtagcgcatagatatttgtacctgaaagaagacgcagcgaatagtatgtgtttttgtcgagcagactgttaaa

SEQ ID NO: 17680 - DNA, 1709 bp, Setaria italica
  Peptide Sequence Number=SeqID_83654
cctcaaggatgtccaacattttagtcatctgagcaaaaggagcacacgatgaccttcagctcgaaggcgccgtaatagcatatctaaggtgtggagcttccagaatcagtgagcattttagctggatcaaaattactcatcggcggagaagacccaaatatcctatagggtagctgcagcatcggctcaagtatgggcaaatcagtatgtagttcttgtatcagaggatggagaccagctggttgtctaggaccattgaactcggaagtacgagcaaatcccaggaacagtttcttggcccaaggatcatgcatctcatcggtgaacttgtaggcaaaatttctatcggcacaccaaacatttataggcggtgctctagctggcggaataaaagcatatgctgaacgaagaagccttatgttcgatgcaagcctgtcatgatgagaaagcaccagtgcttcatatgggcaatcacctgggccagttccaatctttgttctaagaaaactgggtttggtctttgtagaagaaagcaatcgagcaactgcacgaatgcttgtggaatcattctgactaaagacatcaggaccttctgaatcaatgaatgcatccataatttcatcagtgtagttcctattcaattgcattgctaaaaatgctagtctctcaaacaatgaagaagtggccaagaaggaagcttcaactggggatatatttgataaacgcgtaaagccaaatacaccagatgatagaacagacacatctgatgaactagcttctggaatggctgaacaatggatattgctgggcaaaaatatattaaacagcctgttcaaatatccactccgaaatccacagccgtttccagaaatttccatgttgcggatgattccctcatacactaactttggaatctcaaacgttataggatttctcttgccggcataatatacatcttgtaattccccaaacgggggagagagaagtgagtttgggatatcagcaaagtaaaagtaagaacttccctcattgcgctcaaacagctccgggtgattgcagaccttccgtagctgcatgacaatattcatcaggctaagtaacttcttatcatttagattgccgcgacttccatcaagcagctcattaagagatatcttattttttatggcttgatagaagacttgctgacgagaactcaatttgcaggggacaatttcttctttctttttggtcatttcagcgatgacatcaatcttaacccggcgcagcataaagggcttcaaaattgcatgcagtcgactaagctgatgttcattcaaagctcccccatgctcagcatgaccctcaataccctttgagaaccactcgttgaattgttcatggctgtcaaatagtgtgggcatgatgaaatgaagaagtgcccataactcagccatattattctgtatcggtgtcccagtgagcagcaaacgatttctacagttaaagctcagcaatgtcttccagcgctggctgcttgaactttttatagcctgggcctcatccagcaccatgtattgccacttaacacgtctcaaaagcttctcttcattcacaagtatctgatagtttgtaataagaatgtggaagctagcatctctgcgataaagacgctttggggttgattattcttccggagaactatcctctctgggccccagtaggaagta

SEQ ID NO: 17681 - DNA, 137 bp, Setaria italica
  Peptide Sequence Number=SeqID_83655
ataacccttgaattcctcgcccagagcatcaccactgacctcctgggagatccttttgtcaaaaaaggcacgcagcttcttgacgatcaccaagttgataacagatagatcctggctgacaatgcaaccacggacag

SEQ ID NO: 17682 - DNA, 279 bp, Setaria italica
  Peptide Sequence Number=SeqID_83656
ctagaatgaggggacccaagagggcctccaagatcaggcttctcagtgtcggtcaggccaggcagatcattctcacccttcttgacgatcaccaagttgataacagatagatcctggctgacaatgcaaccacggacagacttcctcctgcgctcaccatcgcgcctaccgtaaccacggaagcatggagttcccctgtggagcagaaggcggacacgaccagaagctgcgtgcctttttgacaaaaggatctcccaggaggtcagtggtgatgctctg

SEQ ID NO: 17683 - DNA, 438 bp, Setaria italica
  Peptide Sequence Number=SeqID_83657
aggaggtccaagctctctactgctgcgaaggcctcagctgccacatgcgcttaaggaatgtccagatgcttttgagttcttttatgaaggcccctacctatctaagaacaatgttatagctgaagaaccccctgcgctatgtttgcaatgttcggaacctccactttctagcttcatcggtgcagggggttcttcagctataacattgttcttagatagtaggggccttcataaaagaactcaaaagcatctggacattccttaagcggatgtggcagctgaggccttcgcagcagtagagagcttggacctcctcttggccaggctctcgcttcggcgttccctctgctccttgagcctctgggccagcagcttctggtactcagcagcgtcagcctgcttcttggcgatcctcttcttcttctccgcaatcctgga

SEQ ID NO: 17684 - DNA, 684 bp, Setaria italica
  Peptide Sequence Number=SeqID_83658
aatgaggggacccaagagggcctccaagatcaggaagctgttcaacctttccaaggatgatgatgtccgcaagtatgtgaacacctatcgcaggacattcactaccaagaacggcaagaaggtgagcaaggctcctaagatccagcgtctggtgacccctcattctaggcttctcagtgtcggtcaggccaggcagatcattctcacccttcttgacgatcaccaagttgataacagatagatcctggctgacaatgcaaccacggacagacttcctcctgcgctcaccatcgcgcctaccgtaaccacggaagcatggagttcccctgtggagcagaaggcggacacggccagaagttagcactccttgtttcatggggaaaccttgcttgtcacaaccccccatgatcttgaagacataacccttgaattcctcgcccagagcatcaccactgacctcctgggagatccttttgtcaaaaaaggcacgcagcttctggtcgtcatcaatctcaagcttcttctggcacccggtggtcgggttcgcgatgttgaacgcaggaggaagtctgtccgtggttgcattgtcagccaggatctatctgttatcaacttggtgatcgtcaagaagggtgagaatgatctgcctggcctgaccgacactgagaagcctgatcttggagg

SEQ ID NO: 17685 - DNA, 569 bp, Setaria italica
  Peptide Sequence Number=SeqID_83659
atagcccttgaattcctcgccaagagcatcaccaagaacctcctgggagatccttttgtcaaagaaggcacgcctatagttgataaaaaggcattagctaataagcaggtaatgttacatacagtatacaactacataatcacagttggaaggaatatcatatgcaaaatattcacaacccgaaggacaaaattaagtcaatttacacggtacacaagaaatgttatcacattatttcaataataatcagacaacattcgcctggtgtgctgccatattgattttgagaatgtacttgagtagtttctttgagacgaaaccatcactttcctaaacaaacgttgccattactataaatgaacaggttaaaacagcagttttcatctccttgatgataccataacatttctctataatccaccaaggacttgctgagttataaagaagcctgccaatcatcacagaagggttgcatggaaaacaaacaataaagattcaatccagcaactatcactatttactacacagcttcccgtaaaccctacaatgaggtacagactactataaac

SEQ ID NO: 17686 - DNA, 640 bp, Setaria italica
  Peptide Sequence Number=SeqID_83660
taactaaccgaaactaacaagtacgacaacttaagttttttttttttttttagacaaagtaataaagctatctgaaactttcacaatagaaaccaacatggtaaatctccagtactggaaaaattccgacaagccagcagcatgttcatgcaaaattgcactcgagaaagctaaagggtagggggtcgactgatccaacacagaacatgagggttcttcaactatagcttaggtaggcattcaaacatctctcaagctccatacaatcttaagcggaggtggcagcggaggccttggcggcggaagaaagcttggacctcctcttcgccaagctctcactccggcggtccctctgctccttcagcctctgggcgagcagcttctggtattcagcagcctcagactgcttcttggcaatcctcttcttcttgtcagcaattctagcgcgcttcctctggagggtcaagggggtcaccagacgctggatcttaggagccttgctcaccttcttgccgttcttggtagtgaatgtcctgcgataggtgttcacatacttgcggacatcatcatcctttggaaaggtttgtaactagtctttccttgtatcttggaggccctcttgggtcccctcattctaggc

SEQ ID NO: 17687 - DNA, 1171 bp, Setaria italica
  Peptide Sequence Number=SeqID_83661
ttttttttttttttggttatgaatgtaggagctcaattgaaccaaatagaattctttgttcaggaccggcgtcgacatgcatgagtttaaatattcatatttgtcagggagaaacacaataacatcgtaacaaatctcaggttccagaaatatttcgacaagcctgcatcatgtccacgcaaaattgcaccgatgaagctagaaagtggaggttccgaacattgcaaacatagcgcagggggttcttcagctataacattgttcttagataggtaggggccttcataaaagaactcaaaagcatctggacattccttaagcggatgtggcagctgaggccttcgcagcagtagagagcttggacctcctcttggccaggctctcgcttcggcgttccctctgctccttgagcctctgggccagcagcttctggtactcagcagcgtcagcctgcttcttggcgatcctcttcttcttctccgcaatcctggcgcgcttcctctggatgacctgaggggtaacaagacgctggatcttgggggccttgctaaccttcttgccattcttggtagtgaatgtcctgcggtatgtgttgacatacttgcggacatcgtcatccttggtaaggttgaagagcttcctgatcttggatgccctcttgggtccccctcatcctgggcttctcagtgtcggtcaggccgggaagatcattctcacccttcttgacaatcaccaggttgataacagacaggtcttggctgacaatgcaaccacggaccgacttcctcctacgctcaccatcacgcctgccatacccacggaagcatggagtgcccctgtggagcagaaggcggacacgcccagaagtcaacactccttgcttcatcgggaaaccttgcttgtcacagcctcccatgatcttgaagacatagcccttgaattcctcgccaagagcatcaccaagaacctcctgggagatccttttgtcaaagaaggcacgcagcttctggtcgtcatcgatctcgagcttcttctggcacccggtggtcgggttcgcgatgttgaacttcatggtggcgttgcggaggcgcgctgccgggtgaccagcacctcgagcgctggtggcggtggcggcggctgcgggcggcggcggcgcgagggctagggctta

SEQ ID NO: 17688 - DNA, 750 bp, Setaria italica
  misc_feature (691)..(691): n is a, c, g, or t
  Peptide Sequence Number=SeqID_83662
gttccagtttgcagctctccaccccgcctcccacgctccctgaccgcctctcgcgtcgccttcgccgcgaaatctagggtttccgccgcgcctcgggtcccgcgcaaccgcccaccggccaccgcaccggcagccgctggcgccctagctcgctcgctcgcccaccggtggttgagctggggccggagaagggagggggcgtcactgctcgtgggcgcttctgtgagtcctgagagggccgagggcgggagggcgcgctcggtcggtgcgcgccgcgaggaacggcagccatgtcgcagtcacagtcgcagtcgcagtcgcagtcgcagtcgcagtcgcagaccaactgggaggcggataagatgctggatgtgtacatatatgactattttgtcaagaggaacctgcaggcaactgctaaggccttccaagcagaagggaaggtctcatcagatccagttgctattgatgctcctggtggctttctctttgagtggtggtctgtattttgggatatattcatagcgcgaacaaatgagaagcactcagatgtcgcagcatcatatatcgagactcagctaatcaaagcaagggaacagcagcaccaacaaccacctcaacaacagcagcagcagcagcaaatacaaatgcaacaaatgttgttacagagagctgcacagcagcagcaacngcagcagcagcagcagcagcagcagcgtagagatggttctcttcttaatggtgctgcaa

SEQ ID NO: 17689 - DNA, 427 bp, Setaria italica
  Peptide Sequence Number=SeqID_83663
taactaacaaaagggttactaaaataaacaacgcaaataagcagtgctatacgttttatttggctaaacgctaagctaaggcacttcagcctgctgtgctagctacagccactatagcgcggaatagtgctgctaaatggcatagtgtgtagcgggaaacagttatgctatcttagctccaagtagatgggccttgttcaaagtgagcttttctagggggacatttcttgttgttgcaatatatctgaatctcaagatctttctaatgaactcgaagaggattatatccattctaaatcgagtttagactgtgccgctatcggattttgtgacggtcttgtgaacatgattcattgtattagtgttgggtgtgacttatcagcaaacattagcatttcatttgtacttatattgtgaattttatttg

SEQ ID NO: 17690 - DNA, 354 bp, Setaria italica
  Peptide Sequence Number=SeqID_83664
ctaggcactggcactcacatacattctccagctgcatacttcacactgtactcagcgcgtgccatggcaacctgcaggagccttctcatggtcccggtcactctctgcttcttcctcctcgtgctcccagcgcagagcaaggagaaccttgccgtcgtcatcttctacggcacagcccgatgcaagagcaacccctccaagatcatcagcaatgcaaccctgcatgtgaccatcaatggcaccaccctcgccaccggcaaaatgacgagcatgggccggttcttgatggcggcgagggtgacctcaaaagatcagctcagctccctggtgagcaaaaaggcggttatcaccgct

SEQ ID NO: 17691 - DNA, 826 bp, Setaria italica
  Peptide Sequence Number=SeqID_83665
ttttttttttttttcttttcagatagccagcttcactggcattgtctattgttgaaaattcatattataacaaccatctcatatgtacagacagatcgactggagaaggggaatctgtacacatccatcccaggttaaaacttctcccccaacagtaaaaagaatttccaccaactgtcaaagacgaaaatagccaaaacccctattgctaatattacctccaaccttgtatgtaaacagtaaagcaatcatcttatcttgtaagcccaaccatgctcgctcaaaaatgcatgtacagcttccttgatggcaagattcggaactagctggtgtggttcaagcgcctcacgggtcaaagggtcaaacttccccaccgtttgaagatggtcaagaagtacagccctctcataagtaactccacttggggtgatcactgggtctctgaaggtatcaagtgtaattttgcagcagagatgatcaggaacttctgctggagtatcagcctttgcagctttcttgaaaacttcctctagctcatttagctgttcttcaggttcatctgcagctggattaccaaggctattgtaattcctaagagcttgtttgcattctaccttcagcttctgcaattgaaaggctcgctctcttgataagccttcccattcgatgtattttgctttagaaagctcttgccaaatctcttcaaccatgtagcttgcaggatgtgcaccccttcctagctccaaggacttctccagtgcttttattccttcagacaatctttggctgttgacaagtgctaggcccagcatgtaatgtcccttaa

SEQ ID NO: 17692 - DNA, 786 bp, Setaria italica
  misc_feature (1)..(13): n is a, c, g, or t
  Peptide Sequence Number=SeqID_83666
nnnnnnnnnnnnnacaaatcacagatactgcggcgccattgtttcggatcgcactgaactgttacagattttacatttacctgtccaggatcgaatccatggacgcgacactgaagaaagatggcaacgacaagaacgaaaagacattacatctgcacaggccgtgttcatcggacctggtctcctccaacttgcagcgacgatcaatcgatcagcttacttctagatcgaccgatgccatcacacaccaccatactatattatagattatagatgccgtatctatgtaccacaaaatcaattgccttattgcagcttacaacaagcaatgccgcgccgatggatcgatcgagcaggcttgaaacaatggcgtgggagaagagaaccccatgggccatggctcgatctcatcctcttgtcactctgtcaggcctcgccgtcgtcgaagttgtgcgcgtagctgacggagtcgtacctgaagtcctgtggcgcggcggcctttagcggcctcccgtcgcgtcccattagcctgcgcgccccggcgcgcaccttgtagaagacgtgccgccacgtgccccggcagtggcacccgcccagcgcggcggcctcgtcgtcgctcatctccagcccgcccgcgaaggggggccgccgcgccatcacccacccgagcccccactcccaccaccgccgcagcgcgcccgccgccgccagcgccttcacggacggcatcgactgcgcgcgccggaacgccacggcgcccgccgacgacagcgaggggccgaggtg

SEQ ID NO: 17693 - DNA, 624 bp, Setaria italica
  Peptide Sequence Number=SeqID_83667
agttttttttttttattttttcttgatgaagatgagattttttatataaagcctgaatttaaagtcaaggttacatcagtttaaatgaaaaaaaagcagaatacattataatacaacacacggtgtacaactgtacaccatttcagaaacaacagacagggcacatgtgcaacataagaaaatacacagcaagaaggcactaatcaaataccatgctttgctcatcactacaacttctgcaaactctcatacaatcacactaaatgctattttggcaaggaaccaatgaatttaacaataagatctaccatctgggcatcaaaagcagggccctccatttggaagtgcccagctccttcaatcaagtgtgtatcaacccgtccagctgcagatttgagcttgttttgcaactgtttcacgcttgtgaatccgtctttggttcccatgatgaatagctttggtttttgagacttgagtatagcatcatgatgcctgccgaataggaccgaggccaaaagaccaaatgggtacccgatactaacataaccaatcacctcgtcaaccttatcaactgcagaccctgcaatcggcgcaccagcggaggatccgacgaggaggatgccg

SEQ ID NO: 17694 - DNA, 1267 bp, Setaria italica
  Peptide Sequence Number=SeqID_83668
aatcgcggggtgcatgttatacatgaatgggcatgggcaggcacacccaccgagggtgctgcttggctccgtctgcagaggctggctgatacttggcacaggatattgttgattccagtgactggtggagtagtagttgggatgatgcatggattattggagatctttgagcagataaagcaatcattatcatctcaaagggaaggtattgatttcatggccgcgatctttcccacaatcaaggccatccaagctgccattactttagggacggggtgttcactggggccagaagggcctagtgttgatattggtaaatcttgcgcaaatggatgcgctgcaatgatggagaacaacagggaacggagcattgctcttgttgcagctggatcagctgctggaatcgcttcaggttttaatgcagcagttgctggatgcttttttgctatcgaaacagtattgaggccacttcaagcagagaactcaccaccatttactactgctatgattatattggcatcagttatatcatcaactgtgtccaatgttttgctaggggaaaaggcagcgtttattgtcccgacagttgccagttgcctctaccttattctaggcatgctttgtggagttgtgagtgtggcattcaggcagttggttgtttggttcaccaagacttttgacttgataaggaaaaagtttggccttcctgctgtagtatgtcctgctttaggtggtcttggagcaggcttaatagcactaaggtaccctggaatattgtattggggtttcaccaatgttgatgagattttacatactggtaaaagtgcttcagcccctggaatctggctcttagctcaattagctgctgcaaaagttgtagcaactgcactctgcaaaggttctggtcttgttggtggcctttatgctccaagtttgatgattggcgctgctgtcggtgctgtttttggaggctcagcagcagaattgataaactctgccattccgggtaacactgctgtcgcacatcctcaagcttatgcgctagtgggaatggctgccacactggcttcagtctgctctgtcccattgacatctgtgctactgctctttgagttgactaaggattacagaattctacttcctctgatgggagctgttggtttagcaatatgggtcccctctgttgtaaatcaatctggtagcaaagatacatttaaggcaacatctcctcgacatggttattcttcactattaacctcctactgat

SEQ ID NO: 17695 - DNA, 2258 bp, Setaria italica
  Peptide Sequence Number=SeqID_83669
ccggccggtctggccctttattgctgttcctgattgtgttttctcgaagaaaggcgcggtcttgggagggcgtcgatcgcggattcggctccggaggcgtcgatttgatcccgaggtaataaagggattatggatttggggagacttgtctagcgcggttttgatcgggacttggtcgggggatcaatccgtcatgattaagcaaatcctcggccggcttcccaagaagccggccaagtccggcgagaaggagttggccggagcgggcacatcactgcccagcccgacggccgatgcgagaaccacaacggatttgaccatgtctagcaggctcgtcaatcccaacagctatgcctccacggtcacaaatcccggccagaattacgcggccaggaacgccggcgtcagcaacggattcacggcctcggccgggtacgaggcgctcccgagcttccgggacgtgccggcttccgagaagcccaccctgttcctcaggaagctggccatgtgctgcgtgcagtttgacttcacagacccgaccaaggatgtgaaggagaaggagatcaagaggcagacgttgcttgagctggtggattatatcacctcagccactgggaagttcccggagcccgtcgtgcaggaggtcatcaagatggtgtctgcaaatttgttcaggggaccaacccctgctccgagagagaacaaggcactcgagtcttttgatttggaggaggaagagcctgtcatggatccagcatggcctcacttgcagattgtatatgaactgttcttgagatttattcagtctcctgagacagatgcgaagctggccaagagatacatagatcatggtttcattatcaggcttcttgatctctttgactcagaggatcctagggagagggagtacttgaaaacaatacttcacaggatctatggcaagttcatggtgcaccgcccattcatcaggaaggcaatcaataatatattctacaggttcatatttgagacagagaagcataatggaatagcggagctgttagagattttggggagtataatcaatggttttgctttgccgctcaaggaagagcacaaattgtttttagtccgagcattgattccactccacaaaccaaaatgtgttgccatgtaccatcagcaactgtcatactgtgtcactcagttcgttgagaaagattgcaagcttgctgatactgtcataaggggtttattgaagtattggcccatcacgaatagctcaaaggaggttatgtttttgggtgagctagaggaggtactggaagctacccagccagcagaattccagaggtgtatggtgccactttttcgtcagattgcccgctgtttatgcagttctcactttcaggtggctgagagagctctctttctatggaacaatgatcatatcgaaggtttgatcaaacagaacagtaaggtgatactgcccataatctttcctgcgttagaacgaaatacaaaaggccattggaaccaggcagttcaaagcttgagtctaaatgttcgtaaaatattcatggaccatgaccccacactgtttgaggagtgtcgaaagaagttcgaggaagaggaagctcaagaagctagcgtgaggtcaaaacgtgaggctatatggaagcgcctagaagaaattgccttgtcaaaatctgctcaatgaagcagcacatcttcctgaggcatagttcatcagcagagttcctctatctagtcttgctgacagcatatgagcagatccttctcactggatcaaattagatggctgatgtgagtgctcatggatggttggttgcctcgtgttgcttgttaccaaacgttttacaggctgacatgtaaatacgaggtagatgatgggctgcaaagcttcaacagagcctcaggttctgtcagttgtgtgatccactggcgatgatatcggtttcatcatcagaggacaaaggaaaggagctgttctggctttcctaagatgcaggtgacacagcctgcagcttagtttcctgatctggggatggttaggagcagatgaaagatcagctctttcttgctgatggtaattttgctgaaaatgtaatatgctttatgtatgaatggtaacttgaaggccatgcctttgtgataatatgtgatccggtgtacatgtgttttgcttccatcaatgtatacagaaatttggaatgagcaatgctgattgccacctgtttttattacaaaaaaaaaaa

SEQ ID NO: 17696 - DNA, 413 bp, Setaria italica
  Peptide Sequence Number=SeqID_83670
aaatatttttgaagatattcagaaagccctacaggatgagagaataaaggaatccaaagaaagggcagcttccattgcatggtggaataggttacgatgtgaaaagaggcctgtctatggcacaaatatgagagaggttttgactgtaaagcatcctgtatctgatattcttgagaagaggaacaaccctttgtgccacatggattattcatcgagcctagcagaccttgttcttccatcagtggaacggtttcagaaactgcttgatattgtggaatcatttacatttgcaattcctgctgctcgagctcctccccctgtttgctggtgcagcaaagggaagtctcctgtttttattgatccggcatatagagaaaaatgcacgaatgagttttcccccattctgtctccta

SEQ ID NO: 17697 - DNA, 1190 bp, Setaria italica
  Peptide Sequence Number=SeqID_83671
gccaacaagttcggggagcccgccttcatcgggaacatcctgctctgcggatactctgcttccacgccctgcccggcgtccccgtccccggcgccatcttcaaccgccgaggaggcgcgcggccgccgcaagttcagcaccaaggagctcgtactcatcatcgccgggatcgtcgtcggcgtcctcatcctgctgctcctctgctgcctcctgctgtgcttcctcacaaggaagagatcgtcttccaccagcacaagtgcagcaaggagcgggaagcaggcgcccaaggatgccgcggcggccgggcgcagcgagaagccagggtccggcgcggcggaggtcgagtccggcggcgacgtgggcggcaagctcgtgcacttcgacgggccgctggcgttcacggcggacgacctgctgtgcgccacggcggagatcttggggaagagcacctacggcacggtgtacaaggccacgctggaggacggcagcctggttgccgtcaagaggctcagggagaagatcaccaagggccacaaggagttcgaggccgaagcggcggtgctcggcaggatccgccaccccaacctgctggcgctcatggcctactacctggggcccaagggcgaaaagctcctcgtcttcgattacatgcccaagggcaacctctccacattcttgcacgctcgcgcaccgaatacgacggtggactgggcgacacggatgacaatcgccaagggcacagcccgtggcctggcctacctccacgacgacatgaacatcgtgcacggcaacctgaccgccagcaacgtcgtcctcgacgagcaatgcaaccccaagatctccgacttcgggctgtcccgtctcatgacgaccgcggcgaactcgaacgtgctggcggcggcgggcgccctggggtaccgcgcgccggagctgtcgaagctgaagaaggcgaacgcgaagacggacgtgtacagcctgggcgtgatcatcctggagctgctgacaggcaagaaccccgcggagagcaccaacggcatggacctgccgcagtgggtggcgtccatcgtgaaggaagaatggaccagcgaggtattcgacctggagctgatgcgcgacgccgccgcggggcccgtcggcgacgagctgatggacacgctgaagctggcgctgcactgcgtggacccggcgcc

SEQ ID NO: 17698 - DNA, 268 bp, Setaria italica
  Peptide Sequence Number=SeqID_83672
acaaaggcgggggggacccctgcacgacgccgtggacgggggcatccgggacagggccgtgcacgtgagggacgccgtggccgtgttcttgctcggggtgatgtgcaccggggaggacgcggcgtcccggccgaccatgaagcaggtgctgcagcagctcatccagtacgaccgcacggccagcgtcgccggcgcgtgccgggacgcccgcgacgatgacgacgacaacgctgcgcgggcgcaattaggccaagggggaagaagggcg

SEQ ID NO: 17699 - DNA, 326 bp, Setaria italica
  Peptide Sequence Number=SeqID_83673
aaacaaaaccatttcctgcactagaaagagtatttacatgacaagaatggaagaatcacaaaagcagagatagcctataatgaagtaaagttctagaatttggaagtatgcactcttaccaaatgaacagctaccaaatcctatcacaaggtacaaaatgatattttctggtcatcagcgtggactagctgagatcaaagactacaataataaatttatgaatttatgaaatctatactggaaacacaatgtatatgtgctatcggtaatattgagttgatttaactgctttctctatctttcagatgtcagttagtagtacatga

SEQ ID NO: 17700 - DNA, 793 bp, Setaria italica
  Peptide Sequence Number=SeqID_83674
ttatttgttgggtaacctattctattggttccttgatctgtcattatcatgagatggccgtatctcaagcctttggtgctatcatactgctttccatgctgcaaaccaagaatttgctttatgttctgaatttctgtgttatccagaatttgcttgtgattttgcttctctaacatttaatagctttcccctgagaggaaacacgccatagtgatctctaccaactacagctataccagccatagcaagagctttggctgaatcgccttcagtcagaatcaatgtgcacttgttggagtccttcccaccagcttcatttgcatcctcaagctttggtatgccagaaattcttgacttcttgcttccatcagtcttctttagttctttgcttaatttgaaatcggcccaggagaggacattgctgacaatacttgatttctcgactcccttgaggaattcattagaaagctcacactttgacccaaagcttccctgacgagtggtcaaggtctccttggtctgtgagtcgaaggcggggttgtcaatgagggcattaacaaagacccacagatggttcctcacattatgcagtttcatgtttgcattcttgtttttcttattcacaacggtcatcacatggtttgcaacttggttggtgacataatcaacatgagttccaccccttattgttgcaattctgttgacgaagctgacctgctgaaactgtccttcactcggaataacacacacctcccaccgatcatttacttgatcaaaaacccttagtttgggt

SEQ ID NO: 17701 - DNA, 413 bp, Setaria italica
  Peptide Sequence Number=SeqID_83675
acgcgttgtttcttccacccaccgtcacacgagctcgcagcgaccgccgggctacgaggagctcccacagcgcagggcgccaccaccatggctgcggaaggcaaggctccgtcgctcgcggaggaatattcactcccatcccaggaggtccaattgcaaaatccatctgaagagaaatctgctgttagcactgtggcagaagttgtccctgagaaaagtgttgaaactgcaccagctaatgaggctaccgttgctgttgaagaaacaagtcaaactcctgaggtgaaggaaccctctgatgagccagaagctgaggaaagctctgctgctgaagaaagcgggaggctgctgaagaagcagtgatgctgctgaggagcagctgatagaaaaccagaaattagattgagacagct

SEQ ID NO: 17702 - DNA, 591 bp, Setaria italica
  Peptide Sequence Number=SeqID_83676
cgctttccccgtccgtcatttttgtttgaagcgcaccgtgcggtgcggcgtgccttgcctccttggcttccgccgcttcgcctcgtcgcttccgctctccacaacggcacactccgccgccgccgggtgactcccgcggtgatttcttcccccgaagcgctggtatcctccggatctggacgccgagcccgccgcgagctctaactgtagcgattggatctgaaaatgagcgaggggaatactactcagcttgaccttgaggaaggatcgcctcagatgtctgctgataatgattctagtagtcctgcaacaatacacaagataaatgctgacacgcaagactctggaagcaaaattgaatcacccactccagagaagcttgaatctagaagcaaaggggtcgttgtgagttcactagcaaggaatttgcttgcagagaggtacaaagacagatttgcaaatctgctgggggaagatgaggatgacacggatgatgaaggctataatgacagtgtttcacctgatgtttgccgatctctgatttcaggaagcattgaactccttgtagtaaactactaaggtatttgtctt

SEQ ID NO: 17703 - DNA, 250 bp, Setaria italica
  Peptide Sequence Number=SeqID_83677
cacgaagatggcgaacgttgtgtcatccagcaccttcctctccttgccgatgttgagcacgatgagctcgacgagccccttggcgctcatggcaacgccgagcgcggcggcctcgcgcctggccatgccggtccaggcggccaccgcgaacgtgccgccgaacttccccaggaacgccacggccacgacgagcgcgagcatgccccacgccgccgcgccgcggacggtgtcgacgtcggtgtgcagcccg

SEQ ID NO: 17704 - DNA, 1617 bp, Setaria italica
  misc_feature (1)..(15): n is a, c, g, or t
  misc_feature (25)..(25): n is a, c, g, or t
  Peptide Sequence Number=SeqID_83678
nnnnnnnnnnnnnnntttttttttnttttttttttttttactacaaaagtcagctgatgcatttgtgatggtatttccaattttgacagtgtgaagtgtaaacatctggtcatgtgccagacatagttttttacaatatgaattgctagatcactaagcatcagccgcatgagaatctcggccaatattcagttgcaattgattcagcaggtcaagatcatgctttggaaaggaaacttcaatatcgtccctagattagcacgggctgaaccctaaaaccactaaaaggaacaaactgtcgactaagaactgaacaactactggagtggatggttagcaatcattggggccatctgaagtgtatgtcagtgaggaattgctaggccacagtagcatcttaaacctcttggtccaggtgttgcaataccaagacaggttcttttggcactttcagaatgatttggttctgatcccagccagctctttccatttgctcgaggaagtcagtaaatccatgctccaatgctagaatgctatcctctagccaagagaaaatctcatcctggtttttccgatttttttgaagccaatgtgcctgccagaggcttctcaggacagacatgctgtttgccgcctccttgaatgcaacaagaaatgttggctcttttgatccaaactgctcaacaaagagaacatacttctcattcttgtacaacttcaatagtctattcaccttgtcactggatcccttgccaccaagcattctttccatgggcacaaccaaaaaaatttgtggatgcaagaatctctcccatgttaaaaatgttttcttcctcgttgcaaacaacataaccaggaactgtatgttgtgcaacatgtgatctcacaagaatccgaccacgttttaggtttatcttactgtgcggaacttgagaactgatagggactgatagcgcagccaaagatgtagaagacgaataatcagccatgttgaagtaagagttaagtatgatgactttacacctgctgtatccataataagtacaccgatcgaaaggcctaacagctgagctcctacttcccatacttcctcctttgcagcaacctctcctaaatttccagattgtgcaaagtgattttggatcacacgaaaggaaggatctttaaatcctcttgctacggccttcgcaagattccccaatgatgcaagtgggaggaagtaacctggatagagcggagtcatgagctcaaagatgcttccagcacttccaatgaaatcggcatacatccgccacttctttgggtcatcatcaaaaagtgttccaaagcgtccaccaatgagaagacgcccaaaggctcctatgccatcctttgatacccatctgatagcagcagcagatgcagctgctgaacctgtcccacacctacagccttcagaagacttgatgtaaccagtacattacagatccatcctgtcacatttgttgggaactgcaatagcatgtactccaggtagtccaccgtaacagaccctggaaaccccgctggaagtacaaagtccctaataacctgggggatcaaagaatctgcattctcatcttccactgcattcaccgg

SEQ ID NO: 17705 - DNA, 302 bp, Setaria italica
  Peptide Sequence Number=SeqID_83679
gagcgatccgatcttgggcggggtggcagtctcctcggacgacaccgagagcagcgacgacgacgacgacgtcggcgggtgctcgacgaggaccaactcgccgagggagtcgacgccggaggtagacgagaacgaggtggacaagaaggcggaggaattcatcgccaggttcagggagcagatcaggcggcagagaatcgagtccataaagaagtccgcggggccgcgcggcgtcaagcgccacggcaagtagagctcgctggctgatgatggccgtttgttttcgttttagttatacgtag

SEQ ID NO: 17706 - DNA, 294 bp, Setaria italica
  Peptide Sequence Number=SeqID_83680
ggttaaccctagtttatttcgacatgtatttgacactgtttagctataggaaatgctttttttattgagtttgagctatttcagccgatcgatcttccataggaagtattgtcaattatgacaaaaaccataccttgatttcccaatatttacaggcacaatgtcaatgttgtgtgcaatattcagcattcactgatgagcccttattttaacatatacattctaaccaccagattatttaagcatatgttgcttctattatcctcacaaaattgagagttgccttcacagtag

SEQ ID NO: 17707 - DNA, 445 bp, Setaria italica
  misc_feature (437)..(437): n is a, c, g, or t
  Peptide Sequence Number=SeqID_83681
gcggtgactgggtgagcagcggagcttctggtgctcggcgtcgattcgttcatggcctcggcctctccctgcgcctgcggcgctccatccccatcgctgcgatgccctctcgccctgtcgctccccttcgtttcctttcctcccgccgtccggctcgccaccccgccgcttctcccgcgccgcctcgccgtgtcgcgtccaagggcggcgtcagcgctggaggccctcgtgctggagtctgacgacgaggatggagacgacgcggacgaggaagcggaggtggaggaggaggccggggcgggcctgttccagggtgtggcgtgggcggcgggggccgacgagagggacgcggtgaagtcccccgaactgcaggtgttcgagctggaggagctgccggagcagtggcggcggtcgaggatcgcctggctctgcaaggngctccccg

SEQ ID NO: 17708 - DNA, 406 bp, Setaria italica
  Peptide Sequence Number=SeqID_83682
ggaacctgcaggataagagctccgttgcgaacattaagctgatatgctattgggtctggagcaaagtccagattcaagccagcacggcggaccttaagagagaaatgaaaaataacttagaccaaaacaaattgaagaaactaagcacatgcctcaacaatgaacaaatgaaaacaaatgatctaataagaaaacaacctaatttgcttactcatgcttcaaaatttttttttggcaaaaaaaggatccttcaaggcacagcagaacatgcagtgcaagtgattgcgtgaggggagggataactggcttttagttaggcaaaattcagaccaaaataatttcagtgtcacttaaaaaaaaaaggtcattatactgtttaaagaacttgatcagccgaaaccttagt

SEQ ID NO: 17709 - DNA, 1282 bp, Setaria italica
  Peptide Sequence Number=SeqID_83683
tttttttttgagagaacaagacctcgatttgattacgatccacaagatgaccagatcagactgatcgcaaacagacggcacacaatgtttcagctgttggctctcaaacgtcagactggtggcgacatgaaacaagcgctggaagtggagcttatacagtacatacatgtgcagtgaacccctatggcgaaaaggagccctgaatagacccttccctagggaaattgcttcaaacgggagtgtggccagcttggccgatggtacaaacttaacgcgacagcttggacatgcggaatctcccccacttcaggaatgcatcagatgtttgcctcttctaaaggcaacgttacctcaagggtttcagcgcctcgccggactgtcaaggtcacctgatccccgacgccatagtcatccagaactctcagcagatcagatttgcctttgacaggtttgccgtccactgcaatgatgatatctccaagaacaatgttgccagcaaaacccctgctggtaggagctagacctgctttggctgcagcactgcccccaggaacctgcaggataagagctccgttgcgaacattaagctgatatgctattgggtctggagcaaagtccagattcaagccagcacggcggacttttccaaactgaattagttgaggagcgattttaagtacagttgatgatgggatggcaaaaccaacacctgcagatgttcctgtctgtgtaaaaattgctgtgttaataccaatcatatgcccctttgagtcaagcaaaggaccaccactgttaccagggttaatagctgcatcggtttgaactccacccccaattgtcaccccagcttgactgaaaatatctcgatttaaaccactgataacaccaacagttaaagtatggtcaaaaccaaaaggatttccaattgctaagcattgctgaccaactcttagggccgaggattgtcccacattaattggcttcaaaagatctgtaggagcatcgaccttaagaacagcaatatctttagcacgatctgcaccaaccaatttgccatcaaaacttttctgtatcccttcagcagcaagaatgttgacacgtgcaacgacttcaccaggcttgggattttttgaaagagcactaccaaccacatgataatttgtaacaacatgtccagaatcatcccacactacaccagaaccatttccttcagggatctccacgatgccagttacattaagctgaggccgtagtgttgcatcaaaaatattgacgactgagt

SEQ ID NO: 17710 - DNA, 973 bp, Setaria italica
  Peptide Sequence Number=SeqID_83684
ttgtaacttcctaccccctaatttgttctacccctagtctttgtacttgtaaaattattcttcgtattttaaacctacttgtattaactacctaactagtttagtgtaattatggtcaaaaccaaaaggatttccaattgctaagcattgctgaccaactcttagggccgaggattgtcccacattaattggcttcaaaagatctgtaggagcatcgaccttaagaacagcaatatctttagcacgatctgcaccaaccaatttgccatcaaaacttttctgtatcccttcagcagcaagaatgttgacacgtgcaacgacttcaccaggcttgggattttttgaaagagcactaccaaccacatgataatttgtaacaacatgtccagaatcatcccacactacaccagaaccatttccttcagggatctccacgatgccagttacattaagctgaggccgtagtgttgcatcaaaaatattgacgactgagtaagtatttgtttcaaaaagctccgcgatccgtttctcagttggaaataatgggccagatgggaaaatcttaggagtcacatcctcaattttgacagatggttcacccaaagcaagtgctgataagtaccttgaagaatgtaagctaaaacaaaaggctgacaaggcaataagcttcctctttgacacaagcaataatgttttgcttgacatttcaccaagatcacatgttgccctcaatgatctcggaggcgcttcctcgccgtcgtgggttgccgaggcggcgccctcgacgacaaccctccggcggctgatgctactgaccgcggcgcgcgcggagggcgcggtggtggacgcggcgcagggcaggcaccgcatccgaggagtcctgggtttccagaggggtcgtgtctgtgtgtggcgcacgagctgcaagactgcaactgcaatcgatcgggagtggaggatgcgggattgcggt

SEQ ID NO: 17711 - DNA, 491 bp, Setaria italica
  Peptide Sequence Number=SeqID_83685
cgtactcgagatcgtccttcctgccgcagccgcctcaggctcccgcgaggctcgcactcccgtcttcggggcccagggccgccgccgccgttgtcgcgaggagagcggcggcggaggcgggccggtgtgtggcggcgtctgcgtcctcgtccccggccacggccgcggccgcgacggaggtgcccgggaccatgaaggcctgggcgtacgacacgtacggggacgccagcgtgctcaagatcgacgaggccgcggctgtgccggcggtgggcgaggaccaggtgctcgtcaaggtcgtcgccgcggcgctcaaccccgtcgacgccaagcgccgggccggcaagttccaggccaccgactcgccgcttccgaccgtgccgggctatgacgtggccggcgtcgtcgtcaaggtgggtggccaggtgaagggcttcaaggaaggcgacaaggtgtacggcatgataagcgagaagcccctggaggggcccaag

SEQ ID NO: 17712 - DNA, 882 bp, Setaria italica
  Peptide Sequence Number=SeqID_83686
gccaagccgggccggccgctgaccttgctggtgcacgtatgcgcagaccgtgccgggctatgacgtggccggcgtcgtcgtcaaggtgggtggccaggtgaagggcttcaaggaaggcgacaaggtgtacggcatgataagcgagaagcccctggaggggcccaagcagtccggctcgctggcggagtacaccgcagtcgaggagaagctgctggcgcgcaagcccaagagcatcgacttcgcgcaggccgccggcctgccggtcgccatcctcaccgccaacgaaggcctcgagaaagccggactatgtgccggcaagtccgtcctcgttctcggcggagccggtggtgtcggctcccttgccatccagctggcaaagcaagtctacggcgcgtcgaaggtggccgcgacggccagcaccaagaagatcgagctgctcaagagcctgggcacagacgtcgccattgactacaccaaggagaacttcgaagacctgccagacaagtacgacgtcgtcttcgacgcagttggtcagggtgagaaggctgtaaaggttgtgaaggaaggcggcagcgtggtggtgctcaccggcgcagtcaccccaccagggttccggttcgtggtcacctccaatggctccaccttggagaagctaaacccataccttgagtctgggaaggtaaagccggtcgtcgacccgcaggggccattccccttctccaaggttgtagaggccttctcctaccttgagaccggaagagcaactggcaaagtagtcatctctccagttccataagagctggagcagtagattgcagagtttgttcactggccatttgggttgattggccgtagatttcttctagttgttcttaaaattta

SEQ ID NO: 17713 - DNA, 494 bp, Setaria italica
  Peptide Sequence Number=SeqID_83687
ggcaaaagttaatggaaactggaagaattgaacagaagttcatctgtacagaatcagaagtcgaatgatgcgtcattagaagcagacaaaattcttcgtaaacaaggtgctgaaggcagtggaactagtaatcatgatacttcaacatcagatacatgttgtactgcatatgctgggaatcttaagcctttgagagcaaatggcacggagaatgctacagttcctatcagctccactctggcagctgacactgcaagtgttaacagaggtcctctgactcataatgtaatgcctttagccaagaaaactgacactaacatgctggaacacactgcccagaaaattcgagcacagtcacatgacagcagtgctccaaagcatttgcaggtggaggatagggaaggacaagttcataaattggagagtatttcaagggtctccactacagtatcaggcactgcagatgctaacaaaggccctttgattcataatgc

SEQ ID NO: 17714 - DNA, 603 bp, Setaria italica
  Peptide Sequence Number=SeqID_83688
gtttatttagtcaggagttcttctatgccttttggatagatatagagccaaggagatccagccttggaccaatagctgtcccatgtctttcaactgtttgattggtcagtgaatcagtattatagcttttgtttccattgttactgtatttggtgttctgagtgtatcttgctgtatagtagttgaggccgatgaagtcgaatgatccatttatggcctttgactgttctttcgtgaatcttggtaatctgttaccaactagtgttctcatgctgggtgggtaatctccctttgttaaaggatccatgaaccagccatacataaattccaatgcacgcttggcagcgtccttgtcttgcttggaatttgagtatggaaccatccaattactgactagagtaattcctattttcctttttgctttacctggtatttgtctctgtacacctgaaccgctgctgcatgagcaagaagctggttatgagatacggtataaggttcccttccagagtctcccatgctacatcctgaattttcccaagaggagcatctgcctggtgctaatataccactggcatagccagcaatactgaaactccaagg

SEQ ID NO: 17715 - DNA, 276 bp, Setaria italica
  misc_feature (269)..(269): n is a, c, g, or t
  Peptide Sequence Number=SeqID_83689
attgttctcagtgatgagagcattctatatggaggggaaaataaataatttataacagaaaaacacaattggacaaaacgagggagctgtcggttaataacaatgagcactttatcggaagtaaatgttacggataacctaatcctatttcatctgtcaataataaaagatgcttaatagattcaaaaggaaagacgttgataacacttatgctctttttagttggaatggaagggaatgaacagaagtactcattaatcactaaaacngaagtta

SEQ ID NO: 17716 - DNA, 754 bp, Setaria italica
  Peptide Sequence Number=SeqID_83690
agttcctaccctcttacccgaattggccctgatgttactggccatcatgatggcgccagccttcaggtctgcacgtctgctagcatcctgtgtttcatccatctgcagatgtcttctccggagtgcctcaaaggtcatgtgaactgcttccacaatctccctgggatcggatgcagatggcagaaaggcaagctccttgccagcaacaaaattcttgtatgtgggcttagggcgctttaacttaccatttgagccatcggcaccagatgcaccagaaccaggaggacggcctctcctagccttccgttcagatgccacagtttggttaccagagtaaggttcatcatcaccatcaactaacatgcttgatcttgtcttgtatgcagagataggggtggcatcaatgggcccgttggcactggtgccggtataagaaacaccattcgcagaggcactgaaagtagcaaaagatccaaaggaaggaagattccccgcaccaaaccctgttggaaattggccaaccggagtgacacagaccaatggtggtgtgcttgactgattaacattgactcccatgggtgcagggaacatgggagctaaagaccttaatggcttgacatctaggagctcctgattaggatcaggtatgaaatttgaggccctgtacatctcagatgtatgaaaattcctcgtcgccggcagtccaccactacccaccagaggttgacgagcacgaatcggagaggaagagaga

SEQ ID NO: 17717 - DNA, 716 bp, Setaria italica
  Peptide Sequence Number=SeqID_83691
ttctcaagctgcaggataacattgaacccgaacgccgaaccaggagtgaacgccgactccatctcgctttcggtctgggtcgtcttgatctctgggttcaccttgatgttttccttcttgacaaattcttcgatggtgatgctcagtatctcctgaaggacgaacttggtgacccgacttttgccaagcatctgcaggaggatgctgctgggtatatttgacgttttcccttccatggactttctcccttggactttctgaaaccaggaaccggcggtgcatcacgagacaagatcgtcagggcttcatcaaacaccttttgtgttgccttcccaggcaactgcactcgtacattgatcttatcaccgtcacgggacgcaacagacgtcttgacgttctccagcgacaggtcgctcttcctgtcggcttcagtgatcgacgagtcccgacctgatccaactgcagacaccggctggaatgtgtgcctcaaacttgttcctacaccggaaccggaacgaaggaacccctgcgcaggtatccggcacttggaggcgccgcatattctgatgtgcgcacgaacttgatcaattacctgaaagtagctgcggcatcttggccttgactgaaacttggggagggttgcggccgaggccatggaggtgactcctgcagtcccgccgcccgtccagtttcagccggccggagttggggagggc

SEQ ID NO: 17718 - DNA, 564 bp, Setaria italica
  Peptide Sequence Number=SeqID_83692
tagtttagtactaattaccttaattgtttaagcggaaaggagccggtcgacggcgagtcaagggagacgagagagatgacagagaagctctggtcgctaattagtccgcagaacactgaagatctggacgatccgaggctgaacccgatggccggtggagcgccgagcttgcagaacctggcgtgccggaagctacttgtttgctcggccgagaaagatcaggacgcgcgggcgagggccgcggcgtactaccaggctgtgaaggagagcgggtggcgcggttcggtggagtggttggagtccgtagtggaggagcatgtgttcttcctccacaagacggagtgcgaagagtccttggcactgatggacaggctggtcaccttccttggcgaagactgaatgaatcattgggggcggggacagttcacattgcaatttcattcatcgttactaaggcactgtaataaggtgtgatgaaaattgttccttttattgcgagtaactaaaaatcgtaaccgttattgcaaccgtaataaaatctgctcctttacttaaaaaaaaaaa

SEQ ID NO: 17719 - DNA, 362 bp, Setaria italica
  Peptide Sequence Number=SeqID_83693
gccggtggagatcaaggccgcgtaccgcgccatggccaagcgcctccacccggatgcctcccgcgcgtcgggggcggccgcgccggcggcgttcctcgagatccggcgcgcgtacgagacgctgtcggacccggacgcccgggcgcgctacgaccgctcgctcgggatgccccaccaccggccggtcctggccgccggcggcgtgcgggtgcggaggtgggagacggaccagtgctggtagccgccatgccttgtcatgttcgctcccagaagagatccagccatccagggtagggatggcaatgggtgggcgaggcaagaggacccgcaacacgatcacacccgctctcggacagactggc

SEQ ID NO: 17720 - DNA, 285 bp, Setaria italica
  Peptide Sequence Number=SeqID_83694
gtcaacaacttgagaggcaccagttaatccatccgaaaaaacttagtccaacctcgccgccgccggagaggatgagcgagcggcggtacaccgagcaggaggaggccctcgagatcaagtccctccgccgcatcctcgccgcctatgccaactatcaagatgcagcagaaagggatgtcaagagatatgagcggtcatttaaaatgcttcctcctgcacacaaggaacttcttttccaccttggtctgaagtaccaaagactcagatggtgtatatccatgaacg

SEQ ID NO: 17721 - DNA, 392 bp, Setaria italica
  Peptide Sequence Number=SeqID_83695
cagcctttcctcatccgtaagatcagggtttgggcccgtcaaacgctcccttagttccttctcttcatcactcgtaccgtcccttgagacctggacaaagttgttcacatggccgtcggcattcggtttggttatattctcatgctcattgcacagccagttgccatccactatgtatttgtattcataccgtccttcggcaactctttctcaagaaaccaagctcctttctccttatcatatgtcaaaggaattctctgcaaggatgaagcgcaaatcaattagacacttaagcatgggattaactaagaaaaactaattaagatgtagatggtcttgtttaaccatcatagcccccagagaatgtgaggggcaatcatatttgatctatc

SEQ ID NO: 17722 - DNA, 323 bp, Setaria italica
  Peptide Sequence Number=SeqID_83696
aggaaaggctgatgatcagggtttgggcccgtcaaacgctcccttagttccttctcttcatcactcgtaccgtcccttgagacctggacaaagttgttcacatggccgtcggcattcggtttggttatattctcatgctcattgcacagccagttgccatccactatgtatttgtattcataccgtccttcgggcaactctttctcaagaaaccaagctcctttctccttatcatatgtcaaaggaattctctgaccccagccaatgtcgagcccagaaatttcaacagaagacgaagtatcatcttcccatttcaaagtgta

SEQ ID NO: 17723 - DNA, 567 bp, Setaria italica
  Peptide Sequence Number=SeqID_83697
gttcacacacaagcacatagaaatgcgaaccatctcaactggacctcctattgctcagcctccacgtattgttccaagtactctctgatcatcagcctttcctcatccgtaagatcagggtttgggcccgtcaaacgctcccttagttccttctcttcatcactcgtaccgtcccttgagacctggacaaagttgttcacatggccgtcggcattcggtttggttatattctcatgctcattgcacagccagttgccatccactatgtatttgtattcataccgtccttccttcaggaaacagagacccaaaagttgtgagatacagccatatgggaagtgtaaagctaactgctacatttttgtatatggcaagcagtattttcttttaaaaaaactgcagtcatcctctatgcctccaaaagtccagtatcactagtacaacttaggatgggatggccacagctatatttcaatataaacttcgtgattaaaagattatactcacgggcaactctttctcaagaaaccaaagctacctttctccttatcatatgtcaaggaattc

SEQ ID NO: 17724 - DNA, 488 bp, Setaria italica
  Peptide Sequence Number=SeqID_83698
aaggtccatcgcctcttcattgtgttgttccctgacgccaaagccggacccagccactagcttcatctcaactggacctcctattgctcagcctccacgtattgttccaagtactctctgatcatcagcctttcctcatccgtaagatcagggtttgggcccgtcaaacgctcccttagttccttctcttcatcactcgtaccgtcccttgagacctggacaaagttgttcacatggccgtcggcattcggtttggttatattctcatgctcattgcacagccagttgccatccactatgtatttgtattcataccgtcgggcaactctttctcaagaaaccaagctcctttctccttatcatatgtcaaaggaattctctgaccccagccaatgtcgagcccagaaatttcaacagaagacgaagtatcatcttcccatttcaaagtgattgtatttttggataatcccgtcagctaaataataaga

SEQ ID NO: 17725 - DNA, 727 bp, Setaria italica
  Peptide Sequence Number=SeqID_83699
ttaaaaaataaaaacaaaaataaaaaataaaagtaaacaaaaaaggaaaattaactaactaagaaccccaagaccaaatagtacgagcccagaaatttcaacagaagacgaagtatcatcttcccatttcaaagtgattgtatttttggataatcccgtcagaatgtcagcagttgccaacttaatggcttccaactttggaaaggaagctcttttgctctgaagtagctgatgtccttcattaagactgtacccaagaatccagaacatataagcgagctgaaattttacaagtgctcagagagtcagagttacaaatgaaagctatcaaataccactgctcaagactggaaaacatcaaattgtagccaatgatgttcaagtaccattttctaattcagttgcataacttgaaatgagaaactagaatcttcaagttagtggagacatgttgaggttattaaagtgctacaaagctgcacattgcagcacttgtctgtatgtcagtgcacaatagaatgatttctgttttgtctaggcattaattttgcaattttggtgggttgctatttagtactcttccaagccataagcatggtttctaaaagttttttgttcaatatagttaagtgcaacattaagaaaataatgaaacctaccgcagcacaactctagagaaacaaaaggacttggtaaaacacagcaagttgtgtcgggacacaaaaag

SEQ ID NO: 17726 - DNA, 965 bp, Setaria italica
  Peptide Sequence Number=SeqID_83700
gaaacacaatttgtgcaagctgatagcagatggtactgcttatgtatcactattctctgtaattgatggctcaacaggcaaattagcgagtgtatgtgataagatgtgaattaatctttttattggttttattgtacccggctgctacgaaacgctaactatggaatgcatgcagcaaaatgaagaatatctgaaaccaaaattgtttgtcataaatggttgtaacctgctagcattgttgacaacctgacacccatgtacaagtagctttgttgtcagtactcagtagtttccttttcaaatttatgctaattaaatcgtgtcaatcttaagtattagccaggacaagggtcttcctgttttagacattgtttctgagctacaattgctgaaacttaagcctattaagcaacgttaaaatagatatgtccctaatctattaagcagcttgaacaaaggtcttattcctattcagctgtcaaatggaaattcttttaacacccaacatctaataagataagtgaagggaaaacatacctgaccccagccaatgtcgagcccagaaatttcaacagaagacgaagtatcatcttcccatttcaaagtgattgtatttttggataatcccgtcagctaaataataagacagttatcgcttagcagaaaaaaaatctgtggctcgccacaatatgtgggcacattaatctccccatcataacaaccactgagagaacagtacagcattcacttacaatgtcagcagttgccaacttaatggcttccaactttggaaaggaagctcttttgctctgaagtagctgatgtccttcattaagactgtacccaagaatccagaacatataagcgagtgccacagcaggagctcttccaagtccagcagtgcaatgaatatatgttacgccaccattacagttgacaagcttgtgcgattgaaggacttccta

SEQ ID NO: 17727 - DNA, 1102 bp, Setaria italica
  Peptide Sequence Number=SeqID_83701
tcagaaaaaaatctgtggctcgccacaatatgtgggcacattaatctccccatcataacaaccactgagagaacagtacagcattcacttacaatgtcagcagttgccaacttaatggcttccaactttggaaaggaagctcttttgctactacccaaaaaaaaatttaaaggctgataaattaacagaacatgcaaaataaccatgtggtaacagaaccaagcctatcaacataaatttactgtagagaacagatgagcaggaccaacaaaattcacacaaatagtcaatcatggaggttggttttccagtgcacatataataggcatatttatcttttttttcctaccaaaattttgaacatccgatccgacaaatgtaagtagttaaaagttgtatcaactagttatgaattacctgaagtagctgatgtccttcattaagactgtacccaagaatccagaacatataagcgagtgccacagcaggagctcttccaagtccagcagtgcaatgaatatatgttacgccaccattacagttgacaagcttgtgcaatttgctaaccacagcaggaagcctcaatcgcaaatcaaaagcatcaaaatccctaatttcagcacggcagtgctcaatatctttgaattgtagacaataatcttgaatggcacggatgttgactccaaaatatctgaacaagttggttggtaaaggaaagaagatatattcccggaacggaagcattatatggcagtggaacaacaaaaactatttcattaaaataacaaacggacttttggaagatgtcttgtgctgcatacaaaattagactactgggacagaagctcattttcatagagaatggcaactaagcataaaaaggaagtacccctagtagtttctcagttctaatcagaggtggcatccaataattcatagcaaattacaaagactgagagactgttttcttgtctttgttgctgaaatggagggattaactttacagccactgaattggggattttttttccattcttatgttgtgtcaattacctgtatcactgacatgtgggaccatctgactcgtagaaagtggaccacg

SEQ ID NO: 17728 - DNA, 625 bp, Setaria italica
  Peptide Sequence Number=SeqID_83702
gtttttttttttttttttttttaacaaagaacaaaagctacattcaatttattcaggaccatacgctacttattttatgctggtgactttacaaatacttattttctatgcggtcgcaacggtgtcaacaacacagattgctccttctatgcacaatgagcccatttccacggttaagctactattgacagcggacaacaacaattttttcccccgggaaggtccatcgcctcttcattgtgttgttccctgacgccaaagccggacccagccactagcttctgcagtttatgtcaatacttagtacactgctatctaactccaatgaacttgttcacacacaagcacatagaaatgcgaaccatctcaactggacctcctattgctcagcctccacgtattgttccaagtactctctgatcatcagcctttcctcatccgtaagatcagggtttgggcccgtcaaacgctcccttagttccttctcttcatcactcgtaccgtcccttgagacctggacaaagttgttcacatggccgtcggcattcggtttggttatattctcatgctcattgcacagccagttgccatccactatgtatttgtattcataccgtccttccgg

SEQ ID NO: 17729 - DNA, 1013 bp, Setaria italica
  Peptide Sequence Number=SeqID_83703
ttttttttttttaaactaaagtaacaaaagctacattcaatttattcaggaccatacgctacttattttatgctggtgactttacaaatacttattttctatgcggtcgcaacggtgtcaacaacacagattgctccttctatgcacaatgagcccatttccacggttaagctactattgacagcggacaacaacaattttttcccccgggaaggtccatcgcctcttcattgtgttgttccctgacgccaaagccggacccagccactagcttcatctcaactggacctcctattgctcagcctccacgtattgttccaagtactctctgatcatcagcctttcctcatccgtaagatcagggtttgggcccgtcaaacgctcccttagttccttctcttcatcactcgtaccgtcccttgagacctggacaaagttgttcacatggccgtcggcattcggtttggttatattctcatgctcattgcacagccagttgccatccactatgtatttgtattcataccgtccttcgggcaactctttctcaagaaaccaagctcctttctccttatcatatgtcaaaggaattctctgaccccagccaatgtcgagcccagaaatttcaacagaagacgaagtatcatcttcccatttcaaagtgattgtatttttggataatcccgtcagaatgtcagcagttgccaacttaatggcttccaactttggaaaggaagctcttttgctctgaagtagctgatgtccttcattaagactgtacccaagaatccagaacatataagcgagtgccacagcaggagctcttccaagtccagcagtgcaatgaatatatgttacgccaccattacagttgacaagcttgtgcaatttgctaaccacagcaggaagcctcaatcgcaaatcaaaagcatcaaaatccctgtatcactgacatgtgggaccatctgactcgtagaaagtggaccacgatggcaaatctattgagtcctact

SEQ ID NO: 17730 - DNA, 611 bp, Setaria italica
  misc_feature (2)..(2): n is a, c, g, or t
  misc_feature (17)..(17): n is a, c, g, or t
  misc_feature (29)..(29): n is a, c, g, or t
  Peptide Sequence Number=SeqID_83704
tnttttgtttttttttntttttttttttntttctttttagtttttttttttgtttttttttttttttaacttaaaagaacaaaagctacattcaatttattcaggaccatacgctacttattttatgctggtgactttacaaatacttattttctatgcggtcgcaacggtgtcaacaacacagattgctccttctatgcacaatgagcccatttccacggttaagctactattgacagcggacaacaacaattttttcccccgggaaggtccatcgcctcttcattgtgttgttccctgacgccaaagccggacccagccactagcttcatctcaactggacctcctattgctcagcctccacgtattgttccaagtactctctgatcatcagcctttcctcatccgtaagatcagggtttgggcccgtcaaacgctcccttagttccttctcttcatcactcgtaccgtcccttgagacctggacaaagttgttcacatggccgtcggcattcggtttggttatattctcatgctcattgcactagtcctagttttgttccttattttccttttactttttattttgttaatttgtattacaggacaaa

SEQ ID NO: 17731 - DNA, 496 bp, Setaria italica
  Peptide Sequence Number=SeqID_83705
ctgcagatgagcccagatgaaaatgatgaggagttctggagcaggctcaaaagcatcccctcggactgccgcgcctctgctgacaaacctgaagaagatgaaattgttgcaactcaagataccaacccttgccaggcgcctctagtaattgaagccactacacctgaagaagtgtctgtcccagagcatgaagaaaccaggacgaatccgaaacccattgcgactgtcgcgaggcaagattcatcagaggacgccgccgaaaacgccgagacttcgacgaccagcgaccgtgcctcatctgaagaggagaaccacaacggcgacggcgacaacgcggccgtgccgagggagaagatccttcagaggatcagctcgaagaaggagaccaagtcgtaccagctcgggaagcaggtgtccttcaagtggaccacgggcgccgggccccgcatcgtgtgcgtccgggactacccgtcggagctccagctccgcgcgctgg

SEQ ID NO: 17732 - DNA, 333 bp, Setaria italica
  Peptide Sequence Number=SeqID_83706
cctgttaaaccaaatcctagctttggggatttttgggcattgtactataaatttgaacttcagcatgggaatgcagagacacaaaaggatgttctgaaaagatgtgttgcagcagaaccaaaacatggtgaaaaatggcaagcgataagcaaggctgttgagaactcacatcagccagttgaggctcttctgaagaaagctgtcgtagctcttgatgcagatgaaactctcaatgctggaggcgcctagactccgagataatatatatattttgtgaggtatttggtgaacgtgttccatgcagttttcagaaatttctgttcgcctctttat

SEQ ID NO: 17733 - DNA, 3045 bp, Setaria italica
  misc_feature (2923)..(2923): n is a, c, g, or t
  Peptide Sequence Number=SeqID_83707
aaccagaagttcgacgagttcgagggcaacgacgccgggctcttctccaacgccgactacgacgacgacgaccgcgaggcggacgcggtgtgggagagcatcgaccagaggatggactcgcgccgcaaggaccgccgcgaggcgcggttgaagcaggagattgagaagtaccgcgcgtcgaaccctaagatcaccgagcagtttgctgatctgaagaggaagctggccgatctgtccgcgcaggagtgggagagcataccggagattggggactattcgctgcgcaacaagaagaagcggttcgagagttttgtaccagtgccggacacccttcttgagaaggcccggcaggagcaggaacatgtcacggcgcttgatcccaaaagccgtgctgctggtggcacagagacgccatgggcgcagactcctgttaccgatcttacagctgtgggcgagggtcgtggcactgtgctttcgctgaagttggataggctgtcagattcagtttctgggctcactgttgttgatccgaaggggtacttgacagacctgaaaagcatgaagattactagtgatgctgagatttctgacattaagaaggcacgactcctgctgaagtcagtgactcagacaaacccaaagcacccacccggttggattgctgctgctaggcttgaagagattgcaggcaagcttcaggctgctcggcagctcatccagcgcggctgtgaggagtgtcccaagaacgaagatgtttggcttgaggcgtgccgtttggctagcccagatgaggcaaaggctgtcattgccaggggtgttatgtcaattccaaattctgtgaagctgtggatgcaggcagcaaaattagagaccagtgatctgaataagagcagggtgttgaggaaaggattggagcacattcctgattctgtgcggctgtggaaggctgtagttgagcttgcgaatgaggaggatgcaaggctgttgcttcacagggctgtggagtgttgcccactgcatgttgagctgtggcttgcccttgcgaggctggagacctatgaccaagcaaggaaggtacttaataaggcaagggagaagctgcccaaggagcctgccatttggattacagctgcgaagctggaggaggctaacgggaacacgcaatcagttagcaaggtgattgagagaggtatcagatctctacaaagagaaggaatggatatcgatagggaggcgtggctaaaggaagcagaagctgcggagcgtgctggatctgtgttgacttgccaggctattgtgaagaacactattggcattggtgttgatgacgaggatcggaaacgtacgtgggttgctgatgctgaggaatgcaagaagcgtggttcaattgaaacagcacgtgccatctatgctcatgcgcttactgtgttccttactaagaagagtatttggctgaaagcagctcagcttgagaagagccatgggactagggattcacttgatgcgctcctcaagaaggctgttaactacaatccacgtgctgaagtgctatggctaatggctgcaaaggagaaatggttggctggggatgtgcctgctgcccgagccattcttcaagaagcttacgctgctatccctaattcagaagagatctggttggctgctttcaagcttgagtttgagaacaacgaaccagagagagcaacaatgcttttggctaaggccagggaaagaggaggcaccgagagggtttggatgaaatctgccattgttgaaagggagctagggaatgtgggtgaggaaaggaggttgttagaggaaggtctgaagctattcccctcattcttcaagttgtggttaatgctcggacagatggaagaccgccttggtcatggagcaaaggccaaggaggtttatgagaatggcctgaagaactgcccgagttgcatccctctttggctctcgctggccagcttagaggagaagatcagtggcttgagcaaatcgcgtgctattctcacaatggcaagaaagaagaacccagctcaacctgaactctggcttgcagcaattcgagctgaactgaggcatgcgaacaaaaaggaagctgatgctctgctggctaaggcattacaagagtgtccaacaagtggtattctgtgggctgccgctattgagatggcgccacgcccccaacgtaaagggaagagtacagatgctatcaagcgttgtgatcatgatccacatgtcattgcaactgtgtccaaactcttctggcttgacaggaaggttgacaaagctaggatttggtttaacagggctgttactcttgctcctgatattggggatttttgggcattgtactataaatttgaacttcagcatgggaatgcagagacacaaaaggatgttctgaaaagatgtgttgcagcagaaccaaaacatggtgaaaaatggcaagcgataagcaaggctgttgagaactcacatcagccagttgaggctcttctgaagaaagctgtcgtagctcttgatgcagatgaaactctcaatgctggaggcgcctagactccgagataatatatatattttcggaatagctgtgtaagagagagaagaaagagctaggcagtgagctgggtttggactcaattgatcagcttctgttggtagtgtcagccacgacctgaatgtgcaacacgttcgagagtggatgcttaggtgtggaagcatacgaccaatttggttgttagaagatgttatgtctccattgctatgctctccaacttgagcgttgcaactgtgtgcatgtatcgacaggctatgtgttcgcagatatatactaggaatcattggaacttagcgtatatgtttgactttattttcacacgtactgtgcagtttcttttgttaccgatattcngttttgatgctgaaaatagacatgggtggcccttatctgaccttaagttcttttgagaacaaagaaaatttgatgaaatgcctctaaggatgattagtcttgattgttaattgttttgttcc

SEQ ID NO: 17734 - DNA, 1163 bp, Setaria italica
  Peptide Sequence Number=SeqID_83708
tgaaaagatgatgcttcgaccaatccaacgactaactatgttcccatgaggatcgatatcccaaataattgaaaaggccagcctgtctacacctggattaagcgaaaccagttcttctgaaagtcttgaaggcaacattgatactttgcgtcttaaggtgtaaacactagtagatcgactttgagcttcagcatctaacgcagtctctggatggacaaagtaagaaacatctgcaatgtgaaccccaatacggacagttcctcctgatagtatctcaattgatatagcatcatcaagatccgatgcagtaggagggtctattgtaaaagtcaagaccttcctcaaatcttttcttgcttcaagttctttctgaggaatctgccaacaattgtcaggaaggcatgccaacgactcaggggaaaactcagcatcagatatagcattctcaaataatatagcatccatgtgtgttttaacatgtccacccttccccaagaaccgtacaacatgtgcatagggatagagactttcctcatcccattcatccagtcgtgcagcaaccagttccttctctatagctgcatcaccttctcttaggttctgccggacactatccggcaaagtgctaactttaacaaccatctgggggaatttggggtcagtaggcaagagatgaatcaagcctgtaacaaccgattgtgctctgttgttcatcatccttacacccatctgatttttctgctgctctccaccagggaactctggaaaagaagcaaggaaacctacaatggcgtcacggcgtggggacttcttcatgactgataatactttcccggtaggacgtctacctgggtgagtttgtatcatggcgcagatcctttgtaatgctcttgcatcctcactctttccaccattcaagtctctctcgttactttcaaggacagtagcattcccattttcacacttaacagcttgactaaaaccactgttcttgtgatggagatgcatcctgtccaaaccaggtacgccattactgcaattttcaaacctgcagccggcatctgcttgtcctttcttccgactatgatacccatttgtttcaccaatctcacggacccagaatctcctcctatcgcagggttgcatgcaacgttcggtccttt

SEQ ID NO: 17735 - DNA, 1059 bp, Setaria italica
  Peptide Sequence Number=SeqID_83709
gtttcgggtgtgctcagaatgctggtggagcaggtacaatatatgatagttcattacagactctgaaggtgagcaatggaaatttcacaacacacaccgaaactccattgcttggttttccaatgactagactctggtccaatgtgcttgtggagtgcaatgcacgagtgctggttcccttgttgtggtctagagtgcaggtgacaggtcaaattaggctacttactaagggcagtatctgctttgggttatcagaaaatccaatatccgaatttgagctggtcgctgaagagcttttaatgagtgactctgttataaaggtgtacggagctttcagaatgtatgtcaaagtgctcttgatgtgggattcaaagattcagattgatggcgggactaaggatgttgttcttgcatctatgcttgaggcaagaaaccttgtagtcctcaggcatggttccgtgatatcttccaatgctgatttgatggtctatgggcaaggacttcttaacttgagcggccctggcgatggaatcaaagctaggcgactgtttctctctctattttacaacattgaagttggtcctggttcccttgttcaggctccacacgatgagactgttcaaagtagcttggatgcactttcacgctgtgaaagtaaaacatgtcctagtgagcttattaccccacctgacgattgccatgttaatcgctccttgtcgtttacactgcaaatttgtcgggttgaagacataactgtcagtggcattgttaggggaagtataatccatattcatcgggcaaggactgtgaccattgcgaaggatggcaccattagtgcctcagagttaggttgcaaggaaggcattggaaaaggaacatttctaaaatatggagctggaggtggcgctgggcatggaggccgaggtggcacgggtatttacaatggaatgaaaagtgatggaggtctagcatatggtaatgctgatcttccatgtgagcttggaagtggtagtggtggttctgctgtgtcagcggatagcactgcgggtggggtgggta

SEQ ID NO: 17736 - DNA, 693 bp, Setaria italica
  Peptide Sequence Number=SeqID_83710
ccaggcacccagaaacctggcttgacttcccgctgctgcctgacgatgatgagtctgatggaccattctcatattttgacatgtctgatgctcaacaagagcatgccttggctattgagcatcttgctcccagattggcagctttacggattgaactatgcccaatccatatgagtgaagaatgtttttggaaaatttactttgttcttctacatcctagactaaacaagcatgatgctgaacttctttctacaccacagattgtggaagctagagcaatgcttatgcaacgtttgcaataccagtcgaagcttgaaactgagcagctaggtcatcatagggatgatcttggagttcagttacgagaggatgccttgaaagatggtacagaggcattcccattcgtgcggcaggaaactgcttctgtcatgcccataacagaaattgagattgagaagcaccctatccatgtaactgaagttgcagtagtggacaaatcagtcatcaaagaggagctgcccaaggatcatacggagacctcaaatgttctgcaagaggcctttgatgacgacatagatgactggttcgacgaagaggccgaccttgctgggcacccaactatccacataggtgacgaggaagatgtgtcttttagtgacttggaagaggatgatttgaaatgatttattcgcg

SEQ ID NO: 17737 - DNA, 499 bp, Setaria italica
  Peptide Sequence Number=SeqID_83711
aaacggaaagaaacctaggaaaaataagttaactaagaacatagtaggcaagaggcctttgatgacgacatagatgactggttcgacgaagaggccgaccttgctgggcacccaactatccacataggtgacgaggaagatgtgtcttttagtgacttggaagaggatgatttgaaatgatttattcgcgaacctttgacctgtgtagtggacccgtcaaacgaacctgtattggaaactgggcctctctggtgtacaagaaaatagagaggtgaaagttgtccgtggaaagagtacggtgtacaatgaaacccgagcggctttgttttgcttccatgctgccgggaaacgcactgtgatcttaccgctcgtaacgtggcggttcaatagcattacggtttgtaattttattcatactcttgtgtacataagcattcgtgatgttacaagttcagaacaataaagtttcattcgttggttggttggtacaaaaaaaaaa

SEQ ID NO: 17738 - DNA, 511 bp, Setaria italica
  Peptide Sequence Number=SeqID_83712
gactcgtaggatcactgaactttgagttatcttctgcaccaggcatatccatgccattaacagaagaataagtggatgaaagtgatagaacaattgcttggaactcttcaggaacatcaacagcaacccacgtctcttggtcaagaactgccttgatttttgtcatccgaacgctatgctgataatcaacaaactgcttcgactgttgctgtaggattccacgaatgttgtaacccaacctgcctccaaccttttcagtagcagctataaattcttctgttatattgtagatgatcaagaattcctgaagccttaacctgggatgtagagcagcacggacacctaggagcttagcccatcgcccatgggcagcatcacatgcagcgaaaactgcttcagtgttttctcttaatacatcagcccggacattctttattgaatttatgatggacaaatcatttgcttttgcttggacaaatgggattttggaagtactccgtgtaagagtatt

SEQ ID NO: 17739 - DNA, 560 bp, Setaria italica
  misc_feature (557)..(557): n is a, c, g, or t
  Peptide Sequence Number=SeqID_83713
gaaaatcagcaattatgtcatctgggagctcttccttcactatcctgcacagtcaatcactaccaacttttgtcccaaagttctcagccaagaattcatcaagaagaccataatttggagagtttctgcactgaagttctcagctggtaacttccggatacatgtaagaatatgctgaacatctcggcataatctgttcttcgcctgaggagtgctgacctccaattttctaaacgcttctgtaatgtgagaatggaatatttgaactacttgcctgaatattgtttgcacatcgacttcaagcaatgtttgagaaaggatgcgatgcaaatagtttacttcctttgtaacagctttagcaaattgactaggctgcaaatcattatcctctgggccattccagccttcaacaatttggggtagttttctaagatttgcaagcaatctctccctcattatctggacaagcttgctgtgaatttcatccgatgaaccttgtagtcctagaagtaagaaactaaaactaaaaataaaaaccaaaaattaaaacggaaaanaaa

SEQ ID NO: 17740 - DNA, 477 bp, Setaria italica
  Peptide Sequence Number=SeqID_83714
catgggctgccatctcgaggcctattcaatacaatggacctaactgcatgaagctaggccgtggtgccaaaactctcaggtttcctctataccagcatctaacagatatcagcttacccaaacgcgaatctaactactttgggaaaaaaaaacaaatatggcctgacatggtaaagctatggacccaaaaatttaatctttgggaaggtcgagaaaatcagcaattatgtcatctgggagctcttccttcactatcctgcacagcaatacctgcatggttgttgatgcctgtatgttagatactacacccagatggcagaatttctcaagtaaataacacgttcagcatcaatttgctacattccatgataatcaatagctcattgccctatattagtagttatatgttttccaaaaaaacaacataggtaattcttagcgagacacttctggcttggacacttatctacataacat

SEQ ID NO: 17741 - DNA, 1714 bp, Setaria italica
  misc_feature (7)..(7): n is a, c, g, or t
  Peptide Sequence Number=SeqID_83715
tttattntaatttattgtattggtactaaattctattttgtctttttgtctttggtactaaattgggtattaacccggtctaatgcccggacattctttattgaatttatgatggacaaatcatttgcttttgcttggacaaatgggattttggaagtactccgtgtgagagtattagagacccgtgaagaaacactgtagtcattctcttgggaaatatcagaaacaactgaaccaccatgttgtactgtaggattgctagcatcaatacttaaggttccatcaaggtttcccatgatccactcaacaattcttttcacctcagctgcttgctgtaaatgtacctgtactatcctgaaaatggcagacaaaagttgaacaaacccttcagatgatagacttcgcaacttatttgctaaggactggcctccagcgtcagcatcagcagccctgtctccagttactgaatcagaatctattggtctggcagttaaaactggaagcaactctgcaactgtggctttgattgaagctttcatcacagtaataagtgtatctcggtagattctgagaactgcaggaagtttgtccgttctcagcaggcaaataatgaggggaggagtcgatctctgagaataaactttcctcctcatctatgttaccctcatgttctgtcccattcaatggctggaagcctttctttttacatttgatgaaatcatagcatctacagcttttccatcaggaacagcagcgtgcacgaattctgctgaaagaatgctgttcactgaatctagtgatgttcccagctgatcccgaatatggcgaaagcagtaaagcccagcaagttcatcagtatctagtaaattttgcaagtcatcgatgacatcaagggcaccagcacaatctgctgctgcaacaagcaacttgagtgcagcaagtgcctggctgacgtagaggatgacagtaagcttctgctgcagtgccacaaggttgccccgcgtggcattgagctcctgcacctgccttgctgacccgacgaggtcccccgtgagcacccgcaccacttccctgagctcgcggatcctccctactgcagtaacaatctccccgtcgagcccccgcaaccggccctgcgcctcgtagaaggactcggaccggagcgcgatctcccgcacgaggtgcgcctcgacgacatcgaggtgctggccgaggcgctcctgcagcccgtcgtcgtcgagcgggcaggcggcctggaacgtgggtccgtcctcgagcgcgaagtcctccttgaagaagagcgcgggcacctcgcggaggcaggcggcaaggccggaggaggcagcaggggcaccctcagcgtccgaggaggcggcgagctcggcggtggcgtggaggcgaatgtcagcgaagcgagcataggggtcggagacggcggcgaggtagggcgcgaagtcggcgcgggtgacctcgcaggggtgcgacggtggcgtgggagccgcctcggggagagcgatggttgggggcggccagggtagccaggagtaggatgaggcggcggcggagggaagcgggttgttgaggagcgcggtgatggactgcgggacgccgccgggaggcccggcgaaggtgggggagtcggtggaggaggagacggaggcgacggaggtggtgcggaggggcgggcgcgacgccatcgcggcggcggcggtgg

SEQ ID NO: 17742 - DNA, 813 bp, Setaria italica
  Peptide Sequence Number=SeqID_83716
gtgaatttcatcccgatgaaccttgtagtcctgagtgactctatccaattcggacattaacagctgtttgcgtgcctcaggtattttcaggaaaagtactcgcctgatatctggaattagagaatgtataaaactaattatttgacttgccaaagctaaatgcttagacgtaattgatttaaggccagacacctgcatggcgcctgcaccgaggacaagttggcaagtcctgttgttgaaaagctttaatatttccacaacacgttggaccacctcaaaagataatgatggcaaacatttactgatgtcaacatattctgataacatcttcagcaatatcaagccacagtttaccatatgatagccaacacctccatgtacaatagtttgcaaggttgacctctgattcccagtggcattattttcagtctgaggagaagtggactcaaccttgctttcacctatcgcagatgttaatttgccattatcagcattattttcacctgaatatgttggttcttgactcgtaggatcactgaactttgagttatcttctgcaccaggcatatccatgccattaacagaagaataagtggatgaaagtgatagaacaattgcttggaactcttcaggaacatcaacagcaacccacgtctcttggtcaagaactgccttgatttttgtcatccgaacgctatgctgataatcaacaaactgcttcgactgttgctgtaggattccacgaattgttaacccacaatacaaacaagacaaacccaacgttacttactttaggttactaaagtaaactta

SEQ ID NO: 17743 - DNA, 1233 bp, Setaria italica
  Peptide Sequence Number=SeqID_83717
tataaagcgcagatttcctgcatatagcaatgaaacttgacgcattgcctagactaacttatagcaactgaagattttttgcaccaagaataataattacaaaccttgcagggataaaatacatgggctgccatctcgaggcctattcaatacaatggacctaactgcatgaagctaggccgtggtgccaaaactctcaggtttcctctataccagcatctaacagatatcagcttcccaaacgggaatcaaaatactattggaaaaaaaaacaaatatggcctgacatggtaaagctatggacccaaaaatttaatctttgggaaggtcgagaaaatcagcaattatgtcatctgggagctcttccttcactatcctgcacagcaatacctgcacggaatttaggccaaacatggcaatgtcttggagcacttcccatttaacatattttccaacattgaacatttgtgaagacataagtcagttcctaatgtacagtcaatcactcaccaacttttgtcccaaagttctcagccaagaattcatcaagaagaccataatttggagtagtttctgcactgaagttctcagctggtaacttccggatacatgtaagaatatgctgaacatctcggcataatctgttcttcgcctgaggagtgctgacctccaattttctaaacgcttctgtaatgtgagaatggaatatttgaactacttgcctgaatattgtttgcacatcgacttcaagcaatgtttgagaaaggatgcgatgcaaatagtttacttcctttgtaacagctttagcaaattgactaggctgcaaatcattatcctctgggccattccagccttcaacaatttggggtagttttctaagatttgcaagcaatctctccctcattatctggacaagcttgctgtgaatttcatcccgatgaaccttgtagtcctgagtgactctatccaattcggacattaacagctgtttgcgtgcctcaggtattttcaggaaaagtactcgcctgatatctggaattagagaatgtataaaactaattatttgacttgccaaagctaaatgcttagacgtaattgatttaaggccagacacctgcatggcgcctgcaccgaggacaagttggcaagtcctgttgttgaaaagctttaatatttccacaacacgttggaccacctcaaaagctaccaaaaaattaaaacggaaaaacaaaa

SEQ ID NO: 17744 - DNA, 1081 bp, Setaria italica
  Peptide Sequence Number=SeqID_83718
catgtgagatcggcaggtgcttgatcgacatgaacagaaagatggagtgcacggatggtatcttcttgatcagccgagggaacactggcgggatgccctggacgagctctgtgtacaggagtcccacccctgggatccgctgcacatcgttcttctcgagcagagtcgtcatttggtttgtgggcacaatgtggtcaagctcataccagtatctcttgacatggacgtagtgccatgtcgccatcagagtcatcagaaccagcgcaaagcagaacgggaggtacccaccctggatgaacttggacagtatggaggagaggtagatcagttctgtgcaagtgaacacaacgtagaacagaagaacgaagatgatgtgcttcttccatatgaggagcatcacgaccgtcaccagatgggtggtgatggagaatgtggtcacgacacagatcccataagcattgccgatgctggtggtagttctgaaggcaattgtgactatgatgctcgccagtcccatcatgaagttcacctcaggaatgtacacctgcccctcgtacttcttagaggtgtggatcacttggaccctgggaagacaaccgagtgacagtgccttggaaaggatagcaaatgcaccagagagcatagcttggcttgcaataatagcagcaagaattgcgacgacgaaggttggccagaacaaaggtcctgggatggatctatagaaggtgtccccgacgttctctggaaatttcctcaggtatgcggcctgcccgatgtaacatagcgtcactgacgggaacaagataccgctgaagctgatctgaacagccctgatgttgaagtgtcctaggtcggcaaacataccttcagtgcctgtgacacacaagataacgccaccaagtgaaacccatccatccttcccattccttttgaagtattgtacaatgtaccatggattgaaggcccgcaaaacaccgatgtcgtggacaacgaggttgtacagtccgatgccagctatcagaaggaaccacaccgagatgacaggagcgaaggtgtacccgactttgtcagtaccgaaacg

SEQ ID NO: 17745 - DNA, 649 bp, Setaria italica
  Peptide Sequence Number=SeqID_83719
actactgacaacctttcgtgtgctagtgactagtgaaattgccttactgagttcttcagtaatttattacactgcatattgtacctacttatattttactgtctataggataatgtcactcacgacgacaagtgataaagctataaaaggaatatcagcatacaagagtacaaaaaaatatatatcatggatataatttgatattttgaattataaggtttgttttaagcacagacatcctatactaagttgatattacaaatgaacagaatactgtgaaaccagaagcagccaaaagcagcatatgtacggaagttaaatgtacctggtaacactattacagactcctcttttgccaacctgcagcagaagtccaaatcatccaggatgccatccaagtaacaaagatccagctttaccatgacaaacattgatccctctggcttatgagggcatgtaatgcccctaatctcctttattttaccatagcataaatctgctgagtttcgcaaaagattaagtattttgttgaagtaatcttccttggtgttggctattattttagggactgcaccctggataaatgttgcaggatcatttgtaatattaatatagctttcaatagatttactactcacacttgagttcg

SEQ ID NO: 17746 - DNA, 2164 bp, Setaria italica
  Peptide Sequence Number=SeqID_83720
agttttttttttttttgttattggcaaggcaaataatcttcttcattttattttaccataagataatcatttattaacaaccttctggtgatgcaacgcgtagttgcttgataaaagtcattcagcactaccacgtacggagtaataactcaaccatcactatgcttatgcttccagtttattagcatgcctctggcagaaagacttgatcctttcaagggcattctcgagagtaggtatgtcacaagcaaaagtgatacgaatccaatccttcattcctaatgcactgcctgcaaaaatactcatgtacctcaacactggcttttggtaagagggtaccagaacagttaggaattccgaacagttataaagatcgttgctggtactgccttttccaaattatagttgttcccagacaaaatttccagataatggaataaaacatgtatcccaacctgaacatattctcagccaactagaaaagtaaagatggactccaatgttaatcgtaactactgacaacctttcgtgtgctagtgactagtgaaattgccttactgagttcttcagtaatttattacactgcatattgtacctacttatattttactgtctataggataatgtcactcacgacgacaagtgataaagctataaaaggaatatcagcatacaagagtaaaatgtatggcaaagcaaataatcttcttcattttatttaccataagataatcatttattaacaaccttctggtgatgcaacgcgtagttgcttgataaaagtcattcagcactaccacgtacggagtaataactcaaccatcactatgcttatgcttccagtttattagcatgcctctggcagaaagacttgatcctttcaagggcattctcgagagtaggtatgtcacaagcaaaagtgatacgaatccaatccttcattcctaatgcactgcctggtaacactattacagactcctcttttgccaacctgcagcagaagtccaaatcatccaggatgccatccaagtaacaaagatccagctttaccatgacaaacattgatccctctggcttatgagggcatgtaatgcccctaatctcctttattttaccatagcataaatctgctgagtttcgcaaaagattaagtattttgttgaagtaatcttccttggtgttggctattattttagggactgcaccctggataaatgttgcaggatcatttgtaatattaatatagctttcaatcgatatgttaaccttggcttcctttaagatgccgttcgggtcgcacgttgcgatccaaccaagacgccaaccaggcacaagccatcttttagataaagatcccaaggtgatcacaggaactatatccgcaaagacacccattggtataaaaggcttattcccaaaagccaaatgataatacacctcgtcagcaatgattattattccaagtttccttgcagtctctgcaattttggccaaatgatcatgtgagtacacactcccacaagggttaccgggatttataatgaccattgcaaccgtgttctcatcagcaagagcctccacggactctaagtcagcctcccagcctcggtcaggaataaggttgaaatgccgggtctctagatttctgaacatggttcgtgactcatacaacgggaacccaggtttgggaagcaagatgttggagccaggctgcgcgaggatggagatcatgacatcaatagcttgccagcatccagcagtgaggtaaatatcatccggtgaaagctggtaaggaagatcctgagataggtactccgcaatagcacggcgcgcggggaggacgccgacggtcggagagtacccgttgtgcttcccggatcggagcgcgtccactatagcatcttcagcctcgggcggaggcctgaaggaggcgcaggcggtcgggtcaccgctgccgagcgtcagcacgggccgcgggcccgaggcgtctaccgaggagaagacgcgggcgagcaccacgcggatgctcatgctcccggcgtccaaccacggcgcaccccgcccgggcggccgggagatacgccatgtcgtcgcgctggcgccgccgttcccctccatcgcttggatctctcccacagtcccactggtgactgctcaagctcgg

SEQ ID NO: 17747 - DNA, 260 bp, Setaria italica
  Peptide Sequence Number=SeqID_83721
agtattctcgtgaaattcaggttctacctgtgatatgcttcataatttttataatatattttgataaaagatttgcaatcatacattaccagtaaattcatcatgtcattatatgtgttggaataaatgtgttttcctagaacttccaaaaaaggggcaagtcccacaaccaagtcgcaagctgtccaaagctatctacagctcaaacagcaccctcgaaagtatcagactgttaagtgccaaccattggttggaacccc

SEQ ID NO: 17748 - DNA, 237 bp, Setaria italica
  Peptide Sequence Number=SeqID_83722
cagcagcaaactcgtgtgatcgagcaatatttagtgagttcgttcaaaaagcaatatttagtgagatgggtctgagggcgttgaggctgctggccatggccatggccgtggtggcgctggcctcgccggcaccggtgtccgggcaggtggtcgccgggccgctgcagtgcacggcgtcgctgatctccagcttcaccccgtgcctcaacttcatcatcaacagcaccgcgtccccga

SEQ ID NO: 17749 - DNA, 497 bp, Setaria italica
  Peptide Sequence Number=SeqID_83723
agtgtagtacttggtactttagctggttcaggatgtgactagagttcacttttcccatggcggtcacggtcaggagtggaaggacgtctggatatttcggacagccacgcggcggcggatgctacctgcccggcgttggatcacgatctgacgcctggctgccgaagcgccatcgctggcaaaacagggacagtgggtgggatcgggccccacctctggcttatcggtggcggtccattgctgacgttataggcggcccacatgacgcagttgctaccgatccgtgtcgctcgtccgacggctcagggctcacggctctctagtgctgaagccaatcgaagctcaacgacacgtgtgcggtgtctgcgtgtcacggatccagctccgttgctgacttgctggcgctggtccagtggtccgaccgtgctcaaaagattctcgtgaaggtgaagtcctacatagcgagttttcaagctaggtcaagcgattcctgtgta

SEQ ID NO: 17750 - DNA, 529 bp, Setaria italica
  Peptide Sequence Number=SeqID_83724
ccgctgccccgaaactgcttgatctccgccgcaaacccgcctcccgcactagcactacctggccgacccgccggcccaccggcgatctccatgaaggcgtcgatcaagttccgcgacgacgaccggccgctgatgcgggccaaggtcccgatcggcgtgctcgggctgccgttccagtcggggctcgcgggcggggggcgacccgcgggagctccgcttcgacctctccacggccttcgcgtcgggcccgtcgctccgcctctcgtaccgccccaacgaccccggtctccccttcgcgctcaccgtccgcgcggggctcggcccgctcggctccccggcgcgcgcgcccttcgcgctcgccgccgagttcaacctcctctcccccgacctttccacgccggccttcttcctccggctcaagccccgcttcggcgacttctcgctctcccacacgctccgctcccccgcgccgccgcctccccggcgccccgtaaggtcggggagcggctcccgacggtgacggcctcgg

SEQ ID NO: 17751 - DNA, 419 bp, Setaria italica
  Peptide Sequence Number=SeqID_83725
tcaccttctgcagctgctgaaatttctctttggcttcctcatccccaggattcttatctgggtgaagacgaagagctaatttgtaatatgccttctttatttcttgttgtgaagcggtcttctcaacccctaggatctcgtagagggtcttgctcccggtggcggccggagcggcggcggcggcgcccctctcctcgtcgctgccatcggcgtcggcgtcggcgtcgcgggaaaccctagcccttctgcccttgcggcccattcgacgggaggcggtggtggatcggtggctgcagtggtgactggtgaggaatgggggattggggaaccgggaagaagggcggaggcgattggggattttatacaggggagggcggcgcggcggcgccgaaaattttcactagtgcgactgagtcgga

SEQ ID NO: 17752 - DNA, 1061 bp, Setaria italica
  Peptide Sequence Number=SeqID_83726
cccccccgcccaatggcgatgaacatacaaacctactgtactagcccagaggagaagagaagacacccagatggtattgcaatcagtttggctacatcctgatgctaaaacagatgatgttcggcacagggcaagaagaggatggcagcagcatcacttgcgtttcttggccctcttgccctccagcctctgccgcgcctgctcaaactcctcttcggtgggctccgagctgctcgcgttggggtcgcacttggacatgatggacgagaggatggagtcgaactggtttttccgctccgccctgcgctgcgagatggctaggatcaggtcgttctcctcacttttcctctttttcttcactctcctctccaatggatttgttggtggctccatctcagagatctttttagcccacttctcatatgctttagttgatttcagctcaccttcagcaattgcctcatcaactatatccttgaagcggtgggaatcaagctttggttctgagcaaatcattgagcagaaaagcctgttcatgttgcccttatattttgtataaagatccttcaagtcctttttctcagaatcagatcctctgtatttagcttcaaattcttcaatgtcagcctcagtgaccttcttgtacattgttctgaagtactcttgaagattgtccgcagctgctccaaccagcgcatcatcatcagcaatgccagtctcatcatataatgccctcttctctgcatctccaagaatggaaatcaccttctgcagctgctgaaatttctctttggcttcctcatccccaggattcttatctgggtgaagacgaagagctaatttgtaatatgccttctttatttcttgttgtgaagcggtcttctcaacccctaggatctcgtagagggtcttgctcccggtggcggccggagcggccctggcgaccgccgccgccgtagccgcgccgccctcccctgtataaaatccccaatcgcctccgcccttcttcccggttccccaatcccccattccttcaccagttctacctacttgtctagtct

SEQ ID NO: 17753 - DNA, 337 bp, Setaria italica
  Peptide Sequence Number=SeqID_83727
aaagaaaataaaggaacaaagaaaggtggtggcagagtggtgaatcaagggcctgctacaccggctgatggccttcaggtgaaagaggaggtaggggaatgcttggtgggccgctacattggccggagtgctccggggcatgcgaggattctgattgggaaggttgcatcctacgatagcacaactggggcctacagtgtggtgtttgaagatggacacggcgaggatttggggcttcctcaactcctggaatttctcatgtcctatgagaatggtgcattaggcatgaaagtgagctgcaggaaaaggagctagacttgctggtttcatcgaggga

SEQ ID NO: 17754 - DNA, 1659 bp, Setaria italica
  Peptide Sequence Number=SeqID_83728
ttttttttttttttttttttttatggaaatagttagcctttattttattcattgctattgtgaaataaacatacaccggtttacatgtgtggtccctacaacaccctatcgtatgaagtatagacacaaagaagagaaagaaaaatatggaaattactataggtgtatggacggggtattttgtcagaatgttttgtatctactccaaatttggataaatcccataactttctgataagatatccgccatccaaacagtcccttgggaagttcaaagtgaatcaagaaatggtgtaggtgatgacaagaaccatgacaactgaaaccactgggtatgcttggtatatcatgctctctgcccaggccttgagtggctgactggctgtggcaaggtcactccttgccatcggcagcgcggagggaaccgagctgaacaggggcctgtgtctgcacgaccttggatgaaccatagaccgacagatccatgccctcagccttctccttctcaagctgctccttgatccagaagtatgtgatccttagtccatccttcagcttcatggtcggagcccagccaagcttctccttgatgagtgtgttatctgaattccgccctcgcacaccctccggtccaggaatgtggtggatgggcagctgcttgttctcaaagctgaggactatctcagccatctcattcatgctgaccatttcatcacttccaatgtttacaggctcacggaaatcagactttgttaacctaaggacaccctcgacacattcatcaataaatgtgaaggatctggtttgcagaccatcgccccacatctcaaagcgcccagtggaggttaaagcctttctgcagaaagcagcaggtgccttctcccttccacctttccatgtcccaaagggaccatatatgttgtgaaagcgaccgatccggcactcaatgccaaaatcctttgtgtagtgcttgcacagttcctcagtagcaagtttctccaagccataggcatcttgaggctctgcaggccaggcatctgactccttcaagctaactacagtctccaactgcttaaattcagggtagatacaggcgcttgatgcataaaagaacctcttgacgccattgattctagcagcctcgagcatgttaaagctgatcatagtgttgttatacatgatgacagagtggttggactggatgaaccccatccctcccatatcagcagcaaggttaaacacatggtcaacccccgtggtcaccttgaggcagttgtccatgaccctcaggtcgatgaggtggaactcatggcagaacatttcctcggtcatgtgctcgttcttcttccagtcagaggcgatgatgtagtggccctcgctcatgaggcgcctagcgatgtgggaggcgatgaacccgccagcgcccgtgatggagatccgcagcttctcaaacggccagtatggctccttctccagctccgcgtacgtgtactccttgttgagcgccatcctggcaaacgagggtggtagccgcgccggagcgagattcgagagcggaggaaggatataggagcagctcgccggatctccctcccacctccggccgctcttaaataccaatggcgagacgacttcgtcccgtggaggtggagggagcgt

SEQ ID NO: 17755 - DNA, 334 bp, Setaria italica
  misc_feature (327)..(327): n is a, c, g, or t
  Peptide Sequence Number=SeqID_83729
aatgtagatactgtttaactaatgattaatgccctttgtttcttaccttttgggatgtcataccaaactgcttgcaaaatttcctttccagcatgcaaaagaattgttgcctttgcgtgtgaaagagaaacagtaggatgtttttagagttatattgctcacaccccagtcttaatgcaagcaaaaagactgtcagaacagttacagcacaggtgtattgacagtgaaaccataggatgtcactgaggttagtttaagcgagatggacattgctcagtattttttgtattgtttggtttctagaagctttgtcgaaagatttgatanccccgcc

SEQ ID NO: 17756 - DNA, 317 bp, Setaria italica
  Peptide Sequence Number=SeqID_83730
cggagtcgtctgtacatcgccggagccggagcagcgcagcccggcctccgtgtacttgtcgagaacgcaggcgtcgtgtcgacggccgcagtcgagccaggcgtggccgttgctggaggtgctgacgtgtcagcaccgtggatcggacgcgcggtcgaggtggatggacgatccgggcggccgggctggtccgtcgaggtgcggaggatcgcggggtcgcagttgcagatcgagcaggcgcggagcgcgcggacgatggagggccatcacgtccggggggcgagggtgccggcccacgcgcatccagagtgcgtcga

SEQ ID NO: 17757 - DNA, 478 bp, Setaria italica
  Peptide Sequence Number=SeqID_83731
ggtacattttcactcacctggtcagttttttcaccgacaccaagaacttcttgaacattgcgagtcataatctggtgcacctcgtagagctcatcattcagcttggcaaggttcctttgtgttcttgtatccaagtacagtttcttggtcttctgtatgaatgcatcaaatttaataaatgcatatggccttgcagcagtttcaatttggctgccattaaccttctcaaattcatttttgagatcttcgagatactggaatgcaagtttcttgggataagaacggtcacacagagtcaaatagcacacacggccttcaatgatgtagctgttttgttgaatcaaggtacaacaacagtaatgtacatcattagtgatatagtttactactaggtggaatccacacatcaatgtcgaaatggagacagatgataagcatccacacatcaatgtctaaactagtgcgactgagtcggaga

SEQ ID NO: 17758 - DNA, 732 bp, Setaria italica
  Peptide Sequence Number=SeqID_83732
tttttttttagaagacaataactctaatttaggatcctgaagaatggcctctttccaaacaaggagctatggaacaaaaaatgttgcgaatgagaaaaatgataaaaggatactggaaaaggtatggtccagtctcgattgacatcctcgatgcttcgtgctgcccttttgacaagttcttgaacaattgttttgcttgctgcttgtagaaatcagcatccttcagatcccgaccatcatctagtccctccgacagtggaaggccgtcagtgacacgtgctatcatcgtcagcttcaccattttggaaatatagcaagaggcaaactagcataggtaatctaaaagcaccacctgcatggaaacaagagagaaaaattgtgaagcatgacagatcactccgatgtaaattgtcaaacagtaaagcagggaaatccgccgcatgagccaacatgatggtggtcaaacagaccccaggaacaggagcagctagttgtaagtttcagatggtacctctataatctactagcatctcgtgcatcgacaatattaagattgatgtagcgctaagggcacggcaccaaccgcagcagcgatatcataacgatggcgtaaaagggaagtgagcgtatataggataaggcaaagcatatacacctgcataaacacacgggcacgccccaacaataacaacaactcatctgtcatgattggagaggaaagcaggaaaaaga

SEQ ID NO: 17759 - DNA, 443 bp, Setaria italica
  Peptide Sequence Number=SeqID_83733
cttgttctacacccagaagacaatcagtactatcccaatcacaatggcaacaggggcatacttccgaattaaggcctggcgattgagatctttcgccttctctgcatagattctagtatcagaggtcaacctactggacatttcactcacctctgcaaagagaaaccttacgttaaacaactgctacatcgtgaaataatacatgggagggggacagaaacagacattgatctacttttactgatgccattagcaaattactactgctactgcattttttataaaaaaaaccttggttcatctgattcttgttagtttcgtctttagcctaccaacttgcttggaaaaaggctgtgttgttgtagggaacagaaacaggtcttgcaggaaatgcattgagtagggaaacacagcttaaacagacatatgagcatgtgcctgat

SEQ ID NO: 17760 - DNA, 1051 bp, Setaria italica
  Peptide Sequence Number=SeqID_83734
agactaataatttccaaaaatggtgaagctgacgatgatagcacgtgtcactgacggccttccactgtcggagggactagatgatggtcgggatctgaaggatgctgatttctacaagcagcaagcaaaacaattgttcaagaacttgtcaaaagggcagcacgaagcatcgaggatgtcaatcgagactggaccataccttttccactacatcattgaaggccgtgtgtgctatttgactctgtgtgaccgttcttatcacaatggcaacaggggcatacttccgaattaaggcctggcgattgagatctttcgccttctctgcatagattctagtatcagaggtcaacctactggacatttcactcacctggtctagtttttcaccgacaccaagaacttcttgaacattgcgagtcataatctggtgcacctcgtagagctcatcattcagcttggcaaggttcctttgtgttcttgtatccaagtacagtttcttggtcttctgtatgaatgcatcaaatttaataaatgcatatggccttgcagcagtttcaatttggctgccattaaccttctcaaattcatttttgagatcttcgagatactggaatgcaagtttcttgggataagaacggtcacacagagtcaaatagcacacacggccttcaatgatgtagtggaaaaggtatggtccagtctcgattgacatcctcgatgcttcgtgctgcccttttgacaagttcttgaacaattgttttgcttgctgcttgtagaaatcagcatccttcagatcccgaccatcatctagtccctccgacagtggaaggccgtcagtgacacgtgctatcatcgtcagcttcaccatttttggaaatatagcaagaggcaaactagcataggtaatctaaaagcaccaccatgtggctgcggcggcttgggcttccgccgcgatggaaacaagagagaaaaatgtgaagcatgacagatcactccgatgtaaattgtcaaacagtaaagcagggaaatccgccgcatgagccaacatgat

SEQ ID NO: 17761 - DNA, 931 bp, Setaria italica
  misc_feature (1)..(11): n is a, c, g, or t
  Peptide Sequence Number=SeqID_83735
nnnnnnnnnnntcacatgccgggaatactcgttaattaaataaataaactgggaaatctgtaatcaatggaaacgacctgcctccaggctccagcagcatgttgaacatgttcagtttcccatacagtatggtaagtagtgaaatacttgtctatcagcagccgaaaacctttgactcttacatggtgcgctcgcaaaaaacatatactactacgcagatccagttaataattccgagaatcattaacaccaggtccatatctagggtgtatactacaacgggtttgcttttggcagctaaagtactcgcttgaatcggcagatgcgggataagccatcgaagcatctgacactcggcaccaggttccagcgttgtgtaactcaggaggtccgagatacaccaagtcaccatatcttgttcttaacccaaaagagcatcagtactatcccaatcacaatggcaacaggggcatacttccgaattaaggcctggcgattgagatctttcgccttctctgcatagattctagtatcagaggtcaacctactggacatttcactcacctggtctagtttttcaccgacaccaagaacttcttgaacattgcgagtcataatctggtgcacctcgtagagctcatcattcagcttggcaaggttcctttgtgttcttgtatccaagtacagtttcttggtcttctgtatgaatgcatcaaatttaataaatgcatatggccttgcagcagtttcaatttggctgccattaaccttctcaaattcatttttgagatcttcgagatactggaatgcaagtttcttgggataagaacggtcacacagagtcaaatagcaccagtgaaaccagatatccaaaaatcaacagccccatgccatatatcttcactacagttaaccaaattcagatgcatat

SEQ ID NO: 17762 - DNA, 599 bp, Setaria italica
  Peptide Sequence Number=SeqID_83736
agaccgactacaaaatacttaggacaactaggaagacgtagacgaaggaccaacgctcgtcgctgctctcgggcttcacaattgccaggatgcagaagatacagacgaagtgaggcaagggaggacgacgcggaggattccacatcccacgaggacaccgacactcctgtgaccgggtccaggctccgcttctacgttcaaggagcggctgaggcggcaccgagcagtctcctcatcacgttgtaccgagccggcggcgtagaggaccacatctgtgtgaccgaaggcggcgttcgaggagagagatgaagggggctgtggcagcgggacctgatggtgtcgagcgcaggtgcgattcggggtcgattcgcacggatatgcatcggccgagcacagatcggcatccggtcggcgcccttccctccgacgcaggacaccacaagctagaggcgcgggtctccagcgccgcacggcctggatccggcggttgcctgcccggatctagactcaccacgctggagatacggcgagtaccgatctgccgctgctccactccgcactgttcaaacgccggcgggaccttggatgaactcgtggga

SEQ ID NO: 17763 - DNA, 596 bp, Setaria italica
  Peptide Sequence Number=SeqID_83737
tactttcttaagtatctagacacatgagtaaacttatcacgaacaaggcggatatcctttattggtgcgtgcttagcgaattcataacgaagcatttcttcatcagcattttcatccaggccacgaacaactaaaacatgagttgggcctgtcgcatcagctggtagagcatcctcagtacgaggctaattgcactgaaaacaggaggtccggcgggcaaaattcatacatccacatatagtgcaaatccagtcacatggtgcagcaacagtcctgtgcccatatgtaggccttgaaaaattttcttgtccaagagaaggccccccagttggtttactactatactcaaagaacacattcctaccatcgatttcaaggccattctctgcagtaccttccatcattctacgagcagcttccacagtagggaagtcaataaaagcaaatcccctagacatgccagaattccgctccttgatcacacgcacactgcgtagagggccccactgagcctataagagatcacgacccgaatgattaaaacgaaccagacaatacactttcaaccattgtaacaatttatgaagaggaacttg

SEQ ID NO: 17764 - DNA, 1746 bp, Setaria italica
  Peptide Sequence Number=SeqID_83738
gctacatcatagcacttcaactgatcagtcacaccagcacatagtaagatacagaatgtgcacatttggaggattaaacactcataattctaagtttctaactaaagtgccagtccatggaaaacaaaaaaataccacaagtaaaaggactacaaaaaatgagacaacagaaacacagaatagagagaacagtctaggacatctccctgaatcttgcaatagccttcttctggatgatggttttgtagctgtctccggcttgggcctccagcgacggatcggctttccgctgctgacttccgagtccagccctgacgtcaacggattttgcctggactggctccttgataccactaccatcctttcccaaaccctggatatttgcaaagtcgttgcaagaaacaaaaacaataccaatgcacactcacgtcaggaggaatacaatacaacagttttcgtggaaatatcggtatactgattccccctgcattcaaatagtaacttcttgtgcccaagaaactatgcattctctcgagctagaatcattaagttctgattcctaagcaggtggtcctaagccttttcaagtagatagtataaacacaaaagaagcacacacactctgaatgtattagtgaagacccatagatatcatttgctaacttattctgaaaaggatctacaagaactcaagctttgagaactgacaataatttccagctcataagaaacctgatactaacagcttaccaatatctctaaagtgcaaataatttgaaatttataatagaagttgtaaacaatttgatctctacagtgtattttgcaatgccaacaagaaacataagagggggggggggacaactcttccatctaagagcatcaacaaaatgagaattatgcgggggatgaacttaccagaccctcctgccaccccatgttgcgtagaatgcggttgcccacattgctttcgtcgattgctctatccgcagtgataacttcatagttttcagtgttgctaatttcaccactagagcgttcacccacaccaggaggaaacggcatcgaccctatctcacttgaaccctttcgggacggatagtcaccagcttgacaacaagtaatttccagaaaatcaatacaaaccttgaacaggtaaaatctaaaatatcattcctattatgtttgtggggtcaaggaattcataattaatacagtactatcagcatgacaatataaaagctcccagctatataaggtcagcctatatatactaccataaaactgcacgtacagtcaacacagcctcagaaaagtgagaatgaaaataacggaaaattacatttctggaccgaccgaatgttgctattggtaaaatctcatgctcaagaaatgatgatgggaaaatgactgtgattgtgcatgatgaaaaattaagaaagtgtgttcttacttgaatctagtccaacactatcattgccaagcgatgatccatacagatttcgtctttctgcagcacggtctctgtactgggattgccctggtgcctcagaaaaccgacgtttaccactcccagaaactccagatgaagtattagagactaaggcagatatatctgttttgtagggtgcaggagttgcaagtgcctcaggagtagtcattaagcccttcgtgcttgttgttgcagtggtgtggggctcggcactcccagtatcagataatgcatgaaatgtagtatccgacttg

SEQ ID NO: 17765 - DNA, 926 bp, Setaria italica
  Peptide Sequence Number=SeqID_83739
ccagaattccgctccttgatcacacgcacactgcgtagagggccccactgagcaagaatctgatataggtcatcatcattagtcttcagggacaatcccttgacaacaacagtggcagatggggccactgaatcaccacgcctcctttcatcccagtcatattcccttcttctgtcaaagcggttatcatcataaaaaccatctctttggttccgaccacgacttcttgcacgaggagatcttgatctagaccgtgatcttgatcggtcatcatggccacgtgaccgagaacggctatggcgcatgtatggactttcgtccctttcacggcttaaatctcttctttcacgttcaccctcgtcatgccttctccagttactatctctcctgcctctctcatagtctgaatcatagctgtggcgcccatactcatgatctctctcatagctgttctctctgctttggtgagaactgcggtagcggtcttcaaactcaccatgaaactccgcacgttctctgctcccaatccttttgctcctatcaacaccaaaatcacggcgactgccagattcatagtagttgtcagcagcatgatagttattacggagtttgtcaactcctctgtatgaatcaaactcatgatgttttccatcattgtgataatcagtgccatgccttctgtgatctctggcagttgcatattcctcgtcatgattcctccgaggctgagaccacatagcaccaacagaggctggtggtggatacatatttctgtcatgtacatcctgatagaatgcaccctttccatatgaatctctagaaaagccttcatccacaggcctcctaccattgtaggacccaccagccctatattctggctcattgattacaccactacccatccggtgcctgtagattcaacagaa

SEQ ID NO: 17766 - DNA, 1639 bp, Setaria italica
  Peptide Sequence Number=SeqID_83740
aaggtactaaggactttaaacaaataactagaaataccaagacaatttagggtacgaatagaaagttccctggccaaaaggaattatagcttgcagaagagttcatatctttaacatttccagagtcagaactcggcttgcttttcagagagaatccagttccgctgtgtgaatggttagatttatcatcagaacgtgatggttctttgtcaccaaggacaattcgtgcagcctgtccttcttgattcctttgcttccacatagctaggacattgttcatcttcttcttattagctatcagactagtttttgaggccaacttgatctctttcgccttctccttttctctcttttctgcagccagtgctgcatttgcagcagcttgaacagcatcaggaagcgaagttttctcactctgtttaattgtggcagcaggtgcagaaatcacaacctttttgccagtattactatctgaggtcgttgtgttttcattggccacaaccccagctgctttagtattgttttggtcattgcaaggtacatattgttgagtttgttgatcgtaggaataccaaactccagagttactatcatagtaaaggccagtatttccatcataatagaatccagaggcagaatcatagtagtaaccagatttttcatcccaaacaaatcctgactgtgctgcagaaccatctctttgagactccgagttgctattctgtttttcatcaggattgtactcttttggagcccaacctatggcatcatactgctgagcaaatgatgcagcctcaatggcagctgcggcaaggctgtttgactgcgaaccccctgatacaggtccatgtgtacttttagcgtacgctacacgcaaaacctcaccatttttctccagtgtaatcccatttgtagcttcaagagccttagtagcatcttccactgaatggaaatgaacgaaggcaaaacctctagacacatgagtaaacttatcacgaacaaggcggatatcctttattggtgcgtgcttagcgaattcataacgaagcatttcttcatcagcattttcatccaggccacgaacaactaaaacatgagttgggcctagttcagatccccttctcccaaactgtggagtggtacctgtcgcatcagctggtagagcatcctcagtacgaggctcattgcactgaaaacaggaggtccggcgggcaaaattcatacatccacatatagtgcaaatccagtcacatggtgcagcaacagtcctgtgcccatatgtaggccttgaaaaattttcttgtccaagagaaggccccccagttggtttactactatactcaaagaacacattcctaccatcgatttcaaggccattctctgcagtaccttccatcattctacgagcagcttccacagtagggaagtcaataaaagcaaatcccctagacatgccagaattccgctccttgatcacacgcacactgcgtagagggccccactgagcaagaatctgatataggtcatcatcattagtcttcagggacaatcccttgacaaattgtaacatttattctatttgttcttacttttgttttaaaactttttaggtttttttaggtttttttttcttttttta

SEQ ID NO: 17767 - DNA, 1497 bp, Setaria italica
  misc_feature (1)..(29): n is a, c, g, or t
  Peptide Sequence Number=SeqID_83741
nnnnnnnnnnnnnnnnnnnnnnnnnnnnntttttttttttttaactaacccctcacaaaactagaaaataactagagaaacttcataaattggaacaacttgtgacaggatgagagagatgttcgcatggaagttctagtactgctacatcatagcacttcaactgatcagtcacaccagcacatagtaagatacagaatgtgcacatttggaggattaaacactcataattctaagtttctaactaaagtgccagtccatggaaaacaaaaaaataccacaagtaaaaggactacaaaaaatgagacaacagaaacacagaatagagagaacagtctaggacatctccctgaatcttgcaatagccttcttctggatgatggttttgtagctgtctccggcttgggcctccagcgacggatcggctttccgctgctgacttccgagtccagccctgacgtcaacggattttgcctggactggctccttgataccactaccatcctttcccaaacccagaccctcctgccaccccatgttgcgtagaatgcggttgcccacattgctttcgtcgattgctctatccgcagtgataacttcatagttttcagtgttgctaatttcaccactagagcgttcacccacaccaggaggaaacggcatcgaccctatctcacttgaaccctttcgggacggatagtcaccagttgaatctagtccaacactatcattgccaagcgatgatccatacagatttcgtctttctgcagcacggtctctgtactgggattgccctggtgcctcagaaaaccgacgtttaccactcccagaaactccagatgaagtattagagactaaggcagatatatctgttttgtagggtgcaggagttgcaagtgcctcaggagtagtcattaagcccttcgtgcttgttgttgcagtggtgtggggctcggcactcccagtatcagataatgcatgaaatgtagtatccgacttgatcactcctctagtggaaccccttataacacccataactgtagttcctaaactgttactgacaggtctaggctttacatctgaatccagcatttgggtcgatgaagttccctggccaaaggaattatagcttgcagaagagttcatatctttaacatttccagagtcagaactcggcttgcttttcagagagaatccagttccgctgtgtgaatggttagatttatcatcagaacgtgatggttctttgtcaccaaggacaattcgtgcagcctgtccttcttgattcctttgcttccacatagctaggacattgttcatcttcttcttattagctatcagactagtttttgaggccaacttgatctctttcgccttctccttttctctcttttctgcagctgctgccacaattaaacagagtgaacagcatcaggaagcgaagtttttacctaagtaagttactaagtaaacttacggttacttttagttacttta

SEQ ID NO: 17768 - DNA, 524 bp, Setaria italica
  Peptide Sequence Number=SeqID_83742
agggagcgaagagagagaggagggagcgaagagagagagggagatccatccatggattccgccgccgtcgtcaaggttgtcccgcaggccggcctcgtcaaggaactccccgccgcgccgtccgtcgtcgtcccgcaggtcggcatcgtcgaggagctccctcccgcgccttccgtcgccgtgaatggtgtcccgcaggtcggcatcgtcgaggagctccctcccgcgccttccgtcgccgtcaatggtgtcccgcaatccgtcctcgtcaaggagctccccgccgcaccgtccgtcgccgtcagtggtgccccgcaggccgtcctcgtcaaggaactccccgcggtcgacgcgtcgtccgtgctcgggaagtccgtcgtctccgcccgctcccccaacaccaccgaggagcccagtggcgaggacaccgccttcgaccaccgccgcgcgctcgacctctccgtccccaagcacttctccccaggcgcgcgggacctgttcggcgagccgatgaagctgaccca

SEQ ID NO: 17769 - DNA, 919 bp, Setaria italica
  Peptide Sequence Number=SeqID_83743
ccctttactttagccgtcaaaaccgcccgtccttttggtgcccgtcgctttcttgcggcgtttattctgtatagctataggtcacacagggtaaaacgccgtctatttcactctccacggatcactcgtgcagcaatggaacagtagttttgaagattttttttttctggcaccaatcactttcttaaaggaaatcaagaaacctagattttgactgccggttctcatcagttgtttttaatactattttttctcttggcttgcgaaacttgttttcgtgtgtagtgtttggaggcagacttgaaaattgactctagggtaacacatgtatttttttacagcacgggaacataaagttttctacacagaaaaatggatagaaataatatcttaagcatagatgcttcttcgaggaatcgatatcttaatcaaaatcaccttgaaaaggatgtttctggccggctagctagtatctaaaccgcaaaagttgatggagaaacatggagaggctagtagctagtaaagttactgtgccagatgggtcatgtgtgtcgtctgcatgcagcagcaagcttgcaaatgaagcctagcctttgttcggtgaccacgcacgtcactttaattagctcgctagttgcctctcctaaccatctttccgaaacgatcagtcacgaaaggttagctcagacgactagtctctgtctttcactctttctatctttctttctctcagcgtcatgcaaattaataaccttagtttaattagctacctcgcccatgcgtgcatgatcgagtgcaaaagcttttttgtgccggccgctgttgtcgcaagtcctcctaccaaactactccaattcctcacgagagctcgccgatgattcgacgagaattcggtgcaaccactctgcgcagcgcaatc

SEQ ID NO: 17770 - DNA, 715 bp, Setaria italica
  Peptide Sequence Number=SeqID_83744
gtactcaaatcgggagcctttgtagtcaatcgtgccatcctcaaacctttccggcttgaacttctctggatcatgccaatactcggggctccttgccatagcccaaacattgaccatgaccctagtgcccttcgtgacctcgaacccatgaatgtcgcatgtctctcgacaaaaatgggggaggagtagaggcgccactgggttcagcctcatgctctccttgatcaccatcttagtatagtgtagctcgtccatcttaccctcatgatcctgtggatgcttattgtcaaatactcgtcgcacctcagcctgtgccttggccattacctccggattcctcatgagctcagacatgacccactctgcagctgtggagaccgtctccgtccctccagcgaacatatccagtataatggccttgatatttgtcgtgtcgatggggaattcaagatccccctcgtcccttatccggaggaggactcccagaagggaatcacctcgctgggactcactttgagctatgatcttttctaagacggtgtccatccgccagcgtgctcgccacaccctgcgcctcaacccagtgaagacgtcaatgaaccacagcgatgggaataggtccccaatggtgtagcccccgctgaccttgagggccacatcaagcgccgagaggaactgctcctggagatcgctgctgcagacctggccgaatgac

SEQ ID NO: 17771 - DNA, 135 bp, Setaria italica
  Peptide Sequence Number=SeqID_83745
taaatactcatgatacaagtgcacaagcttatttcatcgttgccactagagcacagatatacaaaacgaggtatatatgtgatacacactcactaccacgctatttctttatcacttgcaaagacaagcacatct

SEQ ID NO: 17772 - DNA, 224 bp, Setaria italica
  misc_feature (186)..(186): n is a, c, g, or t
  misc_feature (201)..(201): n is a, c, g, or t
  Peptide Sequence Number=SeqID_83746
gatgcagacgcttcggataaaccgatgtattttatcttcccttcttcaaccagcttcttgagctcaccaatcgtggcctcgacgggcaccgtggtgtcgatgcggtgctggtagtagaggtcgatgcactcaacgccgagccgccggaggctgccctcgcacgccgcgcgcacgtatgccgggtcnccgcgcacctccctnaagtccggcgtgatgccgaactt

SEQ ID NO: 17773 - DNA, 242 bp, Setaria italica
  Peptide Sequence Number=SeqID_83747
ccacgatcatcggcttgtccgcagggccagccaccaccttgaacggccatagcttcatgtcactctgcacggacgggtcagagaacctcctaccgatcaaccgcttcgcgtctgcatccaaagggacgagcaacaacacagtcagtttgaccgtcaaatcacggcagaaaaacatcaactacagtaaccaacatcaactcttcattcagctttcagagatcaacgaattccaccaatgcaat

SEQ ID NO: 17774 - DNA, 378 bp, Setaria italica
  Peptide Sequence Number=SeqID_83748
tcccgaggaacacaaccatcccaccaagaaggagcaggtgttctccaccttctcattgccctcaccgctcaggatggcagcctggacagcagcaccgtaggcaacagcctcatcagggttgatgttcttgcacagctccttgccgttgaagaagtcctggagcagctgctgcaccctgggaatcctggtggagccaccgacaaggacaacatcgtgcacagtgctcttgtccatcttggcatccctcaggcacttctccacaggctccatgcacttcctgaacaggtccatgttgagctcctcgaacctggacctgttcaggaagtgcatggagcctgtggagaagtgcctgagggatgccgacaaggacaacatcgt

SEQ ID NO: 17775 - DNA, 472 bp, Setaria italica
  Peptide Sequence Number=SeqID_83749
ccctctcgcaggccgtcctccagccgcccggagcggccctccgggttgccgctgatgtccttcttgttgcttcctctttgaactcctgcacgaagtggttcacgagccggttgtcgaagtcctcgccgcccaggtgggtgtcaccggcggtggccttgacctcgaagatgccctcctcgatggtgaggatggacacatcgaaggtgccgccgccgaggtcgaagatgaggacgttcttctcgccggtgctggcggccttcttgtcgagcccgtaggcgatggcggcggcggtaggctcattgatgatgcgcgtgacgttgaggcccgcgatgacgccggcgtccttggtggcttggcgctgggagtcgttgaagtaggccggcacggtgatgacggcgttcttgatggtggtgctgaggtatgcctcggcgatctccttcatcttggtgagcaccatggaggagatctcctc

SEQ ID NO: 17776 - DNA, 591 bp, Setaria italica
  Peptide Sequence Number=SeqID_83750
caggaggttgttgtcgcgggtcctggtcctctcaccctcgtacacctggatcagcacaccaggctggttgtccgagtaggtggagaacacctgctccttcttggtggggatggttgtgttcctcgggatcagcacagtcatcacacctccggcagtctccagaccaagggcagagggtcggacagtccaacagaagcaggtcctgcaccttctcattgccctcaccgctcaggatggcagcctggacagcagcaccgtaggcaacagcctcatcagggttgatgttcttgcacagctccttgccgttgaagaagtcctggagcagctgctgcaccctgggaatcctggtggagccaccgacaaggacaacatcgtgcacagtgctcttgtccatcttggcatccctcaggcacttctccacaggctccatgcacttcctgaacaggtccatgttgagctcctcgaacctggcgcgggtgatggtggagtagaagtcaatgccctcgtacagcgagtcaatctcaatggtggtctgggcagtagaagacagggtcctcttcgcccagaccaccattgagattgactcgctgt

SEQ ID NO: 17777 - DNA, 1187 bp, Setaria italica
  Peptide Sequence Number=SeqID_83751
ccacgatgtattcacaagaaacatcggcgtaggcgaaaagattttagcatatatgcagggagaacagttcaattgttgcatgcataagcttgttgcggctggaacgtttccagaatccagagctttacttctttggtgtgtctgcatacttccatgcggtatgtgcataggaattgtattgccttccaccagccacatcgtctgcgcgtatctggctggtgatttctttcatatcctcatctgttagcttcaccttcagggagtcaatgttggcatctaggttcttgattttggttgtccctggtataggaaccacatcatccccttgatgcagaacccaagctagagctagctgagctgggctgcactggtgcttcttggccaggtcttccattttcagataaatctgcttgttcttctccaaattatctgctgtaaaccttggatggctttgcagactagattcagaggacacttgttgtgtcactccccttccgccaaagaatccccggccaattggactgtaaggaacaattccaatccccaactccctgcagagcggcacgatctcgggctcgatgtcgcgggaccagagcgaccactccatctgcaccgcggtgatgggatgcacggcgtgcgcgcgccggatcgtgtccgggctcgcctccgacaacccgatgtacttgaccttcccctcctccaccagcttcttgagctcaccaatcgtgtcctcgatggggacggtggtgtcgatgcggtgctggtagtagaggtcgatgtagctgacgccgaggcggcgcaggctggcctcgcagcaggcgcgcgcgtactccggcgtgccgcagacggtcaagccgccgcccgcgccgccctgcccgacgccgaacttggtggccacctgcacctgcccccgcggcagccgctgcagcgccctcccgaggagagtctcgttggtgtggggcccgtaggcgtcggaggtgtcgaagaaggtgaccccgcggcggaaggcgtgctcgacggcggcggcgacggcctcgtccccgagcggcgcgttgtaggagcccgtgagccccatgcacccgaaccccagcttcgacacgtccagcccctgggcgccgagcttcacgcggggcgcctgcggcggggcggcctcctccatggcggcgcgcgcggttgcggtcggagta

SEQ ID NO: 17778 - DNA, 1245 bp, Setaria italica
  misc_feature (59)..(59): n is a, c, g, or t
  Peptide Sequence Number=SeqID_83752
cggcctggacggcggcgccgtacgcgacggcctctcggggttgatgctcttgcagagcnccttgccgttgaagaagtcctggagcagctgctgcacgcgggggatgcgcgtggagccgcccacgagcacgacgtcgtgcacgctgctcttgtccatcttggcgtcgcggagacacttctccacgggctccatgcacttgcggaacaggtccatgttgagctcctcgaaccgggcgcgggtgatggtcgtgtagaagtcgatgccctcgtagagggagtcgatctcgatggtggtctgcgcggtggaggagagcgtcctcttggccctctcgcaggccgtcctgagccgccggagcgccctggggttgccgctgatgtccttcttgttcttcctcttgaactcctgcacgaagtggttcacgaggcggttgtcgaagtcctcgcctcccaggtgggtgtcgccggccgtggccttgacctcgaagatgccctcctcgatggtgaggagagagacgtcaaaggtgccgccgccgaggtcgaagatgaggacgttcttctcgccgtcgctgctcgacttcttgtcgaggccgtaggcgatggccgcggcggtggggctcgttgatgatgcgcatgacgttgaggccggagatgacgccggcatccttggtggcctggcgctgggagtcgttgaagtaggctgggacggtgacgacggcgttcttgacggtgctgccgaggtattgctcggccgtctccttcatcttgttgaggatcatggaggagatctcctcggccgagaactgcttctcctcgcccctgaactgcaccccgatcatgggcttctcggcggagcccgggaccaccttgaaaggccacagcttgatgtcgctctgcaccgacgcatccgagaagcgccggccgatgagccgcttggcatcgaagacggtattgatggggttcatggcgacctggttcttggcggcgtcgccgatgagcctctcggagtcggtgaacgcgacgtacgacggcgtggtgcggttgccctggtcgttggcgatgatctcgacgcggtcatgctgccagaccccgacgcacgagtaggtcgtgccgaggtcgatcccgatagctggcccgtctcccttcccggccatggcgacgttctcgtcggggcgggaaaaaaaaaatctacttcctcctagtcgtcgagttgcggggtcagagcacctggaggacgagagaggggaac

SEQ ID NO: 17779 - DNA, 1233 bp, Setaria italica
  Peptide Sequence Number=SeqID_83753
tcgtgtctcttgcgtgtctcaggatgctcttgcaaagttcctttccattgaagaagtcctgcagcagctgctggactttggggatcctagtcgaaccaccaacaaggacaacatcatggacagtgctcttatccatcttggcatccctcaggcacttctccacaggctccatgcacttcctgaataggtccatgttaagttcctcaaacctggctcttgtgatggtggaatagaaatcaatgccctcgtagagagaatcaatttcaatcgtagtctgcgctgtggaagaaagtgtcctcttagccctctcacatgaagtcctaagccttctcaaagccctggggttcccagtgatatccttcttgtttttccgcttaaactcttggacaaagtggttcaccaagcggttgtcaaagtcctccccaccaaggtgagtgtcaccagctgtggccttcacctcaaatataccctcctcaatagtgaggagagaaacatcaaaagtgccaccaccaaggtcaaaaataaggacattcttctcaccaacactagtagctttcttgtcaagaccataggcaattgcagcagcagttggctcattgatgatacgcatgacattgagcccggcaataacaccagcatccttagttgcctgcctctgggaatcattaaagtaagcaggaacagtaaccacagcattctttatggtcaatccaaggtaagcttcagcaatctcacgcatcttgataagaaccatagaagaaatttcttcggcagagaactgcttctcctcacccttgtactgcactacaatcataggcttatcccctgggccaggaataaccttgtacggccacatcttaatgtcactctggacagaagcatcagaaaaccgtctgccgataagacgcttagcatcaaagacggtgttgatggggttcatggcgacctggttcttcgcggcatcgccgatgaggcgctcggagtcggtgaacccaacgtacgacggcgtggtacggttcccctggtcgttggcgatgatctcgacgcggtcgtgctgcccacacgccgacgcacgagtacgtggtgcccaggtcgatgccgatcgccggcccctcgcccttggtcggcgccatgtctgcctctagatcgctcgcagcggcgtcaaaggtgagcttgaggctgctagggttagggttctcgcggctgcgcttggagcagaggcgattgctgctg

SEQ ID NO: 17780 - DNA, 1948 bp, Setaria italica
  Peptide Sequence Number=SeqID_83754
ggggttgcagatgccctccagctccttcatcttgtcctcgaactcgtccgcctccgcgagctggttgctgtccagccagctgatggcgccgtcgatggcctcctcgatgcgcttcttgtcgtcggcgcccagcttggaggcgatcttgtcgtccttgatggtgttgcgcatgttgtaggcgtagttctccagggcgttcttggcgtccaccttcttcttgtgctcctcgtcctccgccttgtacttttccgcctcctgcaccatcttctcgatctcctccttgctcagccgccccttgtcgttggtgatggtgatcttgttcttctgccccgtcgtcttgtcctccgccgatacgttcaggatgccgttggcgtcgatgtcgaagcagaccgtgatctggggcacgccgcggggcgccggagggatgccggagagctcgaacttgcccaggaggttgttgtccttggtcctggcgcgctcgccctcgtacacctggatcaacacccccggctggttgtcggagtaggtggagaagacctgctccttctttgtggggatggtggtgttcctcgggatcagcacggtcatgacgccgccggcggtctccaggccgagggacagcggggtgacgtcgagcaggagcaggtcctgcaccttctcgttgccctcgccgctcaggatggcggcctggacggcagcgccgtacgccacggcctcgtcggggttgatgctcttgcacagctccttgccgttgaagaagtcctggagcagctgctgcaccttggggatgcgggtggagccgcccacgagcacgacgtcgtgcacgctgctcttgtccatcttggcgtcgcggaggcacttctccacgggctccatgcacttgcggaagaggtccatgttcagctcctcgaaccgggcgcgggtgatggtggtgtagaagtcgatgccctcgtacagcgagtcgatctcgatggtggtctgcgccgtggacgatagcgtgcgcttggcgcgctcgcaggccgtccgcaggcgccgcagcgcgcgcgggttgccgctgatgtccttcttgtgcttgcgcttgaactcctggacgaagtggttcaccatgcggttgtcgaagtcctcaccacccagatgggtgtcgccggcggtggccttcacctcgaagatgccctcctcgatggtcagcagcgacacatcaaaggtgccgccaccaaggtcgaagatgagcacgttcttctcgccgctgctggtggccttcttgtcgagcccgtaggcgatggccgcggcagtgggctcgttgattatgcgcatcacgttgaggccggagatgacgccggcgtccttggtggcctgcctctgggagtcgttgaagtaggcaggcacggtgaccaccgcgttcttgatggtggaaccgaggtaggcctcggcaatctccttcatcttggtcagcaccatagaagagatctcctcagcagagaactgcttctcctcccccttgtagttgaccacgatcatcggcttgtccgcagggccagccaccaccttgaacggccatagcttcatgtcactctgcacggacgggtcagagaacctcctaccgatcaaccgcttcgcgtcgaagacggtgttggtggggttcatggcgacctggttcttggcggcgtcgccgatgagccgctcggtgtcggtgaaggcgacgtaggacggcgtggtgccggttcccctggtcattggcgatgatctcgacgcggtcgtgctgccacacgccgacgcacgagtaggtcgtccccaggtcgatcccgatcgccggaccctcccccttcgccatcttctcttcctcctccttcacgaactgcccctcacagatccttcaaccaaaaccctctcacgagcgctgcttgttgccgggagattgaaccgtttcgcgtgggaaaacttatttttt

SEQ ID NO: 17781 - DNA, 1546 bp, Setaria italica
  Peptide Sequence Number=SeqID_83755
tcagggagttggggattggaattgttccttacagtccaattggccggggattctttggcggaaggggagtgacacaacaagtgtcctctgaatctagtctggtacaaacacaacattccacggaattattatcctctatcaatctgcataaggccatctggcattttgtcttccagtttactaaggaatttaactttggtttcatcagcaaaggcatccaaggtttacagcagataatttggagaagaacaagcagatttatctgaaaatggaagacctggccaagaagcaccagtgcagcccagctcagctagctctagcttgggttctgcatcaaggggatgatgtggttcctataccagggacaaccagaatccagagctttacttctttggtgtgtctgcatacttccaggcggtatgtgcataggaattgtattgccttccaccagccacatcgtctgcgcgtatctggctggtgatttctttcatatcctcctctgttagcttcaccttcagggagtcaatgttggcatctaggttcttgattttggttgtccctggtataggaaccacatcatccccttgatgcagaacccaagctagagctagctgagctgggctgcactggtgcttcttggccaggtcttccattttcagataaatctgcttgttcttctccaaattatctgctgtaaaccttggatgcctttgcagactagattcagaggacacttgttgtgtcactccccttccgccaaagaatccccggccaattggactgtaaggaacaattccaatccccaactccctgcagagcggcacgatctcgggctcgatgtcgcgggaccagagcgaccactccatctgcaccgcggtgatgggatgcacggcgtgcgcgcgccggatcgtgtccgggctcgcctccgacaacccgatgtacttgaccttcccctcctccaccagcttcttgagctcaccaatcgtgtcctcgatggggacggtggtgtcgatgcggtgctggtagtagaggtcgatgtagccgacgccgaggcggcgcaggctggcctcgcagcaggcgcgcgcgtactccggcgtgccgcagatggtcaagccgccgcccgcgccgccctgcccgacgccgaacttggtagccacctgcacctgcccccgcggcagccgctgcagccgccctcccgaggagggtctcgttggtgtggggcccgtaggcgtcggaggtgtcgaagaaggtgaccccgcggcggaaggcgtgctcgacgacggcggcgacggcctcgtccccgagcggcgcgttgtaggagcccgtgagccccatgcacccgaaccccagcttcgacacctccagcccctgggcgccgagcttcacgcggggcacctgcggcggggcggcctcctccatggcggcgcgcgcggttgcggtcggagatttgcagaggataggatcggaggcagccgtggccggaagcgaacactcagcagtgtagccagctgacagggcttgctggctggcttaatttttattcggc

SEQ ID NO: 17782 - DNA, 1567 bp, Setaria italica
  Peptide Sequence Number=SeqID_83756
ggggacaccacggggagcaggggggatgccggagagctcgaacttgcccaggaggttgttgtcgcgggtcctggtcctctcaccctcgtacacctggatcagcacaccaggctggttgtccgagtaggtggagaacacctgctccttcttggtggggatggttgtgttcctcgggatcagcacagtcatcacacctccggcagtctccagaccaagggacagaggggtcacatccaacagaagcaggtcctgcaccttctcattgccctcaccgctcaggatggcagcctggacagcagcaccgtaggcaacagcctcatcagggttgatgttcttgcacagctccttgccgttgaagaagtcctggagcagctgctagacaaccctgggaatcctggtggagccaccgacaaggacaacatcgtgcacagtgctcttgtccatcttggcatccctcaggcacttctccacaggctccatgcacttcctgaacaggtccatgttgagctcctcgaacctggcgcgggtgatggtggagtagaagtcaatgccctcgtacagcgagtcaatctcaatggtggtctgggcagtagaagacagggtcctcttcgccctctcacaggcggtcctcagcctcctgagagccctcgggttgccagtgatgtccttcttgttcttcctcttgaactcctggacgaagtggttcaccatcctgttgtcaaagtcctcaccaccaagatgagtgtctccagcagtggccttcacctcaaagataccttcctcaatggtgaggagggagacatcaaaggtaccaccgccgaggtcaaagatgaggacattcttctcaccaacactggtagccttcttgtcaagaccataggcaatagcagcagcagttggctcattgatgatacgcagaacgttaagtccagcaatcaccccagcatccttggtggcctgcctctgtgagtcgttgaagtaggcaggaacggtgacaacagcgttcttgatggtgctgccaaggtaagcttcaggcgatctcacgcatcttgatcagaaccatagaggaaatctcttcagcagcaaactgcttctcctcacccttgtgctggacaacaatcatgggcttctcacccggtccagaaatgaccttgaagggccagagcttgatatcactctggacagaagcatcactgaacctcctgccgatgagacgcttggcatcaaagacggtgttgatggggttcatggcgacctggttcttggcggcatctccgatgaggcgctcggaatcggtgaaggcgacgtacgagggggtggtgcggttcccctggtcgttggcgatgatctcgacgcggtcgtgctgccacacgccgacacacgagtaggtggtgccgaggtcgatgccgatcgccggcccgtcgcccttccccgccatctcttcttctcactaccggcggtcgcggagctgcagcggctttgcgagggaccggaggggtggggaagatgggacgcggagttgctgagacacgcaacagaggataggcaaggcacacgaggggatagg

SEQ ID NO: 17783 - DNA, 1637 bp, Setaria italica
  Peptide Sequence Number=SeqID_83757
tttgtcaagtctcatgatcgtatcatgatctatttaaattcggctcaatctttttagaaaagattgagccgaatttaattgcaatcaattagaaaaataaagaagaattactgcatttcgtaactgattttttttctttctatagggtatccatcgcttcgaactcaaatttgatctccttccatacttcacaagctgcggctagttcaggactccatttgcaagctgctttgataatttcattaccttcacgagcaagatcgcgcccttcgttacgggcttgtacacaggcttctaaagccacacgattagctgctgcaccaggtgcatttccccaaggatgtcctaaagttcctccaccaaattgtaatacagaatcgtctccaaagatttcggtcagagctggcatatgccaaacatgaataccccctgaagccaccggtataacacctggcatggatgcccagtcctgagtgaaaaagataccgcgagaacgatctttttcaataaaatcatcgcgcaataaatcaacaaaacctaaagttatttcgcgttccccttctaacttacctactactgtaccggagtggatatgatctccccccgacatacgcaatgctttagctaatacacggaaatgcataccatgatttttctgtctatcaataactgcatgcattgctcggtgaatgtgaagaagtaggccgttgtcgcggcaataataagacaaactagtatttgcggtgaatcctccagttaagtagtcatgcattacaataggaacccctaattcccttgcaaatgcagctctcttaatcatttcttcgcatgtacctgcagtcgcattcaagtaatgccccttaatttcaccagtttctgcttgtgctttataaattgcttcagcacaaaagacaaaacggtctctccagcgcataaatggttgtgagtttacgttttcatcatctttggtaaaatcaagtccaccgcgtagacactcataacacgctctaccgtaattttttgcggataatcccaattttggtttaatagtacatcccaataaaggacgaccatacttgttcaacttatccctttcaacttggataccgtgaggcggaccttggaaagtttttgcataagcagtgggaattcgtagatcctccaaacgtagagcgcgtagggctttgaaaccaaacacgttacccacaatggaagtaaacatgttagtaacagaaccctcttcaaataggtctaatggataagctatataacagatatattgatctgcctccccaggaacgggctcgatgtgatagcatcgtcctttgtaacgatcaagactggtaagtccatcagtccaaacagttgtccatgtaccagtagaagattccgcagctactgcagcccctgcttcttcaggcggaaccccgggctgaggagttactcggaatgctgccaagatatcagtatccttggtttcgtactccggggtgtagtaagtcaatttataatccttaacaccagctttaaatccaacacttgctttagtttctgtttgtggtgacataagtccctccctacaactcatgaattaagaattctcacaacgaccttaactaaactaaaacgtaaactaa

SEQ ID NO: 17784 - DNA, 1014 bp, Setaria italica
  Peptide Sequence Number=SeqID_83758
ttttcctttaggttactattgacaggttcaaagctaataaatgtctgctcgagttaattctccttctctcagggtatgatcaacttcacagaaaatccaatgtgcctttcaaacagaggtgcattacattggcactgcgaacattcccaatgcaacaaagaaaattatgctgtccttggtcagtgcccgtatgcaaattttaggcaactattccacatgtgtttgtaactgcagtaggtctaccagattatcactgtatattgctgagatcctgagatgcggcactataccaagaggcataaaggtcatttgcaatatggtataaactacaatgtagattggcttcctatgctttagaagttatcgatggcagctccaagtcttcaaccactgtttgctggaaacaaagacaccgcttccaggtcttcaatcactgttgctgctgcaaaaagacatggcttggttgcactgcttcaacaattaggttcatcgaaaatggagtttcagactgagtgaggcatcatttgggtgggcagctagataagaacatagggcccaaggcttcaacaattcaaatacgagctggttaacaaatttcatctgcaaatataacatcaaatatggattgaacttcgtcttttggtatgtttggctggtctactaagagttgccggagtacaacaatgtcactggaactgctcttccatgtcaacaaggagataatggatgattttagtgcaaactcagcctggtgcatctcgcataatgttcgaagcccatccaagcattctgcaatagttggcaaaattcccacttgtaactgcatctgtttcgctgtgagtgccgacccacctctcaccatctggttggtatcacgcagagccttatttagagctttcacaatgccattgaacttctccagtgtctccctcatagaaacgaagatgagttcgagactctctatctgcttccccatgaggtcctcttggatgttagccacaccacgcaaggcac

SEQ ID NO: 17785 - DNA, 704 bp, Setaria italica
  Peptide Sequence Number=SeqID_83759
acttatattcattgtgatgaacaacgatcaagtattgctttccaccttgaataaagaaatcaaaacacgatacctcgtatgtcgcgggcaacgtagatttacattttggagaatcaatatcccataccatcctatcgtagtcccatacttcgaatacctcatgtaaagatgccctcaggatccacggctctgttggatgcacacatatggctgcctctgtttcgcaaaaaccaccaggacgatagtatctcgcgggcattatctgataaaatgagaaaacaagccagaatagaccaataaactaacatatatttctgaaatggaaccagtatacgacaaatttggggacaatctaaagaaaatcattcaccttgagttcaggctttacgtcttgtctgtcccaggaaactggtcgggccaactctggttttaaattaggacgtattggcggctgtgaaataaaataataatactacttaactaacgtaattgtagtatacttttttaaaatatcaccacttaatatatcctaaaaatagttcagcggtcctcaacgagtcatggaattggtggtgaaataggaatacgctgcatcaccattggtggcctcaacaatgagtctgagtttcatcttctttttaatatatataatcagcagctcttccgcttagtttctattttaaaaaaattgtcttaattattta

SEQ ID NO: 17786 - DNA, 2970 bp, Setaria italica
  Peptide Sequence Number=SeqID_83760
gtcataataacttctataaattaaaaaatcaaaacgatatacaatttggaatggagagaggagctaagtaacattttactaaaaagactcaatatgatactttgttaagtacagtctcagttatgttccagaacatcaataacaacatacgtctattactatgttacatctgacacatacatactcaacttaccaacagaatatatatatagtttcattcaaatctcgcttccctctgactcatgtggtctttcaagcatatggccgatttcagcaactgcaattccatgtgcatgtcctattacaatcctttctgatcccttcacgccgaatacattatatacccttccaagataacagttcagtatgcccacaagattgaacgtactggagctccatagggagactcttccgtctatggagcctgtaattagtaccggaagttcaggatgggaacaagctgtagatatattcttccctttcagagtttcaacaagagtccctgtatcgtagtcccatatcgtggacttatattcattgtgatgaacaacgatcaagtattgctttccaccttgaataaagaaatcaaaacacgatacctcgtatgtcgcgggcaacgtagatttacattttggagaatcaatatcccatacctttacacctttccttttgaaaaatgtaacaaaagtatcttggtcatttgggttaaatttaagttgtcgtggaaagtcttccgtgttaaatgtctgaacacaatcccagcccctctcccagtcccacagcttaatgctgcacactactggtgcattcccatcggatgaattatcatgaactaatgatgatagcacatacggtcgagatggatggacttccaataacacagtacctctttcatgggccttaaaactctttatttttgataatatatatgttttggatcccttgaaatttttcactgccatataactgtacacatatatgtaaccaacatctcgtctgctatattcagtgctagacccaaccaaaatccatctctttcgtgaaaccaacttcggtatccctgttggtaggcttagttgcccatcagcatcaccatatatatcggcctcttcactgggaatgaagtaaaatctttgtggttgggcaaaacagaagtgcaccttttccatcctatcgtagtcccatacttcgaatacctcatgtaaagatgccctcaggatccacggctctgttggatgcacacatatggctgcctctgtttcgcaaaaaccaccaggacgatagtatctcgcgggcattatcttgagttcaggctttacgtcttgtctgtcccaggaaactggtcgggccaactctggttttaaattaggacgtattggcggatcagtatgtgcacagagagcagctattttcacctcgtgcaccttaagacccctttctctggctttcgtaatcaatgctcctgggtcgacgatccgtaggccctgatacctctctttggtgctttccagtgtgaaaaagtcgtcgttgccgaaccgtggattttgctggtgatgcattacgacagcgagtgtgtacctgcacttcggcggcaccacaccagattgcggcaagaaatgcgctgataatctctctgacggcaagagcctgaagaccacaggtacatctatgttgttggttaggtgcagcgagcatgagctgcgatgtagctttttgggctcaggcaaagagaaatcgagctgcagcggatgcacactgaggagctcgataacctgtccatagttgctgtttgattcacacaagcttctttctgctggattagggtaaaaggctttaagtatttccgatgaaccaggccttttcgtcctgtcatggtccacacattttagggctatgtcgagcagctgttttacttgtttgatatatattttctttagtgacgcatcattcagtgacttctcaaatattttcatccatcttccgcaagctctctctgtgaattccatactcttggggctgtaactactccagccaatgggcaccttttcgcctgtgattatctcacacattataacacccaaactgtatatatctgtcttatgagatattttgccctcgagtaggtattctggtggcatgtatccaagtgttccagtaagggtatgagtgaaaatttgagatttttgtgcatccctgagcctcgacaaaccaaaatcagtaatttttggaaccatatcatcatctatcagtatattttcaggtttaagatccatatgagtaagattgcattcctcgtgaaggaaatctaaacctttgcaaattccttccattattgcgtatctcttatcccagccaagatccagacctagaacatagtcacgaagacttccgttgctgatgtactcgaaacagagcaaacgttgacgtacttctgcaagaatatgttccccgttttgcggcatcgcttcaaactttgtctcggcacagtaaccaataagttgcactatatttgggtgccgtatcctcattagagaattcaactcagctttgtatttgctgtcatcaaccacatgttcagcataaagtttcttgatagcaataaacttctccctcccgagaactcccctgtaaacctctccaaacccacccctgccaactagtcgatcagaagaaaaaccatctgtgatggctttcaaataatccagtgacagaggcacgggttcttcactaggatcctgcagtacaatctgtagctgcttcctgtagtcatcaaaggtagaagctccactgtacattcctgctgactaggagcagaatcgccggggggcggggcgttgatacaactgccgactggatccggagaggacgagctccgctgctcacgctcggagggccgttgacgcgactggagaggtcgagctgatccgctcgggaagaggttacagtagacgcgcaggtattgtgtcaacg

SEQ ID NO: 17787 - DNA, 523 bp, Setaria italica
  Peptide Sequence Number=SeqID_83761
accaaaaccctaaaccccgccgccgcttccacccgtcgcccgccgtcgagagcaaaggaggcggcgatggcgaagaagctggggaagaaggcgcgcaagttcgcgcgcaagaacctgcagtccgccgccaagcgcaaccgcaagatccggaaccagttcaaccaccgccgcccccgcagaggtgggagcggcgctcgggaggatggagacgaggacttgcttcagcgggtcgacgatgcctccaccatggccaccaatgatgctgctgatgctttgatcagtggccttgagtttccagaggatgatgttgaaatagacgcagatctatctgacagtgatggctatctttcagaggaccctgggtgtccgtactattctgacggtgaggatggagatgatgtcaaagattgtatcatgcaagatggtttggacaaacagaacgatgatatgaatctggatatcaaaaaacaaaagaaaaagctgaagaagttgctggataaggatcctgagtttgcaaacttcc

SEQ ID NO: 17788 - DNA, 1063 bp, Setaria italica
  misc_feature (1)..(102): n is a, c, g, or t
  Peptide Sequence Number=SeqID_83762
nnnnnnnnnnnnnnnnnnnnnnnnnnnnnnnnnnnnnnnnnnnnnnnnnnnnnnnnnnnnnnnnnnnnnnnnnnnnnnnnnnnnnnnnnnnnnnnnnnnnnncctaaaggcggcccaacccaaaagttaacatgcccatcttatagtacattctcttctttcggagcgatcgtgtaatacaactggctagcatacatgatttcaaattgaacaggggatctgatggaataaacaggggatcgaaccactggctgactggcagtatttggaacacacaaacaaagtaaatttttgctgaaaaatgttccttgcagacacaaaaaggaaaatttgcatgctactgtactaccagccgtttgtagctacataacttacaatttagcttaagctgcagctgggtcgagtatcgggtcggcagggtactcttcgtatccacttatgcctgtgattcttaaccttgtgtttggctgtctgtgaccaagtttcctctggtacttcttcttcttcttgtacttgtaaactataactttatcatcccgtccctgttcttcgaccactgcatgaacagcagcattggtcaccactggcatgccaatgtaagctttgtctctagttgacactagtagcaccttgtttaatatgatctgatcattgacattggcacctttcaatctctgtgtgtatatataccggcctggcatcacaatgtattgccttgaaccaatcatgacaacagcgaagatgtcggcgtccttcccggcccccgcggcggcgagctgcgcctcgacgggctccggcaccgcgggttcctcctcctcagcctccgcctcgggctccacgaactcgacctccactgcatcggggtcggcggcggctcggagctgccagcggcggtgcgcaacggcggagacggagagggagcggcgtgcgtatgggagcgaggagagggtcagggtcttggaggcgaggaggcgcaggggcagcgttgcggtcgcggtcgcggtcgccatggccgcggcggggaggggaggcatggatgacgatgtccgagtgggaagtagaa

SEQ ID NO: 17789 - DNA, 570 bp, Setaria italica
  Peptide Sequence Number=SeqID_83763
aaacatggcattgctgggccgcatctttgtgaacaaaagcatggagtggttagattttcagcaggctgtacaggcagggcacaagggaagatatgggcaaatcaggctgaggaagccaaagcaatctatctatacctatccggcgccagattgtatgtgccatgggtagactcctaaatgccacatcaaagactgctgtgctaggctcttcagctcaagggttctgctagatcaccagctaatctgtcaatggcgctccttactggcaatttctagctctcttggattgcgacatttggttccggtgttttggtggtttagtcatttagctcattcagttgaaccttaacttataccaactttcttgttctttctttctttcttttttgagaacttatgccaacttgacttgtagcctccacgaagacaatcccttcccggtaacatgtaaattttgagaccgctgccgtgcactaatcattttccccctgttcataatacagtctatgcagatgtaattaacagaaattcttggttgtgactggttttagcaaaaaaataaaaaaaaaa

SEQ ID NO: 17790 - DNA, 687 bp, Setaria italica
  Peptide Sequence Number=SeqID_83764
tgattggacggttcatccaggcgaagaggcagagaggtgatcatggagtcaaagcacaaggggatggctggttgctgactgttgctctgattgagggaaccaacctggcagcaaccaagtcatctggctactctgatccatatgttgtatttacatgcaatggaaagacaaaggcaagttcaattaagtttcacacccttgagcctcaatggaatgaaatttttgagtttgatgccatggaagatcctccctcagtgatggaaataaacgtgtatgatttcgatggacccttcgatgaagttgcttgccttggtcatgctgaagtgaatttcttgaaatataatatatccgagcttgccgacatttggattcctctgaagggaaagctggctcaagcatgtcagtcaaaattacatttgagaatattcttgaacaatacaaggggtactcaagttgtgaaggattacctggacaaaatggagaaagaagttggcaaaaagattgctgtgaggtctcctcatgcaaatttagcattccagaaaatcttttctttgccagcagaagaatttcttatcaatgactttacttgtcacttaaagaggaaaatgctaacacagggtcgcctttttctatccccaagaatatttgggttttacacaaacctttttggtcaacaaaaacaaaatt

SEQ ID NO: 17791 - DNA, 758 bp, Setaria italica
  Peptide Sequence Number=SeqID_83765
agtgtgatgtgcgtggcggctaatctagaaaggacagaggagtataggacatgaacaaagatttgctaagcttcagttccgtggtgaatgtggctgcagccaccagtgtcgtgaaggacatgaaccgtgcttgtagttcagtggtacaaacaaagcaagaatgcagtgagccaatggggcagttaattagacaagcatatctatgggtatcattatcgtgaatccatggagatgacaggagcttggggatgggttcattatacaaggcaaagccctggggaaagtacagtcaagttcgctgtgaataagtcaccaattgatcaatgtcatctgctggtcaaaattgaatggtttatgggtaactttccgctgggttccacctaaatacctgttgcacaggatacaaccttttccgactagtatataaaaaaaatgaacatttgaaacagtgaaaactataggagaacataattaacctaatagtctagcaatgcaactatttctagggtaaatgttgtgccagatctaccattgcttgtccacaaaatgtctagagatacataactaagagttgtctatactctgtagttatagagtatcactatctcatctcagatctcaccccccaaaactgctgcatatttactttcttcagatcaacatatgctttattcatgcatactgccaattaacatgcttagttcagttcagatgttgtgtatgtatatccatgagaacgggagttgagggactatcct

SEQ ID NO: 17792 - DNA, 1171 bp, Setaria italica
  Peptide Sequence Number=SeqID_83766
gtcgtcggcatgcggcccatggcgtaggggtggtacatgacgcgcgcgccgccggacacgtaggtgccgtcggggagcacgtcggcggcggcgcagaacttggagtcgaactgcacgggcgggaacaggcgcatgttctcgtagagcaccgcgtgggtgtagtgcaggcccttgaggtgctcgtaggtgaccggcgtcgagtcgtcgccggcctccgcgcgcatggccgccgccacgtcggggttcttggacaggagcatgaagagcatggtgagcgcggaggacaccgtgtcgcgcccggcgaggaggaagctgaccacgatgtcgcggaggtacttgtcgtcgacggcgtgcgcgtcgccggcggaggccatgaaccgggacaggaggtcgtggctgttggcgaagccaagcttccggcgctcccggatcatcgccgccgccagctcgtcgacgagcttgatggccttcttgagctccctctcggacccgatgttgagcaggcgcttcatcctccacagcagcggcgacgccgccgcgccgcgcatggcgcaaagccgcgtcgctgtgtcgaacgcgtcagccagcttggacatgggcatttcgcgctcgaggcagcccgggtcgaggccgaaggagatcttgcagatggtgtcgaaggcgaagcgccggaacacgtcctggaggtcgacgacggcgcccctgtcggcggcgtcagcgaggaccggcatgaggcgggcctccacctcctgggcgatgatcttgtaggcgtaggagcggacggcgacgctgccgagctcgaggctggccatcttgcgctggtggcgccaggcgtcgccgtcgacgttgaagatgccgccgccgaggaggtcgccgaggagcgcggcgaaggtcttgcccttggggaagttgtcgaagttggtcttgagcatgtactcgacgttggccgggttggcggtgacagtgcagccgaggacgtggacgtggacggtgccggtgggcgactcccggagcaggtgcgcgtaccagtcgccgaggttggtgaagtccctcgcccacgacccggtgaggtaggcccggcagacatggcagctgcaccatggccaccggcgcacgagcaggagcaccacggccagcgccaccaagcagagggagaaggctgagaaggcca

SEQ ID NO: 17793 - DNA, 534 bp, Setaria italica
  Peptide Sequence Number=SeqID_83767
aaaagagagataagaagacagatgagcgtctctcagttattgctcttgaatgtctgacgtggtgtgaggttgatttaatattcgtatgttttttgatgggtattctcgtggagctgttggtgcagaggatttgcccgtgttacttaagctgaaagattggccgcagcatagttccttcgaggagcgacttccacgacataattctgagttcatgtctgctttgccatttcgtgcatacacagaccctaaatatggtcctctcaatctggcagtgaagttgccagaaagtgttataaagccagaccttggtccaaagacttatattgcttatggtgttgcgcaagagttgggaattggtgactctgttaccaagcttcattgtgacatgtctgatgcggtaaatatgcttatactgcttgtgctcgtagcatttgtattaaattttgctccctttttggactgtttatccaactaatggtactgtacattccaacattctacttatggaactttttcttaacactaaaaaaaaaa

SEQ ID NO: 17794 - DNA, 434 bp, Setaria italica
  Peptide Sequence Number=SeqID_83768
taggggcaaacagactgatcaaagctatgaagatcatatgaatgtccctttttctaaagggaaatcagaagttgctctctgcgcaactaacgggggagagaagttgggaaatggtttcagcagtgaagataaatttgagtctcccaagtgatgcagaggaaaatttcaaacccaaaattgaaatatctcttgaaccaaaagatgataaagccccttttgtagaggggaaccagtcagagggtggtgcattgtgggatatcttcagatgggaagatgtcagtaaactacatgattatctaatgaagcatgcaaaggagttcagtcattgtaattacgaaccggaggagcaatataaacaaaaacatggaggatgaggaagagcctaaacaagagatggaggaggatgaggagcctaaacaagaaacggaggagga

SEQ ID NO: 17795 - DNA, 477 bp, Setaria italica
  Peptide Sequence Number=SeqID_83769
acccatcgttcgtcttgtcgtacataccgcctccaccacaccacaaccatcatcatcaccaccacattggccacagcatagttcctttgaggagcgactgccacgacataattctgagttcatgtctgctttgccatttcgtgcatacacagaccctaaatatggtcctctcaatctggcagtgaagttgccagaaagtgttataaagccagaccttggtccaaagacttatattgcttatggtgttgcccaagagttgggaattggtgactctgttaccaagcttcattgtgacatgtctgatgcggtcaatatcctcacgcatactgatgaaataaagctcaaagtcaaaaggattaaagcaattgagaaaaagagggagagggaggaggagcagcgtaaacaaaaagatggaggaggatgaggagcctcctaaacaagagatggaggaggatgaggaggagcccaaacaagaga

SEQ ID NO: 17796 - DNA, 644 bp, Setaria italica
  Peptide Sequence Number=SeqID_83770
cagaaaggctgacaaatgtagtgtatctgaagaagataaattaaattctctatgcatattgtgcgcttttgctcccttggctcaaagaatttcatcaagagcagatgctagagaaaagtgttgaggcctcaatcagagggattgattcatgtaaaatggaggttcctctgtccgagtgtggaagtgatgaacggatatactgcaacaactgcaggacatctattgttgacttccaccgaagctgcaacaaatgttcctatgatatctgcctcagctgctgccgtgagctttgtcaaggccttaatccaattggtgatgtcaacagtgataaggttactagtctacctgatgctggaggcaaggaagatttgcaactaggaagtagtcattgcaaaggtgcaagtcaactagtcaagagccttctgatggacataatgatattttaatagataatgcagttccgtctgaagaccgcaatcctagtttgagatgatggagggtaaataacaacgggaccatacctcgcccgccgaatgaatttggcggttgtggaagttcccttcttgaactcaagtgcttgtttggggaaaagtttattgctgacttactggagaaagctaaatcaccacccaactccagcactt

SEQ ID NO: 17797 - DNA, 444 bp, Setaria italica
  Peptide Sequence Number=SeqID_83771
agaacagacagaggcggaatgttccagcagtacaggagcaggaacctgagaagaaacgaaagagtgataaggattcaaatatgtgccatcagtgccagaggaacgatagtggaagagttgtacggtgccagggctgtatcaaacgagaaaagaaattcagatactgtgtgaagtgcattaagcgctggtttgtgcccttctaaaagcatttgtattgatcacctgagattgcatatgtttgacagttgcttttgagcagttattattttggattatctaatccctagttttgtagtatgtatgttactttcagccaccatattggagcctatgtaaacttatatgtagagtttgctattatgatttcactatttgttttggcatgaataaatcaggtatccacatttgtctagaggatgattttgcgacaaattgcccagtttg

SEQ ID NO: 17798 - DNA, 3042 bp, Setaria italica
  Peptide Sequence Number=SeqID_83772
ttcgtattcgtctgatgccgcccaagcgcaagcgcggcggcggccgcgggaggcccaggaaggaggacaaggacgccgcaccggccgccgactccgaccccaccgccgccgaggaaaacggtgaaaacaggggcgacgaagagatgcctgagccacatgattctgcaaaggaaaatggcgagggagatcccaatggggatatgttgcagtcttgtgctgaggagaatggcgtggaaggggtagctgaggtctcaaaaccctccaaaaggcgcaggaaggatcctgttgcggatccatcttctcttgagtttagtggttccgggcgacttcgacagaggcggaatgttgcagcagtccaggagcaggaacctgagaagaaacgaaagattgataaggattcaactatgtgccatcagtgccagaggaacgatagtggaagagttgtacggtgccagggctgtatcaaacgagaaaagaaattcagatactgtgtgaagtgcattaagcgctggtatccacatttgtcagaggatgattttgcgacaaattgcccagtttgtcacaaaaattgcaagtgtaagtcttgtctgcgaggagacatatccactgtcggctccaggaatgctaacaagtctcagaaaaaggctgacaaatgtagtgtatctgaagaagataaaattaaattctctatgcgtattgtgcgctttttgctcccttggctcaaagaatttcatcaagagcagatgctagagaaaagtgttgaggcctcaatcagagggattgattcgtgcaaaatggaggttcctctggcgaactgtggaagtgatgaacggatatactgcaacaactgcaggacatctattgttgacttccaccgaagctgcaacaaatgttcctatgatatctgcctcagctgctgccgtgagcttcgtcaaggccttaatccagttggtgatgtcagcagtgacaaggttactagtctacctgatgctggaggcaaggaagattcgcagcagggaggtagtcattgcaaagttacaagccaagagccttctgatggacagaatgatattttaataaataatgcagttccgtctgaagactgcaatcctagtttgagacggtggagggtaaatagcaatgggaccataccttgcccgccgaatgaatttggcggttgtggaagttcccttcttgaactcaagtgcttgtttggggaaaagtttattgctgacttactggagaaagctaaatcactggtcaatgatgtaacagtgctggagttgggcggttcaaactgttcctgcttcactgaatccagtggaataaacaatggaacatcacgtaaatcagcttgtagagagaattcccatgataaccacatatattgtccaactgctagagatgttcaaaatgaaagtttggaacatttccaggagcactggttgaagggtcagcctgttattgtccgtgatacacttgcattgacttctggtttgagctgggaaccaatggttatgtggcgggccttaagagaaaagagagataagaagacagatgagcgtctctcagttattgctcttgaatgtctgacgtggtgtgaggttgattttaatattcgtatgttttttgatgggtattctcgcggagctgttggtgcagaggatttgcccgtgttacttaagctgaaagattggccacagcatagttcctttgaggagcgactgccacgacataattctgagttcatgtctgctttgccatttcgtgcatacacagaccctaaatatggtcctctcaatctggcagtgaagttgccagaaagtgttataaagccagaccttggtccaaagacttatattgcttatggtgttgcccaagagttgggaattggtgactctgttaccaagcttcattgtgacatgtctgatgcggtcaatatcctcacgcatactgatgaaataaagctcaaagtcaaaaggattaaagcaattgagaaaaagaaggagagtttaaagaaaaaggaagagggtggtagtcaaggctcacaaacagatcttgaatcgaccattgagccaagacgtaaaggtttgagaagtggctcaaacattcagcagccagcactagatgttgcttcagagcaggaggaaattgttcaaaaatctgcagttgctgttgaagctgagggaaacttgaagaatgcaaatggacaacagactgatcaaagttatgaagatcatatgaatgtccctttttctaaagggaaatcagaagttgctctcagcgcaactaatgggggagagaagttgggaaatggtttcagccgtgaagataaaattgagtctccaagtgacgcagaggaaaattttgaaccaaaggtgggtaaaattgccatatctcttgagccaaaagatgatgcagccccgtttgctgaggggaaccagtcagagggtggtgcattgtgggatatcttcagacgggaagatgtcagtaaactacatgattatctgatgaagcatgcaaaggagttcaggcattgtaattatgaaccggtggtgcaggttgctcatcctatacatgatcaatgcttttatcttacaaatgagcacaagagaaagcttaaggaagaatatggaattgaaccctggacatttgaacagaaacttggtgaggcagtatttatcccagctggatgtcctcaccaagtcagaaatttgaagtcatgtataaaggtcgcacttgactttgtttctccggaaaatgtgcgagagtgcatcaggttgacagaagaattccgtctgcttccaaaggggcatagggtgaacgaagacaaactagaggttaagaagatagctctttatgcgctgaaccaatccattaaggacatcactgaaaaggattgcgaggaaagcgaaaagaacaaagctgaaggtgaggagcagggtgaacaaaagagcagcagcagtgtaaacaggagaggcagagggagagggagaggcagagggaggagagggagaggggagaggggaggaggaagcaagg

SEQ ID NO: 17799 - DNA, 411 bp, Setaria italica
  Peptide Sequence Number=SeqID_83773
gtttatcaaaaaaaggtaaaatccatggttggactctatggcgatatgcctggacttgctcagaaaccatattcagttttggtataatcagatggggtgcacttaaagtcactcccttcagataccgtcctaataggagtcatcacagcaatcatccatagacaacctacaataatcaaaatattacagaacaatcacaagtttcaaagacggaaaggatcttaaggacaaacaatgatcagattgaaaaaatggttttgctgagagactattcagttttggatgtaaacaagcaaggaaagcgaatccaactcactcagacaccatccttgtacaagtcatcacagcacacaattgttgtaaaaagaaacagcttgtgttcacacatacacatcatgaaaccaaaaagat

SEQ ID NO: 17800 - DNA, 607 bp, Setaria italica
  Peptide Sequence Number=SeqID_83774
gttttttttttttttattgaaccaaattcaaatttaattataacacagttgtcaactcaggtttaaaagaaattgatgcaaggtccacaagtgtgtaacagatgctattttttcacaacggactagattaatatgttctagttccaaaccaccattacatgtcattagacaagacactaaatctggaccaacaagtgctactgatgaacaaccattctaagagtaggctatttcacttatacaaatagcccacaaaatgctattgttagcctgtccaaaatgctataattaggctacaaaatactatgtcaaccatctatccagcttgcaagtactagaagaacagatcctggtcaagaagattatcaacttcacaaattggagctgtcaagatttgggtaaaattgacaatgatattgtactcttgaaggtccagatttgctcctttattgctgtcaccattctccacttgcgctaggggttgcacatcatcactttttttttgttgctttgcttgtcgtcttgaattctttgattgaacctcctttttcttgaatttgtagcagttagcaagcttctttgctgtacattagtgtcagctattttc

SEQ ID NO: 17801 - DNA, 352 bp, Setaria italica
  Peptide Sequence Number=SeqID_83775
tcggcgcccgggtcgccggtgttcgatccggaaatactggacgcgttccggaaggcgctcgacgagctgacgcccgactcgcctctccctaatttcgtcaaacgcggcggagacggcttcgagaagcgcgagattcagatgttcccgggcatcgtgcgcgcgcgggtcagcctgctccaggaaaagatcaacgccaagacgaagctagccaagaaggcctcgccgccgccggagagcgcggggcgggtcgtggtgtacctcaccagcctccgtgggatccggcagacgtacgaggactgctggtccacgagcgcgatcctgcgcagctacggcgtgcgcgtcgacgagcgcg

SEQ ID NO: 17802 - DNA, 1333 bp, Setaria italica
  Peptide Sequence Number=SeqID_83776
tttggcaacaatttgtgaggagctgctcagtatctctttatcaaaggaactccagtgtagtaattggtcatgccgccccttgagtgaagggcaaatacaatatgctgcatcggatgcctactacttgctagacatatttgatctgttccaacaaaagataacaatggaaggaaaatgttcatctacaacggaactaacttcagataggcattgctcatcaagtgtcatagaatgctcatcttctggatatgacatttgctctggtggttacttgatgtccatagtaactaagtacagtgagaagatcttgttgacggaatctgatacaaaaccacggtcctcaagacggaaagaaaaaacgaagcttcctaataatgctaaatgcaaggataaggtggattgctgtactgaatggcagggtccccctccatgggatccttccattggcggggatgggtacccgaagttcttgtgtgatgtgatgattgagggcctagctaagcatttgcgttgtgttggaatagatgctgccattccatcttcaaagaaacctgaaccaagggagctattaaatcaaacatacaaggaaggaagaattttactaacacgggatgtcaagctcttgaaatatcagtatttagcgagtaaccaggtatacagagtgaaaagcctgcttaaacatgatcaactagctgaggtaattaataccttccagttaaagatctccgaggaccaacttatgtcaaggtgtacaaagtgtaatggtagttttattcagaaaccactcacccttgaggaagctgttgaagcctcaaaaggtttccaggttattccctcgtgcttgttcaaccgaaatcttgagttctggaagtgcacagattgcaatcaactctattgggagggaactcaataccacaatgcagttcagaagtttttgtcagtctgcaacatcagtgactaagcagttggccttcttgtgtctgtaacctactgagacttcatcacctctcggtgagagagaactggataatcatctgaatctgatcgttggcatccaattgcgtgcgatgaagcagacctcctattgtagtggttgtttgtccctgagtcgttgtaaatagccaaacatgtttcagttattgccttactgcaactattttgaaacgtgttccttttgttttatacagaaatagagacaaaagatgggatacccagtacagtatctctgttcaatttccctactttgccagcctgatccaacatgtaccgtgaaaattcagaaggtgaaattacaccaaatataacatcctttggcactaattaaaaaaaaaaa

SEQ ID NO: 17803 - DNA, 732 bp, Setaria italica
  Peptide Sequence Number=SeqID_83777
agaagaagagacggaagagaggaaaagggccaaagcccagaagattcggcggcgccggcgctccctctctccttgcattagaagagcacacgaagccacacccaaaggaatccgccacctgcagatctcagacatgccacgacggaaggggaatcgacaaggtcatagaggacgttggtcggattcctacccgcaaaaaagaaaaattgtgggtcggattcctcagaagattctgatggtcctcctcagtctgtatttgtcaaatatgattcagacaatgcagcggataccaaagccgaacataaatactttggggctgtgtttagcatttgcaaatccattgtatccctcgcctctaccagtgatggaaggcatctgtatcttgctcagggacagtggttgatcatgtggggtcagaaacgtggatacttacctctgctactttggtcagaaaacctggaactcagtatgaggcgtataaagatggtgaagttaagattaaagtggttctgcataatgaagaaattgctgaaggtaccctagcactgtgccatttgcattataatctcgccatcgtgaagattatatctccaatagatattcctgcagtggaactcagggacacccctgaatgttcttccatgcagcctaggcctgtagttgctctaggccgcaatatctggtcagaatttctgatgagaaatggggagctgatccgtgcaaattgtgaat

SEQ ID NO: 17804 - DNA, 522 bp, Setaria italica
  misc_feature (516)..(522): n is a, c, g, or t
  Peptide Sequence Number=SeqID_83778
tcagctcactctgggcggcgcgcccgcgggagccggcgtaacgtgcgctatgggcgggcgcaggcggcgacggcgaagaggaagcggcattgacaagggcacgtgcgcgcgcggttggcgtggctggcgcccggatcggccggcgtaggaagaggccaagacgggctgcgtcaggggctcggctcgtccagctctgcatctcgtacgggcaagggatgtgtttgttctgaatgaaatctgaatcttctgatggttacagtacagcagtaggatttggatttggttggcaaatcttgaaatttacaagtgtaaatagagtatacatagttgtttggaactttggataggagtataggacatgcttgtgagactattacacattgtctctctcttcctgtaactactgtcatttgtacggagataatgtgaaaatgttgatgaacaatctactcacagtggacgataaccggaattttgatctccaaacaaggatttggttgtgaaccaaaaaaaaannnnnnn

SEQ ID NO: 17805 - DNA, 364 bp, Setaria italica
  Peptide Sequence Number=SeqID_83779
gacccgcccccttcctcttcttcctccggcggccactaatcgcccgccgctacgacttggaacttggaccccttccccttccttcgcttccgttccatttccccgctcgcccacctcaattatccagcaggcaccaccgcggacctcccgttccgacttctccaccacccaaccccccaccccacatcgatctttcttttcttccgttccgtgtgtggcgcggcatctcccccgtggagtacaagagtctctgcggattctcgcgagcttgcgagtcaacctagactctctccggtcaggtttgctggctctgcctgccgctgacccggaggaggaggagccaggagggaagagcgcgcggccg

SEQ ID NO: 17806 - DNA, 1178 bp, Setaria italica
  Peptide Sequence Number=SeqID_83780
cgccacgcacgaacgcgccaggcaccacatcgcccgccaccactaagctccgctccgcagctccatccaagatcgacgcgacgatgggattccccgtggggtactcggagatgctgctcccgcgcgtgctgctccaggtcctgctcctcctggggcacctccaccgcttcctcctctgggccttccacgccgtggggctcggcgacctcatcgacctcggctgcaacaattacccgctgccagcctccgcggcggcggcggtgcaggagcagcccgggcgcgacgcggtcctcgcgccgctgcagcaccggcggccggagttcaggaccgtcccggcggtgcacatcgaggaggcgctccccgtggtgcggttcgaggagctggccggcacggcctgcggtggcggcgactgcgcggtgtgcctgagcggcatcggcgccggcgacgaggtgcggcggctcagcaactgccgacacgccttccaccggggctgcctcgaccactggatggcacacgaccagcgcacctgcccgctctgccgcgcgccgctcatccccggagccgccggcgccgccgccggggacccctggggcgcctccgccgccgactacgacatgtcatacccgtcgtccctgccgtccacgccgctgctgacggtgcccaccccgacgctgctgcggccgcacgagctgctgctcaacggcctgggcggcttccagtgagccgctgcccctgcgcgcgtggctggcaggccacgcgaaaccgtggcgaggcaaaccgcgtcctcatgtgcggcccacgccggccggtcggtcagaagggtgaccgccgccaaagctgctcaaccaccactcgagtctgcagcagtagcagtggagcacacggttggcctcgtgcccctcggtcttcgacggcctcggccgccggcgaagggcgaaaccaacggcaaaggagcccgccccggtttttacagcggctccccaaggggatagaaaaaaaagtaactaaaaaagaaagagaaaattagtaggaaattagtcaagtagattgttgtgtagcccgattccatcttcaagtccgcggagttgcgaatctttttgcagatgaaatcaaatttgctttacaagaactccggatcccgtgcagttcttgctccatttggaccaaaaaaaaaaaaa

SEQ ID NO: 17807 - DNA, 787 bp, Setaria italica
  Peptide Sequence Number=SeqID_83781
tagtctaggcccatcttcaggtgtatcgacatcagtgtcagcacctgtttcatcgagtacatcagtaactgaatcatcaggaagccaattgccaaagttatcctccatttctgcttctatgttttctgtgggtttaactcccccatctgtgagtccttcgatttctgcagttgaaccctccatgcttgtgtcgcaaggcataccttctttggtgaacagtaagccagtagctctacccgattccactgtgccatctgtctccagtgataagcctgtgagtgtacctgctgcttcagtgccaacctatctaccttcctctcagtcaccttctgctaatgatgcatcgccagtcaatgttgcagagcaagttacattggtaactcctggtcaacttctgccaactgcttcctccacagttatttcatctcaggcattgcaaactgcctctcctatggttccatcctccaaggttgcctctacagttccatcctctgaggcaacctcctctgtggttccgtcctctcaggctacttcgtctatagctacaccctcgcaggttgcttcttcatctgttctttcacaagatgtgcaagtgataagtgaaactaaagcagctaaacagcgtgaatggaaggcaaaacaacctgcggttgctccatctggaaataaggagcccctattgccagctccaaagcctgtacttgagaagcctattggagcttcctcatatgttcagtacaacaacagaggccgaggaagaggaagaggtggcagaggaaatgggcaa

SEQ ID NO: 17808 - DNA, 2329 bp, Setaria italica
  Peptide Sequence Number=SeqID_83782
aattagcgaagggctttaaaaaataaaggggaaaaatttaagggtgagagaaagaaaaaaaaaacaagcgaagagggagccggggatcgaaaccctaggcgcggtcggcggcgatggcggcggcggcggcggcggcgccggagtcgtacatcggtagcgtgataagcctcacgtccaagagcgagatccggtacgagggcgtcctctacaccatcaacaccgaggagtccaacatcgggctcaggaacgttcgctcatttggaactgaaggccgtaagaaagatggccaacagattcctgccagtgacaagatatatgagtacatactctttcgaggaagtgatataaaggatttgcaagtcaaatcctctccaccagctcaactggcaactttacacaatgatcctgcgattattcagtcacattatcctcatccagccttgtcatctacaagcttgccttctgctgcaagcacaacagcagctgatgctacttcacacaatgctccgtctgcaattcggatgccaccaccatttcaagggaatttgccaccttaccaacctggcgcgagcttacagtcatggaactcgtcacctatgccatcgtcagcaaatggcgccggcctaacaatgccaccaatgtactggccaggatattacacaccaccaactgggtttcctcatcttcagccaccaccctttcttcggccaccacacagtttaacagttcctagacctttgcagcctcctgtccaatatcctggacttaatggatctgtaccagctggctttccaagtatgccagagcttccttcttttctccaacctggtaatagtaatagtaatagtctaggcccatcttcaggtgtatcgacatcagtgtcagcacctgtttcatcgagtacatcagtaactgaatcatcaggaagccaattgccaaagttatcctccatttctgcttctatgttttctgtgggtctaaccaacctcctctgtggttccgtcctctcaggctacttcgtctatagctacaccctcgcaggttgcttcttcatctgttctttcacaagatgtgcaagtgataagtgaaactaaagcagctaaacagcgtgaatggaaggcaaaacaacctgcggttgctccatctggaaataaggagcccctattgccagctccaaagcctgtacttgagaagcctattggagcttcctcatatgttcagtacaacaacagaggccgaggaagaggaagaggtggcagaggaaatgggcaatcgcgtcccataaccaagttcacagaggacttcgatttcatggcaatgaatgagaagtttaacaaagatgaagtatggggccatcttggtaaaagtacaggacagttaaatgatgatctaaatgattatgaagatgttctagaagatgaaatatctcctagaaagccagaagctaagcctgtgtatgttaaagatgatttctttgattctctctcgtgcaacacaattgacaatggagggaggaatggaagaattaaattctctgagcagagaaaaatagacaccgagacctttggtgactcggcaaggcatcggccaatgggcatgcgaggagggaggggcccccgtggtggtggtcctcgtggtcgtggctattatggtagaggatatggatatatgggtaggggacgtggctactcttacccaaatcaccaatcatgatacaaaagatggatatgctattcagtgcctaggctagaagcacatgaatgaggtgaagaaatgacctatttgcttggaaacccgagatcgatcacaagtcccgtctcggctgttggaagagtgcctattaattgtaagatatggactatctttcagctatagctgaaaatgcggtaatagtttggtggccgatttgataagaatcggtgtcacccttgaatcaaaggcaggttgaatgcatatctgctctgttgccagtgtcgattcccttgggagataaataggaccatgataaatgcgctgttggatgttcttgttgagctttcttagagctcaagacattgtcatatatgttgcaggaacatggtgctcctgatgggagtgcttaagttcaatgtgtgctagtcagtagtacctctggaaatctgcgatacaaaatactatgcacagatttgtgtaccttacaattagttgtattgtgcactggtaacatggttttatgtcgttctttggatttcatggcttggtctagttctgtgtgtagccatttgctctggacatatcttacaattatttgtatcgtgcactgtgctttagaatttatttttaacagaac

SEQ ID NO: 17809 - DNA, 769 bp, Setaria italica
  misc_feature (1)..(77): n is a, c, g, or t
  Peptide Sequence Number=SeqID_83783
nnnnnnnnnnnnnnnnnnnnnnnnnnnnnnnnnnnnnnnnnnnnnnnnnnnnnnnnnnnnnnnnnnnnnnnnnnnnncccaagtaaaccattacaatttcatgagataagaagacaaaagttcttacagttaagcacagaactctgtgggcctgaatgcctgagaaacgacaaattgaacacagcgacaagttacaacttttttctggactacacgtaacgacatgttaaccacacactaaagcgtaacatccactgacgtacaacagtacgaggttgagccttcacatgattagccctctcgtgagcataattacagctaaaaagtagcgtcacacggtaagtagctgagaaatcaacaccggagaggacacgggcgcggcctactccgacctgacgattgactgtccgttgcgcaatcgtgtcacgggcccacgcggacccactcgtaccggccgtccatgggagcgtccttgacgacgtcatagttgtacttggccgcgaagcgccgggccatgctgctctccgcggcggcgaggaacgcctccacctcttcctgcggcggcggcctcgctctctttgccttcttcggcatgcaggtggccgcaatgtcgccgtcgcgcttgctgcagctggacaccgccatcaccgtggcagcggccgcggccatgcttttcttcttcgtcgtcctcggctcctcgctcctgttgtttacttcacgagatcctctcctccctcgcgcctgtggcctgtgggggctgtgggcgtag

SEQ ID NO: 17810 - DNA, 446 bp, Setaria italica
  Peptide Sequence Number=SeqID_83784
cccgcgccagcgcgcccgcccgttgggtagcaccggtggcgcctgccgcattgccatggccagactggccaccatggctccatcccatgcgaaatgccacctgtgccctcgccccgctcctcctttataagcccggcgccagcgctcccccaaaccctaacccctccgccaccattgccgccaccacctccaagtgccgccgccaccttgccagctcgattcgccgccaacggtgagtcttcggtcgattccttgccattggagctccctcgcgacgttgcgcatccgttttgtctcctcacctttcttcctcctccgccgtgtagggtgctcgctggctgcctccatccgccgttccgccaccgcccttggagctccattgcgctgcctcctgctcaccgctaggccgccgctggtgagctccattgccttagggcatggcccca

SEQ ID NO: 17811 - DNA, 587 bp, Setaria italica
  Peptide Sequence Number=SeqID_83785
cttttgcgcaatctccctctccatctttgtcctggcagtcataaactcattggcaggcgcatcagcttcatcattacttaatggagaatttgaaacttcacatataggacttctgaaccctgtatgtttccgctttgcattctgcaatagcccacggggtttcacatcctcatcaatctccatgtaagcaggatgcccgtttccattttgatttgttatattttcaataccagtgctctctttagataaattttctgatttgaacatattcttgtctggtacgccatttgccttcaaggacttactgctatataatgatgacaattttgtttgcatcattaattttgaagccctcacgcttagcttctcattttccaggtcagttgggttttcatcaatgcgtggagccccttgactggcaaactcgtgccatgtagcactcagttgatcagcaggatttgctttggacttctgaagaagagcttggaagtaccttgaacacttgattctttctacattaatgtcaccctgctttgcaaaacacagccaacctccttttgcgacccctcaaaagctgcactgaactc

SEQ ID NO: 17812 - DNA, 256 bp, Setaria italica
  Peptide Sequence Number=SeqID_83786
gcggggtgctactcctctccaatcataatgatttcctttcgggtgagtccaatatttcagttgaaatgggtggtgtcaataaagaagaaatccgcaatttctgagaggatgtatcagagttagccctctttctccactcttcacaaacctagcaagtttgtctggttcgaatgaaatataaatttgtacctgcgttcacgatgaatgatctcatgcaaataaatcggctgtcgatcttccgtaggactgggctaaa

SEQ ID NO: 17813 - DNA, 414 bp, Setaria italica
  Peptide Sequence Number=SeqID_83787
ggttcatcttctccagctacaggtttatcaacgtccattgcttcactgccagctgaatcagctttagacttctttttcttgcttttcttagcagacacatcactcttctcattgcctgtaaaagaaattttgcaataagtttaaattacatttttttagatgaatgcaagcgtttcagggatcaagaaggaagtgtgtatatccttacaatcaccatcctccgaagcggcatttgtaataccctcgatggcagctttcatcacatcaaggttcttacgaggtgcaacaccattgtcatagaagtctagtctctcctcaacttgttcacgcagcttctgtccgaaaatggatgtattcaactctgaataacaatcaatacgtgaagcaatggaacacttgttggccaggtatcga

SEQ ID NO: 17814 - DNA, 323 bp, Setaria italica
  Peptide Sequence Number=SeqID_83788
gcaagcccaaaatcaccaaggcgtatactttgatctctggcaataaatatattggagcacttcacatcacgatgaagaatgtgatttgcatgcaaataatcaagagccatgagaagctgcacaagccacttgcagagtttctcctcagaaaagtggttaccattggctcttttgatagcatcagccatatctcctccctcacagtaacctataacaatgcaaacgtagcaacgagatgaggacaaggcgaaagaaatctgctaaagctggaatgtctttttctgctaaatcagatttgttcaccagaaacttggcaatcttag

SEQ ID NO: 17815 - DNA, 189 bp, Setaria italica
  Peptide Sequence Number=SeqID_83789
agctttctgaaattactacttcctgtcctcatggtgtgatgcccaacaacaatcttccaccttgcagttgatttcttcatagcctcatccaagtcctccagcaaattggctatgtattttcctcgaggtgccactcctctccattccaacggaattactggactcaccctggcaagcatcattatgact

SEQ ID NO: 17816 - DNA, 803 bp, Setaria italica
  Peptide Sequence Number=SeqID_83790
ttccgaccacagaagatgcaaggtcatctgaagtcagtattttgcaagcccaaaatacaccaaggcgtatactttgatctctggcaataaatatattggagcacttcacatcacgatgaagaatgtgatttgcatgcaaataatcaagagccatgagaagctgcacaagccacttgcagagtttctcctcagaaaagtggttaccattggctcttttgatagcatcagccatatctcctccctcacagtaacctataacaatgcaaacgtagcaacccttttccacccatgaatctttgtactccacgataaatggattcctgactgttgcaataagctgcatctcctgatgggcagacctgcgagtgcggtccgtttgtcgcgcaagtcgtatcttcttgagcacatacttcttcttctccaccttgtgcctcaccaaaagtgcagagccaaatgctccttttccaatttgctccaatacctcatattggtccatccttttggagtctgcagctcacaaacagcaagcttatccttgttcttccactgtcctgaaccaccggagagatccagcaccaagcgctccctggtccgaaactcagagggagcaggctccggcggccgacggcgtcacgcgcgcagatctcgccgcatttgatcctagacggcgacgtcggtggcggcgggaagcgcgtggggaagagtagaaaaagatgaggtttttggcgggttcaagcttgctgggagctccctttccaatccaagcccgcccttattatagtccctaaaggcaattgggggtg

SEQ ID NO: 17817 - DNA, 859 bp, Setaria italica
  Peptide Sequence Number=SeqID_83791
gaccaatactgtcaatagcagcttttcacatcgagatttttacgaggcgcaacacccttgtcatagaattccagtctctcctcaacttgctcacgcaacttttggccaaagacagaggtacttgcctctgagtagcaatcaatgcgtgatgcaatcgagcatttgtttgccaggtagcgagccattctgcctttgttcttggttgtagcacggccaataaaggacgagtggaatatgagaccatacttcggtgtgttccctcgagttttcagtgctctggtggacaataaagagaagtgtaagaggaatattgttgcgactatttgccgaagtttattcatatgggatcagtttaagagaactatttctaaagtcaaattagaattacaaaaacaactgggaaatcataaaaatgtttcaacagcaacctgaaaagtgccttctcagcaccaagtatttgaagagtggaggcagggcacttggcaagatttgaaagactgccagcatgagagattaggcgagctccaacaacttcaccaatcaatgatgttagattcggcgcaatatcattcatcttagtcacaagatattcataaaggttttacggtattcagacaaattcataaccctctgggcaaattgctggacattaatcaaatcaactggtgacagatcctggcctgaaaacaaacaagaacaaacaaatcacatgtgaatttactatgaccactatagtcgaactaaatcaacagtgccatatcgcattacccattgaagcctttgctgcttcaacaatttctttagccttgtccagatcaccaactatatcagccaaagcaggaacatctttctccgccaa

SEQ ID NO: 17818 - DNA, 1372 bp, Setaria italica
  Peptide Sequence Number=SeqID_83792
gcttgcggggtgctaaccgcgatctgattgattttcaggaggcaaattaagcaaatcgcttgccaagtttacacgggatactaccagaatccggagttgctttggggtagtgggggttggacaatacagaggggacatctagcgatgtctgaaactggacgcctttccctcctgctcgccttttgaaatccaaatcaatttcacagtgtggcaatccagagactttgccgtacataattccaaatagaagttttgtacaaatcaatagcttgaccagcctaatcctccaattgatctggtctgcgacagttttcattcttcttgatccagataggcggagggttgtgggtgacccgttttgctcgaggtccactggtacaggaccttcccggagacatcgtaaaagttgaactgagcctgctctcggttcagctggagggacatgaacccttgcccgtcgtagaagaacctgagcttgtccttgtttggctggaacactcctctccatgcttttgaaccgcctccgctagtgaaatactggattgggctgtctctgctgctaatgtgctccaggcagtgatcatgcccattgatgtagaagtcggcgccattttccttgaggacaggaagtagtaatttcagaagctccttggtgtctccatgatcactgacactcctcatggtgtgatgcccaacaacaatcttccaccttgcagttgatttcttcatagcctcatccaagtcctccagcaaattggctatgtattttcctcgaggtgccactcctctccagtcataatgatgcttgccagggtgagtccagtaattccgttggaatggagtggtgtcgacgaagaagaaatccacaatttctgcattaacaatgaatgatctcatgcaaatgaatctgctgtcgatctttcgcaagactgggctaagctgtgcgagcgcattgcccctgtaatcatgatttcccagaactaggtaccacggcttctgtaagctttgtgctgtgtagatatcagtaaacgattcttcaaatgcatgatcatgtacgtccttcaagccattgtcatagaaattgtccccggtggatataacaaagtcgatgtcgagcttctccccaacccttcccatctgctccgcgacccgtgactggttgtgcgtccccttgcgtccccagtccccgacgacgagcaggctgagcgacccgtcgttcttggccgggtggtgctccaaccggggcagcgcgcccgcggccgtgtcgcagcacagcgcggccgccacggccaggaacgccagcgccgcggccgccatggcagcgctgctgccgttcgccataccccggggctcgaagcacgacgaccgagag

SEQ ID NO: 17819 - DNA, 1028 bp, Setaria italica
  Peptide Sequence Number=SeqID_83793
agcgacgacgacataaaccgaacctaggtattccttctccgtggatggatgaactacacgccatacttcagtactagtacatttttctctcagatcacttctccgccgcttatcacaatgccacaatcaaattttacagtgatgtcggatacctgaaccgatctctaatctctcgtggtgatctccatccgactcattcctctgtggcgtagccggacggccggaggtggctcgtttccatcgggctcgaccgcgtatattggtacagctcattcccatcgacgtcataaaaggtgaactcggcttggttttggtcgagctggagggacatgaacccttgcccgtcatagaagaactcaaggttatcttcgttgggctggaacactcctctccatgctttcgaaccgcctccgcttgtgaagtactggatcgggctgtccctgctgctaatgtgctccaggcagtggtcgtgcccattgatgtagaagtcgacgccgttggcctggaggaccggaagaagtagctgcagaagctccttggtgtcaccatgatcactgacactcctcatggtatgatgtcccacggcaatcttccacgttgcagttgatttcttcatggcctcgtccaaatccttcaacaaattggctaagtatttttctcgaggcgccacttctctccaatcataatgatcatctttagggtgagtccagtacttcagttgaaatggagtcgtgtcaacaaagaagaaatccacaatttctgcgttaacaataaacgacctcatgcaaatgaaccggctgtcaatcttttgcaggactgggctgagctgtgcaagcacatcacccctgtagtcatggtttcccagaacgaggtaccagggcttttgcaggctcttcgccgtgtagatgtcggtgaaggattgctcgaacgcctggtcatctgtgcccgtcaggccgttctcgtagaagttgtcgccggtggatatgacgaagtcgatgtcgagctgctcaccgactttcccatctaca

SEQ ID NO: 17820 - DNA, 1711 bp, Setaria italica
  Peptide Sequence Number=SeqID_83794
agagttgcttgggaagcaactgcggctcaggaggggagatgaggtctttgagaaaatattttctaacagcttgcatgctcttcaggtggtgcaattctactactggaaagcacccaagctggcagcaaggacggaacaaagtgccattggttcaagaacagttcgctatccaactatacatcattcaagaggaacagaactaccattaccatgcaatcacacacttgcagaaactatatttggatcatttaacgcttcggagtttactttcgaatggaatgattttgcattagctgttgctctgtgggaaaattattcggaagagttaaagaaacagttgttgacatctctgccatactggctgtccaatggaaccatttttgttgttgaaccctctgagctccagagaactgcaccaatctaatgctacaatggtgatttggatctgcctcattcttcagcgaaatagcttgcagggaggtatgcttttctcaagctccactgggagtaccggtacagtatattcccatcaacgtcgtaaaagatgaagtcagcttggtcctggtgtagctggagggacatgaacccttgcccatcataaaagaacttgaggctatcttcatttggctggaagaatcctctccatgctctggaaccgccaccgcttgtgaagtattggattggactggaacaacagaagcatatacgctatatgggtaagaccacttcacctggtgttttaatattggcatgcatgttgaattctaaattactgtaaaaattcactttgtataaatggatgctaacctgtctctgctgcttatgtgttccaggcagtggtcatgcccattgatgtagaagtcaacgccgttaatcttgaggattggaagaagcagctggagaagctccttggtgtcaccatggtgactgacactcctcatggtatgatggccaacagcaatcttccactttgcggttgatttcttcattgcctcatccaaatccttcagtaagttggttatgtatttctcgcggggtgctactcctctccaatcataatgatttcctttcgggtgagtccaatatttcagttgaaatggggtggtgtcaataaagaagaaatccgcaatttctgcgttcacgatgaatgatctcatgcaaataaatcggctgtcgatcttccgtaggactgggctaaactgcgctaaagcattacccttgtagtcatgatttcccagaacgaggtaccacggcttctgtaagctcttcgccgtgtagatgtctgtgaaggattgctcgaacgcatggtcatccacgcccgtcagcccggtctcgtagaagttgtcgccggtggatacgacgaagtcgatgtcgagctcctccccgaccctgcccatctgctcggcgacccgggactggttgtacatccccttgcggccccagtccccgacgacgagcaggctgagcgacccgtcggtcttggccgggtgctccagccggggcagcgccgccacagcgcacaagagcgcggccgccgcggccaggagggcgagcgccatggcagcgccgcccttcgccatagcgcggcgcacccggagggagcaagaacggagggcaccagttggtagcgcgcgtgcgccgcagcaaagcaagcccacacctcggtcaggtgtcttggcagttgccacaggcaggcagaaggggaaggaag

SEQ ID NO: 17821 - DNA, 1997 bp, Setaria italica
  Peptide Sequence Number=SeqID_83795
aacgttcactaagttgattgctcatggatttaattgtctaggatatagtttgttactgtaagacagtgatcctaattgagccttaactatttatgcttcacttgaggtggcactataaacctcaacagggctacaatatgtgatagtgccacctcaagtgaagcataaatagttaaggctcaattaggatcactgtcttacagtaacaaactatatcctagacaattaaatccatgagcaatcaacttagtgaacgttgaaaagccatagagcaactatagcctatacatcatcatcatccgttttggatttcttcttcttcttcttctttttcccttctgtggttgtcttaggcccaatgtcctctgaagcctcacggttcttctttttcttcttcttcggggtctcatcttgtttgacatcatcagtggccattccttcatcctctggctcctcaagcttgtgcttcttcttctttttcttctcagtttgaggttcatcttctccagctacaggtttatcaacgtccattgcttcactgccagctgaatcagctttagacttctttttcttgcttttcttagcagacacatcactcttctcattgcaatcaccatcctccgaagcggcatttgtaataccctcgatggcagctttcatcacatcaaggttcttacgaggtgcaacaccattgtcatagaagtctagtctctcctcaacttgttcacgcagcttctgtccgaaaatggatgtattcaactctgaataacaatcaatacgtgaagcaatggaacacttgttggccaggtatcgagccattcggcccttgttcctagctgatgcacggccaatgaatgacgagtggaatataaggccatactttggtgtatttccacgagttttcagagctctgaaaagtgccttttcagcaccaagtatctgaagagttgaggcagggcactttgcaagattggacaggctgccagcatgagatattagtcgagctccaacaacttcaccaatcaaagaagtcaggttgggtgcaatatcattcatctttgttaccaaatactcatagagctttttacggtattcggatagattcatgaccttttgggcaaactgttggacattgatcaaatcaactggtgaaatatcctggcccatagatgcctttgctgcttcaacaatttctttcgccttgtcctcatctccagttaaatctgctaaagctggaatgtctttttctgctaaatcagatttgttcaccagaaacttggcaatcttagcataaaggtagttgtcattcacaatttttactagctctggaaaatgccatgaataccactccctcactctcatggagaaggtattgatatccttatcaagtgtgtccaacagaaagattgcttgaatcaccatattatccacacggtttacattgaacttgaccttagccctgctataactatgtcccagacctagctgagccttctccaagtcagatttcttgagttggtcaataaactgatcgaagtgcagccgcactcctcggaggagttcctggacgaactcattgctctggcaggggatccccgtggcctcagagatgtgggaccctaccttgggctccatgacacctagactgtacttcgccttctttcccaccttcaccttgggcaggttgagctccaggaagttcctcagctcatcggtcatgatcccttcggagatggcgttgcactggttgagcgcgtcgacggcagaggagaagggggagaagccggcgagcttgacagtcttgccgaagcgctggaggtccaggacggaagcgcggaccgcgtccacgctctgcccaatctcatcgatgccgtacgcgtggaagagagcgtacgccgacgccgactcgaagagcaggtacaacgccatctcctcgcgccgcgcttcgccggcggcggcggaggagatgctaatgctagggtttaggagaggaaggc

SEQ ID NO: 17822 - DNA, 2119 bp, Setaria italica
  Peptide Sequence Number=SeqID_83796
aaaaagggtttaaccctgatactagctgacagatcacgagtgcattagcctcttcaacaaacaaaaattccacgcagtctactaggattccacaccctcgacgggaaccaaaaccacatatagagaagataggaaaacttcatagtcgagcaggatttcatcgaactctgcatggaccacaacctagatgttcatctctgttttcaacaaatactctgaattcatcaccatacagtaggtaaactactcatcatcctcggccttggacttcttcttctttttcttcttcccttcagtggctgtcttaggttcagcatcctctgaaacttcgcggctcttcttcttcttcttcttgggagtttcgttaacctcagcgtcaccattggcagcgccattctcctgctcctgggtctcctcctctagcttatgcttctttttcttcttcttcttctcggttccaggctcagcttcgccatcagcagcattggagggcttatccaggtccattgcatcaccatcagcctctgtcttggacttctttttcttgcttttcttggcagatgcatcagtcttctcattatcatcatcatcgattgaggttccattgaccatactgtcaatagcagctttcatcacatcgagtatttttacgaggcgcaacacccttgtcatagaattccagtctctcctcaacttgctcacgcaacttttggccaaagacagaggtacttgcctctgagtagcaatcaatgcgtgatgcaatcgagcatttgtttgccaggtagcgagccattctgcctttgttcttggttgtagcacggccaataaaggacgagtggaatatgagaccatacttcggtgtgttccctcgagttttcagtgctctgaaaagtgccttctcagcaccaagtatttgaagagtggaggcagggcacttggcaagatttgaaagactgccagcatgagagattaggcgagctccaacaacttcaccaatcaatgatgttagattcggcgcaatatcattcatcttagtcacaagatattcataaaggtttttacggtattcagacaaattcataaccctctgggcaaattgctggacattaatcaaatcaactggtgacagatcctggcccattgaagcctttgctgcttcaacaatttctttagccttgtccagatcaccaactatatcagccaaagcaggaacatctttctccgccaaatcagatttgttaacaataaatttagcaagcttggcatatatgtagttgtcattgacaatcttgacaagctcagggaagtgccacgagaaccattccctaactctcatggagaaggagttgatgtccttgtcaagagtatccaaaagaaatattgcctgaatcaccatgttgtcaacacgattcacattgaacttcaccttggccctgctgtagctatgccccaggccaagttgggccttctccaagtccgactccttgagctccttaatgaagcggtcgaagtggaggcggacgccgcggagcagctcttggacgaactcgttgctctggcaagggatgccggtgacctctgcgatgtgggagccgacctttggctcgacgacgccaaggctgtacttggccttcttcccctccttgggcttgggcaggttcagctccaggaagctcctcagctcatcggtcatgatcccttcggagatggcgttgcactggttgagcgcgtcgactgcggaggagaaggggttgaaggcggtgagcttgacggccttgccgaagcggtcgaggtccaggacggaggagcgcacagcttccacgctctggccgatctcgtcgatgccatacgcgtggaagaggccgtagccggaggccgactcgaacagcaggtacagcgccatctcgccggcggatggcggcggcggctgctgctggttggggtttgggggcggcctcttccacgcgtatggcatcgacgagatcggccagagcgtggaagctgtgcgctcctccgtcctggacctcgaccgcttcggcaaggccgtcaagctcaccgccttcaaccccttctcctccgcagtcgacgcgctcaaccagtgcaacgccatctccgaagg

SEQ ID NO: 17823 - DNA, 891 bp, Setaria italica
  misc_feature (1)..(31): n is a, c, g, or t
  Peptide Sequence Number=SeqID_83797
nnnnnnnnnnnnnnnnnnnnnnnnnnnnnnntaacaactcttccatcgcaatggcttactgatgtctccaaacgatttgtttttttttgttatttcgagtcataaagatgtgcctttcaagagttgaaggatcaattcacccactacacacaagaaccatgcaaactagtatataattaccgagtcaagcacaatttaccagaagcagcagcactgtactaatcatcatatgtagcagcaaactactatgaatttatatatataatacgcccttacttattacttgatcacctacacataatagagattatgccaccacgctggatggaaggcagcctctggtcgctggcggcggcttcagcgcgggtaggcagcgatctcgacgcccttgttgccgagtgccgacgacgggggcgcctcgtaggcgctgaagaggcggtaagaggagatgagggagaggaggatgaagcagagcacggagccgaaggtgatggccaccgaggtccgagccttgcggcagaagacgccaaacacgccgcacgcctcgctccacgtcacctccttgtcgccgttgtaggccaggtacaggagctccgctgccgccgcgccggcggccaggatcaggtacgtgaacacctggtcgaggaggaagacgacccaggagcgtgacacggtggctggcctgggcacggcggtgtagaaggccgtgacgagggagtaggccgcgcagaggccgttggcgtagacgaggtacttgaagccgccgaggtcggagtaggcgacggtgccgtactcgttggtctgctggtccttgagcatgatggccatggcggccacgcacagccccagcggcgccgcgcgcagcagcgtctccacgggccgcacccgcgc

SEQ ID NO: 17824 - DNA, 448 bp, Setaria italica
  Peptide Sequence Number=SeqID_83798
atttatattgccttgcataatcaataggtatatgctggtaatgctttgatttgtgctataaaataatgtcagtataaataataaataataagtttgtctatgcgcatagtgggttgtgaaataaaagagctcattgaagtattctgaagagtaaataagatccataccatgaatccagtaatgttttgaaggaatatcaaaggaatatggcgctgtgtgcacaattcaatgaagtgggagccctttaatgctgactcggtaaacaaaatgccattgtttccaatgattccaactggttgcccgcatatccttgcaaaaccagtcactaatgttgttccatacaattttttgaactcatcaattgcaccttctgatttgaagcagtcctttgacattcgttcagtaatagcccgtattgttgatggaagtgaatttgatgagttcttct

SEQ ID NO: 17825 - DNA, 347 bp, Setaria italica
  Peptide Sequence Number=SeqID_83799
ttcttatttcttaaacttactaattctaccttactactttccatcaacaatacgggctattactgaacgaatgtcaaaggactgcttcaaatcagaaggtgcaattgagcgaagttcctcgatatcatacaatggttcttggtaatcacaagcagaactttgaatatttgttcctttagcagctaagtgaaggttcttcacaatgtttcgccccagtgcaagcccatgaagttcatcttgtgcaaaatggtctgagactccggataccttacaatgtactgatgctccaccaaggtcctcagcagatatctcctctcctgtagcagcctgcgagagctcgaggaagg

SEQ ID NO: 17826 - DNA, 738 bp, Setaria italica
  Peptide Sequence Number=SeqID_83800
agtgaaggttcttcacaatgtttcgccccagtgcaagcccatgaagttcatcttgtgcaaaatggtctgagactccggataccttacaatgtactgatgctccaccaaggtcctcagcagatatctcctctcctgtagcagcctttacaagtggcgggccggctagaaatatagtcccatttcccttaactattacactctcatccgccattgcaggaatataagccccaccagcggtgcaagaacctaaaactaaggcaatctgagggataccatccgacgacatcttagcttgattgtagaatattcgaccaaaattatcacggtcagggaaaacttcagcctgcctggggagattagcacctccactgtcaacgagatatatgcaaggcaatttacactcagaagcaatttcctgtgcccgcagatgctttttgacagtaagaggatagtatgtgcccccttttgtggttgggtcattggccacaaacatacataatcgtccgtgaacaggtcctatgccagttattataccggctgatggtaatgcttcttcataaacatctgagcctgcaagctgcgagagctcgaggaaggacgctccggggtcgagcaggcggtcgatgcggtcccgcgggagcagcttcccccgcgccgcgttccgcttcaccgcctccgcgcctcccccgcgcatcacctgggagatgcgggcgcgcaggtcggcgcgcaacaccgccg

SEQ ID NO: 17827 - DNA, 792 bp, Setaria italica
  Peptide Sequence Number=SeqID_83801
ctcgcttcaatgtcaaaattaacttttttgtatgaccaattcctgtatgtgtcaacgaacaggaattggtcatacaaaaagttattttgacattgaagcgaggcgaaggattaatgaaacatgcctccactccttgtctctttttgttgttcttttctatttgagagaggacaccagccgcctgaaaaaggttgaacggaagaaacagcaagtgttagtgttgactgttgcagtgttgcttcactctgtttgactttccacattttcttttttcttcacaggttatcttaatctttaatataagtacaattgcatcagtgctagtctttgagactccaacaaaataatctgagatgccagcagagtaacagtttttttaatggaagcagagtagcggttaatgcacctatcatattttttacgccacatcttcaaagactaacaataatgctgccaaatagcaaatgctgccatcttcaatgcgtcaaagtattggcaacgaataccaattattatattacagacattcttaccaggcaatcatatcagtgacaatccaattgtggcaataacaggtgcgagggttcttacctggatgccacccataacagatatcctagcagttggccaaagaaacaaaaagtttgggctatatgcgcgtccgcacattccataattcccagcaccaaaacttccaccaacaattattgtaattttaggaaccttggcgcaggaaactgccatgaccatctttgctccagctttcgcaattccactagcttcagacttcga

SEQ ID NO: 17828 - DNA, 1394 bp, Setaria italica
  Peptide Sequence Number=SeqID_83802
tttttggatttttaaaaccagtcctgtcaataacatttttctctcctggcaaaaccagtcctgtcccgtgccacttatattagaaataaaccaaaaaagatgacgtaaaaccagggtgagaaaatttattcccagagggcagaagtccaatgcacattgtgcgcatggaaagccgttttattatacacggatgtgtattcatatacaccatttacatccggaatacaccgtactttgtgtcttctggaaccggcttcgccgcagcagagaggcagaggctcagaacacgcctggtgtcagcagggtcgatgatcccatcgtcccatagcctagcagtggcgtagtacgggctcgcttctctgtcgtaagcctccgctacctttgctttgaaggcttcttcctcgtccttggtccactccactccttgtctctttttgttgttcttttctatttgagagaggacaccagccgcctggatgccacccataacagatatcctagcagttggccaaagaaacaaaaagtttgggctatatgcgcgtccgcacattccataattcccagcaccaaaacttccaccaacaattattgtaattttaggaaccttggcgcaggaaactgccatgaccatctttgctccagctttcgcaattccactagcttcagacttcgacccgaccatgaatccagtaatgttttgaaggaatatcaaaggaatatggcgctgtgtgcacaattcaatgaagtgggagccctttaatgctgactcggtaaacaaaatgccattgtttccaatgattccaactggttgcccgcatatccttgcaaaaccagtcactaatgttgttccatacaattttttgaactcatcaaattcacttccatcaacaatacgggctattactgaacgaatgtcaaaggactgcttcaaatcagaaggtgcaattgagcgaagttcctcgatatcatacaatggttcttggtaatcacaagcagaactttgaatatttgttcctttagcagctaagtgaaggttcttcacaatgtttcgccccagtgcaagcccatgaagttcatcttgtgcaaaatggtctgagactccggataccttacaatgtactgatgctccaccaaggtcctcagcagatatctcctctcctgtagcagcctttacaagtggcgggccggctagaaatatagtcccatttcccttaactattacactctcatccgccattgcaggaatataagccccaccagcggtgcaagaacctaaaactaaggcaatctgagggataccatccgacgacatcttagcttggtcgaatattctacaacaataccgaccaattagacaaggaaataataaagaccccaaccaagacggtagacaa

SEQ ID NO: 17829 - DNA, 439 bp, Setaria italica
  misc_feature (398)..(398): n is a, c, g, or t
  Peptide Sequence Number=SeqID_83803
gccgttgcacggggagggacgggagcccggaggccgtacgatcgagcccgcaaagcggccgtacgcgcggcgcacgcctctgtcgcgctccgccctgcctttccacgcccgccgtggaggaggcgagccagccagcccagccgctccccctttttcatcttcccccggcgttgccgcgcggggcccactccgccgcgcgtgcgccagccgagcccgccccgagctctgcgccgtcgccatcgcccgccgttgccgtttcgattcacttgttcggttcggagcagaggcgggggccatctatggcggacgcggcgggggtggcggcggcggcgccagggctgcccgtggcggcggggagggacagggacaaggatgaccgccgccgctgggcgtcccgntgcggcttcgccgtcctcgggatcatgagcacgctcctcgt

SEQ ID NO: 17830 - DNA, 471 bp, Setaria italica
  Peptide Sequence Number=SeqID_83804
gaagcagggaggcagaggcggcatgaccatgccaccaccggaaccggacgcgccgccgccgacaaccaacagcaaatcccctcgtccctccgccgccggcaacaacaaccacctcaacaagtccatgtctcatcagccaggccatggcggccatggacaagcatgtggccaccccaatgggcagcagccccaagcagaacagcatcaacttcgccctgccgccgccgccaaccagaagcaggcattcgcttgacaagcagcagcagccagcaaagacgacgatcctccacgagctgcccataagcagcaagcagagcgtcaatcccaacaagctgtccgagaggatcgtcaagtgcctcatctgcatcttcatcaggctgctcaggtcatcacgggtagccgacatggacaagtccggcaacctcgccaccagcttcagcttcaggatcgacaccggcctcacgtcgcccg

SEQ ID NO: 17831 - DNA, 437 bp, Setaria italica
  Peptide Sequence Number=SeqID_83805
tattgctacgtggaactcgttaatggcttccctttgcaagcatggaaaaattaaggaagctagagatgtttttgactcgatcgcaacgaagggccaggagcctgatactgtctcatacctaattctgcttgatgggtacgctactgaaggatgctttgttgatatgacagacctcttcaatttgatgctaggagacggtgttgcacctgacgtccgtattttcaatgtactgatcaagggatatgctaaatgtggaatgctggatcgggctatgattatcttcagtgaaatgaggcatcaaggagcaaaacctgatgcggtaacctatttgacagtcatagctgcacattgcaggatggctaaaatggatgatgctatggaaatatttaatgaaatgattgatcaaggagtagcacccagtatagctacttacagtg

SEQ ID NO: 17832 - DNA, 341 bp, Setaria italica
  Peptide Sequence Number=SeqID_83806
cggagcataaccagtttttctaaacttgcgcatgccttctgttgtatgactgtgcatttatgttacaggagttatttgaaaccatagatgtatgacttagttccctttgatctaaacactagtgtgataggccgagtagctgcaatgcttaaacaggactcggtaaaagtcgagtgatttcctatcactcgcgagttataggagttgtttgttctccttttgctacaactataaggatgatggacggggtagggctctgtgaactattttggtggtcggtggattgccccgtctgtctacttgaaattggactaaaggtaacaaaaaaaaaaaaaaaaaaa

SEQ ID NO: 17833 - DNA, 349 bp, Setaria italica
  Peptide Sequence Number=SeqID_83807
atgcccatcgcagtaccttacaacaactatattccagtcgtagaaatctgaaggtagatgagccagttgtgagctccggagccgaagcctctccgcaggtggtaaccaggcgggctcccatccaagcacaccgcgcccttctcccgagccccggcgacgagggtcaggtcgacgcgctccggggagctcaccgtcagccgtgagcgggagaagacgacaacgaccaggaggagcaggagcaggggcgccgccgcggcgacagccaggccccgtcgacgctgcgggaggaggggggacagcagctcggtcgccatggcctttttgtgcggttggagagtggagaacatgg

SEQ ID NO: 17834 - DNA, 713 bp, Setaria italica
  Peptide Sequence Number=SeqID_83808
ccgccttcgtcaagtcggcgcacccgggctggacgccgtccatgatccgatcggctctcatgaccacagcgacgacgatgaacaacctcgggaagccgctggcgagcagcacgggcgcggcggcgacggggcacgacatgggcgccggggagatgagcccgctgcgcgcgctcagcccgggcctggtgttcgacaccaccacgcacgactacctcaacttcctctgctactacggctacaaggagcagatcgtccgcaaggtctccggcgacgcgcgcttctcctgcccggcgggggcgccctcgccggacctcatcgcgtcgggggtcaactacccgtccatctccgtgccgcgcctccggagggggaggccggccaccgtgacgcgcaccgccatcaacgtgggggccacgaacgcgacgtacgcggccgccgtcgaggcgccgccgggcgtcacggtgcgggtgtcgccggaccggctcgtgttctcgagtaggtggacgacggcgaggtacgaggtgagcttcgacgtggccgccggcgcgggcgtcagcaagggctacgcgcacggcgccgtcacctggtcggacggcgcgcactcggtgcggacgccgttcgcggtcaatgtcctctgatctgattgggtggttgcctggtggcttctttgtttgtttgtttttttggttcgtgtgtgtttggtaacttggttttgg

SEQ ID NO: 17835 - DNA, 266 bp, Setaria italica
  Peptide Sequence Number=SeqID_83809
ggggggggggggggttgtgttaagggggatgggaatgtgcagagcattcgtatatgtgaatgggactaaaatggccgaacaaaaaaatagtgctatcttcaaatccaaaatcctcttcaaccctctatgctctgttcatgtactgtccggttcttgaatcaactagtatatcatcgcctacgttcacaaaagagggaaccgtgacaacagctccagtttccagggtagcaggctttgttcctccttgtgcactatcgcttgccccg

SEQ ID NO: 17836 - DNA, 1040 bp, Setaria italica
  misc_feature (1)..(49): n is a, c, g, or t
  Peptide Sequence Number=SeqID_83810
nnnnnnnnnnnnnnnnnnnnnnnnnnnnnnnnnnnnnnnnnnnnnnnnnttttttttttttttttttggttaggcataactgttctttactcgtgttcttgggtcacagttaatcagtaataatcagagtttgagatatgaaattatgagctgaaggttttgaacataattttccgtttgtctcgtagcgaggatccacttgcaaaggaaatcctgggggcaaaagatgcaagcattcatacatgtgaatggggttaaaatggtcgaacaaaaaactagtgctctcttcaaatccaaaatcctcttcaaccctctatgctctgttcatgtactgtccggttcttgaatcaactagtatatcatcgcctacgttcacaaaagagggcaccgtgacaacagctccagtttccagggttgcgggttttgttcctccttgtacactatcgcttgccccggggtcagtatcagtcacagtcaatctaacggtgatgggcagctcaaaatcaatgatcttcccattccagtacaacaaattgcagtccattccctctttcagccatttttgcttgtcaccgacatctgcttcgtttaaccgactttcttcaaatgttgtcagatccataaacacgaactgggagccatccttgtatgtaaattgcttggtttccttggaaagggatggttcctgtagcgtacttccagcccgaaaggttttctcaactgtgttgccagtgacataattgcgcatttttgtcctgacaaaagcagcaccttttccgggcttgacgtggagaaactctagaactttccatggcgcgccgtcgacctctacgttggtgccaaccctgatgtcattgctggagagagcataaatccgggtgaagaggcgggagcggagggggcgggggcaggagggcaggcgacggagctggagggaggcggcgtggtgatggtggcaggaggggctggcggcgaggtggcggagagaggccattcctttgctgcttccggcgcaggccacgcaggtgggtggatgttgc

SEQ ID NO: 17837 - DNA, 731 bp, Setaria italica
  Peptide Sequence Number=SeqID_83811
aatactcccattgatgttcttcatcactgtatctttcccgcatctaaggttaaagcaaaagccttactgttgcttttggaagcaagtcctatgcatatgaacctttttggcaagatattattggaaacttttaaaaaagacaattctcttctgcaagtcaaggattctgattctaatgcttcatggcctcaagaagatggtgctatacttctattgcctgctgctttatcatgcttgaagtgtcacagtgatgacaatgggcggtgtgccgaattccttgagccagtttcaatcttttattctgaactcctattatgtgataaagggttttcaagctggaaaagctttgttaccaggagcatttttgaggaagattttagtgactttatacccacaccagttaaagatataatgatttatttcagtggcactctcttggggaaatcagttatgatgttgcaccactacttttcttcaaaagaaatgtcgaggaaggaacgcttggacatagttggttcaatttttccagagtcatctgagctattagattctgatgttaacgatattaatccgacttcatgcaagcgtattgtgaaggttactaatgaactgtttgcgaagatatcactaattaggttgttgttatctcctcctagaaaatcattgtccagtgaagtagcttcggagagggagtccaagagattgcacaaagcaaagctcaatttcattag

SEQ ID NO: 17838 - DNA, 900 bp, Setaria italica
  misc_feature (120)..(120): n is a, c, g, or t
  Peptide Sequence Number=SeqID_83812
aggaaaatcatgaattgaaatctgtcgtttaatttcatcaaaaattgaactgctagggaatataatatcttcgtcagtctcatgttaaccaaaatttgctccagctatggaccacagacnttaaaaaatagctcagatcaaatggattttctgaagaaaacattcagattgtgtgcatatactggaatactagttaacagcaatatgttttcaggtctgagtgaagggtaagcatctacacctggccctcggcaaattaaacaaagggattaaatttcctttttgagcgaaagcagtgattagtcaattagattacagataggagcagacacaaaagcagtaaaaggtcacacctttgctttacacgacaagatcgcttcccctgttcaccatcaaatcagagtgcctctaaaaccgtgttcgctactggtagtagagtaggagtactaaataaaagaaaggctaaaattgaaggccatttagctggattgcaggttacccaattaagcttaatcttcattagctaagtaaaccacgtatgcaggaactagttaaaccttggagggtggattggagtcatggagccagaagcaggtacttgttagctcggtcttgcttggctggttcgaattcctcctctagcggctagcgcctggctccggcgcccatcatcttcttgaactcgtcgaagttgacgctgccgtcgccgtcggcgtcgacggagcggatcatccttgagcagtctgcgacggagcacttgtccccaagctggcggagcacgcggtggagctcccgcgcggagatgagcccgttgtggtcggcgtcgtacatgcggaacgcctcccgcagctcggcctccgtggcgtcctcctgcccctccccggcgccggcgccgccgcg

SEQ ID NO: 17839 - DNA, 1420 bp, Setaria italica
  misc_feature (1275)..(1420): n is a, c, g, or t
  Peptide Sequence Number=SeqID_83813
tatatcgcaggaggtggaagcaagaaaaaacgacatcctgaaacatgggtctttgacgttctagaatccaagtggtctgtttgtgtagtgcctcctagttcctcaattactacgaagaaaggtttcagcatggtaccattgtactacagggacaagattgtgcttgttgcttttggaggaaacaaaaaggagccatctgacaaggttgaagtactagtggtgctgcagaacgagcactgtttcagttggcggtctgcacctgaggttgaacccttaatgtatgatgaatctcctccaagctcaagggaacttgctgatcacctcaaccattgtgctcctctgtactctagtggctcagtagcgagaagcagcattgccaccacagcggaaaactcatctgggaggaaatccctccccgattcgctgctacagaactcaaatctcgggagctcatcgctccgaaggcagttccgtcaagaacaggactgcagcctggcccaaaaactgcagaaaccaatcgatgacgacaaatacaaggatgttgatgattgttctgagctaccttccatcacaaaccaaaaaccacgtaatgacactcatcagtccccagatgctgaagctaaagcgagaaagctgggcagaagttcttcagacatcaacaaccatcacgatacaaggataaccaccctggtcaggagaaacatggctttagaagagcagctctcagctgcgctaacgaccaaggacgaagcggaaaagaacctgtctctggtcatcgacagcaaggatgagctggagaagaggctggctgagagggacagagaggtcgaggcactgaaggagaaggtgaccgggctggaactggcgcaagaggagtcgaacaacctctccaacaccgtacacgctgacaatgtgcggctcgagcgtgaggtggcgttcctgaaagccgtcatggatgagacccagaaggagctgcactcaactcgcggagttctagcaggagaacgtgcaagggcgttccagcttcaggttgaagtgttccatctgaagcaacgtgtgcaaacgatggaaggaaggtcacctacaccacgaaagcctcagaacctgtagagtacatgtagaagtgtacagtatttctagcactctgttgtaaattcaatgttgtattaagagtggtattggggccatttgatttgcaatgttaacctatttcgccactgggctcaattgtgtatcattgagtttttatccatccgcgaagatgtttatgcaacnnnnnnnnnnnnnnnnnnnnnnnnnnnnnnnnnnnnnnnnnnnnnnnnnnnnnnnnnnnnnnnnnnnnnnnnnnnnnnnnnnnnnnnnnnnnnnnnnnnnnnnnnnnnnnnnnnnnnnnnnnnnnnnnnnnnnnnnnnnnnnnnnn

SEQ ID NO: 17840 - DNA, 1879 bp, Setaria italica
  misc_feature (1831)..(1879): n is a, c, g, or t
  Peptide Sequence Number=SeqID_83814
gtcctcctcccgtccccccaccccgacgcgcagccagccactcggccagaaccgtgcggagttcacgaagacagagccctcctccgcgaccaccagccacaggaaagccccacgcgtcgacgcgctccgtctgtgtggagcgcacgagcgccggccggcggctagggagcgaggggatcgaggcggctcggccgagtggaggagatggaccgcaaggatgtcggaatcctcgccatggacatctacttcccgcccagctgcgtgcagcaggaagcgctcgaggcccatgacggcgcgagcaaagggaagtacaccattggccttgggcaagattgcatggccttttgcagtgaggtggaggacgtaatctcgatgagcttgacggttgtcaattccctcctgaaaaagtacaaggttgacccgaagcttatcggtcgcttggaggttggaagcgagacggttatagacaaaagtaaatccatcaaaacttggctgatgcaaattttcgaggaaagtggtaatactgacattgaaggagttgactccagcaatgcttgttatggtggaacagcggccctattgaattgcgtgaattgggtcgaaagtaactcctgggatggacgatatggtcttgtcgtttgcacagacagcgcggtttacgcggaaggaccagctcgcccaactgggggtgctgctgctattgctatgctcattggtcctaatgctcctatttcatttgagagcaaatatagagcttctcacatggctcatgtttatgatttctacaagcctgatcttgcaagtgaatacccggtggttgatggtaaactatcccaaacatgctacttgatggccctagactcatgctacagacagttctgcaacaagtatgagaagattgtggggaaacaattctcaatttctgatgcagaatattttgtgttccattctccttacaacaagcttgtgcagaagagttttgctcggctttgctataatgacttcatgcgcaactgcagctctattgatgatgatgctaaagagaagctccagccgttttcaaatctgactggtgaagagagctaccagagtcgcgacttggaaaaggcctcacaacaagtcgcaaagcacttgtatgacatcaaagttcagccatcgactctgcttccaaaacaaattggcaacatgtatactgcatccctctatgcagcgttggcatctgtgctatataacaagcatgatagtctggatggacaaagaattgtgatgttctcttacggcagtggcttgacatccactatgttttcgttgaggctaaacaatggccagcatccgttcagtttatcaaacattgcttccgtgcttggtgttacagagaagcttcagtcaagacatgagacattgcccgaaaagttcattgagacgctgaagctgatggagcataggtacggcgcaaaggatttcgagactaacaaggacacgagcctgctgccgcccggcacgttttacctcacccatgtcgactccatgtaccggaggttctatgaccagaagcctgtagaggaaacagccggtggcaaagccaagtgctgcaacggcttcgcaaatggccactagtgacgtgccgtggactccctatgtcgcctgccttgttgctcatcgactcatcgtgctttgtactctaatatgcttatgcttagaattccaagcctagcgtgtttctgaaataatttattatctgcagctgttctcctagatcagctagtttttgtattttatttatctgactagtgaaatcagtcttgacattcttgtttcttttagttcgttnnnnnnnnnnnnnnnnnnnnnnnnnnnnnnnnnnnnnnnnnnnnnnnnn

SEQ ID NO: 17841 - DNA, 256 bp, Setaria italica
  misc_feature (2)..(2): n is a, c, g, or t
  misc_feature (15)..(15): n is a, c, g, or t
  misc_feature (29)..(29): n is a, c, g, or t
  Peptide Sequence Number=SeqID_83815
tnacctgtacagaanatttgagagccacnccggggacggtatccccgcgccggacggcatgtgacagcgcgaacctccccagggaggcggcccgccagaaggcctgcgtcgccggatcaccgacgacgcgtcgcacgccccagggcgcgcagaaggcggcctcgagcacggcgcggtcggaggccaccgcgtgccacgcgcggcagacgcaggcggaccgcgcgaggtcgatcggcggtagccgctgcagcacaaa

SEQ ID NO: 17842 - DNA, 604 bp, Setaria italica
  Peptide Sequence Number=SeqID_83816
gtcgaagctctgccacaggacggcgccaccgccgtcccggagcacgaagttgccgcctgtccagcagctgcgctacgggggcgccggtgccgctcgtgttcgacggcgccgatgaccagaatacacgcccggagctatcggcgatcaccaggctgccggtggcgttgatggcaaggctagccgtggcgccggtgatcggcgcgtcccggttagcgacccagacgatggtctggggagcgatgcccatgtaccagatgcccaagaacctcgccgtcgagctcgccggggtgaagaagcccaactcgaagaccccgcccgccgaaacaagcgtctcgccatcggctagggaggagttggcagcgatggtatctgccgcggaggcaggggaggagaagaacgtaacgagcagggaagcaaaagcagctgagctaatggcggccgcacgcccgcaaccatggctctgttcggcacaggccggaaaagcgcgacgcactcactgcccaattcccccgtccccccaactatgacgagctacaatttttactcgtcggcacgccggcgagaatccttcgaaccctctcacctcaacctaaccgtaccccca

SEQ ID NO: 17843 - DNA, 561 bp, Setaria italica
  Peptide Sequence Number=SeqID_83817
atgtatagtacggacttgaagctgtggcgtgttccttcaacagcacaaattaatagtgacaaccaccagttcatcaagctacataattcattcggctccatagatgaaatgatgaatatcatcaagaactaaacatacaagaaggtgctaacatataaaaatgcgcactcttcaaccccgaacacaagtcttatctactctaatcacaactctatgaggcctttgatgcagtaggtgcccacaaggaaccagccagtcatcacagcggcgaaagcagcaaggccaatcaggaatgtcatgccgccgaggagggtaccgacggagagcacgaccgcgaacggcaagaaagtcttcaccgcagacgccgtgctcacccagcggcctcgtaagaacatcacagcagctaggctgaccacattccatttctcgtggccggagtaaaacagtcggttcagattgttcacgacaaaggagtgacagttgcaggtgaataggttgtagttcctgttctgaaactcctgcgtgcctttcttcaacgcaccgtcccatgtggcacctcct

SEQ ID NO: 17844 - DNA, 1291 bp, Setaria italica
  Peptide Sequence Number=SeqID_83818
gcggcggggagggcgggcgcggggtgctttgatccgctggcgcctgggctgccgactgccgtgagtcctcggttccgtggcggcggaggccgcgcaattttggaacgcggtggcgtgctcgtgtcgttctttacctagcttggcgtgatccaattctggtcccaactgaaaggcaaggaggtgcgcactgcagaacacaagcgcgcgcttcgtgcttgctaagaaacttctgcagtcatcactccaagctcgtgaggaaagtcaatttgagttttatactttgtactccaatcatgtcggaattcgtcaggagtagatatgataagcaagaagattttcaagttctgttgagcaagaaagatcctggagaatcacctcaacacaagcattacctgtggatggcacactggaccaaggcaagcagcagtgcagaaccccaaaataacaatatcagcaaccctttggaggatatcaacaagggcagtacaacaaaacacagtgagactttgccttatgaattcatgaaatctacagtagctgaaaggctcatggtaggagtaagccgtggaagtgcctccatgcagcatgcccaacaattcaattctagcatgtggggtgtggcacatcatgtttgcaatgaattgggagcaaagaataatgaacaggttgatgagtcttttgaaaaatccatgaagaagaatgctgtgaacttacgtgctagggaagttgtgtcagaagcattttctgttcacaagctttcagagttaccattggattttcagaaacttgggagctcagaggatccaagttcagattggagccactttcctatgttcgaaattaatcgaaagattgacaacatactcaacccaaaacgaaggtctgaacttggtcctgcatctctgaatctaaatatgtctacatctcatgttatggcactatcatcacaggaatatatgatgaactcacaacgaatagctgatgataatatggaaatgtgcaaatctgcaagaggctttgcatctcgcatagaagatcctgctggccttaactcagatccttcagggaaaaagttaaaaagaaaattattggatacaatgtcatgttcttgcagcaagaatgacaacgactcatcagattgtccaatagatgatcagcatacaagccaccattttgcaaaagcaaagcaagagctaccctgtgcatctaatgaaaaaaagttcatgtttgcagcaaacaatgacagccgaattgtttcaagtgcgttccacaatctggagacaagaagatc

SEQ ID NO: 17845 - DNA, 316 bp, Setaria italica
  misc_feature (273)..(273): n is a, c, g, or t
  misc_feature (285)..(285): n is a, c, g, or t
  Peptide Sequence Number=SeqID_83819
atccgagatcggcgtctcgggttcgattcggcggtggcgttttgcgttgggggggaggccttggagtatgtggtctgtacatgacacagggtttatgtgttgacaccgtgaaaatgatcagtgatccatgatcgatcacatgaaagttttccaagacttgactatgcgtcatgactaacctagaagatggtcttctaatttgctgaccacagggatgaaatgtgtaggcgcgaatttgctgctgtttggtcaaattttatttggcaaaacggnggctgatttggngaactttgtcatgtgattattgaagtgccaa

SEQ ID NO: 17846 - DNA, 606 bp, Setaria italica
  Peptide Sequence Number=SeqID_83820
cgatgcggcttctctccggcgtcctcgcttcctcgtccgcgcttctctccggcgtcctcgcttcctcgtccgcgcttctctccggcgtcctcggctccgcgtcggccgcgttcgaccgcctcggattctcgcgcgtatccttcggccgggcgaacccctcaagcatgccggcccccgcttgtaaagccgctgctgcctcttcgtctgccgctgccgacgccgacgccggcgcccagaaaccgtggctcttcgtcggtctggggaaccccggaaggatgtacaaaggcactcggcataacgttggctttgagatgattgatgctatcgcagaagctgagggaatttcagtcaccagtaagcaatttaaggcgatcgtcgggaaaggccttattggtgatgttcctgtaatgcttgccaagccacagacttttatgaatgcaagtggtgagtctgtaagtaaaattaccctactgcagcttcaattaaatcatgctttgctagtcctttctccttactactatttatgtaggttggacagctcgtttcatatttcaagataccactaaatcaattagttgtggtaaatgttatccttgagctaatact

SEQ ID NO: 17847 - DNA, 686 bp, Setaria italica
  Peptide Sequence Number=SeqID_83821
cgacaggagggtggatgaggccgtggaggtgtaccgcggcatggaggccggggaggtggagggcgtggcgccgaactgcgcgacgtacacgtgcgtggtgggcgcgctgtgcggcgcggagcggtggtcggaggcggaggacgtgttctacgagggggtgaagcgccggaaggtgatcgacctcggcacggtgcgcttgctggtgctcgggctcaagggcgccggcaaagggcgcgcggcgagaagggtggtggtcggccttcgcaagaagttccccgagcagttcgacgggccgtggagggagctcgaggaggcagccgggctgccggcctctggcaaggaggatgacggcgaggaagacggcgccgacgagcagccggtgccgacgacggccgcggcgtgagctgcttggtggcagcgttggtggtaactggcgaggctccaaaaccggtggcgaatttggtttagaaaggcagatcagtcgaataagcgaattgacagattacaagaaccactcgagtcttagttacttgtttatcctctttggtgttctgaaaaattttgctcgttcagtagcacctccagcgccgtatcttaccgatacgatcaaacgcttgatttcgttgttcctgaatagtcctattgatgcattccgatgctggcatgttcgtgcttatagaatttcg

SEQ ID NO: 17848 - DNA, 414 bp, Setaria italica
  Peptide Sequence Number=SeqID_83822
tcagtgtgagtatgctcctctcgctcgacaagttcctcctccactacctcaagaagcgcctcttctccgggccaagaatcccgagcggcggcacctccaaatcgcggaggcccatggcggccgccgccaagtggagcgagacggccatgctcgtcatcgacatgcagaaagacttcgtggacccggcgatgcgcagccccatgctggtggccggcggcgaggccgtcgtccccgccgtcgccgaggccgttgccgttgcgagggagcgcggcatcttcctcgtctgggtcgtcagagagcatgacccttctggaagggatgttgaacttttccgcaggcaccactattctgggggaaagggtccaacagtgaaaggtttgaaaggtgcagagctggctgatgggcttgttatcg

SEQ ID NO: 17849 - DNA, 840 bp, Setaria italica
  Peptide Sequence Number=SeqID_83823
gtattggtgtgcattaactctgcttaaaatgatttccagatatttgttggaggccaacatctgctcataacatacagttgtctcctttttacacaaagcagtttgattcagaaagtagtgtgatatatttaattgtcatttcttatcactgttctctgctgggacattgacttacagcaaactgcaatgtaggtcgtcagagagcatgacccttctggaagggatgttgaacttttccgcaggcaccactattctgggggaaagggtccaacagtgaaaggtttgaaaggtgcagagctggctgatgggcttgttatcaaggaaggggaatataagttggtgaagacaagattcagtgctttttttgcgacacaccttgattctgtcctcaaaactgccggaataaagaacttggttattgttggagtccaaacaccaaattgcattaggcagactgtctttgatgctgtagcattggactatgagaaaataacggttcttattgatgcaacagctgctgcaaggccagaaatccatttgtcaaatatcagggatatgaagaacatcggagtggaaacgccgaccctggatgaatggcgccggtaggttcagtggcacttcactccatctctcggcaccaaattaccagagagacaagacatccctggtgtattcgatgcgacacctacatcttctatttttttggttttcgattccattttcgtctgactgtgtagttgtactgtagtgttactttgtcaggcaagaacaatgccagatgctgccatgtacgcaaacttctaatccctgttgtatagataaagagttcactatgccatt

SEQ ID NO: 17850 - DNA, 462 bp, Setaria italica
  Peptide Sequence Number=SeqID_83824
tcaccaccaatcctctgccctttgtacgctcttcgaaacccgaaccgaggtcaatgttcttgggcctgacagcccatatgaagtccacctcggcccgctcgagcccatccgcgacctccttcaactgtgactccgggattgcagctagcgtcccaagagcaacatacagcaccgccctaccatcggttgtcttgttgtcaagccactccatccaagagggctgggcctcggcgggcgcagatgctggttgggccaggcagaggggcccgacgggccaggccctgaggcccatatgctggttccagaagtcaacgtactgagcctccaggccgtggaaggtgttgatgatcagcccttgactctcctctatggccttgcccagcttaccgtcgagctccatcatgggcgctatggacgctgggtcgccgaagggtgccatgaagtcctcgaaggtgagcttta

SEQ ID NO: 17851 - DNA, 681 bp, Setaria italica
  Peptide Sequence Number=SeqID_83825
cacacggcacgctgggatagactatagagaggaggggggaaccaaaaagggagaggaagaaggaaagatcgagcagattgcgcatgaacctaagcgatcttggcgaagcatccgcccccggcccatcatgaccttgaactcctcgaaggagatgaggccgtcgccgttctggtcgacgccctcgatcatgcgcctgcactgtgcgacggatgcggactcgccgagcccccggagaacgcgcgcgagctcggtggcggagatggtgccgttgccgtcggcgtcgaagacgcggaaggcgtggcgcaggtcctcctcgacggcggcggcgtcgccggcaacggtggcgttgagggcggcgaactcgtcgaggctgatgaagccgtcgccgtcggcgtccgcctcggccatcatgcgcgcaagctcgtcgtcggaggcggcgtggcccaggctctcgaacagggccgcaagctcggaccgcgagatccggccgtcgccgttggcgtcgaacttgcggaacacccgcgccatctcctcctccgccgtccgcggcggggacccgggcgccgcctcggccttggcctgctgctgctgctgctgcgactgcggcggcggcgacttggagcggcggccgaggcggaacagggagggcacgggcatcctcatcttgcccatggctttgtt

SEQ ID NO: 17852 - DNA, 510 bp, Setaria italica
  Peptide Sequence Number=SeqID_83826
acgaagcttaacacgagctacaagtttacaaattttaatgtccttggaaatgctcgatagcattgatactgaaatggagaatctgacagccgggtcttctatgttgtgtgttcctttttacattctagagtagccctcatattgctccatgaatgagtcattgaaattcttgaagctcaacatcatgcgtgctcgcaaagactcggggatggactttcttcaagatcataaaaatttgcccaggaacattcaggctcagtgctattgaagcaatcttgttgatctcgtccagtatcttgtcgcgcggcctgtcccgtctgctgcacctccatcgtgtgatcccccacctgcaccactgcatcgctagcattgcaacaccatcagctgccaccgcatcccacccgatcaggggcgaagccagacctggtaagaagggccagctccgcccctacacccgatcgaggcatgtcttgtagaccatgaaggggagggtacgttccatctggaaag

SEQ ID NO: 17853 - DNA, 401 bp, Setaria italica
  Peptide Sequence Number=SeqID_83827
aggaggcccatacgaagaagttgccgaagcccgatctgtgctacagtacagaggtgcggtcggcggctgtaatgccgcatggcacgcgcgcgtctgtcaacacgagacatcacaacatccgccccaagacttggcagctggcttatggacgacacctttaaaacattaagatccattatgtcaaacttggctcttttctgaataattcgccgcatgtactgtacagccatcttaaccgtgaatttaggaactcgaattttgtaaacgtcgacaagttccatcatcaagtcatacaaattagtaaaagcactatccaataccatgccagcaatagagggaatcttctgctccatagagtaggcttgtaacggcgatcgatgggcgccggttacaagcctact

SEQ ID NO: 17854 - DNA, 1251 bp, Setaria italica
  Peptide Sequence Number=SeqID_83828
accttctcgctcttaatcttcttccacagtgctcggatcttctcctccttagctttatctttatcagatggtttcctctggctttgtctttgaggcgtagccagagccttcactgtcttattctcctgcttatcgttattatcccccgaggatgactcatcatcactggccgctcctaaagatgaacatctgccccaactttctctgttagagctcgtgtatgagcaggactcctcattgtgcctactaattttatcctgcagacgtgatccaacactatccccatccatctctgacaggctacgattttcatctaaaaggaaatccaagtcagtctcgttgttaacagacagctgattcaagctttctgacagcaagtcaactgcagatcttttagcatttggaatgttaggtgcatctgtcgatgaactgcaggcagcagtgttagctggctgcagaccattgatgatttcaaagaagaaactctcattggttacattaccaactttaaatgcacccatatgtagcttattagaacgtgctgcaggcaacagaggaggatgcaatgttttgtagaagaatattgaaactgaatcataatatgattgaggtcttggggaattgtgatcaccctcaaattttattatacttttatcccccccatatgcctggtgaatacgctcgcaatggtgaggctgaataaacatatcattcaagccatgtccaaataatgcagggatagacatcttgggagccaactttaaaacattaagatccattatgtcaaacttggctcttttctgaataattcgccgcatgtactgtacagccatcttaaccgtgaatttaggaactcgaattttgtaaacgtcgacaagttccatcatcaagtcatacaaattagtaaaagcactatccaataccatgccagcaatagagggatcttctgctccatagagtaggcttgtaacggcgcccatcgatcgcccccaaaggcctatactggaaacttgcttattggcccgtagacatgacaccgcacatttgaggtcctctttctcatgccaacccaggctgacataatctccacctgatagacctgacccagaaaagtcaagtgtgaaaacagtgatatttgaagaaagcagtattacagcggcttcatttgcatccgctcggcatccactatttccgtggcagtagaccacacatgggagagcagtattctctgggataaaagcaggaacatag

SEQ ID NO: 17855 - DNA, 803 bp, Setaria italica
  misc_feature (1)..(57): n is a, c, g, or t
  Peptide Sequence Number=SeqID_83829
nnnnnnnnnnnnnnnnnnnnnnnnnnnnnnnnnnnnnnnnnnnnnnnnnnnnnnnnnaccaacaagctgttgtcacactgcaatctacaagatgcaaaagtggggtaaggaagttacaggtgacagcaagtcagaggtggaagttacacttgtttcaggcaattacagcggatggtacaagggcgtgcctctcagctttccaagcatcctggcacgcgatcgtggcgtcaacctacgtatattcacctatggttacaggttacagtgttgcagtgacgacaatccgtcagaatcaggacgatcagtggttcaagcaggcttgtcagggtcagggctatggagttgtaagctctccagacgatttgttcctcttgtgccgagcaggttggccgaggcacatcctgaagcgctgtgatagactgtcccccatctccaccttctcgctcttaatcttcttccacagtgctcggatcttcttctccttagctttatctttatcagatggtttcctctggctttgtctttgaggcgtagccagagccttcactgtcttattctcctgcttatcgttattatcccccgaggatgactcatcatcactggccgctcctaaagatgaacatctgccccaactttctctgttagagctcgtgtatgagcaggactcctcattgtgcctactaattttatcctataagaaaggaagacttatcatcagtcaattcacaaaaggcaagtatcgagtatatcaaacctcagttcttaacactgtaatgtgtttctgatggcattcaccttgagac

SEQ ID NO: 17856 - DNA, 806 bp, Setaria italica
  Peptide Sequence Number=SeqID_83830
taacgtaagtacttaactaaagttaaattttttactaaatttaaattgttcctttggtaaattgtcttcgtattagtctatttgtattacttgtaaattggtagaattcttgacagccgggttcttctatgttgtgtgttcctttttacattctagagtagccctcatattgctccatgaatgagtcattgaaattcttgaagctcaacatcatgcgtgctcgctaaagaatcaaacaataagggctgtttcatcataaaaatttgcccaggaacattcaggctcagtgctattgaagcaatcttgttgatctcgtccagtatcttgtcgcgcggcctgtcccgtctgctgcacctccatcgtgtgatcccccacctgcaccactgcatcgctagcattgcaacaccatcagctgccaccgcatcccacccgatcaggggcgaagccagactgaaaggccactggggtcagctattttaaatgacggggtcgaacatacttaaattagtgatgaacagtgattttagttaaggaatttagaactccatcgggtcagctgaccctggtaagaagggccagctccgcccctacacccgatcgaggcatgtcttgtagaccatgaaggggagggtacgttccatctggaaagatttttcaagagtgtctgtttcacacaatcacccttagccagcacagttaagcgaggttgggagaccgtggacgagtcggcggtggagggggccatcaattgctggtggagtagatatacaatccatgtacttaaaatcttacccgcaagaatattc

SEQ ID NO: 17857 - DNA, 623 bp, Setaria italica
  Peptide Sequence Number=SeqID_83831
ttaaaagtttcttaagtttgtttgttaaacttagttgttatttattttgttaagttaaagttcttagttatttactagtcggtctttctattttgtctattccgtcttcggcatccactatttccgtggcagtagaccacacatgggagagcagtattctctgggataaaagcaggaacatagtggctgcattttaagatatagcctcttgcatttgtaagctccaagtctagtcgtttgtatttccgtcctgcgaggataaactctgtgtcccatagatactgatctggatcattttctgaccggggcggccggatgacgaaattgacgaactgctcgatcatagcgcctcccagtggtgagcggcgctcctacgctgtgcggcggcggggcctccccgcgctcatccaccacccccgcgcgcctcccggctcgccctcctctcggaattacgccccccgcctgcaaggtggcgcccacccggacctgaggaatcctccgcggagccgcctcggatctgcctcgccggatccggcggcccgagggggatccgggaggccgaggcggtggttggggaggcggggaggaggggagggggggaggggtggaggggaggggagcaa

SEQ ID NO: 17858 - DNA, 1225 bp, Setaria italica
  Peptide Sequence Number=SeqID_83832
gcatacaaaataaataaaaaattgagaagaaacataattatgcctggaaagtcaaaccatagttgcataccatctggaaagattttcaagagtgtctgtttcacacaatcacccttagccagcacagttaagcgaggttgggagaccgtggacgagtcggcggtggagggggccatcaattgctggtggagtagatatacaatccatgtacttaaaatcttacccgcaagaatattccttataaaaaaactacaaatattagcacaaaaataatataaaattacataggttgctttcctgcatatctaaaaaaatgcaaatagaagtttcacctacataggttgttcgtcaatttagagcaaccaaagatagatcttgggacaatccatttatgatacatgagtttcattcttatctgcttatgacaaaaagaatcactttagataaacttttgtatccaagaataaataactttatgcaatcatgccacacgacaagtgttccagtttaccataaactcatgaaattaatgtcatatgaaattgcatattcatgtattcctgtgaatttaagtataaagtaatcaggcataattagagatcgtctattaaggttacacaaatgctgatcaaataagatggcatttgaccttctaattctctggctggatagtggtaaactggatttgaagcccaagtagtagcaaagcagcaacagacgtgcgtgtgagcatctccattggcagctgtggtattccagagccgcaatggatatgatccctgtcacagtggttaaggtgcccatgatattggtacgcataaaccttgctgcacatggtgccattttccttagcagctaccaggcaacataggtaccaaaattatggactttatccaaaacaacgaatcttgttaaagttgccatccaacctcctctccagcaataaaagacagaaaaaaccttgctaattgatcccagcacttgcctccaagtctagtcgtttgtatttccgtcctgcgaggataaactctgtgtcccatagatactgatctagatcacattctgacctgcagaaaccagtaagtaactatcctcaatcgcacgatctcatcctccattggaattagggatcgtacatttacaggtatcgtttcggcgaagaaacccaaagcgaagacgtgatttcctctcgtcaagcggtaagtccctagttagtactaactta

SEQ ID NO: 17859 - DNA, 2118 bp, Setaria italica
  Peptide Sequence Number=SeqID_83833
cattccaaggcaatatgcatgatatacactcgtattgccatgttatagacttatgtttatcgacaggttacccatgcccagacagccatcttttgcttgctagctagcccggattttctcatcgataaatgtacgaataccgatcgggaagcacaggcgcctcacttgagacacaaaacttggcagccgagtcgtgtcgtgtcatttaaacgagctacaagtaattttcaattaatgtccttggaaatgctcgatagcattgatactgaaatggagaatctgacagccgggtcttctatgttgtgtgttcctttttacattctagagtagccctcatattgctccatgaatgagtcattgaaattcttgaagctcaacatcatgcgtgctcgcaaagactcggggatggactttcttcaagatcatctggagccacatcaaacgtcaggaacgtaagataacagagaaaaatgtccgacatatgtttatttttccatattgaggccacacgaggaatgtaaatgcatgtcattcaaaatagagtaccagcttaaagaagaacaaaagaataaagaatcaaacaatgagggctgtttcacaaacaaaaatttgcccaggaacattcaggctcagtgctattgaagcaatcttgttgatctcgtccagtatcaggcggtcctgcttgctacacaccttgtcgcgcggcctgtcccgtctgctgcacctccatcgtgtgatcccccacctgcaccactgcatcgctagcattgcaacaccatcagctgccaccgcatcccacccgatcaggggcgaagccagactgaaaggccactggggtcagctattttaaatgacggggtcgaacatacttaaattagtgatgaacagtgattttagttaaggaatttagaactccatcgggtcagctgaccctggtaagaagggccagctccgcccctacacccgatcgaggcatgtcttgtagaccatgaaggggagggtacgttcctaggaaggatttttcaagagcgtcaattttgcataccatcacatctggaaagatttttcaagagtgtctgtttcacacaatcacccttagccagcacagttaagcgaggttgggagaccgtggacgagtcggcggtggagggggccatcaattgctggtggagtagatatacaatccatgtacttaaaatcttacccgcaagaatattcataggttgttcgtcaatttagagcaaccaaagatagatcttgggacaatccatttatgatacatgagtttcattcttatcttctaattctctggctggatagtggtaaactggatttgaagcccaagtagtagcaaagcagcaacagacgtgcgtgtgagcatctccattggcagctgtggtattccagagccgcaatggatatgatccctgtcacagtggttaaggtgcccatgatattggtacgcataaaccttgctgcacatggtgccattttccttagcagctaccaggcaacataggtaccaaaattatggactttatccaaaacaacaaattatcttgtaacagcggccatcgatcgcccccaaaggcctatactggaaacttgcttattgacctcgtggcaaccaaggctgacataatctccacctgacagagctgacccagaaaagtcatgtgtgaaaacagttatatttgaagaaagcagtattacagcggcttcatttgcatctgctcagcatccactccaagtctagtcgtttgtatttccgtcctgcgaggataaactctgtgtcccatagatactgatctagatcacattctgacctgcagaaaccagtaagtaactatcctcaatcgcacgatctcatcctccattggaattagggatcgtacatttacaggtatcgtttcggcgaagaaacccaaagcgaagacgtgatttcctctcgtcaagcgaagcctgaacctgcagaagcttatcgactgaagattgaagctttggttctgaatcccgggtccatacaaaattacgaaagagcataattcattttgttttcagtaaacaatggaaacaattgaacagtaccatcatttattttgaccctttgcaaaaaga

SEQ ID NO: 17860 - DNA, 351 bp, Setaria italica
  Peptide Sequence Number=SeqID_83834
tcatgctcgacgaggcgttccgcgcgcggctcggcgacttcggcctggcgcggcaggcggagcacggcgagtcccccgacgccaccgccgccgccggcacgatggggtacctggcgccggagtacctgctcacggggcgcgccaccgagggcaccgacgtgttcagcttcggcgcgctggcgctggaggtggcgtgcgggcggcggccgatcgggacggagggccggtgcaacaaccttgtggagtgggtgtggagcctccacggcgaggcccgcgtgctggacgccgtggacccgcggctgggcggcgagttcgaggagggcgagatgcggcgggcactgctggtggggc

SEQ ID NO: 17861 - DNA, 509 bp, Setaria italica
  Peptide Sequence Number=SeqID_83835
tagagcaatgttttaaatagtttagcctctggagaagctccagggctaggatagtcaccgtttagcgctaaactatattatccgctaatagccgctattagccggctaaaaaagctaaatgacccctcatttagcttatagcccgctaatagcagctcctgactcatgaggaagacaagcaagtttcaacaatatttcccagccagaagtttctacaatatttcccagctggaagtttctagtgtttttcccttctaccattgtattgctcttgcttgtttcgtttgtattgcagtcaatgatgtgtgataattcagaaccgagatagagtataatccactaaattatgagttttaacatgcatttttgttaaaccgctaaatggggctatctgaggctatagctggctatagcttttttagcctctgaaaaacccagccgctaaagggcttagccctctatttaaaacattgctctagagtctccagtcccgccactctccagtttcc

SEQ ID NO: 17862 - DNA, 482 bp, Setaria italica
  Peptide Sequence Number=SeqID_83836
agcggacagaccgaggcggtcgcggagagcaagaaggcgagggccgacgttcttgggcgaggagcggaggagcagcgggtccgcagcgacgacggcggcgatgtcggcacgggagaggccgacgccagagagcagggcaaggatggcgtcggggttggaggcggagttgaggcgggaccaagcgaggtcctcgaatgccttcttgtaaacttgggatgattcatcgaacgctttcttcgccgtcttgcgggcttgagctggggcgaggccgcaggcggcgacgaggtagtcctcgagggagaatggggcggcggcggtggagaggaggcaggcggggtggtggatagggggaagggagccgggaggtcgcgcggaggagagggagaaggcgcgtccggaggagctgcatggcggcggcggatgcggcggcgcggcaatccggcgtcgccgacgagggggtaggtgatgggcgtggccgcgtg

SEQ ID NO: 17863 - DNA, 545 bp, Setaria italica
  Peptide Sequence Number=SeqID_83837
tttccacatcttccacaaaacctttttttttcacaccactaccatggcaacagtagagcttgccaacacaggatggagcaagaaccagggctactaaccaaaagatctaactctactctaatgcgacagccacacacttccgaggaaacaagcttagatttttgccacagaagagcacaatcctggtgaatgcagctaaatctggaccatgcagatgcaaactgaaccgaagaaaaccacgaacaaccaccaaagttggacagactagccttgaaatcacgaccaagaagaggagggggaaatgggcagctgccaatcccgagccggcaggaggccaccacggaaagctcggcttcggtcggatctggggcttgaggccgcgcgctcgccggatccagggcgccgtgccgtggccgccgcggcaggtggaggagcggaggcgggggctacaggacgacgggcctgggaggcattgggaaccggatcgaaatctgcagcgccgcgctttgtccgcttctcgggaggacagacacagagagagtgtg

SEQ ID NO: 17864 - DNA, 574 bp, Setaria italica
  misc_feature (560)..(560): n is a, c, g, or t
  Peptide Sequence Number=SeqID_83838
ttactttgctcatttttagccaggcaagaatacatgtaaagagtgtcagcactcagcagtcttacattacaggtatgcttgccttgagagcataaacatatgcaaatagttacagcttacaacactgattactcataccgacaaataaaataataaacaagagcaaaatagcaaacactacacttgctgcacttcaccaaaagggggaagagcaccgttgattctccagcgcgcataaggcataagctagatcagggtggcagtcatatttgctgacggctggtggcctactaggacggctgtatggccagtcactggctggaaagctgcagctgactcgagcttctcccaggtcagcttccgcttcacttcgaatgaaacccgcttttcttcatcctccttgtacttagccagacatgatgagaagagatcctcgtccatctcagaaaacatcttctttacattcagagtcagattcaggactgcttggttccagtgattctgaatattctgttctagtgctggaacaacgagaggcatgatcacttggcggtttttgngcgatcaagctgat

SEQ ID NO: 17865 - DNA, 1664 bp, Setaria italica
  Peptide Sequence Number=SeqID_83839
taactaaggaacggactagtaataggaccaagtacaactaggactaggaaaagactataacggacctaggacggctgtatggccagtcactggctggaaagctgcagctgactcgagcttctcccaggtcagcttccgcttcacttcgaatgaaacccgcttttcttcatcctccttgtacttagccagacatgatgagaagagatcctcgtccatctcagaaaacatcttctttacattcagagtcagattcaggactgcttggttccagtgattctgaatattctgttctagtgctggaacaacgagaggcatgatcacttggcggttttgtgcgatcaagctgataatgtgatcattgttccatacgaagagtgctctttcagcaacctggaagtgagaactggtgatgcaatgagcaatccgtcgaaataatggaaccatacatttctggaattctgcctggctggtagactctaagatctcttcgatctcactaagaaacatcacttccttctgacaatttgttattggccagtatcttaacaagccaataatgacagagcttgcaagctttgggtccttttctagaaactgtgtcacacagtaggtcaactgctggagatacaaaccaactgattttggtttgtgtaaaggaatcaaaactctccaaagaaaaatcttgtgttcttccttcaaaggcaatgcaaagccactaatgacactgccaaagacctccagcagctcagcaatcccattgtgccgatcagtctcaaagacaaactggtagaatatattgctcactgctttgcggatgaaaggacggtgtaccatgaacttcccatatatcctgtgcagaatagttttcaaacaatccctttctcttggatcctcggaatcgagaagattaaggagcttcacaatgaatgagtgatcaaagtgtttcttccctacctttgcatccaaggatgaggatccaataaatttcagtagtagctcatacacaagctgcagatggcaccatgcaggatcgaacatcggctcgtcctcatcaccctcaccaccacatgaaccagacctgtaatttggaggaaatgcacggaacaggttgatggcacacatcctagcgcaggcagcaatcgaggcctctgagaagcgagcattgctagattcaacaaactctataagatccagcaatgcctgccttttgatatccttctccaccgaactcttgttcgggtccgagaaatcaaagacgacgcagcacaggctcaacttgctcacaaacaggttctgcttctccgagtttgggacatccttgaaggaaaccaacggctcaatgccagcgacaacacttgaggggaagacggcagacgacatgcgcctaatggcggaagccgggcggctaggtgggatgcttcccaagctgctcgtgcgctgtatcccggtgccattgctgcactgacctgagtccccggaggccgaggacttccggggcagcttgctgagaaactgtttccacatcttccacaaaaccttttttttcacaccactaccatggcaacagtagagcttgccaacacaggatggagcaagaaccagggctaacttaaccaaaaagaattacttaaacttacttaacttacttaaattaagtaacgtaa

SEQ ID NO: 17866 - DNA, 651 bp, Setaria italica
  Peptide Sequence Number=SeqID_83840
gaaaaaaaggacctgcttggttttagttgccaatttttgttgcagtcaaaaccaatggcatgctaaaatatggacattccaaagctagggtaagaaatttaggtactcggtttagtgccaatatatggcaaccttcaagaagtttctagtgactttaattagttctggctataaacaatggcatgccaatttttggtaatgaaccaattgatagccaaaatttctaggcatgccatggttttggttgggcaaaaattggaacccaaccaattaggcccaaaactccatacaactattgagacattagtgattctgcccctacattggaggctaatggtgattttacccctgtttttaactttgtgattttacccctactttttggtttgaagctgccgttcacccctagtttggatggacgttagatagatcaagattagataaattaaaaaagaaaaggaaaacacatttacaggatagggaaaggacctgactaccccttccttatccaaccaatcccgtgagcctcctttctgaccgttccacgcgatgggaggaacctgagcaacggcggcgggccaaattgagggcggtggctacggaaatctgggtgccgggctaccctgccgcgctctccccttggaaatcaag

SEQ ID NO: 17867 - DNA, 1407 bp, Setaria italica
  Peptide Sequence Number=SeqID_83841
tttttttttttttaaccaaaactgatttttcttatttgattttacccttacaatcctctgtcaccaactcacccactagctataagtacataaataacctcgaccttctgccctacaccaccggaccttcaggtttacctgcaatcatttgcagtgacaaaagctagagatgcatcaatcatctgcatctgaagtatttctgaacccctccctctgttcctatcgtccccaattccctctctctgatacctctcctccgatacctctcctccctaagtacaatgctagacggaccaacgacaccaatcgccaacaccaccaccatggacagacacagacagagaacgatgactctcgctccctggcggcctctcaccggaggctgttgacgaaggcgaggagcgagtcgacgtccctcttctcggacgggtacttgatgggcctggcggtgcggctcgggaacaggagcacggtggggaagctctgcagctgcagctccgcctgcgcgaacggcttctgctcgccgtcggcgcggaacctggccaccttcacaccggaatccgccagcttctccgccagctccacgtaggaggcctccatggcctggcagaaggggcaccacggcgcgtacagcaccacgagccacggctccgcgcggttctccaggcccagcaggttctcgatcccggtccgggtcagggacaccacggcggggctctcgaagatgtccggggcgcccgccgagccgttgccgttggcggacttgggcgccgcctgcccgtccttttcgatgttgcccttgtgaaggccgcactccttggccttggcgtcctcccaccaccaccggccttcacgctcgtgctgccccggcaggaccggcctggtgcacggctcgcaaccaattgacacgtaaccttgagcgtgcagggtgttgacagggacgtccatggtcctcaggaatgtccagatgtccttgccgtcgacgttggccacggggttccacttgatcaagctaccagctccgccatcctggccctcaaatgaaggatcaacctgaacgacggggatgcttgccctggtgccaggggactggtccttcctctggccggtgatccaggccctgaggcccttgagggccctgcgcagcggccgcaccttgcgcacccggcagcactcctggtggccgtcctcgtagaaggagaagaggcccttggtccgcaccagctcctgcacctcgccggcgtccgggaacatgtactcgatgcggatgccgtagtgcttctccaccttgtcgaagaactggtaggtctccgggttcaggcggcccgtgtccaggctgaacacccggaaggggcgccccgtcagcttcgcgtactcgatcagcgccacgtcctccgcgccactgaa

SEQ ID NO: 17868 - DNA, 501 bp, Setaria italica
  misc_feature (1)..(56): n is a, c, g, or t
  Peptide Sequence Number=SeqID_83842
nnnnnnnnnnnnnnnnnnnnnnnnnnnnnnnnnnnnnnnnnnnnnnnnnnnnnnnntttttttagagtaacattgaagacgaccatgccaataacaaataggtattaaagcattcaagttttgcccaagcagatataataagagggtacctaaacaacaaacacatggcacaccgccagcggacctttaaaagttcaacgacaacagcaatgaccggggacaaaactaatatgtgatagtgaaagttatctaggtatcgcaaaagcagacacaggattaaccaccaggcgcatcatttcttcttggcggcagccttggtaaccttggcgccggtcgggtccttcttctccacgctcttgatgactcccacagcaactgtctgtctcatgtcacggacagcgaagcgaccaagaggagggtactcagagaaggtctccaccaccatgggcttcgtgggaatcatcttcaccataccagcatcaccgttcttcaggaacttgg

SEQ ID NO: 17869 - DNA, 821 bp, Setaria italica
  misc_feature (1)..(14): n is a, c, g, or t
  Peptide Sequence Number=SeqID_83843
nnnnnnnnnnnnnnccctgtgtgccttggcagtctcttttattttttttttttttttttaagcagaacgaaagactccgacaatacatccaacgaataacgtctcacaaaagggtacacatggtattggagcattcaagtttagccaaagctaagatggtacctaaacaacagacacatggcacaccgccagcagacctcaacagttcacaggataacagaagtggtggcggacaaaacttgtgtgatagaggcaaggcatctaggtatcgcaaaagcagatacaggattaaccaccaggcccatcatttcttcttggcagcagccttggtaaccttggcgccggtcgggtccttcttctccacgctcttgatgactcccacagcaaccgtctgcctcatgtcacggacagcaaagcgacccagaggagggtactcagagaaggtctccaccaccatgggcttggtgggaatcatcttcaccataccagcatcgccgttcttcaggaacttgggctccttctcaagctccttaccggaccgtctgtcgatcttggtaatgagctcagcaaacttgacagcgatgtgggaggtgtggcagtccagcactggggcgtagccgttgccgatctgcccagggtggttcatgatgatgacctgggaggtgaagctggcagcctccttggcagggtcatccttggaagttaggaaggaccaacgaaacccaacgacttagaagaataccttaagaaacaaagaacaaaacgttaacttaacaaacgttaaagaaaaagaaaccaaaaacgttaaagtaacaaacaaa

SEQ ID NO: 17870 - DNA, 818 bp, Setaria italica
  Peptide Sequence Number=SeqID_83844
cgactcagtgacgtatgtggaacgcgaaccccggcaggtccacgggcatcgccatcagcccgacgttgaagaggttgtagtcgctcgcgaaccgccgccgcgcctcctcgctcaggtacggccccgcgaacaccgtctgcgaggtctccaggttcatgtcgcggcagggcacccgtattgggaaggccctaccgccctcggcagcgctccggtcgagccaccgccggaggtgcgccaggatgacccgctgctggagggcggcgtaggtggagagcgcgcgcggggtgaagttgggcgcgatccggcggcgcaggtccttgtggtcctcgccgaacatgtagatgaggttgtggtccccgaagagcttcttgccgaaggggtggccgatgaggtggaacgcgtcggggcggacgttggcgaacacgcggtgggacagctccgagtcgcggatgaacacgatgaaccgccccaccaggaagtccgccgcgagccccgcgccggacttcttggcgcgcgccgcctgcccgtcccagtaccccgtcgggtcgcggatcatgtgggcgacgctcccgaggaacggcacgacgagcggcgggcccggcagggggcccttcttgcggtggtaggacagctgctccaccaggaagtagaaggccaccgccgccaccaggaacggcgccgccgcgcggatgtccaagaaactggacagcgactccgccgccattgctccccggccggcctgtagcactagcagccgccgctaccgcgcaggtctccagagggctgaggctcgcggggagctggagctcgcctctccc

SEQ ID NO: 17871 - DNA, 396 bp, Setaria italica
  Peptide Sequence Number=SeqID_83845
gtgagcagaggaggtgcaggaggagaagcgatgccggacaagggggagaggggccacggccaccagcaccagcaccagcaccagcaccagcaccagcaacagcaccggaaaagccagcagtcggcgtcagctgccgagctggaggagggggagctgctcaatggggagcccgacaccaatgggttgcccgagaggagcatgccaccgaagaagtggcggaaggtgctggcagcctcgacagctgctgcagaggtggaacctggggagattgtcagtaccaagcaagcggtgccgttgaagaaggcaaggaggaacggggaggtcgagaagggggtagttggtgccggagcggcagaggaaggaaaagtcttctgggaacagcgccaggaagtcgag

SEQ ID NO: 17872 - DNA, 962 bp, Setaria italica
  Peptide Sequence Number=SeqID_83846
gttcctcgcacctcacagcaagatgcatgtcatagaaactgaaattcagacatcagaacattatcatgagtagaacaagattatttgcttacacacagagataagggtgcttcctaaactatacttctatcagccccctttcacaaacactattcaagcctctttagggccggcacaacaaaagatattcagggttacacaatgaaattcaacagggctgtcatagaagcaccagataacaggcacaaccaaaacagcaaagtatagcaatgcattcttgtgctggttataatcctatatcggaaccaaggggcttgtcatcaggaccgtgaccgaatattcgttcgacagtatgggcaatctgcacatttgcgcacccatggctccaagcatgtcgagtggaacctgtgaccacagcgcagccttatcagctcatctccatcatagaatccatcgaggcaaatggaacactccggcgagggctccctgttgtcatctttgctagcctcaaaaatctcaatctgcagcctcaagaaagctgccttgctaagtccggatgacctgtgtaagttagtggaactgatggttggtatttcttcatctgattcactgctcaggtggtacgatgaagagttgggcccatttgcctgatgccgggtttccctgtttctgaagtcgatgaatctaaacacatcgctagcagaaaattcatctaatgaaatagatggcctggaggcagatgaaccgagagaaatgcctcttaatctctccaggacacgtgcttgtgcttgcagtacagcacctggaagccgttcatttgtcctgaacatcagcctatcaagtctgttcctccgagcagcagaatccccaatgttattattgtctaggtatgataagatctggtcctggtacgagtaagagagtgacggattctcattcgatgtcggacacaaacaatagca

SEQ ID NO: 17873 - DNA, 752 bp, Setaria italica
  misc_feature (709)..(752): n is a, c, g, or t
  Peptide Sequence Number=SeqID_83847
gatcgtcgccgcgttggatctgcagcgccaccccgacgcggcttctacctggagaccttccgcgacccctccatctctctccccgcgtccgccctgccgccccgctataaggtggacagagctgtgagcagtgccatctatttcctactgcctgctggggagattgctcggttgcaccgcatcccttgtgctgaaacctggcactactaccaaggagaacctctcacggtatttgaggtgcatgatgatggacaaatcaaaataacagtggtcggtcctgatctacgacatggccagagaccacagtacatggttcctccaaatgtatggtttggggccttcttgacctgcgacatcgagtcctttactgaagatggaagtgtctttgtcaagactcctggaagagaccctgcggtgcattattcctttgttggtgtaacctgtgctccagcgttccagtttgaggacaacgaactggcaacacgtcaggacatgaaagctttggctccaaaggctgaagcattcatcaattaccttgtaccatcttagactgccttgcaagtgcaagtagcttgttcttcatgaggatcttcatgtactgatttgctctagtagctgttgaaaatcactgtatgatatcaaatcggcttgtaactctgtaaaatcagttctgtgtggattatggcagttaattgttttcttgtacttnnnnnnnnnnnnnnnnnnnnnnnnnnnnnnnnnnnnnnnnnnnn

SEQ ID NO: 17874 - DNA, 840 bp, Setaria italica
  Peptide Sequence Number=SeqID_83848
taaccctttacccgtatttcaattgcaggctctgctgcatgcaattgcttgcgctctccagtgatcttgtcgcgcaacctacaacagatgagcagttgaaggttgcaagcttgacactggaagatagccagtcgcatccagggatcagtagctccttgtttggcttagcggatcgtagtcatacgcttcgccagcctttataaaacgtcccttgacccttttcctcacgtctgccctagccttgcgagaagcatatctgatcttcttgtcaaactttcgtctcttcttcttctccttgtatcgtgtgagagcactatctctgctgcctccagcaactgaaccttcaggaccaggaggatgccacggtggctcacccatgaggagcattggtgataccccacaatcttggtgatctccagcactgctctcaccagtcaaaccagagaaggattgagatatactggatctgacttgcctaacaggaatacaaaggctggaatcagcccttgcaccttggtttgacatcgcggaatctgctgataccacattgctacattccagctgcatatatttgggctcctcattagagtcaaaaggcggcatttccttcatttcaaagtaactgtcaattccagcatcatcaaagagttgctctgtttgaatgtgagaggtaccaaagagttcttcgtaattctcaaatgtcaggtcagtatcatccacacataagtcttcatacatgctgccatcattgaacttatcatcgtctgtagcatagggtacctttggtgtcattgaatctgatccggcaggctgatcggtggctagtggcagaatattgaa

SEQ ID NO: 17875 - DNA, 1318 bp, Setaria italica
  Peptide Sequence Number=SeqID_83849
ctccggcgcctgcaccaggatcccgcaggccatgcccgagggtcccgaggcccgggcggtgcagtcgccgaaggcatgcgcaaccaaattccccacccttgtctcccaagggctgctcttcgtgtggcccgacgagaatgggtgggagaaagccactgccaccaagcctccaatgttgccgaaagagtttgatgacccggccttctccacggtgacgatccagagagacttgtactatggttatgatacgttgatggagaacgtctctgatccgtctcatatagaatttgctcaccacaaggttactggacggagagatagggccaggcctctgacattcaagatggaatcaagtggtgcctggggttactcaggggcaaattccggtaatcctcgcatcactgcaacttttgaggccccatgctatgcattaaacaaaatagagatagatacaaagttacccatttttggagaccagaaatgggtcatatggatttgctcgtttaacattccaatggccccagggaagactcgttctattgtctgcagtgctcggaactttttccagtttacaatgccaggaaaagcatggtggcagcttgttcctcgatggtatgaacattggacttcaaatttggtctatgatggtgatatgatcgttcttcaaggccaggagaagattttcttagctgcatccaaggaatcttctgcagatgttaaccagcagtacacaaagatcacattcacacccactcaggctgaccgatttgttttagcattccggacatggctaaggaaatttggcaatagccaacctgagtggtttggaaatgctagccaagaaacattgccttccactgtcctttcaaagcgcgagatgctagacagatacgagcagcacacattgaaatgctcatcttgcaaaggagcatatgatgcattccagactctgcagaaggtcttcatgggagcgacagtagtgtgctgtgctaccgcagggattcctgctgaagttcagctcagaatattgattggtgcagctgctttggtcagcgctgctctagcatacgcattccatgatctccagaagaattttgtattcgtagattacgtgcacgctgacattgattaaaatttttgcgagcatctggtgtagcgacatcacatgttcatttctgtaacgtgtaacctaggccgcctagctagggaatgtaactttttaccggatataaagctcaataccaatttgtgtataataggcagtaggatgtagcgatgtaaagcggaaacataattttgcatatattatccattggat

SEQ ID NO: 17876 - DNA, 1956 bp, Setaria italica
  Peptide Sequence Number=SeqID_83850
cttctttcgcagctcaatgaggcatcctttcctcttttaatgatggcgtttgcgttcaggtgatggagaaggatccgagaaaggccgcgacgccggtgaagggatcggccagagctggcaccggaggcgccatgaacagaattcaggcgaggagagagcggaagctcgcgctgcagcaagatgtcgataagctgaagaagaagctgcgccacgaggagaacgtccaccgagctctggagcgagcgttcacgcggccgctcggcgccctgcctcgcctgccgccgtatctgccgtctcagacgctggctcttctcgcggaggtggcggtgctggaggaggaagtagtccggctggaggagcaggtggtgaatttccggcaagggatctacaaggaggcgatcatcttctccaccgccaagaacacccatccctccggcggcgaagttcccgtgccggtgcagctcgttccgtcgaacccggtgcccaattcagtagtctctccgacggcagcacgcccaggttcagaccatcctcccacccgtccatcgccgcacaacggcgtcgtcaatggcaagcaagcaccaagaaagcccgtccctggctcggggagccaggatgaccggtccggggcagggaaagagaatcagtcgtgcagcaacacgtcgagcgcaagcaggaacagccgccagacgccgttgcagcagaagacgcccagtaagtccagggcgacgccggcagtggcacctgacagacgcagggcaactcctgctcagacaaccagtgcagcaacgccagaccgtaaaaggcctgcggacgcttccgccagcaaccgaaacaaagcgacgtcccaggacgactcgagcgtgccgaacaaactgtctgaggagctgctgcagtgcctgctgaccatcttctcccggatgggctcggccggcggcggccatggagacgaggaccagcaggcgccgtccccgtcggtgtcgggctccagcgagagctcgggctcgggctcggaggatgcgtacccgcaggacccctacggcatcctggagctcggcgccagggacatcggcccgtacaagcggttccacgtggtcgacgccgcgtcgttcgatcggaacgcggtggccggcgacggcgacgcgttccacgcccggagattgaaggccttgctacggaggctgtcgtcggttgacctggcggggctctcgcatcaacagaagctggcgttctggatcaacgtctacaattcctgcatgatgaacgcgtttctggagcaagggatacctaccaccccccaaatgctcgtggcgatgatgccgaaggcgaccataaacgttggtgggcgcgcgcacagcgccatgtccatcgagcatttcatcctcaggctgccctacagcgtcaagcaggtgaatccggaaggggcgaaggccggcgacgacgtgacggcgcgcggagcgttcgggctggagtggcctgagcccctcgtcacgttcgcgctctcctgcggcagctggtcctcacccgcggtgagggtatacacggcggcgcgcgtggaggaggagctggaggcggcgaagcgggagtacctgcaggcggccgtgggcgtgacgtcgccggggaagctggcggtgccgaagctcctgcactggtacctgctggacttcgccaaggacgtggactcgttcatggactgggtgtgcctgcagctgccggcggagctgcgccaggaggcgatgcggagcgtggaggacggccggcgcgggggcgccgagccccggcgcatccaggtcctgccgtacgagttcaggttcaggtacctgttggcctcctcgtgacgcgtactgtactagcgccagtagtaactgaaggcgtgcgtggtactgtagtctggtacacaggtttttgcaataaaggcaagactgtcgagatgcagttcggcctttgtataaaagg

SEQ ID NO: 17877 - DNA, 707 bp, Setaria italica
  Peptide Sequence Number=SeqID_83851
ttttttttttttattcagtcaagagctttctcagcaccagaattcaattcaagagctaggatgtcagcttttttggagaatagtcctttccagagctacaatccaaagtcaataaaacatacaggccttttggcgaggccatacaatctgccttttggaaaacgccacgagtcttgcccaatatttctgcagttctgctgaatctttatgttccactttcaacttacaagtagcttcctctgaatagcgatgttatgatatttcacgcaacaaaatggtcagtgccaaaaccagagagcttaggtccaatgctatctgatcaattacaaaacccagtacatccaacatctacttattgctgttctgtcagtaatcagtccctggctacatcatgctgaatcaaccagtctcaagcacgacatgtcagactctacaagcattttcttcgaaaaacaggatggatattcacattcaaattctcagtcttttcgcacctagcaacagattctttcattttgtcaagcaccttaggcaaatacgcaatattagcctcaaccttggatttgaggatgtttagcttttctagctgctcttcttcagcaattgatgtttctgctgttggagattctgtaatatccatggacgttcagcaatcattaggagaaaattgtgtaaacatatctctgaaaaattatcgagtttggcac

SEQ ID NO: 17878 - DNA, 299 bp, Setaria italica
  Peptide Sequence Number=SeqID_83852
tctggttgtgctcggtgggtgatgtgatggagcccatgaattgtgcctgctgtactaattggagatgcaagttttgacaagtaatcgatccatgacttgatccggcatggagtatatgtatcccacctgctgatcgggcgagcgagttccagcggccctcgccgtgcgaggcgacgtagttgaccagcaggaggtcctcctccaccgtccacggcccgcgccggagctcgccggccatcacctcctcctcgctgctcgcgtctctctcgtgcgccatgtccatcaggttctttctctct

SEQ ID NO: 17879 - DNA, 529 bp, Setaria italica
  Peptide Sequence Number=SeqID_83853
cggatcgtaccggtacgaacggcgagcacgcacacaacacaagaagggaaggaggggaaaaaggaagacggaggccatggtggtggttacagttgagaaggacgagacgggcgagccggagctgctgctggagcgcagccgggcgatcacgctccagggccgcgacaggaagggccgcgccgtcgtcaggatcgtcggcaactacttcccagcgcgagcgctgggcgggcgggcggaggaggcactgcggggttacctgcgggagcgcatgctcccggcgatcgggggccgggatttcgtggtcgtgtacatgcactcgcgcgtggaccgcggcggcaacttccccggcgtcggcgcgatccgcgcggcctacgagtcgctgccggccggcgacaaggggaggctgcgcgccgtctacttcgtgcacccggccctccagtccaggttcttcttcgccaccttcggccgcttcctcttcagctccgggctgtacgagaagctgaggtacatgagcaggctcgagtacgtg

SEQ ID NO: 17880 - DNA, 758 bp, Setaria italica
  Peptide Sequence Number=SeqID_83854
tacgtaaggtaagtacttagtacttaggtaagtaattacgtaacggtcgtccgtcccgtccgtccttcgtcgttacgccattcgttcggcaacagcatggggttcggccgctacgtcgccaccatgaccgtcgccgccgacgatggcgactcctcggcggggtgcaggctggtgtgggcgttcgagtgcgagcccgtgcaggggtggagcctcgacgggctcctcggctacctcgacggcggggtcaaggccatcgccgcgcggatcgaggaagccgaggccgccaaagatgttgccggaggagacgacgtagccatctaccgccgaattgtcgcccaatgattggtgttctatctcgtcaaactcattattttaatgcattgttcggatatcttccgctaaactttagctttattcggatcctaatgagctaattataaaactaattgtagaactccaggctattaaggctaattaatccatcattaattatgaactaattaggtttaatagattcgaattaaacttcatccatgcaattagttttataattaagtatctaaaaatttgatgtgacgtatgctgcaggttcacgacactcttgttgcttgcttgtctctccttcccttccttctatctctgccgagtttcattgtactacctcgtgtcgtgtcagctgagacttgaaagaaagggacactgtgctgttggctcctgatgctcttgtttccttgtgggccctgccaccctgtgggctg

SEQ ID NO: 17881 - DNA, 314 bp, Setaria italica
  Peptide Sequence Number=SeqID_83855
tgcaaaccaatacattatattagctgcacaaggcacaaaccaatacgagcttaagcatggcacctccagctccggcgcctcaggcggctgcgacgacgacgacgacgaagagcgtgaaggccccgaccgcgaagcaatacatcatagcagctctgatggcggtcctcgtcgcggcgatcatcgtcaccgtcttcttcatcgtgctgagccccgcgcgcatcctcatctccgtcgccgacgcgagcagccacaagaccgccgatggcgtggagcttgccctgaccctctccgtcaacaacaccagcacgcgccgg

SEQ ID NO: 17882 - DNA, 329 bp, Setaria italica
  Peptide Sequence Number=SeqID_83856
atactttctagtctgatcaagaaaaccaatgccctagaaatgaagtggcttctgatgattattcttaaagatttgaagttggggataagtgagaagagcatatttgatgaatttcatcctgatgcccaagacttgtttaatgtcacttgtgacttgaaattcgtctgtgagaagctcaaagatcgaagtcagaggcataaacgccaggatatagaaattgggaaggctgtcaggcctcagctagctatgagagtccgtgatgcttcagctgcttggaagaagcttcatggaaaacaagtggttgctgagtgcaaatttgatggtgaccg

SEQ ID NO: 17883 - DNA, 267 bp, Setaria italica
  Peptide Sequence Number=SeqID_83857
gcagcaggaggatatagaggatagtagctttgttgctttaatatgtgtgttgcaagtcgcccaatcctgtcgccaggctttccaacaggtggcttgcgagaaatttcctcaccactgagctgtttcaagatgtccactgtacaacagccaaagtgtatctggttacagctgaatagacttggatttgccagacaagaaatctgatgtgtgatatcttctggtaaattcaggtcaaatgcaggctgagggaaaacaagtcatggtgag

SEQ ID NO: 17884 - DNA, 872 bp, Setaria italica
  Peptide Sequence Number=SeqID_83858
cgattgcaaaaccctagggtagccccctcgatcgatcggataccatggcgacggcgaggctccgatccgcggcctccctccgcggggttctcctccgccacttctccgtggggcccgcctctaccccgcacgctgtctcccgagtgccagattttcaggttcctcaggctattatatggaggcatttctcaacacgcaagcctaatcatcttgcaaaacgtgatgactttggtctgattgcctgtttgcacagtcagacaagatgggcttctcaagctgctgctgctgtgaaagaaactgaatccagtgggagcaagataagcattgggcccaaaccaaagcagattaaagaggatgacgatgatagtaacctggtttatcacggaccgatatcgtcaatcataaagaaagtgaagcttctctctctgtccacctgctgcctttccgtgtcgctagggccggtgataacattcatgacttcacccgatatgaatgtgatcctcaagggagcagttgcatccaccgtcattttcctcagcgccactacaactgcagcattgcactggttcgtgagcccatacattcacaagctcaggtggcgtcccggttcagatagctttgaggctgaggtgatgtcatggctggctactcccctcaaaaggacaatcaagtttgccgatattaggcctcctgaaaccaacaggccttttgtcactttcaaggctgaggggaacttctacttcgttgatggtgaacacttctcaaacaaggctttgttggcaaggcttaccccccagaaacttcctcatgagtctgcgttcaagaacttgtgatcgaaggttgttcgaccggcccatggctgcacttgttcg

SEQ ID NO: 17885 - DNA, 552 bp, Setaria italica
  Peptide Sequence Number=SeqID_83859
tttttttggttacataaccatagagtaatgcaatttcagatcaaaatatttgtttgaaggcatccaagtagacatcttactcctacttattccaactgctggctcaaaaccagatttcatagtgttcctaaactacaactgttcggcgccaacagcttgcaaacctcgacatggaaagtaacaacagcactaacatatagtaacacatctccgaaatattagcaggagtcattcataaaaatttcaaatggccaacaaaggttcacgaacaagtgcagccatgggccggtcgaacaaccttcgatcacaagttcttgaacgcagactcatgaggaagtttctggggggtaagccttgccaacaaagccttgtttgagaagtgttcaccatcaacgaagtagaagttcccctcagccttgaaagtgacaaaaggcctgttggtttcaggaggcctaatatcggcaaacttgattgtccttttgaggggagtagccagccatgacatcacctcagcctcaaagctatctgaaccgggacgccacatgagcttgt

SEQ ID NO: 17886 - DNA, 356 bp, Setaria italica
  Peptide Sequence Number=SeqID_83860
tgttggtatgcccgtagcaagatgagcgatgaagagcttaggaacatgattagcatgacactgacatgtcgaattgacaaaagggagaactgtggcgataagatggaggagtttctgcagaggtgcttctaccaatctgggcagtacaactcagaggaggggtttgctgaattagataggaagcttaaagaaaaagaggaaggcaaggtaccaaacaggctattctacttgtcgatcccgccaaacatattcgtcgatgtggtaagatctgctagccgcaccgcgtcttcttcaaccggatggactagatttatagtggaaaagccgttcggccgcgactcggagtcctcagggga

SEQ ID NO: 17887 - DNA, 2171 bp, Setaria italica
  Peptide Sequence Number=SeqID_83861
ccaaatctacctcaacctccggctgatcccaatggagtaacactcgcgaccatccctgttcccttctcctgctccattgatcccattcccatggccgccaccggctttcgcgtccacccggccgccttcttctcagctcatccgcgcgaggcaggggccaagcagttgccgttccaccattgctcacctcacaggatccttgtcgcaagaaggacgtggcttctcagggcgaggtcctccaatgggcgcccgcagatcggtgcctcgttcagcaacagcaatgaggtgctagatgggaagccagccggagatgggccaccaaagcagggagggggcaccgtcagcatcaccgtcgtgggcgcctccggcgaccttgccaagaagaagattttcccggcgctcttcgccttgttctacgaggactgcctcccggagcattttacagtgtttggttatgcccgtagcaagatgagcgatgaagagcttaggaacatgattagcatgacactgacatgtcgaattgacaaaagggagaactgtggcgataagatggaggagtttctgcagaggtgcttctaccaatctgggcagtacaactcagaggaggggtttgctgaattagataggaagcttaaagaaaaagaggtacggatatcgcaaatcgagttggatttgaattcagcaagcatcgtgcccgctatacctaatctgccgtgcaattcagaaaatgttctcaaaatcgtatggaagagcgatgatttgcatatagtacctttcttctgattggagttcagtttctaaggttagctgatgcatttgtgtggtgaaatgcgaaataaccgcgcttcagaattttgtgtcatcaggaaggcaaggtaccaaacaggctattctacttgtcgatcccgccaaacatattcgtcgatgtggtaagatctgctagccgcaccgcgtcttcttcaaccggatggactagatttatagtggaaaagccgttcggccgcgactcggagtcctcaggggagctcactcggtccctgaagaagtacttggccgaggagcagatattcaggattgaccattatttgggcaaggagcttgttgagaacctttcggtcctccgtttctccaacctcgtctttgagccgctgtggtcgaggaactacatcaggaacgtgcagctcatcttctctgaagatttcggcaccgagggtcgaggcggctacttcgacaactacgggatcatccgtgacatcatgcagaaccacctgcttcagatcctggccctgttcgccatggagaccccggtgagcctggacgccgaggacatccgcaacgagaaggtgaaggtgctgcggtcgatgcggccgctgaaggtggaggacgtggtggtggggcagtacaagggccacacccggggcggcaggtcattcccgggctacgccgacgaccccaccgtgcccaagggcagcgtcacgcccaccttcgccgccgccgctctcttcatcgacaacgcgcgctgggacggcgtgcccttcctcatgaaggccggcaaggcgctgcacacccggcgggcggagatccgggtgcagttccggagcgtgccggggaacctgtaccggcggagcgtcgggacggacccggacacggcgaccaacgagctggtgctccgggtgcagcccgacgaggccatctacctcaagatcaacaacaaggtgccggggctcgggatgcggctcgaccgcagcaacctcaacctgctctactccgagcgataccgccgggagatccccgacgcgtacgagcggctgctgctggacgccatcgagggggagcgccgcctcttcatccggagcgacgagctcgacgcggcatgggccatcttcacgcccgtgctcagggagctggaggacaggagggtggcgccggagctctacccgtacggcagcaggggacccgtcggcgcgcactacctcgccgcaaactacaacgtcaggtggggcgacgtcaccagcgacgacggctccttctagccaaaggtcgagccattggcgatgctctgcggttgtttgtgcattcttttgttggaaattgaaagaataaagaacctctcgcaggagaaagggaaagatgatggataaagcagctctgttcagtgttttcgttccata

SEQ ID NO: 17888 - DNA, 291 bp, Setaria italica
  Peptide Sequence Number=SeqID_83862
attcggaacatatgtacttggatctagattgtacaccttgcaactcaagcgcgtattcagaagagcaccaaactcaaagctcatgctcatgcaagtatggtcagataaaattctggaaaataggaaaaaaaacatactggacggctaaactagcaacatgttgtgttcaatgttgctttgaattcgttgatctttggaccattatttaccaagccatgaaatgtttgtataataaccgcaaaaaaaagaaattttgtttctgagatccatctcgtcaccccgatcaaaatg

SEQ ID NO: 17889 - DNA, 745 bp, Setaria italica
  misc_feature (5)..(5): n is a, c, g, or t
  misc_feature (73)..(73): n is a, c, g, or t
  Peptide Sequence Number=SeqID_83863
caacncaaaaatgatatcatccatggagcataagggttctcaacaacatgaaaatactgaagacagcgtaaancagcttacttggggccatggataagaagtgcaaggtccttcgtcattttgccagattccacagtttcaatacatgcagattcaagtttctgtgtaaaatccagcagcctatcatttttatccagctttgccctgtgttctagtccacgagtccaagcaaatatagaggcaatactgttggtactcgtctcctgccccttctcatgtaacctgaaatgtcttgtgacagtcccatgagcagcctcagcctccaatgttttcccatcagaagacaacagcactgatgtcatcaaacccagcgatccaaaacctgaaacaagcattcattaagaaaagtaaattgataagaaattggaaacatggaaaataatcatacaaaccttgggccagtatattacactatgcagtttctgtaagcacatcatctcaaaaaatagcattatatccaaattttcaacaacaggagaaaacttgtgcaaaccttgggccaggaaatcgctctgcacgtctccatcataatttttgcatgcccacacgtacccaccctcactttttacagcgtaggctaccatgtcgtcaatcaaccgatgctcataccatattgagttctcctcaaacttctccttccagttctcttcatatacctcctggaagatgtctttgaatcttccgt

SEQ ID NO: 17890 - DNA, 548 bp, Setaria italica
  Peptide Sequence Number=SeqID_83864
gctgtgctggccgtgcaggccactctcttgctccgccgccagagcctcgcccttggcgtcaccgtccaccactccgcctgcgacggcgccagctccacgcacttcctccacacctgggccgcagcggcgcgcgccggagcgccaccgccgccgcccccggtcatcgtcgaccgcatcccggactccaggggcctctacgacatctacctcaaaagcctgccgccgatcatctctgacgaagccttcgagttcgtcagcaagccgcccagctccttcgaggacaggctcctggcaacgttcacgctgccccggagcctgcaggagagcatcaagggcgtcgtcgccagcgaggcggcgcgacgcggcatcacgccgccacggtgctcgtccatgctcgccacctacgccttcatctggtcctgctactgccgaagccgcagcggcagtggcagcaaaaccaccagctacttcctcttctccgtggatcatcgcgctcggctgatgaagtcggccgtcccagccacctactttggcaactgcctctgccc

SEQ ID NO: 17891 - DNA, 400 bp, Setaria italica
  Peptide Sequence Number=SeqID_83865
ttgtaattgatgaatcctcccctctgtgccttttttcacactcataagaattctctcggcgattcttctatttgttatctttctgattccgccttttggaccaattttaactttggagggactaggggagggctgcggagatttattgcttattggatgtacttctgagtcactgctttctgagacagccattgcagttgaagaggtttcactttgctgagatttagtcttccttccactggagccgttctttttcctatttgtgcctggctggttcattgcattgcctgatgagtgagatggctcctcaccatcaataagcatgtgatcaattccagctacagaatccgggttcagaggccttatagcaatatttaccacaggatgcaccatcagcaat

SEQ ID NO: 17892 - DNA, 915 bp, Setaria italica
  Peptide Sequence Number=SeqID_83866
tgtcttgtcggtagtattttatttgtctttatttggtattgttactttcttgtagttcactgcttttctgagacagccattgcagttgaagaggtttcactttgctgagatttagtcttccttccactggagccgttctttttcctatttgtgcctggctggttcattgcattgcctgatgagtgagatggctcctcaccatcaataagcatgtgatcaattccagctacagaatccggttcagaggccttatagcaatatttaccacaggatgcaccatcagcaatgccactacaagctggctgtttttctgtaggaaacactaaatcttgagaacacccgtgtagcttgcaatcgaaaactagacatcgtcgacagaagagattgtcaaaggaatccaatgctgcatccaagtctttgtcaccgtacaaatcttccactttggcattatgctcaatcactttcttacaagaatcctgagttttctcaccttgcaggatctcatacctggcctttatgtcatcagtagccctatcaagatgttgagccagcgtatgcagtacagcatctgacatgccacattcttgaacagtcatccgaataatacaatcttctgaatgtttaaattccttcttctcctcctcatcgtcaatgccttcctcttcgctatcactgcaaattagtgcttcaccacaactggcatcatagtaaatcctccgccgaccaagtacagattgatcttccgacatcctctggttcctgtccaaaaatatccatgttgtataaggtggaagctttggcacttctggtagtttaattggtcgaatagaattctttgcactgagatttccacccaaaatggcattcgatgaggagaaaagactttcatcttgaaaactgctgccatctttgtca

SEQ ID NO: 17893 - DNA, 168 bp, Setaria italica
  Peptide Sequence Number=SeqID_83867
tcaagatgaagctggttgagttcagttactcaaaaatttatggggctgaggctgcaaagtatgttaaggtggtcaatgatgctgtgcatgaactgtacaaggagtatgtggctcagccactcccactgaccccagcctatgttgaggtggtcaatgatgctgtgcatg

SEQ ID NO: 17894 - DNA, 487 bp, Setaria italica
  Peptide Sequence Number=SeqID_83868
aagattagggatgttgatacgatggaggagaggtgtatgcaattatcagaaagaaaagagaacctgctgcaagcattcagtactatgcctggaaggatcagcttcactgtaggattgtggagaactagccagactcttgcctgtgtttcagttgcagggcagtttatcgactctgaatggaaagtacaccgaagaatgcttaacttcatgatggtgccttctcctcattcagagaatgcacttaccacttagtgaagcaattagcatgagcctttctgactggaatatgaaggacaaactattcaccatcacattggatagtgaatgctgctcacatgatatctacaatgcagatctgagggatcatctctcgatcaagaacaatctcatgcttaaggaacagctatttgttgtgaggtgctatgctcatatccttgatgctatcgttcaagatgtcatttgcttcaattcatggtgtcatctacgg

SEQ ID NO: 17895 - DNA, 611 bp, Setaria italica
  Peptide Sequence Number=SeqID_83869
cctgtagttacttcaaactagctatatgactctgcacttaacatcatgacagtagcaaacccaacttcaaacctttctaccatgaagcttggaaagttcagctagagctagcaaatggcacaggacatgaagatcccattttcagtagcatcaccaaggatatgcaccagaggtttgacaagtactggaaagattgcagccttgtgctagccattgctgttgtcatggatgatccacgtttcaagatgaagcttgttgagttcagttactccaagatttatggggatgagattgtaaagcgtgttaaagtcgtcaatgatgctctgcatgagctgtataaggagtacgcggcaaagccaactccactgaccccagcctatgttgagcaaagtgaagggaataatgggctagccaatgcaaagaaaagtcaaggagctcctgcttccactacacttctagattttgatgtgtacctttctgagatccgaagtagcgagcagtcaaaatctgaaatggaacagtacctggatgaatctctcaccacgtaatcttgattttgatattctgaactgggggaagcttaatgcaatcaagtttccaacaccctccaa

SEQ ID NO: 17896 - DNA, 2965 bp, Setaria italica
  misc_feature (559)..(559): n is a, c, g, or t
  misc_feature (2931)..(2965): n is a, c, g, or t
  Peptide Sequence Number=SeqID_83870
tcctagtaaccttattcatttataaaattgtgcaaaatatctgctgtcttttctagtttgttatgacaactttggtgatttacccgacagattagttttgtttaattttatctatgaaactatcaagtgatctgatgtgattaaaatatacctcacatgattttatttattctgttcattttcacaggccttcttgggttccatcgacaacaaacaagatctagcacactgctcggcctagctcgtacggattctggatcttggccaccacctcccgcactcctatttcacaagttcagctgctagcctataagcatggttgaggaaactgccaatgacactcaggtggcccaagataatgagattgcccccaatgatgaggcaattcaaggtgatgaaatggtgcaaggtgatgagttgacccaaggtgatgagttggcccaaggtgaagaattcgttcaaggtgatgagttggcccaaggtgatgatttggtgcaaggaaatgagctggttgttgctgaggaaacggacccctgggaccagaaccaggagagggggngtaagaagtccttggtatgggagcacttcactattgaagaagtcgctggaggggtcacacgggcatgctgcaatctctgcaagcaaacctttgcttacagctctggctcgaagattgctgggactagccatctcaagaggcacatcaccctgggttcttgtcctaagataaagcgtcaagagcagaggctgctgctgccttcagcaggaggtactgacaatgatggtgagggaactgcggagcggccaaccaagagacgctacagatatactggttatgcaaatgctgcttttgatcaagatcgcagttactcgtacctggcaaagatgatcattcagcatgactacccgcttcacattgttcaacagccggcatttgccactttcattgagagtctgcagccacgtttcaagattgtggatgttgatacaatggagggagaggtgtatgctgtttatcagaaagaaaaagagaacctactgcaagcattcaacactatgcctggaaggatcagcctcactattggattgtggacaacgagccagactcttggctatgtttcacttgcagggcagtttattgactccgagtggaaagtgcaccgaagaatgcttaacttcatgatggtgtcttctcctcattcagagaatgcacttagtgaagcaattagcatgagcctttctgactggaacatgaaggacagattattcaccatcacattggataatgaatgttcctcacatgacatctacagtgcaaatctgagggatcatctctccaacaagaacaatctcatgctcaagggacagctgtttgttgtgaggtgctatgcccatgtacttaatgctgttgcactggatgtgattgcttcaattcatggtgtcatctacagtatccgtgaaagcataaaattcataaaagcttcctctgcccgtgaagagaagtttgctgagattgctctgcagctggagattcccagtaccaagaccctctgtttggatgttacaacccagtggaacaccacttatttgatgttgctggctgccttggattataagcaggctttcactacacttgagacatgtgatgataattacaatgaagctccttctgcagaggattggaagaaagttgaggctgcctgtaattacctgaaactgctatatgactctgcacatagcatcatggcagcaggaaacccaacttcaaaccttttcttccatgaagcttggaaacttcagctagaactatccaacggcacaggacatgaagatcccattttcagtggcatcgccaaggatatgcatgagaggtttgacaagtactggaaagattgcagcctcgtgctagccattgctgttgtcatggatccacgtttcaagatgaagcttgttgagttcagttactccaagatttatggggctgaggctgctaagtatgttaaggtggttgatgatgctgtgcatgatctgtacaaggagtatgtggctcagccactcccactgaccccagcctatgttgaacaaggtgaagcgaacaatgggccagccaatgcgaataacagtcaaggagctcctgcttccactggtgatgggcttctagactttgatatgtacctttctgagatccagagtagccagccctcgaaatccgaactggaacagtacctggatgaatccctcactccacgaatccaggagtttgatattctgaactggtggaagcttaacactgtcaagtttccaaccctctccaagatggcccgtgatatattggccattccaatgtctatggtaagcagtggcagctccatattctctgctggaacaggaagccacatgctggatgactacagaagctctctccgtcctgagattgtggaggcacttgtctgcacaaaagactggctccagtactcaccagctaccacggaggcaccaacttctgcactggtcaaggctgaagggtcttaggtttgcagtggctactgcttccttgtcgaaccatgaatctatctgtttatcgtatctatgagtgtaggtaaccgtagaggtgtattgtaggctgagattgtgaactgattgttattctggtatttatctcgtagaggtggaacttgtttgtatcgaactttgttaactcgtcagtgtcatgttatagcttttggtatcgtgttctggtactgtctggctttgcatgcgatgtgcatgtacaagcttcagggtgcaggatgtatcagctggttgtctgtactttgtaccctggttttgtattcaatttgatatgcaccgtgaattgatattcatgtttgtgtaactagctgtagaatgtctaattgtaatgctattcatcacctctccagtgcttcaatnnnnnnnnnnnnnnnnnnnnnnnnnnnnnnnnnnn

SEQ ID NO: 17897 - DNA, 2320 bp, Setaria italica
  Peptide Sequence Number=SeqID_83871
tgatgatatggcccatggtaatgaattgatcaatgctgagatgaccccacacaccacatcaagacgtcggaggaagaagtcgctagtctgggagcacttcactatagaaaacatgccagggggaagctcaagagcatgctgcaatttatgcaagcaaacctttgcgtatagttctggttcaaaaattgcaggcactagccatctcaagaggcacatcaccctcggttcctgtcctgttatgaaagaccaagacaggaagctagcactgccaccaccaggaggccctggcactgataatgatggtgagggtactgtagaacgccctttgaagaggcgctacagatacactggttatgcaaatgctacttttgatcaggaaaggagcttctcttatctggctaagatgattattttgcatgactacccgcttcacattgttcaacagtcagcctttactacttttattgagagtctgcagccccgtttcaagggtgtagatgttgaaacaatggagggagaggtttatgctgtttttcagaaagcaaaggaaaacctgttgcaagcattcaacacaatgccaggaaggatcagcctcactataggcctgtggacaaccagtcagactctaggctatgtttcgcttgctgggcagtttatcgactcagaatggaaagtacaccgaagaatgctcaacttcatgatggtgtcttctcctcattcagagaatgcacttagtgaagctattagctcaagccttttagagtggaatatgaaggacaggctattcactatcactttggataatgattgctcttcccatgatatttacagtgcaaatctgagggatcacctctccaataagaacaacctcatgcttaagggacagctgtttgttgtgaggtgctatgcacatatcctgaatgtagttgctcaggatgttattgcttcgattcacggtgtgatttacaacatccgtgagagtatcaagttcataaaagcttctccaagccgtgaggagaggtttgcagagattgctctgcagctggagattcccagtaccaagaccctctgtctagatgttacaacccagtggaacaccacttatctgatgctgctggctgccttggactataagcaggcttttgcgacactagagacatgtgatgataattacaatgaagctccttcagcagaggattggaagaaagttgaggctacctgtaatttcctgaaactgatatatgactctgcacatagcatcatggctgcagcaaaccctactgcaaacatctttttccatgaagcttggaaaattcagctagagctagcaaatggtacaggacacgaagatcccattttcagcagcattgccaaggatatgcatgagaggtttgacaaatactggaaagattgcagcctggtgttagccgttgctgttgtcatggatccacgtttcaagatgaagcttgttgagttcagttactctaaaatttatggtgctgaggctgggaaatatgtcaaggtggtcaatgactctctgcgtgagctgtacaaggagtatgtggcacagccactcccattgacccccacctatgttgaacaaggggaagctaataatgtggctgccaatgcaaatgctactcaaggaaatcctccttccactactgatggtcttcttgactttgatatgtatctttctgagattcaaagtagccagcctgcgaaatgtgaactggagcagtacctggaggaatccctcactccacgtatccaggagtttgacatccttaactggtggaaacttaacacgctcaagtttccaactctatcgaagatggcccgggatatcttggccatccccatgtcgatggttagcagtggcagctcaatattctctgctggaaccgggaaccgcatgcttgatgactacagaagctcccttcgtccggagactgtggaggcacttgtctgcgcaaaagactggctccagtatgcaccagatcaaactgaggcgtcaggttctgtgatggtcaagtcagaagcatcgtaggttcactgttgggagcttccatgttggagcaggaataagtttgtggtatcaatgagtgtagttaactgtaggcatattttaggcagcgattgcagaaacattgtgatctattatgctatttatctcctagtggtgtaatttttcgtgtcgaactcagtttaactcatcgaagtgttctttaatgtattgagtttagctggtctgtctgcgggatgcataatgtggtaacttaatacagttatagcagatttttgaaactaaaaaaaaaaa

SEQ ID NO: 17898 - DNA, 3016 bp, Setaria italica
  Peptide Sequence Number=SeqID_83872
tacttttacttaagttttagtttaattagtaactaaacttttggttagtattttacccgtactagtatttagtttttgtttaattttattctatgaaactatcaagtgatctgatgtgattaaaatatacctcacatgattttatttattctgttcattttcacaggccttcttgggttccatcgacaccagactctagaacgcacaactagactacggacctagctcgtacggattctggatcttggccaccacctcccgcactcctatttcacaagttcagctgctagcctataagcatggttgaggaaactgccaatgacactcaggtggcccaagataatgagattgcccccaatgatgaggcaattcaaggtgatgaaatggtgcaaggtgatgagttgacccaaggtgatgagttggcccaaggtgaagaattcgttcaaggtgatgagttggcccaaggtgatgatttggtgcaaggaaatgagctggttgttgctgaggaaacgacccctcggaccggaaccagacggaggagaaagaagtccttggtatgggagcacttcactattgaagaagtcgctggaggggccacacgggcatgctgcaatctctgcaagcaaacctttgcttacagctctggctcaaagattgctgggactagccatctcaagaggcacatcaccctgggttcttgtcctaagataaagagtcaagagcagaggctggcactgccctctacaggtggtactgacaatgatggtgagggaagtgtggagcggcgaaccaagagacgctacagatatactggttatgctaatgctgcttttgatcaagaccgcagttgctcatacctggcaaagatgatcattcagcatgactacccgcttcatattgttcaacagccgacattcgccacttttattgagagtctgcagccacgtttcaagattgtggatgttgatacaatggagggagaggtgtatgctgtttatcagaaagaaaaagataacctactgcaaacattcaacaccatgcccggaaggatcagcctcaccataggattgtggacaacgagtcagactcttggctatgtttcacttgctgggcagtttatcgactctgagtggaaagtacaccgaagaatgcttagcttcatgatggtgtcttctccccattcggagaatgcacttagtgaagcaattagcatgagcctttctgactggaacatgaaggacagactattcaccatcacattggataatgaatgctcctcacatgacatctacagtgcaaatctgagggatcatctctctaacaagaacaacctcatgcttaagggacagttgtttgttgtgaggtgctatgcccatatccttaatgctgttgcacaagatgtgattgcttcgattcacggtgttgtctacagtatccgtgaaagcataaagttcataaaagcttcttctgcccgtgaagagaggtttgctgagattgctctgcagctggagattcccagtaccaagaccctctgtctggatgttacaacgcagtggaacaccacttatctgatgttgctggctgccttagattataagcaggctttcactacactagagacatgtgatgataattacaatgaagctccttcagcagaggactggaagaaagttgaggctgcctgtacttacctgaaactgctatatgactctgcgcatagcatcatggcagcagcaaacccaacttcaaaccttttcttccatgaagcttggaaacttcagctagaactagcaaatggcacaggacatgaagatcccatttttagtagcatcgcgaaggatatgcatgagaggtttgacaagtactggaaagattgcagcctcgtgctagccattgctgttgtcatggatccacgtttcaagatgaagctggttgagttcagttactcaaaaatttatggggctgaggctgcaaagtatgttaaggtggtcaatgatgctgtgcatgaactgtacaaggagtatgtggctcagccactcccactgaccccagcctatgttgagcaaggtgaagcgaataatgggccagccaatgcgaataacagtcaaggagctccttccactggtgatgggcttctagactttgatatgtacctttctgagatccagagtagccagccctcgaaatccgaactggaacagtacctggatgaatccctcactccacgtatccaggagtttgatattctgaactggtggaagcttaacactgtcaagtttccaaccctctctaaaatggcccgtgatatcttggccattccaatgtccatggtaagcagtggcagctccatattcactgctggaacaggaagccgcatgctcgatgattacagaagctctcttcgtcccgagattgtggaggcacttgtctgtgcgaaagattggctccagtactcaccagctaccactgaggcaccaagttctgcactggtcaaggctgaagggtcttagattcacgttggctactgcgtccttgtcgaaccatgaatctatctgtttatcgtatctatgagtgtaggtaactgtagaggcatattgtaggctgagattgtgaactgattgttattctggtatttatctcgtagaggtgtaacttgtttgtgtcgaactctgttaactcgtccttgtcatgttataggttttgttgtaccatgttctggtgcaggatgtatcagctggttgtctgtactttataccctggttttgtattcaatttgttatgtactgtggatggatatggcatgtttgtgtatagctgtgtagaatgtctcattgtagtatatgtgtcatcagccagttgtactgaatcagtgctgtgtttgtgtttgaaatggttatcgtggcgtgatggcaccatgtgttcaactgttttgtgtatttatctgtttaactgttttgcgtagatacaatatgcctcttcatgtgtgatggcaactacaataaaaaaaaaaaaaaaa

SEQ ID NO: 17899 - DNA, 590 bp, Setaria italica
  Peptide Sequence Number=SeqID_83873
cttgcatggaacgacttaatggacatgatcttaagaaatgtacttacatttaactatacatttgatgcgccatttcatttcaggtaccgtcttttctaactccacgacacggtgtcaagtttggaaacaataattctgtccctgaggttgtagtggatgttccatcaaaccttccacgatcaacagaaacagctcaggttggtttcttcttgaccttccacattcttaacttctttatcccgtggttggaatgcatcacacggctacctcttatccgtgtgctttatttattcgcatatttttaaggaaaaagtctaatttactacccatgtatagtctaaatccaaataaccccctaaagtaacgaaaggtttacttaaccccctgagtttgttaaaccgggttacacttcacctttatctcatatctaaagtaacgaaaggcttaaacccctgagttttttttatctcatatcttcaactttattcgctacctataggaacaggtgcttctttcagttgcaaaacacccaataaaagaggtagagaagaacagaaaagctgcagctttgtattcgtctagtctaacta

SEQ ID NO: 17900 - DNA, 1727 bp, Setaria italica
  Peptide Sequence Number=SeqID_83874
caactgagctctttctcctctccgtccttcaattcgtcctcctcgctagctccatcgtctccaggaagaaagaaaaagaagagatcgttggttggttagttgagcgaccttaaagcaagcaggatgttggaagcagtagagcagcgctccacactgctctgggagcggctgcggcgagcgtcggagacgaaggagctgctggcagcagaagctggttcatggcaagcagagcacggtgagggcagtgatgacgaccttggaggagcaagggagcctccggtgagccggtggcgatggctcaaggccgtgtccatggtggcgttcggtggccggccggcatacaagccggtagcacaaatagtgcctcttagtgatcagccgccaaagtctggaagtgatcacaataatttactggaggcagctgatacaggtcttggggcggaccgtccacaaccgagagtcactgctcaggcacaggctcggttatctccgagagacgttgccaagattagaagcaataatccagtccctcaggttgtaatgccggttccatcgaaccttccaccatcaacagaaacagttcaggtaccgtcttttctaactccacgacacggtgtcaagtttggaaacaataattctgtccctgaggttgtagtggatgttccatcaaaccttccacgatcaacagaaacagctcaggtagctgatcagatgaaaaagaagcagcaggagcgttgcctcaaatactcacagaaggcccttgcgtttgccgtctgcacattcattggatacgcaagtgctgcaaaggcaagtaggaaaagttctgaggatagtgaaccaagcaatatcaacataactttcaaactcgccatggtacccttcttcattgccctctgcgcggacctcttttcgttgaagacgaaggcaaagtatggccgtgcctttgtcttcctatcatcattccatctggtgctgatggtatacctcgtattcatctcattcgacatgagatatgcctacaccatgatcttcctgcctctagtggctgtttcctcccttcttcaacaaaagctatggcctgggcagcaacaaggcaccgatgaaaaagctaataaaaacctagacagcatctttgagttgtcctctcttatcctcaactggagcacctttatctccgcgctcatggtcatattcagggaattaaagcctaacgaaaaatatgaagatatagcacacggtgctgtagggctcttcttcttcctcactatcgttctagggctctatctaatgctagtcacaacagtgagaattccggaactggtacgtgtgaggtacctcgatgtcctgcttatctgcctgctcgtcggcactatcatctccgccttgatctcgtttctacattttacttgaagacggagcggaagtcctatatgcagccaggtctaggtgtcttggaaacaaattgcacttggtgtgcataaattgtgtactatagtcacgaacaatttgttggtggcctgctgctgcatattgatgtgttgcacctctcactcacatgctacggaaagaaataggcaaaatagccccatcggtcatccagatcgtttttgtccctgaaccgtcaaaagagctgatttggtccctaaactgttatatatgtctggtcgaattcagtcattgatcttatgtggcatgccacatcagctagaaataaaaaaaaaaaaaaa

SEQ ID NO: 17901 - DNA, 469 bp, Setaria italica
  Peptide Sequence Number=SeqID_83875
cttccgacatctctaaattagtttccgtgttatcccctattggttgaacagacgcccaaggggtggcatcaggaatcccatttttcacattggattgcttctgcttcagcacctcttcagatactgatggcctggggtttccatatggcctaagacatgtaagggcaagagtgaagagaacattgaacaacgcggtgaatccgagcaatgcaccaaagcctatccaataccacctggcttccgggaacaccccatgggacttaaggacttgcacaccgagagtctcgttggagacagtgctattcaaaattttatcccagctatgccccaaaaactcattcactgtgatggcattctgcacatacatcagcggggatatccagtagccccagatccaccatttcttcacgtcatctcttactagaatgaaaccgtttacgaccatgaaagtcatcataatgagcattgc

SEQ ID NO: 17902 - DNA, 1096 bp, Setaria italica
  Peptide Sequence Number=SeqID_83876
tagtacttagtgctgcttttgacttcaggagaatctcaagaccatgtttgagttctctactgaatgaatgttcagctttctctccaaggttgatgagacccttgtatggtattttgattacctttttccttgacaatgaagagttagccagcaatttttttgaagagctctcaatttgtttgctaacacaatgcactgcatgtcggaacaattgaaagtcaatgcaaccaatctgctctgcaagtgatgccttttggaccttgtcccctgataccaaaccttccagaacatggccctgatccatttcggagagcaccttctttccagcaattacacgtcgttgaagcctcttcctgtccttccactccatcacacgcctttctttctttgatctcttgtcagatcgtgaattgagctcaagtaacccctttggaggtgtaatccacatttctctgctctccatatcaacatcaggtacaatatcttcagcaaatggaatccacacatgatcacgtgatgaagttgaatcttgattttctgaatctggatccacagcagtaccctcagcagagccaagcatcacctgtagaagatctccgcctccaaaattgaaaacctggccaactgttcctacaagcttgcctgtatccttgacaataactctcattccaacaaggtcaagtgagaagaactcatcgtcctcaatttctggcctatctccagctttcacgagtatagctgaaccgactatttgcctagcctcatccaggttatggataccatcgaagctgacgatccaacacttcttccccgtgtgggcccttcctcgaacaagctcgaattccctgacctgttgcttcccagcagcccgagccctcagccatctcgtccccggcgtggcgaaacggagctcggggaagtcggtgcgtggcgtgacgaggacgtccccgcgcaccccgtgcgcgccggacacgtagcccacctccaccagctcctcgtcgtattcctgttcctcctcctcgccgtcgtattccctttgctcatcctcctccccatagaattcctcttcgtcttccacctcctcctcctgctcccg

SEQ ID NO: 17903 - DNA, 1061 bp, Setaria italica
  misc_feature (1022)..(1061): n is a, c, g, or t
  Peptide Sequence Number=SeqID_83877
ggaaaagagagaagaaccagtcccgtctctttcgttctgggaggtcgacgaggaagaggagtcgagcacccgaccggcgaccagcccgcggcgacgcggcgccaggagaggtgctcccgactcctgagctccggatccccatcccgccgtcaagcagttgcgcccgccgcggccgtagcatgaggtggccgccgccgatctcgcatcgccgccgccccttcctcctcctcgtcctcctcgtcgccctctactcgattcctggggctttttccattgaggcatgtcacgctcaatacggttgagatatttactactcatgaatggtttggcaagccaacagtgtatttccgttgcaatggagagaacaagacaaatttgccagacgtcaaggaggcacacgtggctctatgcctttaagggtgaagaatcatggcagccattagcagagcttccagaaaagaaatgcaagcggtgtggtctgtatgaagaggacgcatttaaacctgccgatgtatttgatgaatgggagatgtgttctagtgatttcaaggatggaaaatatacccgctttaaggaaaaccagttcaatgcaacattcctatgcccaaactgtactgcttctgctggtgatcatggaaacggtgagcatagctcggaggtggaaactaataaggcatctgttccagttatcattgtagttagtgttcttgcttcagtacttgtcatcattgccttgtttgggggctataagtactggcagaagaagaagagagagcgagaccaggcacgattcctcaagctctttgaagagggagatgaccttgaagacgaactggggcttagcaatgaattctaaatcagtgagtacagtacttactaggtacaggctacagtcaatattttcagatgtagtttccacgttgtcatgtatagaatgcgtaattttcactttgaaattttgtagtgtgtagcattaccgtagtgtaaagaaacgattctgacaaaactatgattcagttacnnnnnnnnnnnnnnnnnnnnnnnnnnnnnnnnnnnnnnnn

SEQ ID NO: 17904 - DNA, 296 bp, Setaria italica
  Peptide Sequence Number=SeqID_83878
atcacaaattctgacacgccgtagtgcccactcagcctctcctttctgaatatctttacatcctctacaaaagaagggaatcctccaatggccatgaaagttaaaagtgcagtggtatacattattacttcacatcgactctgcaaaatcggagacattatgagtgttacacatataagatatttgttctatctgcccctacattaatcatatagtcactttacctggatagaactgtaactatagccgacttggtagaagatagtgccaagacatacgccaatgccatatagaca

SEQ ID NO: 17905 - DNA, 591 bp, Setaria italica
  Peptide Sequence Number=SeqID_83879
tttgttacagaagcctgcttgttctcttctcttaaatgaagctccatccatgtttttcatctcaactatttggtacgttgttttttctgcataactggaggatttgtatgcagtcgtcagaatgtctatcgcttcagctgctgttttcctgtttgctttagaactctccacattttcctatatatgagatgatattagatgaatgacactgaatatgttcgaatttattggaatgtatacctcatcaaagtctttattgattgttcttagaaaatggtcggatgggctcctcagatgtggacatggaaagccgctcagagtaaagaactcggtggcatcggaggttgtcccaaagaacaccgtcttcccggcggcgagcaagcagagcccatggaagagctcgaagacgtcgccgctgggctggtgcacggcggagacgaccgtcatcccctctcggacggcgatccgggcgatgtggctcatgacgtggtaggaggcggcgctgtcgagcccgctggtgggctcgtcgaggaagagcagccgcggtcgcgtgagcatctcgatgcagatgctcacccgcttccgctgccc

SEQ ID NO: 17906 - DNA, 1059 bp, Setaria italica
  Peptide Sequence Number=SeqID_83880
tcctcgtttgcctcccaattttggtctgatttcctcggcaatcttgacgatagcgaagaagataagcctgtatagcaccatcattccacataggatggcaaggtttacccatttcgagtaccccatctccacctgcaacttgctcttcaggacctgaataccactgatggtgacattagactcaaccagctgatcacttgggaatgacagtcccatgaactcgttcttgtagaatccttgcaccgcgtacttgtggaaggagatgtagtagcaggggtacttccatactggcttcgggagctcactgggaaggcggaagaagccgccattgagcatcatcaccccctgcaccccagctccaatgatgattcccatcaggaagtccggaacaatcgcggcgataatcatcatcatgctctcaaccagcaggcaacatatgcaaaggacgatgacgaaataggtgaagtgatccacgccttttgttagtccagtgaggtagtatagcattgcaccgggtaatacagcaatgacagacaggtatggagtggctgaaagggtgtttgagatcacaaattctgacacgccgtagtgcccactcagcctctcctttctgaatatctgaaacaagcgtgtcaattgtggtaagagtgagctcagaattaaggtgataagagtaacacctatgtgcttataacacgggagaatgtagcatttcgtattggaaaataggactactagtttatacacggttcctgaacttgctagaatttcttctaatcctgagtaaagataactttcaactaattctgtgttggttatattctgaatgtcataaagttatttcacggtaattttgaataaaactatctccagcatggaaaccactctgaattggtgaagaatcaacctttacatcctctacaaaagaagggaatcctccaatggccatgaaagttaaaagtgcagtggtatacattattacttcacatcgactctggatagaactgtaactatagccgacttggtagaagatagtgccaagacatacgccaatgctct

SEQ ID NO: 17907 - DNA, 1404 bp, Setaria italica
  Peptide Sequence Number=SeqID_83881
tgttctatttgtcttgttatttacccggttgtctaattgtctatacttacctcactggactaacaaagtccagtgaggtagtatagcattgcaccgggtaatacagcaatgacagacaggtatggagtggctgaaagggtgtttgagatcacaaattctgacacgccgtagtgcccactcagcctctcctttctgaatatctttacatcctctacaaaagaagggaatcctccaatggccatgaaagttaaaagtgcagtggtatacattattacttcacatcgactctggatagaactgtaactatagccgacttggtagaagatagtgccaagacatacgccaatgcccatatagacggccaaacgcatccagtagtaacctatgtccctatgcatattcaagaatgatctccttgtgagcacaaggagctttgtacagaagcctgcttgttctcttctcttaaatgaagctccatccatgtttttcatctcaactatttggtacgttgttttttctgcataactggaggatttgtatgcagtcgtcagaatgtctatcgcttcagctgctgttttcctgtttgctttagaactctccacattttcctcatcaaagtctttattgattgttcttagaaaatggtcggatgggctcctcagatgtggacatggaaagccgctcagagtaaagaactcggtggcatcggaggttgtcccaaagaacaccgtcttcccggcggcgagcaagcagagcccatggaagagctcgaagacgtcgccgctgggctggtgcacggcggagacgaccgtcatcccctctcggacggcgatccgggcgatgtggctcatgacgtggtaggaggcggcgctgtcgagcccgctggtgggctcgtcgaggaagagcagccgcggtcgcgtgagcatctcgatgcagatgctcacccgcttccgctgcccgccgctgatgcccttggtgatccggccgccgatgcgcgtgtccatggcgtcgccgaggcccatctcccggatcacccggtccgcgtgcgcccgcttctccggcggcggcatagtgtccggcagctgcagctgcgccgagtagtacacggcctcacgcaccgacagcgtcgacatgagcacgttgtcttgggtcacgtatgctgaggttccataggcaagcttctcctgccgaccattgattaaaatcagccctgttttgttcatgcctggtcctaatcttcctgcgagggtgtcgaggagcgtggtcttgccgcacccagacgggcccatgatggccagcacctccccgggccgcgcatggccgctcaccccgtccaggatgtccaccgccggcgcaccgcgggcgccgcccgccaccgtcacgcgcacctcctcccacgtcagg

SEQ ID NO: 17908 - DNA, 1224 bp, Setaria italica
  Peptide Sequence Number=SeqID_83882
cgctctgctccgctgcaactccccagaaaaagaagctccgggaaatttcctattagcatttcgaattctcgatctggcttgcggcggcgccggaccggatgcgggaagccggcgctcgatctgggcattgaagtcggggcaggaactggctgtgtttggatgagttgtagtattgaaagtggcaactattcacggttgtgagcgaaatggacaggaaagttgctagcaacgtggagcttgattctgctgtcttccaagtatcctcgcctgacaacaggtatgaggcaattgcttgcagtaaggggaatacagaattgatagcatctggtcctttcgatcagttagttctgcacctggaagatgccaaaaaattccaatcttgtacatcaagtggcacttttaaactcttattggctggggatggaaaagggtcttcctggtttaccaagtccaccttacagagattcttgcatatcattaattcatctgatacctcaaaaatcggtcaatggggttttagacgagatgtcacagctggaggaaaccagaaagtttcatcaatcgctctatattaaggagcaacaaaatattactagtggtgctttaacaggaggcttgtttggtactggtgccatagcacaacaggaaaatgttggcccaaattcatcggagactacaaagaatgaattgcttcgagcactggatttgagattgaccgcactgaaggaagagatcttggtcttattgaatcgagctgttggatccaatttgtcgacaagagaaatctctgatttatctgcttttgttcagcgatttggaacctcagagtttagttggttgatgcggtgtatgttgttgattgcggattgtcaaccctctgagctccctccacaacaggactctacagctgagaaaattgacatgggcgacaatgcacataaaactcgtgatatcagccctcagaccaatctccagaggcctattgccaacaatgtctctccagcaaagcttgcacaaattgagcgggaaagctcgacagaaagtgatgattcctctgagtccagtggtgaaggtgaggctgttgttgaaaggagccggcctcttgtaagatctgcttcacctagaagatctgcttctccaatgcggagggttcaaattgggagatcaggatcacgtagatcaacggcaattgccattaagagcctcagtttactttcccttcct

SEQ ID NO: 17909 - DNA, 2853 bp, Setaria italica
  Peptide Sequence Number=SeqID_83883
accagttccacaaagggcacgggtgaaatacgttttctgttacagtgccagttttgggggtcattgctgatttcttctaggcacaaattgagcgggaaagctcgacagaaagtgatgattcctctgagtccaagtggtgaaggtgaggctgttgttgaaaggagccggcctcttgtaagatctgcttcacctagaagatctgcttctccaatgcggagggttcaaattgggagatcaggatcacgtagatcaacggcaattgccattaagagcctcagttacttccctcctagtcagagaattcctttggataaagatgatgaaagcaatggtgaaactgaccagccaccaaggaaatctgacaataacgtaagaaggatgagtgtgcaggatgcaattagccttttcgagagcaagcagaaggatcagaatccagattctcaaaataagaaagctggcttgtttactactaagtctgtcctgagaaggtggagtgctggaatgggtgattcgttgaatgataagtcagaagaaagaatctcagattctacatctgagagtaaaccgaacaacatggcttatgacacagagaaggaaggagctgaaatgaagactgaaccagatgaagcaccaaagaattttattacatctgaggttgaaggtttaactttccatgctgattctcctgacactagggtgtcaggaatggagagtgcagtttctagtaatatttgcgcagaacaaacaaagtctggactggaggaaagcagtgatcgtgcaatggcctcagctgagtggaatcgacagaaggaagctgagcttaatcagatgttactgaaaatgatggaggtcatgcctggaaagtttgcaggtgctaatgcaattgctgctggcctcgattccaccaatcagcagaaaggtgcaactcacggtcagcataaagagaagcgagacgcaaagattagaaccgagaaaggcacaaggcggcctacaaaggaggtgagctccaagcccttgaaggatacatttgggcagaagaaatcagcaatgacccccaaaactggcactgtaacagaaaaacgtatttcaccagttccacaaagggcacggcggaattcctcacctccggtcctacccaaagaagtagcttcaaagacaccagtcagaaaaagcttaccaaaaccatcaccatcacccgcacctgcgcctacaacacgtagttcatggtcaggtggttctttgacaaaagcaactacaacacaaagaactaaaaattctcctgggaccggaatggcttcgacgtctacaccaactagccgaaggaggactccagcaacacccccatcgtctcagctggcttcaaaagtggaaagaaccattcaaccagtgaagaacaagaaggaaactgtgactgctacaaagccagctataaagggacaagaagagaagaggacaaaaacggcaacaaagacaagcagaataactaaagtttcaccttcgttagaagaaaagtcgagtgtaacaacgaagcaaagcttgcacaaggtttcaaagaaaagcagtgttgtaccagtggagtccaaacccttaaagaaagccactgggattagtcaaagcgttggttccggtactgtgaagaataaggtgccccaacttgatgactcctcaaaagatagtggaagtgttaaccaagctgaagataaggagcaatctcctatgacaaccgagccaactactaaggtactggaggctgatcttgctcaaccagcacatgatgttgatgaaaatttagaaatttcgctcgataatgacttgaatattgaaaaaacagagaaaccggcctcgagtttaactgcaacagaaatgggctccagtgaccaggttgagccccctaccaatgaggcagatgaggccatacaacctccagacgaggacatgggtatctcatcagctgcctgggtagaagtagagcatcaagagcaagaagtcactgacctgagtgaaaatgtagtggccgaggatgtaacttcccctggaattgcaccattgccatcatcaagtccaagagtccgtcattccttgtcacaaatgctgcaagcagatagcaatgaaccagaaattattgagtggggaaatgctgaaaacccacctgcaatagtttttcataaggattccccaaaaggattcaagaggcttctaaagtttgctcggaaaaataagggggacaacagtgctaatggctgggcaagcccatcggtagtttctgaaggagaagatgaactagaagaatcaagaggcactagtgacggtgcaaattcgagcaggagaacttttgatggttcaaagactaatagcatcttatcagctcaatcaaccaccggcagcttcaactctatgaattcagataagcaaagggagaggcctggagctgccacatcaacaaaagcatcaaggtcgttcttctccctctcaaacttccggagcagcagatcaaatgagtcaaagcttcgatagcatatgcattttgccctgcagatacatggatagttttatcccccactccgttcaggaggcctactagatgtaaaaatggtttgcgatttgattgttgggacggagccagcttgccgtgtttggttctggttgccttccatttgatatagcttctgcctatgagatgtcatactttgcttttctgtacatttctatcttctacagcggttgcgagctgattgagatgtcagatatgtttgcatggctcgcaagagacttgcttactccaaaaccaacgagaactagaccaaagtaattcttctagtatttcttactattcttgtagtagttaaaccgtaa

SEQ ID NO: 17910 - DNA, 375 bp, Setaria italica
  Peptide Sequence Number=SeqID_83884
cggctctcgctccttccccacccacgaaccctcctggaggggcaaaaaaggggttcgaatttgctcctgatccaagcgccaggctcctagattccgcctcccaaatcatcttcccgatccgatctgccagttccccttcgatcccgcttcccccagccgattcctgagaagatctgagtcctccccgcgaccatggatccgcgcgccaggtaccctccgggcatgggcaacggccgcggcgggaaccccaactactacggccgcggcccgccgccgcaacagccgcaacagccgcaccaccagcaccagcagacgtcgggggcgcaccaccaccagcagtacgcgcagaggcagcagcagcagcatcaccaccac

SEQ ID NO: 17911 - DNA, 1180 bp, Setaria italica
  Peptide Sequence Number=SeqID_83885
aaaaaggggaccaacaattaaaaagagactcaaacaccaagagcctccaaaacatggtgccgcgaattcgatgatattcatcgacagtggcactatgcagaagcaacaagaaacaactgggttcatatgattaagggaacaatccctaaggcataataaactgacatccaatgatccaaataatctggatagcaatagaaccatatatcaacaagctgttagttgccttgaaacgctaccaacatcaccgagttctctatttatacatgcctctttatgtctcaattgatgggaatcttgcacgtcagtggagttaacactgcaagtcgatgcagtcacacatatccaagatcatcaagttgcctagctaatatcaagcgcagatatctctcaactggtaggcaatgatttcgatgacttcctctttttgtgagccaatgctgatagtatctttttcctgggacccattggaattcctaaagacttcatatcttcttcattcatgtaagccattgctttcatatcaacctcttcagcctggaaatttatcaaatacttctctagatcaagagacttcagtaaactctcaagtgaggcatcaaccttttcctgggattgttgcggcgcaggtggcgctggtgccggtgccggtgccggtgccggtgcaggtgcaggtgcaggtgcactgactttcttaacgacaggaggggccgcaattggaggggggtctctcttctgaacaggtctgtcgctattaacgatctctcttgcaggctttgggacctgaacagtactgctaagttgagggcgctgactcgggatgccagataacttttcacgaagatctggaactgatgatttcttcacaacctgaatcctttgctccactcgagattttttgtttggttgaacatctctggaagtaggtccagatgaagtttgagttcctccagaattcttataaagctcgcgcctccacgtcccatcatcccggcgaaacctttttgcgtcgtcagaccgcgagcgcgagacgccgcccgacccgaggcggtccctgacggagcgcttccgcccggaggacctgtcggcgtgcatcgcgactgcggaggcggcggtggcggcgggcggggagggcttgggagcgcgtagggtttcgtcggcgaggaggggaggacgacgg

SEQ ID NO: 17912 - DNA, 275 bp, Setaria italica
  Peptide Sequence Number=SeqID_83886
ccacactaaagccatcaaaatttatatggaacacatgcaatttattcatgtgaaggcatgatttacattcacaaactccagaataaccaatcgaccatggaaaccagggagcagtgggcacatcgcctaccagcccacacttcatcttagagctcccactgtacaccatgatcacagcaacctctataggcatgcatatgtatatctacttatgcagggacagggctcaggccagctgatggttgtaggctcgctgcgtatctcctcgcccaaca

SEQ ID NO: 17913 - DNA, 278 bp, Setaria italica
  Peptide Sequence Number=SeqID_83887
agcaacctctataggcatgcatatgtatatctacttatgcagggacagggctcaggccagctgatggttgtaggctcgctgcgtatctcctcgcccacagatcataatggatgatgtcctcaagcgacgggcgcgttaccagctcgttccgatgggcgtcgcatgtacgctccaccaccttgaagatgtccaggtagctaatcttttcatcaatgaacaactccacagccttctcattagcagcactcaggacacctgtcatggtacccccagcccgg

SEQ ID NO: 17914 - DNA, 267 bp, Setaria italica
  Peptide Sequence Number=SeqID_83888
ccaagataaggtgtacaagattggtatccgcatatctggccatcccagttgagctaggacggatgaatcctgggtttcaaccatagagtgtatgatagactgtgggtgaatcacaatctcaatgtcatcatattcagcgccaaataaataatgtgcttcgataacttctaggcccttgttaaataaagtagcagaatctactgtgatcttcttccccatattccagtttggatgctttaaagcatcagcgactttaacatctttcaa

SEQ ID NO: 17915 - DNA, 687 bp, Setaria italica
  Peptide Sequence Number=SeqID_83889
tggttgtaggctcgctgcgtatctcctcgcccacagatcataatggatgatgtcctcaagcgacgggcgcgttaccagctcgttccgatgggcgtcgcatgtacgctccaccaccttgaagatgtccaggtagctaatcttttcatcaatgaacaactccacagccttctcattagcagcactcaggacacctgtcatggtacccccagcccgcccagcagcataggcaaggtccatcgaagggtattttacattgtcaggagctttgaacgtcagtgaacccaatttgcaaagatccagacggggccaggtgacctcagagcattaaaatttatatggaacacatgcaatttattcatgtgaaggcatgatttacattcacaaactccagaataaccaatcgaccatggaaaccagggagcagtgggcacatcgcctaccagcccacacttcatcttagagctcccactgtacaccatgatcacagcaacctctataggcatgcatatgtatatctacttatgcagggacagggctcaggccagctgatggttgtaggctcgctgcgtatctcctcgcccacagatcataatggatgatgtcctcaagcgacgggcgcgttaccagctcgttccgatgggcgtcgcatgtacgctccaccaccttgaagatgtccaggtagctaat

SEQ ID NO: 17916 - DNA, 330 bp, Setaria italica
  Peptide Sequence Number=SeqID_83890
ctaattcacaaactcccccaaaatacaatcgaccatggaaaccagggagcagtgggcacatcgcctaccagcccacacttcatcttagagctcccactgtacaccatgatcacagcaacctctataggcatgcatatgtatatctacttatgcagggacagggctcaggccagctgatggttgtaggctcgctgcgtatctcctcgcccacagatcataatggatgatgtcctcaagcgacgggcgcgttaccagctcgttccgatgggcgtcgcatgtacgctccaccaccttgaagatgtccaggtagctaataaagtcctcaattaa

SEQ ID NO: 17917 - DNA, 477 bp, Setaria italica
  Peptide Sequence Number=SeqID_83891
agttagaataacacgacgaagtgctccttcagacaaaccttgtatacactggcaaaagagaagcagattctaataagcaaagaacgccaccaaaacataaaatgtacttccacatcattccaagtttcagaggcaacaccaccatcgcattgcagtgtgtttaaacatccttagccagtacctatttttcccgatattaaaccaagcatgcatagtaatgaaaaatatatgtgttcgagaagtaatgaaaaatatagttgtagcaacaaataatcattttgtgagatacctggaatattgcagagtgctcagaatcagcaggaagaattttcactttgtgtttgtgtgcaaggggaagcacgaaagggccacctgcaataagcgtctctttgttcgccaacgctatgtctttaccagcttcaattgcagcaactgtaggcttcagccctgcactacccttacttattcccttgttgt

SEQ ID NO: 17918 - DNA, 520 bp, Setaria italica
  Peptide Sequence Number=SeqID_83892
ctggccatccccgttgagctaggacggatgaatcctgggtttcaaccatagagtgtatgatagactgtgggtgaatcacaatctcaatgtcatcatattcagcgccaaataaataatgtgcttcgataacttctaggcccttgttaaataaagtagcagaatctactgtgatcttcttccccatattccagtttggatgctttaaagcatcagcgactttaacatctttcaatttgtcaactggccagtccctgaaagcaccacctgatgcagttagaataacacgacgaagtgctccttcagacaaaccttgtatacactggaatattgcagagtgctcagaatcagcaggaagaattttcactttgtgtttgtgtgcaaggggaagcacgaaagggccacctgcaataagcgtctctttgttcgccaacgctatgtctttaccagccttaattgcagcaacttcagccctgcacaccctactatccctgtgacaactgtaactgcatctgggtggcga

SEQ ID NO: 17919 - DNA, 1023 bp, Setaria italica
  Peptide Sequence Number=SeqID_83893
taagggtacaagacttcgctaattcctgctatgatcccagtgtatcttctttccgtagcgtggttcaaagtggaaatgtttgatggttagatgggatgatgatgtagatttccgtcgaccaaacaggatttctccttgggagatcgagctgactagctcagtttcaggatcccatctgtctgcaccaaatgcgaagaggctgaaaccatgtcttccccatgtcaatccagactacctagttccaaatggaagtggtcgtcctgattttgcggaatctgcccaattccacaaggtcttgcaaggtcaagaattattgggttatagaactcatgacaatgctgctgttgctacttctcagccatgtgaagcaaggaatatgcagtacattgatgagcgtagttgctccaatgatgcgagtaacagtatcccgggggttccaagacttggtgtcagaacaccactaggaagccctgggttttcctaccattgctcaggctttggggagtctcaaagattccaaaaggtcttgcaaggtcaagaagtatttcgtccgtaccgaggaagtctagttgacgcgtgtttgagaaataatgccttccatccacaagacggttctcatgcgcctagtgcggtgaataaatggcatacacaacttcatggatgtgcttttcgggggccacaagcaccaatgcttccatctcaatcctcatctccaccatctgtccttatgtttcaacgaggtaattcgaagatatcccggtttgaatttgggcatggttccttggataaaaatgaggatgatagacctgctatgtttggccatgatggaggtattggaggaactgagcaatcattgatgctccagcctcatcatgattctggggaagttagaaataggcatgtgacagttgagaaatttcactccactgttgctgccaggaaggatgggccagataacagggaagttaacacaaatagttgcaaaatatttggcatatctttgactgagaaggttccagcaaa

SEQ ID NO: 17920 - DNA, 1064 bp, Setaria italica
  Peptide Sequence Number=SeqID_83894
gtctagtcgttggttcgtacgtcaccctccatgcggacgcgtccacggacgaggtgtacgcgcagctcgccctggtcgccgagaacgaggaggtcgcgaggcggctgcgcggagggtcggaggacgggagcggcggcgacggcgaggacggggacaccgtgaagcagcggttctcgcggatgccgcacatgttctgcaagacgctcacggcctccgacaccagcacgcacggcggcttctccgtgccgcgccgcgccgccgaggactgcttcccgcctctggattacagccagcagcggccgtcgcaggagcttgtcgccaaggatttgcacggaacagagtggaggttccgccacatctatcgaggccagccccgcaggcaccttttaaccactggatggagtgcatttgtcaacaagaagaagctagtctcaggggatgccgtactatttctgcggggagatgatggggagctgagacttggagtgcgccgtgcagctcagcttaaaaatggatctgcttttccagcgctttataatcagtgttcaaatcttggttctctagccaatgtagcacatgctgttgccacgaaaagtgtgtttcacatctactataaccccagattaagtcaatctgaattcattataccatactcgaagttcatgaagagcttcagccaaccattttctgctgggttgaggttcaaaatgagatatgagagtgatgacgctacggaaagaagatacactgggatcatagcaggaattagcgaagctgaccctatgtggcgtggttcaaagtggaaatgtttgatggttagatgggatgatgatgtagatttccgtcgaccaaacaggatttctccttgggagatcgagctgactagctcagtttcaggatcccatctgtctgcaccaactgcgaagaggctgaaaccatgtcttccccatgtcaatccagactacctagttccaaatggaagtggtcgtcctgaattttagacggaaatactagacccaaattaccaacaaaggtacttagacaaggtcaagaattattgggtt

SEQ ID NO: 17921 - DNA, 942 bp, Setaria italica
  misc_feature (50)..(50): n is a, c, g, or t
  misc_feature (892)..(942): n is a, c, g, or t
  Peptide Sequence Number=SeqID_83895
ccacactaaagccatcaaattatatggaacacatgcaatttattcatgtnaaggcatgatttacattcacaaaactcccagaataaccaatcgaccatggaaaccagggagcagtgggcacatcgcctaccagcccacacttcatcttagagctcccactagacctgctatgtttggccatgatggaggtattggaggaactgagcaatcattgatgctccagcctcatcatgattctggggaagtgagaaataggcatgtgacagttgagaaatttcactccactgttgctgccaggaaggatgggccagataacagggaagttaacacaaatagttgcaaaatatttggcatatctttgactgagaaggttccagcaaacaaagaaaaggactctggtgatgtcaattatccatccccattcctgtctttgaagcaacaagtgccaaaatcactgggcaacagttgtgcaactgttcatgagcaaaggcctgttgttggcagggtgattgatgtttcaaccatggacatgatgatctgatctgttaggcaaattatccaggaggtgaagaaatgctaggactgctttcatcttcatggacttttctgtcgtgtagtgtggatagtttcaggttgatgattgggtctgatgaaagatggatggacagaggatgctgatcaaacttgtaccgtagttgtagtgttagagcactttgtatgacaaccttcagtgctccatgttatcagcatttgttgctgctctaaacttgcctgtatgtttataagctgtatgctgtgacaaagccatctatggagggcttgttggcattagcatcgttctagactaagtaatatgagaacataatttgaacttaaaaaaaaaaaaaaaacnnnnnnnnnnnnnnnnnnnnnnnnnnnnnnnnnnnnnnnnnnnnnnnnnnn

SEQ ID NO: 17922 - DNA, 1465 bp, Setaria italica
  Peptide Sequence Number=SeqID_83896
aatggatgatgtcctcaagcgacggcgcgttaccagctcgttccgatggcgtcgcatgtacgctccaccaccttgaagatgtccaggtagctaatctttcatcaatgaacaactccacagccttctcattagcagcactcaggacacctgtcatggtacccccagcccgcccagcagcataggcaaggtccatcgaagggtattttacattgtcaggagctttgaacgtcagtgaacccaatttgcaaagatccagacggggccaggtgacctcagagcaatagattctatctggccaagataaggtgtacaagattggtatccgcatatctggccatcccagttgagctaggacggatgaatcctgggtttcaaccatagagtgtatgatagactgtgggtgaatcacaatctcaatgtcatcatattcagcgccaaataaataatgtgcttcgataacttctaggcccttgttaaataaagtagcagaatctactgtgatcttcttccccatattccagtttggatgctttaaagcatcagcgactttaacatctttcaatttgtcaactggccagtccctgaaagcaccacctgatgcagttagaataacacgacgaagtgctccttcagacaaaccttgtatacactggaatattgcagagtgctcagaatcagcaggaagaattttcactttgtgtttgtgtgcaaggggaagcacgaaagggccacctgcaataagcgtctctttgttcgccaacgctatgtctttaccagcttcaattgcagcaactgtaggcttcagccctgcacaccctactatccctgtgacaactgtaactgcatctgggtggcgagcgacctctatgacaccttgctctccaggaataatttctggcttctcctcacaatcagctatggcttcttttagctcatcaactaatgattcgtttcttacagcaaccagttttggtttgaatgttttgacctgatcagctagaagagtcacattggaaccagcagcaagagcaacaactcggaacttatcaggattctccgcaacaatgtccaatgtctgtgttcctattgaaccagtagatccgacaatcgagataggctttgggccatcccatgacctccggccaggctcagcaacagctcgtccaggccatgctggtggtggagcctgctgcatagaacagcatgtccttctaagagaaattgctcttttgcccttcctttgaaaagtaaaatccactttgtgctggccgaaaggtcccctgctggagtcgaggaaggagacggcgctgagctcccccgggaacgacgccttgagtgcagccatcccggccggcttcttggcgatgctgcggtaatggccgcggggtgagtggggagatgaggagagggaggggagcggcggtggtgccgtggtggtggccgtcgccgaggtcgtccgtgggag

SEQ ID NO: 17923 - DNA, 496 bp, Setaria italica
  Peptide Sequence Number=SeqID_83897
tgttgttccgtctacttagtaaagggtaagtagttacctttttcttgttacgtctagttgtctaactaggtttgcataggatgcagctgttcctcaacaagattatcagcctttttcatatcaattacatgctcttttggcttcactgtgacaaccccaggagcagctgccatcgatgagtctgacttttgcccatctctcgcatcataaacaacatttgaagctgctgatgttggcatttttaaccatgctcctcctttgcgtcagaaatacatgggaacctttcccaacattattctcgtgcgactccttgatttctgccacttccttggattaggctctccaagcttctgaggcacccttcctatcttgcttttaaacattctttaaaatgtaaatgatcgaggaaaatacagacccagctatgcagtaaatctttcaagttttcctgtattcaaacttgcaaggcagtaaaaatggtgatactggtattcat

SEQ ID NO: 17924 - DNA, 486 bp, Setaria italica
  Peptide Sequence Number=SeqID_83898
acggatccagattcatgcacctcaggagcttcataatggaataaggtgcggccagacaactgacatacaaagaagcacaggctttatgaaagatgaaaataatagcattcattcccttgtcatgaaaacattggttagccagtattcactactttgaaaataactagtgaacttctatgaaatcaatgtatcataaccaaactcaaagaataacattgtcaatgcaactttaaattacagcatcaaaacatcaagaaaacaaatagctctataccattcgaaatgattataaaatgaaaggagaaaaccagcataacagcagataaagaagcaataagctagaaaaacatagcacaacagcccaaaagtgtcatggcattctattgtctattagctgtgtctagcttgacatttgttttaacatataattttgagttagatatttttatgtggccaatacaagcctgtttccagagacttaactag

SEQ ID NO: 17925 - DNA, 3472 bp, Setaria italica
  Peptide Sequence Number=SeqID_83899
tagtagaaatagtactaaaagtaaaatagcaaacctacaattttggagtgtcatgtggagcttcttgccagattcagttctccccgaatctggcaaagacgcctccgttgatcattgatgcagtagtaggatattctggccgaggcaagaacgatggaatacagtggcaggatgcaagaatgcaccgtgcttttatccattgccatgctcctcctctgaatctctggtcaatttatagttcgacgaagctattgttgtaattctgtagtctgcacaatacaatctccaagcctgtttccagatcacttgatgtgatcatgcgtggttctgtagaccatatgtaaatacgagaagtgaaacaaatatattagagtttgccctgtcacggtattccatcgttccttgcctcggccagaatatcctactactgcatcaatgatcaacggaggcgtctttgcaacatgggggagaactgaatctggcaagaagctccacatgacactccaaaatgaggtgcattcttgcattcacttagaagcagcggcctccacatttcccccctctacatggaagcctttgatgcattgcttaccatgcgagttaagtcttggacaacttcagacattggtggtctaaattctggttcatgctgaatgcagcggctaataatgtcagcaaaacgcgacaatgccttttcagaacattgtccttgaatggaaggatcgaccatctttgctatggcatcaatatcatagagctgagaagtggcccatcgcaccagatgctgttcagcgcgtggacgtgagctgtcataaggtttacgccctgttagaagttccaacatgacaacaccgaagctgtaaacatcacttcgatcacttacggatccagattcatgcacctcaggagcttcataatggaataaggtgcggccagacaactgagatactgattttgatgctaatgatgcaaggccagattcagaaatatgcacaactaaggtgctgttcagaagaacaacagatggttcaaaattctgatgtacaattggtggttggcaaccatcatgaagatgttgtaatgcttttgctgccccaacagcaacttggaggcgagcattccatgataatggcttgcttgagtcatctaaataatggagctcatcatgtagggtcatcttgctacagtgctcgtagacaagtaatcgctgctcaaactccgcacagtatccaacaagcccaagtatgttaggatgcctgagttcagaaatgctgacaactagctcaagaaaggcgtccactggtacttttgagttaaaagcatctatcgccaaaacttcaagtagctctccatcaggaagctctgccagatataccttaccaaacctgctatctcttatgaaattttcctcactgaaactattggtatattgttgaagggatgcaatggaaaaggacttgacagtacttgtcaagtctacctttccaactgaaggtactcttccctttctagtgcggacactgggattgacgatgaccttttctgtacgcagtgcaacaggttgcataggatgcagctgttcctcaacaagattatcagcctttttcatatcaattacatgctcttttggcttcactgtgacaaccccaggagcagctgccatcgatgagtctgacttttgcccatctctcgcatcataaacaacatttgaagctgctgatgttggcatttttaacctatgctcctcctttgcgtcagaaataacatgggaacctttcccaacattattctcgtgttttactggtgactccttgatttctgccacttccttgattttaggctctccaagcttctgaggcacccttcctatcttgcttttggtataaatgtcatcccttgactttctttctttgcacttggataaacagtacatggccattagcacaataactactgctgataccactcctgtaaggatatatccaactaatttgattgtagatacagtatgttttcccgatcctggagtacttcctcctggaacactagaagaggttgaaggttcttttgtggggacatgcctagctggaggcgagactgatggtaatggtgttggcgccgcaggaggttgtgcggatggggctatgctggtattgaatgggttcccatccttcttaaagtttggcaagttgagtaacttcacaggcactggaccagagaaaagattgttttctatgttcaaatcttggaaaggtagatcttgcaacacatcaagggttccggttagttgattgttctgaatatgcaggctagtcaatgctgtcaaatttcccattgaaggtggcagcggaccggtcaagttgttagaagaaaaatctaaatttgcgagtccagtgagtgctaaaaatacatctggtatatctccagacaattggttgttattgagtgacatgcttgtcaaaagtgtaagtgatgacaatgtacttgggaggctaccacttagctggttagctgaaaggaaaaatttctgcattgtgactggtagaccatctggtatggttccgccaatattattgttgctaagatccaaggtgattaatgatgtgaaattccccaaagtgttacccagctgtccacccaaacttgcaccgctgagaattatggaggtaatatttgaggccacgcatgaaacaccctgccaaccctcattgcaggggtcaccgccatttgtagtccaattaggcagctgtggtgctccaagcgcagtgtacaagccatttatcgcaaacacgtcttgctcgtaagtgtagggctgacagcacggtaacgcggagagtagcaacaagatggcggccgaagcaaccaggggcggcggggacacccgcagcacgcgcgccggcttgctcatcgccacgaccttatcccttcagcaatcccccaacgcgggcatgagctgacgagcgaccccagtggatgaaggtggcaaactcggtcacgttactctgctctttggaaacaatgatcaataatgagtccctgaggattccagcctgcggtaggttcctgtctccacggcagcactgcactgcgcgcaaccagcgagtccaatctctgccgcaggccgcagccgccgacgccgctttaccgagacgctcgccaccgaaagcaagcgaccaccagcagtccagcagccagtgcggtcctcctttcctcggtccgcgtttaaaactgccccgagctgagctcgggaaagccttggccgctaaggattcgcgctgctcgggtgggagagtgttggagaggagaggagaaaggagatgacgagacagggacggggatagatctatcaatccgctcgtcgcaatccgtcgcgggcgccggaaaggggacaaagcggccaggcgaggcgtgcggtgcggcgggactgcgggggagggggggagcgtcttgtgttgatgagtgcgcggaggcg

SEQ ID NO: 17926 - DNA, 461 bp, Setaria italica
  Peptide Sequence Number=SeqID_83900
ttctgatgcacagagatatcgtttgactttttccacagcagtagcagggctagtcatttcttcagctgggagatgaggctcgctatcttgcgagcaattaactaaccattcttctggcagttcatctgtcccgtcagagttcaataaacagttggcaccttgaaaatccatcacttgcagactttctgaaagcccaccatcagtaataggacaggtcatctcaatattttcaggacagaactgcagcatgcgtctgcgtttagcctgtaaagtttccttcccttcttcaaagtccttgacgatgatatctacattcaatcttaactcctatatcacagaactgaaattcaaagtctgtacaatgtttaattggagtttgctcatcaaacatgctccaatcatcacccacactgttgcttgcttcagcccacaaactgctgcagggatcagctaacagatct

SEQ ID NO: 17927 - DNA, 547 bp, Setaria italica
  Peptide Sequence Number=SeqID_83901
agtaggactactagaagaggtttccactttcatgccggtttcctctttctctgtggattctggcagttcctcttgtgctgaatttctcgtagttgataaggagttccttgccttttgttgttcttctaatatcttctgcaaatatcttgcatgttcttctatgcgcagctgtagttgcctttgcacctctaattgttcatgaagttgtttctgaacctcgatttgcacccgaagagcttctgctacttgtaaactctttttgccagcatcatttcctggtattgctgattgagatttcttgccttctgaagatgacttcttgtcttcttttgtctctggaagatacttggcaaaacgatatttctgcaaatggctcttcacatgatagatggtcaagccttctaccttcataagcttcagcgcacctttttggagttgccttttctggccctccaagcttgttgacagcctctacaaaacgctcatggagctccagtgtccatctcagtcttgtttttgttacatgcttcaggtcgagattgaactt

SEQ ID NO: 17928 - DNA, 381 bp, Setaria italica
  Peptide Sequence Number=SeqID_83902
gagatttgagagggtgacaagaagcttgaaggtcactaggtttttctccacacttgttgaggaactgaaggccataggaccatctagccgtgatgattcgccacggaatgatgtgatggtcccggtagcgcactgcaaccgcagcccggttttactcctgatgggtggtgggatgggagccggcaagagcactgtacttaaagatatcctcaaggaagcattttggtctggagcatcagcgaattcagtggtggtggaggcagatgcattcaaggaaaccgatgtaatctaccgagccattagctctagaggccatcacaatgacatgctgcggacggcagagctggcctcaatgacccataatgacgatgcaggtgcacc

SEQ ID NO: 17929 - DNA, 230 bp, Setaria italica
  Peptide Sequence Number=SeqID_83903
ttggttgggattcttagatgccactgcagacagcatctccagttcagtagcagcatgtgtggagcatttattctactacccatctgtggcatcaaaatctccagaatactggaagctgctggtcgaattgaagtctcccctgcatttgccaaggaagccacatcccctaacaacttgcagttgcatgctcgtccgcagcccaagtgagcatagtgttagtgttcggtcct

SEQ ID NO: 17930 - DNA, 464 bp, Setaria italica
  misc_feature (30)..(30): n is a, c, g, or t
  Peptide Sequence Number=SeqID_83904
atcaagcctaccacaagcaacaccacacangtttaacgccagggagccacacatccttatggaccgaatcttgtatagtagcttgttgattctatcattcagaagggataaacgccggcgaagatgacgacgatggtgcggcggtcgctcgatctgacgagtggatgagacaggattgattggaatggcgaggtggcctaaatggatttagaggtcacgatgaggggatccacaaccactttgcttgcaacctgaaacgctttgcttgcacattctatcgaacaccgcaagttccaagttcctctttgtaacagaattgctgaacagatcaatctggaatctctggagcctatggccgcagggctggatccccgatcaatccaaaaaaaaatcagaaacctgaatacttcaatcttctgttgcgccctgatataccagaatcgcttgacagcctaatccgcggg

SEQ ID NO: 17931 - DNA, 260 bp, Setaria italica
  Peptide Sequence Number=SeqID_83905
tggttgtatcatccacagtggtcttgtcccttttggttccagcctctgttaccagaagagccttcactaactcatcttgagatgatgctttgattggagagccattcagaaaagcaccttttccacgaactgctgtgaaaagctaaatggaacaatgagattagactaacaatcttttcaaaatgcactgaccaaaatacagcatactgttaaagttaggggtttacacgacaatataaatctgatacgaataaaactaa

SEQ ID NO: 17932 - DNA, 480 bp, Setaria italica
  Peptide Sequence Number=SeqID_83906
tagaccaatgtgaccttacagttagccagttaccaaaatggggactgatgcagaatgatcagaatatattcatcaagatgaattgggaagtagtcacacctaacaacttgcagttgcatgctcgtccgcagcccaagtgagcatagtgttagtgttcgtcctgtactagccatttacatcagttatacgtcaaaaattgctgtgcagcagcttatcattgaacatcctcattgctttaactggagatcgcaagcacgtttgcccaataaatcgaacttcaatctcgggtgcttactgtgcttcctgaatgcctatgtagcaggcaacaaaaaaaaccagccctatcaccctcccctgcatcccctgcatcaggaacaagacagcgagcagttcgtgaaaggatcacagtctacagatcacaggaattagaaggtgaacaacaccggaccattacaatagtaaacaaatactacaactaga

SEQ ID NO: 17933 - DNA, 1465 bp, Setaria italica
  misc_feature (1127)..(1127): n is a, c, g, or t
  Peptide Sequence Number=SeqID_83907
gcatagaacagaaataaatttgtctgtcgaaaccaaacaaatcaaaggtactacaaaaaagacagtaggtctttgtatttgttgacaccagacatcaggattgaagaccatcaaagccagtgtacttctttgttgcgtgaagaacagctcaggacctaaactaaggcgcagtttgcagcatacattcgttcatcattctcactttggttgggattcttagatgccactgcagacagcatctccagttcagtagcagcatgtgtggagcatttattctactacccatctgtggcatcaaaatctccagaatactggaagctgctggtcgaattgaagtctcccctgcatttgccaaggaagccacatcccctaaaaaaaggactaaactagatttaactatctggcactcttaggtatggtataatccattttttcactgactagtggggtaatccaggcatttactgtatgttgatcaaagttatttccaggcctgatgaaaccagacctgaccaatgtgaccttacagttagccagttaccaaaatggggactgatgcagaatgatcagaatatattcatcaagatgaattgggaagtagtcacacctaacaacttgcagttgcatgctcgtccgcagcccaagtgagcatagtgttagtgttcgtcctgtactagccatttacatcagttatacgtcaaaaattgctgtgcagcagcttatcattgaacatcctacagaagtggctatgttagaaagagaagaaattaaacaaatcctagtgacaagcttactctgcaatatacctcattgcttcaactggagatcgcaagcacgtttgcccaataaatcgaacttcaatctcgggtgcttactgtgcttcctgaatgcctatgtagcaggcacaaaaaaaacagccctatcaccctcccctgcatcccctgcatcaggaacaagacagcgagcagttcgtgaaaggatcacagtctacagatcacaggaattagaaggtgaacaacaccggaccattcatgtaacaatctcactgcctaaatcatctaaaataactataaaattaagatcatatgatctcttttgggaaaatctagaatggcaactggcaaatntctctttgaccccatcaaggatggaaagccccttcctattcattcagaagggataaacgccggcgaagatgacgacgatggtgcggcggtcgctcgatctgacgagtggatgagacaggattgattggaatggcgaggtggcctaaatggattttagaaggcacgatgaggggatccacaaccactttgcttgcaacctgaaacgctttgcttgcacattctatcgaacaccgcaagttccaagttcctctttgtaacagaattgctgaacagatcaatctggaatctgcaaagggttaaaaataaaaaaatggtactctgaaaagtgaggacatcta

SEQ ID NO: 17934 - DNA, 1288 bp, Setaria italica
  Peptide Sequence Number=SeqID_83908
tttttttatttcgcaacgtagcaaccgtataaaattgaaagccgcacgtagcagcgatatcaatatcactatagcagcagaactggcacgtattccctccagaatatgtggcattcccttcatcaaaatgcaggaggataaagcggcaatttacatattccctttggaatgagtctaattttccttccagtatctgaaaattgtgctatacccttccatccaagcatatgagataatcatgaaagcactggaacaacagaatgttattgcgtccaacaagatagttgtgcaaggcagtgctccctgtgtagaattacatggaaaaaatcgctcaaacggcaaaggcaatctaattttcttattctactccaggaacaatggtagcagttgtttcaattggtatcccccagttccttgacgaacttatccttcagcaagccgttagagcccgccattcttcgcgacatcaggtcgaattctccgccacttggatcaaacacatggcccccagcttcctgaaggatcacagctccagcagcaacatcccaggggccaccaaatcccatctcgtaacacagatcaagcctaccacaagcaacaccacacatgtttaacgccagggagccacacatccttatggaccgaatcttgtatagtagcttgttgattctattggttgtatcatccacagtggtcttgtcccttttggttccagcctctgttaccagaagagccttcactaactcatcttgagatgatgctttgattggagagccattcagaaaagcaccttttccacgaactgctgtgaaaagctcattcatgatggggttgtagacaactccaagtgtgggaattttcctaatggtgagaccaatcgagacacacacaaaggggaagccatggacgaaattggtggtgccgtcgagtgggtcgacgatccatgtgggatcgtcggtgaggtcggcggtggcgccgagcgccgccgacgtctcctctccgatgaacttgtggtccgggaagtgcttgcggaggtggttgaagatgaggtcctcgcaggccttgtccgtctccgtcaccaaatccacctggcccttgtgctccacattcttggtctggtaaaatcccttgcggatgatctcgccggcgttcttggcggcttcctccgccacggcgaggaactgctcctccgacatggcctgctccgatctctcgccccccgccgatggttcgcccgctacggccagcagcaaattctggccgctccctccttctccacctgcgcccg

SEQ ID NO: 17935 - DNA, 530 bp, Setaria italica
  Peptide Sequence Number=SeqID_83909
ggccaccgttgctgatcatcttcttcctctgatctgaaggatgactgtccactcgattcgccaggccagtacaagctcagcccttgtagacgagccgcttgtcgacccaccggatgcggcatccgcaagcctgcagcatctggagcagctctggggagagcacggactgcagcccgcccagcagcttcagcttcttcagcctcccgcaggaggctcgcagtgccatctcgaacccttcgatggagacccaggagaggtggaccatcttcacgtcctggaggcacctcagggagcccagcagatggcacagtcccagaccagtgatttggcagtaggatatagtaagttgtctgagattttgggagtatcttgaaagtgcccagagcccagcatcatccacagaatagcagcgcttcaggtccagttcaaccaggctcgtgcaaccgatggcgatggaggtgatgccgatgcctgtgatgcgcaccaggcatctcatctcaaggtgtctgagctcttccagagcgcttagg

SEQ ID NO: 17936 - DNA, 1986 bp, Setaria italica
  misc_feature (1956)..(1956): n is a, c, g, or t
  misc_feature (1971)..(1986): n is a, c, g, or t
  Peptide Sequence Number=SeqID_83910
ggcacacaacagatgcacacaaagctatagcaatggcacttataagcgcggccacatcttgttggaaggcagcacctgaggttcaccccagtgtatggggtgatttctttatcaactacatccctgaaccgctgcagatttcagatgaagagatgttagacagagtcaatcaattgaaaggggaagtaagtggtctatttgaggcttgcaagaatgtcgtggaaaaaatggacctcgtagatgtgctgcaacatttggggatagatcaccatttcaaggaacaaatagccaccaccttaagcagtatccacaggggtgaattcaacagctcaagccttcatgaggttgcccttcgttttcgcttgcttaggcagcatgggttttgggtttcagcaggtgaatttaacaagttcaagcatgaagatgggagctttattaatgacataactaacgatccgaagggcttgttaagtttatacaacgcagctaccttttaacgcacgacgagggtgcacttgaagaagcccttctatttgcaaggcgccatctggaattgatgaaaagtagtctcaaatcccctttagcagagcaagtggagcgtgcccttaaaataccattaccaaggaccttaaagagggtagaagcagtctcttatatcccagagtacagtggagagcaaaggtacaacccagccatactggagcttgccaagctagattttaacctcctgcagcgtcttcaccaaaaggaactcaagacaatttctcagtggtggaaggatctttctgaagacattaaactagaatatgtgagggaccgaatcgttgagtgttacttttgggcttatagtgtgtactacgagcaagagtatgcacgtgcacggatgatcctcgccaggttattcgtgctaacatctttgttagatgacacatatgatgatcatgctactttggaggagtgtcgggagctcaccaaggctatagaaagatgggacgaaagtgatatttctcttttacctgaatacattaagaaattatttctcaaggtgataagaaacttcaaggaatttgaggatgagttggaagcacatgagaagtaccgcattgcttatgctaggaaagggttccagcttatatccaaaagttatctccaagaagcggaatggtctcatcacaattacataccaagcttcaatgatcatgtgaatgtatccaccatatcagcaggtgctcaattgttgtgcgtggggctgcttgttggcatgggagatgttgcaaccaaggaggcatttgagtggaccattggtaacaatgatgccataagagcatgtgcagaggtgttccgcttcatggatgacatggcggattttaagagaggaaggaacaaaatggatgtagccacatctgtggagtgctacatcaagtagcacaatgtcagtgccgaggttgccctggccaagtttttcccctttgttgatgatgcatggaaaacactaaatcatgcaatatttgaacatcatgctctacttccggttctacaacgagtcacaaacttagcaatgagcatgatgctagttttcctcgaccagagagatggttatacaaacagcaaggaacttaaagagaccttgaagagccaattcgtcaagcatgttcccctctaatataataccagtggatgatggcatcaacaattatgaacatttaggagtgaggcatgcaccatcagataatctgtcagcttggcacctatgcactattttcataaaaaagtattgttcttctgagtattgcttgcggaaatccaatattgtcagtgttgtgtgggataggtataagatattgagcatgataagtatgattataatgttgtcatgtttgtatgcgaatgtggttgaaattttcctcaataagtaaaaatgatggaatatttattgttaaaaaaaaaaaaaaaaanaaaaaaaaaaaaacnnnnnnnnnnnnnnnn

SEQ ID NO: 17937 - DNA, 282 bp, Setaria italica
  Peptide Sequence Number=SeqID_83911
gaaatcgatagattgaaataggggaacactgcgccgcggggtgtggaagccagcagccagcgccagcgcaataatggaatccctagccgccgcctccgtgttctccccctcccgcgtcgccgccccggcggcgggggccctggttcgggcgggggcggtggtgtcggccgggatgaggaggaggagcggcaggagcggcggcatgaggtgccgcgccgtgacgccgctggcgagcgcggtgatgagcaggggcgccgtggcggcgaaggcggcggaggagga

SEQ ID NO: 17938 - DNA, 560 bp, Setaria italica
  Peptide Sequence Number=SeqID_83912
gagtttttttataaggtaccacatccatccacaagaataccagcacaacacacaacagctcataaaaggccagacaagtccaacaagcatacgatgcgttaattcctaattcagtaggtgcttttggaataacagcacacaaaagttgacgagatagaattggcattaatgtttacatatctatccagtacagaattcgaaaagacagaataaaggttatgctcctcgcattcatgtctccaccttcatccattcatgagaataatttgctttcagcaagcatgcatactattctggcttcttcaaatttatacaattgtctgtcgcttcattaaacaagacctcaacctgcttcaactccagttcagcagcttcaagttgtttctgaagctccagtcccacgacttcattctctgcctgcagctcttggattcttttcaactgatcctcttctgatgacagtggcaacgccgcaacaagtgcatcaaacttcttggcggcgaggacgagggcgtggctcatggccttgggttgctcggcgaggtcgagcgcgggcgcct

SEQ ID NO: 17939 - DNA, 530 bp, Setaria italica
  misc_feature (428)..(428): n is a, c, g, or t
  Peptide Sequence Number=SeqID_83913
atccaagacaacatcaaaccaaggggaaccggttcttaagtggcagatgggatcataagtctcgtttgtgtttatttgcatccctcagcttgtaagtttgcacaatcatgctcaaatgcttccatttcgatgatatgatgtggtccctggaatgttgcataaatgtagatcagtcttgggcaaaaattacgctgcttgatggacttctaagcatgtgtgatttactcatattttcactgctgaactgggtgtgtagacaagtactcctcatttagtcaacctaaagtactgtgaaaattcaagatatgagttaaactggattgtgatttattgttcgggctgtagagcataagtgcacaacagatattattgtgtttgcacttccgagcaattataaatgcattcattgttcgggcgaaaaaaaaggntgcatttgttgccacaaacaaaggtctactggaactttagttccctgttcttctttgtgctactttctttcttgtcataatagattgagtatttttcagtcg

SEQ ID NO: 17940 - DNA, 774 bp, Setaria italica
  Peptide Sequence Number=SeqID_83914
gcgcaaacaaacgagcaacctccaaatcagacgccagcgacgagcaaagcaaggggggagataggcggatggggcagtgcccgtgcttcggatcggcgcaggcggcggagcaggagcggcgggcggaggcggaccggcacgagtcccaggacgcccgcgccaaggccgccgaggccgcgcagaggagacaggaagagtttgacaagtcagcagctggaagagcagcaaaagcgcaaatgaaagctatgaaggaatccaagacaacatcaaaccaaggggaaccggttcttaagtggcagatgggatcataagtctcgtttgtgtttatttgcatccctcagcttgctgttgatggtgaatgagacttcccatttccgagaggatgcagcggcaccttcttgttagtgattgtatgttgttatgccagtgaagtgtacatccgtttactcatctgttatagtgtacatgcgatccagattccagagacactcagactctgcagttacaagtttgtgctgtatgtatgaatactgtatatctttatcagcagtagtagtctgatagcatttgcatagaggttttttaccttttacccctcttcgtagtttgcacaagccatgctcgtgccctgacatcggcatctctggtgtaaataatccagtgatataggcttagtgatttacagttactgaactctatgtttgtactgtatattttccttcgcgacatcaagcatctcgtgtaaatttcacaattaaaaaaaaaaaaaaaaaa

SEQ ID NO: 17941 - DNA, 569 bp, Setaria italica
  misc_feature (87)..(87): n is a, c, g, or t
  Peptide Sequence Number=SeqID_83915
aaatcaattcccagtgcacgatggttcctgataaagtctgttccaacagttccagaataagcatctgggttcacatgcaaaagttcnggagtggatggaccataaaacccttcaacacctatctctaacaggtgcacagggtctatagacttcacataagacgccatctcttctatccatgcctgcaatgtgtcacccgatggatctgaatggcatcgtggctcattaatcagctcccaagcaagaattgtaggatcatccttgtaggcctcatttgtaattgaatttattcttgtcagaacagccttaacaaaagctttgtagtagctcttaattgtgggatcagtgaagaagtcgtcgtcagaagtaagatccagcccagcctcctttccccaccttatgtactgtgattttcctccataatctttccaattattacatagcgacagtatcaacctcatcttatgctttcttgcttcgctgatcacaaaatctaatgcctggaagacctcctcgtcgtaggagaagggtttcagctgcagcgcgcggtatccgccgtcgttgaacgg

SEQ ID NO: 17942 - DNA, 1844 bp, Setaria italica
  Peptide Sequence Number=SeqID_83916
atgccccactatgcgggggacgaacgcgatgagcaacctcgtcgcggcgatgccaagtgactctgacagtgaacccatgagctcaatcacagtctggctgctgtcctgctccttcatgactgagaccaccgtggcgagaggcttggggagcgcggtgagcgcaagcagcacgcgcacaatgctgaggttgagggtgtcaggcatggaacacttgagcatgtgagcgaagttgtacaccgagtacttggacgtgatgacgtggccttccttgttgacaacgatggcctcaggatccaagccagactcaacaatgttggctagcacagcggcagcctccgtcttagagcccatgggttcctcatcaatctttcggatgaagagctcctcgaccatgactgggacagcaccagcatccacgagcgtcttgccgttggggtggtgggaggagatctggaccaggacgtcgagcgctgccttgcgaattgctgtattgccactgcgcaccatcttgatgaggatctctgatgcgctcccagcaatgttgatggtcatctcctgtttctgaattagctccccaaggtagctcaccatttctatctgcacatcttctgacccttcaactaggtgcctttgcaaaggatccaagtagccactttcagccatgtacttgatattctttggtaatttctctaggttctttaggacctctccagccttctcggcagcaatgggatcatccgagccgttgaacttcattgtggtgagaattagtatgcttccagcagttgaaccaatgttctccaacagtaactctgatttcgaaagctccactaagaaagagatagctgcatgcctttcatcagtactactgctagaaagcagctttatcgtccttgaaacggctctggtttttgcaatgatttcctttcctgcatcgtcctcaaccaacaggcagagaaggtccagggagtcacaccgaataagcgcatccttgtggtccagaagccgcgctaggaacttggtgatgccaatcttgtgcatctgatccctgttctttctcctcagcctggccagcaccttcagctcatgtatggcctcaagcaccatcgcctctgtggttgccatagaaagtgcagtacgtgcgatcctgatccgtgtcgcttcattcctcataatccattctgcaatcgtgctcttcagtggaatattgctccttagtgtcttgctctgcattgcggtctttgtaacaggacatatcacaggttcagagctatctgtaaacttctcaaagtaatcctcaatggctctcctgtcataagtcacactactctccgttgttactggatctaccatgaccttgtttgtcagcggacagaagaaagaatcatacaacggctcaacatattccgcgacttcagggagggaactgaaggactggccaccaaactcatgtgactcctggtacatcccctgcaagaagtccaccagcctcggcatgtcactgttgtgcaatgttcttctcctaggtctttccatggacacaaccatcgacatatcaccctctgagtagccatcacaggaacgctgatcatacagatcgtgccggttcctgacaacctgaaggtgtccactgactgctggctctgcaaacctgctgctagtaaacgtcgatactggtatcctgctgagctcattgcttatattctttatgacattatccaagtcctcggttatgcccaggaggtcgtcatccatgagccgctgcgcggcggcgctgcactttgcgacgaggtccttggcgaggtcgacattggcagccagatactccattacgtgcagcgtgt

SEQ ID NO: 17943 - DNA, 930 bp, Setaria italica
  misc_feature (17)..(17): n is a, c, g, or t
  Peptide Sequence Number=SeqID_83917
cggtggctgccgccagngcccgccagcacgtgccgcgccgcgtcgtgctccgcgagcacggccacgccgctcgtcacgtccacggcgtcgtccatgagcgtgcacagcgcgccgagcgcggcctccaccacgcgcccgctctcgttgctctccaggacgcacaggaggccctccaccgcgccggcctccacaaggcagaacgtcgtcgacggggagcacacaccgcggtgcaccgggcagacccggctgtgcgccggtggccgccggttgtcgtgcacccgcccggcggcatgcgcctcgcgcaggcgctgcaggatgttcttcttcttcgggcgccgctcctcggccgggggctgggagaggttgtgcgtctggctgctgaggttctcgagcccgaccgcagcgagccgctgcacctcgtcgctgcccgccgaccgcaccaggagatcagtgagcaccgacgtgaggttgtgattcatggccgccagaagcacgtccgggtcatacagagtcgtcgttagccggacgagcgtgcccacgaggccctccatgtacgccttcgcgtggcggcttgccctcgtctcgccgcactgcatctcgtctatcttggccagcgcggtcgccacggcgccccggttcagcaacgcgaggttcagagcaatgtgctggtacggcagcttcgccaggagcgttgccaacacggcatgccgctcggagatccgcccattcagaccgatgctcttgacaagcttccctggctgccccggggccttacagagcttctcggcaatggtatgccccatatgcggggacaacgcgatgagcaacctcgtcgcggcgatgccaagtgactctgacagtgaacccatgagctcaatcacagcattgtgcgcgtgctgcttgcgctcaccgcgctccccaagcctctcg

SEQ ID NO: 17944 - DNA, 260 bp, Setaria italica
  Peptide Sequence Number=SeqID_83918
ttattctagtaagaagtggagttacaaggaacaagattagaaagctagaattgttaagaagaaataacactcatgattacttgtgtcaatggtacacggcactatcccttcagctgtaagatcaagcgcatgctcttttcaacatagtattattgatcaatctgctacaagggcacacccttttgacgttgtaagagtaggaaaaggagtacgagaaagcaagtaacttcagaactaagaaaaaaaaaaaaaaaaaaaaa

SEQ ID NO: 17945 - DNA, 401 bp, Setaria italica
  Peptide Sequence Number=SeqID_83919
cctctccccacctagccaacaagctcaacaagctagcatggcggggagcacggcaggccctgctgctctgctgccacttgtggccgtgatcgctttgctgatgactgctccggcggcggcggctaggtacccgccgctggcgccggggctgtcgttcgacttctacaagaagagctgccccaaggcggagtccatcgtcagggactacctcacctccgccatcaggagcaacgtgggcctcgccgccgcgctcatccggctccacttccacgactgcttcgtccagggctgcgacgcctccatcctgctcgactccacgcccacccagaagagcgagcgggacgcgttccccaaccagacgctccgcccggcggcgttcaaggccgtcaacgacatccgcg

SEQ ID NO: 17946 - DNA, 710 bp, Setaria italica
  misc_feature (232)..(232): n is a, c, g, or t
  Peptide Sequence Number=SeqID_83920
agaaaaataacaattttagacaaaactaaaactagtggaactgagtactggacatagaaagtgtacactgtattataggaaggtgttatagaattaatgcagttgactgaactaactttccctagaaccactgaaatgtcaacacatagcacagttcccagctagaattatcaacacctgagcatatagttaagagttaggtattgagactggatcgtctaacctttttacnccttttggttgataaatttattatctgattcatcacacttcatttgttctctcatcttcattcaggaaggttcactccaactaactggtctcttattgcgtccggatctcatatagtgccagtaccacctttaaaaggatagcaatgttagttttttattgtatcacataggataacagcagaacagtagtacacaagagagagaatatcctaattggctgtccgagatctacataaattgttagaaaccggctgcaatttcaggcagcggtatgaaaatgggtggtatgtgaaattcactagagtatgatgggatgggaataccgacctacttgttgggaaatatctggatcttgacaaaacttttttgcaatggctactgttagttgcatttcttatgatgcttgattgttgttatgcaggaggcgactcttcagcatgataaacacatgcctacaatatttgaggtagtgacagg

SEQ ID NO: 17947 - DNA, 978 bp, Setaria italica
  Peptide Sequence Number=SeqID_83921
cttgtgcctttatgggtatcccaatgagacgtgggaggtgaccttgccagctgaggaagtgcccccagagatccctgaaccagcattaggaatcaactttgctagggatggcatgaacgagaaggactggctggcgctagttgcagttcacagtgattcctggctactgtctgtagcattctactttggtgcccggtttgggtttgacaaagaagctaggaggcgactcttcagcatgataaacaacatgcctacaatatttgaggtagtgacaggatcggccaagaaacagacgaaggagaagacacctaacagtagcagcaagagcaacaagcctagttcaaaagtgcagtcaagagctgaggctcgttcgaaggccaaggtccccaaagatgaagaagagagcggtgacgacgatggggacgaggaggcggaagagcacgacaacaccctgtgcgggacctgcggaaccaacgacggcaaggaccagttctggatctgctgcgataactgcgagaagtggtaccacgggaagtgcgtcaagatcacgcccgcccgggccgagcacatcaagcagtacaagtgcccggactgcaccaacaagagggccagggtgtgaacgacgaccgagcaccccagcggccttttcaggaggaaaccatctcctggcgccgggatcatcccctagatatggcgtagtttcctagcctgtaaaacccgcgtttctatttatggttacatatctgttggttagttgttcgacctagctgtgtgtctctaaaacgtggcatgtcccctgtgttgagtgttgacgtgagcgtctctcttcctagtatgtaaacactggaggtacctctcaactgaccatttcttcattattcgtgcagtgcacttggtagtagtgactagtgactgtagtctttgttaacagttcccagcatgtctgcttgtgcgtaggtaggatttgaatagttcttg

SEQ ID NO: 17948 - DNA, 545 bp, Setaria italica
  Peptide Sequence Number=SeqID_83922
cgacgtcatggatgaagcttcctggtctgacgtcgaattctgcagatccactcagaactggtactgcctctccaagacactggcagagctcgaggcattcgactacgccaagagaaccgggctggacgtggtgtcagtctgcccgtccctggtgatcgggcccctgctgcaatccacggtgaacgcgagcagctccgtcatagtcgactgcttggaaggagatcgcgaggtgaagctgaagctgaggaacttcgtggacgtccgcgacgtcgccgacgctctgctcctggtgtacgaggctccggaggcgtcggggaggtacatctgcgatgcgcacgcgaggcaggtgtccgatgtcgtggagctgctgaagggctggtacccgacttacaagcatgccaccaagttcctgcaagtgagcgatgagcctctgttcagttccaagaagctggaggcgctcggctggaaattcaggccgttcgaggagaccctcagggacagcgtcgaatcattcagggaggcaggtgtcctggattgaacaagca

SEQ ID NO: 17949 - DNA, 549 bp, Setaria italica
  Peptide Sequence Number=SeqID_83923
cggggtcgacggcatcgactgcgtccgcttgtagctcccggcagcagcaacggcatcttgagaacaaagttttttagggggttagttcttaactcaagatcatcatcatacgtgtacagcttaacatgtctaggatgctccgttaattagtttttcttttaaaccatttttggtcctcgagaaagtataacaaatcaagcagatcatgatttcatgagccatcttttaagcagatctgtactagttgagagagtccgtcgttagacatcagatcagtttgcattggtgcttcatgtatcttgattgagttttgttccaaactgctaccataacaactagtggtagaaaaccgcgctacctttgtcgatgacgatcgggcggggggtggcggccttgcggagcttctcgagccccgtctccgggtgaggcccggccaccacgtcgtcccacagcttctccagcatcttcgccttcctccaacaaaggttactgctggccactggcttactgcactactatgctaacgagaggaagagcaccgcaccacca

SEQ ID NO: 17950 - DNA, 628 bp, Setaria italica
  Peptide Sequence Number=SeqID_83924
atcttttctatagaaggtcaagatgaatcaagccccttatatgactttcgcttcatgcttccaatgctatctcaaataacaatggaggctgatggatgtagaactttggcatcatttggcggccataaggcagttatagattgccttgttaaaatgactgagcaggatggaatcgacaatggtagcatgtttttggcatgtgataccatcataaacttcatgtctaataggaaaagtgtcaatattccagtggattcttgtttcattcgcctcctaaaagcacttgttacatgggctggaaccacaaatgcctcatcggttaccatgacagcatcctgcttatgcgcaatgctgatagacttgacatcagaagaatttctgttgagctgctctgattttgacaccaagacccttgggagtttgtctgagctcattgtcagaagtttgcagcaggatgtccctgacgatgatggggagcaattcaaccagaagcagatgattgtatcaggttacaggcgatgggctaatcgatttccacatgttaaaaacgtagtggagcagcatgtatccttgtgatcaaccaccgccccaagggcagttctgcatgaatgaaaaacctgcaaaatta

SEQ ID NO: 17951 - DNA, 365 bp, Setaria italica
  Peptide Sequence Number=SeqID_83925
agcagctcgtccagcctctcctcggtgaggttgccgacgttgttcagctcttgcttcagctcctcgtttctgaaaactgcaccgggaagaaattgtgtcgccgtttcatcagtactagagaaggctgggtcggagattggataagcaatgtttatgatataatgatgcgctggcgttggattggaatttggaacagtgcgtgatcaaaagaagttaccctgagcagcccgaagtcggaggaaacgttaacgattcttccattggaggaggcttgcagaagaggcagtaaggcttcgatcacatgctttgtgccgtagtagtttgtctgcagacctttctttgcagcgtcataagtctcccggcta

SEQ ID NO: 17952 - DNA, 1324 bp, Setaria italica
  Peptide Sequence Number=SeqID_83926
ttttttttttttagttctcaacgcttagctgatttttgacccctcagaaatagggtaccatcagaaacccaatagctggataaaccacaaactgatccaaaaccgaaatatatgccagcgctgtcgcggacctgaactatactgcaagtgatttcccatgccaagaaacgcctcaagtaggaagtagctgtgaaaaatcaaaatgttgttactaacttattatattgcacatgagatctactgttcgtgctcaacatttcaattcatggttctcttccttattctgaatcaccacaaacttcacacgaacgacgcctcctccccgtcttcaaagaaagcgccggtgaccccgccttccggcagcagcgccaccttcgccaccctgctcccgccttcctcgggcgtcaggagccccgagtgcatagtgatgtcggtcttgatgtacccgggatgcacgcaattcacgcgcagcccgggttccttcgcggccaggatcctcgagtacgcattcatggccgccttggccaccttgtatgcggcgaatgctaccggccacccgcgcgcgtccgcctttccggcctcgaagtctttcaggaacgtgtccagcagctcgtccagcctctcctcggtgaggttgccgacgttgttcagctcttgcttcagctcctcgtttctgaaaaacctgagcagcccgaagtcggaggaaacgttaacgattcttccattggaggaggcttgcagaagaggcagtaaggcttcgatcacatgctttgtgccgtagtagtttgtctgcagacctttctttgcagcgtcataagtctcccggctatttctccacaaccattcaagcctctggtccctatccatgccacacagctcttcttcgcttgttactgacgcgtaagcaggatctcggttgtactcaacgccaccaaatgcagcattattaatcagaatgtctagcctcccaaaacggatcttcaagaaatcggctaacctagcaatgcttgacgcatccgtgatgtccaactggtggaaaatgacactggaaagccccagctccccgagcttctcaacggccgctccgcccctcgtctcgtccctagccgttaagacgacggtgacaccattcacagctagctgccggcacacctctagcccgatccctttgttcccgccggtgaccacagcgatccttgtgcttgggacggggaaactggagatgcctccctccatgagcgtgcaccacgagctcttgtcaaacaaggcactaggagatgactttctctggtcagcctggtgctggcaggccttaatacaaaca

SEQ ID NO: 17953 - DNA, 2549 bp, Setaria italica
  Peptide Sequence Number=SeqID_83927
agatgggttttattcacccgaactcagaggtgagtttggggctggccttttagatcttcatgcaatggatgacagcgagcttctttctgagaatgttgcgtcggaaccatttgagccttcaccttttatgcccaaggaatgtattagggcactggataatgatgaggatgatgtaatacctgaaagccagcaaggtctagcagataaccgtagtagtgcattcaccagcgaaaaagagaacactacggtcggtgctagagaaagtaatgtagcgaagatcaaagtcgtggtaagaaaaagacctctgaacaaaaaggaggtgtctcgaaaagaggaagacatcatagacgtacacaattctcagttcttgactgtccatgaacctaagctcaaggtggatttgacagcttatgtggaaaagcatgaattctgctttgatgctgtcttggatgagtatgtatctaatgatgaggtgtaccgtgagactgtggagcctattataccaataattttccaaaggacaaaagccacgtgctttgcatatggccagacaggcagtggcaagacctatacaatgcaacccttacctctaagagccgcacatgatatggttcgtcttttacatcaacctatgtatcggaatcaacatttcaagttgtggcttagctattttgagatttatggtggcaagctttttgatcttctcagtgaaaggaggcaactcttaatgagggaagatggaaagaaacaggtctgtattgttggcttacaggagttcgaggtttctgatgtccagattgtcaaagaatacattgagaaaggaaatgctgcaagaagcacaggcacaaccggggccaatgaagaatcatcgcgatctcatgctattctgcagttggctgtgaaaaagcatatcccagttactgatactcggagacagagagaccgagatgctattgaagcgaagaatacaaagctcgtgggaaaaatgtcatttattgatcttgctggaagtgagcgtggtgctgatacaacagataatgacaaacaaacaaggattgagggtgcagagatcaacaagagccttttggcactcaaggaatgtattagggcactggataatgatcaaatacacattcctttcagaggaagcaagctaacagaggtgctccgtgactcttttgttggtaactctcgaacagtaatgatttcttgcatttcaccaagttcaggttcatgtgaacacacactaaatactttaagatacgctgatagggttaaaagtctttccaaaggtggcaacacaaaaaaggagcagctcactgtgcagtctgtagcatccggcaaggaatctacctacaactcgtatcctttatcaggtgaagctgaagaaaatatggaacagactcaagaaactagacctgttgatggttctaggaagggtgttgacaatttcatttccaattcttccatggaacctgagagaaactcatttagtatgattccaagctatcaacatagaggaaaagatgaaatgagttcaagatctagtttgaatgatagggagagaggggatttgaaacccagccaggcttgttttactagtaaaacacagtcacttcaggattcagtaaattcacaagaagatgtaaaaatcacgaaagtctcaccaccccggagaaaagctaacagggatgataaatcagaaaggcagagcaacttcgtgaaaaaggaaagtggacctgaaattagtcggactgttcttaagcagcaacatcaatttaaacagcagcagttgcaaagaccatcatcgacctcagcaccacaggtttcatccaagcaatctgaaaaggaggatatggaaataaatgcaatacttgaggaagaagaggcattgatagcagctcacagaaaggaaattgaaaataccatggagatagttcgggaagagatgaatctattggcggaggttgaccagccaggtagccttattgacaactacgtggcgcaattgagctttctgttgtcacggaaggcttctggcttggtgagcctccaagcgcgcttagcacggtttcagcagcgcctcaaggaacaggagattcttagccgtcaaaaaacatcaagatagttgaacttcagaaattgaaatcctctgatttgttttagactgagaagcgatgagtatattgcatcatggcctttaacatcatcttgaaaggagagaagagcagaggatctcaaggtgatttgagatgggagatggtgatgtgggttggtcgagtgcaggcttttggttttgaggtctgaattagtttgctatttttatttttcctgaaacgggtgcttgtggcggcataggtttgtcaatgtttgtcattttcgtttgtaccaatatagttgtaactgttgtttgaagatatcggtagtgaaatgctgcggcgaggaaacaaccattgtacctcgccctgccattatagtgttgtattctttgttgatattatttcacaccaaacaaaaagaaaaggcggcatgcggcaaacttctacagg

SEQ ID NO: 17954 - DNA, 432 bp, Setaria italica
  Peptide Sequence Number=SeqID_83928
tctggactgtcagttcagaacaagcaacacaaaataggttacagggtcaacgcagacacttgtatgcatgtcaaacaatattaagtgcaaaaccgagtcccgtgaaaacattaggatttgtcatgagtccaaaatgtatgcttgcacagggcatacgaaaattgcttatcaagcatactgtatgccaataactgaactaatatattacaatgcaggttacatgttgaatgcagggaacactgaacagcaaaactgaatcacataaaaatgacaggacttgtcacaaacctcaaatatatgcttgcaattggtaatgacctatcaaggatactgtacaatcggacgattagcctctagctaatagcacagctagcccacatgcggaaaatgggatgataacaggcaattattgaaaagacctagatgaaagac

SEQ ID NO: 17955 - DNA, 972 bp, Setaria italica
  Peptide Sequence Number=SeqID_83929
cggcatcaacaccttgtgccagtcattctttgggactcgtctccctgcagtgatgggtggatcttacaccgtcgttgcgccgaccatttccatcatcatggccggccgctacagcaacgaaacagaccctcatcagaaattcctgcggactatgcgaggaacgcaaggtgctctcatcatcgcatcgacaattcagatcatacttggtttcagtggcctctggcgcaatgttgttagatttctaagtccattgtctgctgttcctctgatctcgctagctggatttgggctctatgagcttggttttccaggggttgccaagtgtgtggaaattgggctcccagaaatcattctaatgctcatattttctcagtatttacctcatgctattcatgtggcaaagcctgtgtttgaccgattttctgtaatcttcaccattgctattgtatggctgtatgcatacattcttactgccagtggtgcgtacaagaatgcccgaacaaagacacaagtgcattgccgtgttgaccgctctggacttataagtggagcaccttggattaatgtcccgtaccctttccaatggggagctccaacatttgatgctggtgaatgttttgcgatgatgatggcctcattcattgctcttgtggagtcaactgggaccttcatcgcggtgtcaagatacgcaagtgcgactatgatacctccctctgttcttggtcgtggcattggttggcagggcattggtactttactgggtgcatttttttgggacagctaatggaactgctgtgtcagttgaaaatgctggtttactagccctgacacatgttggcagccggagagtagtccaaatatctgcaggattcatgattttcttctctattcttgggaaattcggagccattttttgcgtccatcccactgccaatatttgctgccctgtattgcatattcttcgcatatatc

SEQ ID NO: 17956 - DNA, 533 bp, Setaria italica
  Peptide Sequence Number=SeqID_83930
ttaactttaaccgttaatttagtttaacttaatttaccctttacttaaacctttacttacctttacttattgtaggtacagcatcacacttctcgaatttctgaagagcctgaccctctgaatacgccatcccgatcgaagcctcgccattcctcccaacacccatgtaatacagcctccagtcataggccccatccatttgcaccaagtacggtgaaccaaccccagcaccatcccacccttcgccctcctcagatgggcacagcactggcatctcactggaccgcctccaccctttaagcccgtcctccgacacagccattccaatgctcactttcccatccgcatcaacaccatcatacaccatcacataccgcccggcagcacggtcacggacgacatgtccatgccgcaccccgcattcatcaaaggatccagcacggccaccctcaagcaccttccctatcttcgtccaccggatgccgtccctggacctcgccagacctatcgcgtgcctccgcgacatttcgtcg

SEQ ID NO: 17957 - DNA, 371 bp, Setaria italica
  Peptide Sequence Number=SeqID_83931
ggtcagcagagaggagcgtgtcgtagagccagtggcaggcggggtcgtcggcgcccccgcccgcgcggagggcatcggagagcgccgagtaggcggcgggcgagcggaggagcgcgcgcgcggggcggtcggagtccgccagcgccgcgacgtcctgggacgcggccgggggcaggatggaggagagcgtctggatgcgggaccgcgcctgcgagaccgactcccaccaggacggggtcgggtccgaggctgaggcggaggcggagggggacggcgaggcggcgcccgcgccggtggaggatggggagggaggcatggcggcgacggcggcggcgaagccgagatgagaatgagatcgctccgcagctgtg

SEQ ID NO: 17958 - DNA, 385 bp, Setaria italica
  Peptide Sequence Number=SeqID_83932
gtgggagaggaaagaggaagctggcgcattgactccagcctccggcgcacgccagccggcgaccttccggcttccggcggcgctcgagccggggggatcccatcttggagggagtgccgcaggagcaggaggagagatttcttgggcgcatggagagttgatgcttcgttccccctggagctctggtatttggcatgcccacatcgtttgaacatgtacctctctcatcaatatagcactcctgtgacagtaatgattttgtgtgtgttgatactattctcctagctttatggtcgcattgtgatcagatacaaaaacatgctcatgaaggggaccatcttcagatgttctcagagcaagcatttctagtgccccaagtacatct

SEQ ID NO: 17959 - DNA, 440 bp, Setaria italica
  Peptide Sequence Number=SeqID_83933
tatctgaactcatgaatctctacataatagtatagcaagtttcagctagatggaaaataacttctctctcaatgaaacatgtcgtatagtagatacacctaatggcaaaagagaatgacatatctcacacgattatattttcagaatcggtcacttgtatgcaatattaaaatgtctgagtaggcatctaatgagaaatgaaaacaaacattaagggaaatatcatgtctgcaagacataccagtgtgtcaaaatcttcatctacaaactttaatgttgtagagaccaccaagatgcgctgattcttcgcaaagaaatactcattgtactgtatataaactgatgcgttgacaagtgaagccacgcttatagagaattagagatgcctcctgataccatcagtcttcaatgattatagagaattagagatgcctcctgat

SEQ ID NO: 17960 - DNA, 1049 bp, Setaria italica
  Peptide Sequence Number=SeqID_83934
tgtcaaataatactcatcatcgagtaaacaaccttccagtgacaagtccagtgtgtcaaaatcttcatctacaaactttaatgttgtagagaccaccaagatgcgctgattcttcgcaaagaaatactcattgtactgtatataaactgatgcgttgacaagtgaagccacgcttatagagaattagagatgcctcctgataccatcagtcttcaatgattatagagaattagagatgcctcctgataccatcagtcttcaatgatcaagttgagggatccaagaatcagcaccgtataaaacactagaagtttagcatcatagacattctaacaggtattaaagaccaacttcttcagtgtggatgattttatgtatcgaaaattattggagcaaccaatgaagttcaaatttaccagcacaaggcaaccatgacagaacagttcagtgaaacattcatccaattgctcatataagggactgagtatttttgaggcaacaatgacatggatccaccagcaacttgaagggcacatcaccagcgtagctaatgccatgacgagtccatttattcaaggacacagaatttgaatggagcaataccaggttgttggtaaaatccacaaatttgtcccacttctcattgatctcatcataaccagagaaatcaaagctccgctcatcaatgttgatgaagggcatagagtaccaggccgtggaggatgctgtacagcagggtgctccacaggtcagcaatttccgtttattagatatctttcggaatgcctaaattgttggttactgaatcaaaattgttgtttgctagatattctttccaaatgagtctttgcagcgcacacttcttttatgcaaatgtgaagttattgtttattagaatttctataaacataaaacctcttttactcgatttaaaaaaaacacgtgcatgccgcacgtgcaccctaagctactaacacactattggccctttagccttattttatttataagctacctacaaccacaggcttatttattattaactatgg

SEQ ID NO: 17961 - DNA, 1412 bp, Setaria italica
  Peptide Sequence Number=SeqID_83935
taatttattattattaggtctattctaagtactattgggcaggtgattttagtaaagtgaaactgagctggaaagatatagttaaaagggcaccctgcatatccaaagtcaaaattcaccacctttatagatgatgaaatcagtgcagcctctatattaatgactttcattcagttcttacagtctccagaccaatgttacagtcaagcatcacgtgttcattgatttgtcaaaataatcagcgatagctccagatgcttccattgactctttgcaattttcaaatgaattacaaagtcataggaacagatcacattatttataacgataacagggattctatctaccacagcttatcgtaattgctacagtgcaaaacattgtgagtttattcttggaattgttccgattgtctagactgctactcttggaagagggaccttttcctcacatatctactacattaacataattcgaggtccacaacatccaggataacctgcatgattataatccagcattccagctcctttccccttaccccaacccatcagacactttttcgatactaggactcggagagtagaggccaagaggaaacactcaccatttagagataatagccagcactggggcaaagagaacgacataagagaagaggaccctcaccaagaagccatctaaattttggtgtatcaccatgccatcttgtagcctcaccatgtgccacaaaagttcaaccaggtcatggtcgtacaggacatatcaacttcagctttggacatcagaacgttgtctccaccctggctttgcaggctggttcccctcaatacaaacccagaacctatggaaaacttttggtggtaatacaaggtaagatagctgaatcttaatgagagatatggcaagatagaaaaaacaaaaatcatggtatgccgtatacaaagtacattctcaagaaagctcccttagatcattcagtctgctgtcaaataatactcatcatcgagtaaacaaccttccagtgacaagtccagtgtgtcaaaatcttcatctacaaactttaatgttgtagagaccaccaagatgcgctgattcttcgcaaagaaatactcattgtactgtatataaactgatgcgttgacaagtgaagccacgcttatagagaattagagatgcctcctgataccatcagtcttcaatgattatagagaattagagatgcctcctgataccatcagtcttcaatgatcaagttgagggatccaagaatcagcaccgtataaaacactagaagtttagcatcatagacattctaacaggtattacggaccctaccctaccgacttaccccgacaactaccgaacttcttcagtgtggatgattttatgtatcgaaaattattggtagc

SEQ ID NO: 17962 - DNA, 267 bp, Setaria italica
  Peptide Sequence Number=SeqID_83936
tcctcctcctccggtccttccacctgctcttctcttctctcagttctctgattgcgttgcctcgcacagtttcttccattttttctgctcacaccctccctttaataattcaaagggaagttgcgttaggtgggcgcgtgcgtgctccagcctcgggaggagggacattgctgcaagggagggatcctccgcatccacccacccagaaccgagtcccaatccaacctcccctaatccgccattgcagcactctccctccccaatcga

SEQ ID NO: 17963 - DNA, 337 bp, Setaria italica
  Peptide Sequence Number=SeqID_83937
tttttaattcttgtccacgatacctttgatctttagctgttctttaagttcccacttgatttttttaatcttctgtgcaatctcttcaaaaccaacattttggttttgacatggttctcctgttgcttgattcttatctggtttgccttcctgcagctccctcaagacctcttgttttgcctcgttgatcatttttttgatttgttcctcgtccaatgtagtcgtcgtgatttttgaagcttgcttggccggctgggcttgcatggggaatacttcccgtaggatttgttcgtactgaagtttgatgaagataagttgggccttcctcttcttgatc

SEQ ID NO: 17964 - DNA, 376 bp, Setaria italica
  Peptide Sequence Number=SeqID_83938
agggtgcgtgggttcgacctcctgagtggatgcagaaggagggcaatcttgagcttgcagccaaagtcactgatagattggttgagctgcagccagaacgagcggctgggcaccttgtgctgctgtccaacatgtatgctggcgtcgggcagtgggagcaggctgggatggtgagggcaagagtggccgcactgaatgctgagaagcctgccggaagaagctgggtgaatcagaatgagtccagcgtggtggtagcataagcccaattagatcaacctgtgcatagtaaagcactaaaccaccgtacttgaatgagcactgcaattatttgatcatcaggtattaagccaatattttcttctcagcagtataatta

SEQ ID NO: 17965 - DNA, 261 bp, Setaria italica
  Peptide Sequence Number=SeqID_83939
tcacgccagtcgggttcaatggatggtgctcgtcttgctgggcgttcgtggcggcggcgacgatagagagcgcgcaggcgatcagcaccggtgacccgccgccggtgctgtcggagcagcagctggtggactgcgacccggcgggaccaagtactggatcggcaagaactcgtggagcgccaggtggggcgacaacggctttgtctacgtgctcagggactcgccgcccttgggcttgtgcggtctcgcggtgcgccccta

SEQ ID NO: 17966 - DNA, 259 bp, Setaria italica
  Peptide Sequence Number=SeqID_83940
gttcgaatctttaccaaataagtatcgtctgtatgtgtgacgaacctggtgtgcacgcctgttgaggcttaacgttatactttgtacctcttcctgtggtgtttctttcagtgattgggacttgtcttaacgttaagcctcaacaggcgtggcctcggtcttaccgcgacggccactgtatctggttactgcataaataaagatggatgtgcttgccttctggacactggaccattatgggctgctttgagttggtact

SEQ ID NO: 17967 - DNA, 258 bp, Setaria italica
  Peptide Sequence Number=SeqID_83941
ctgcctctttctcgaacctctcgatcacacgcttgtcgatacctccaagcttgtagatcaggtgaccggtggtggtcgacttgccagagtcgacatggccaatgaccacgatgttgatgtgggacttctccttacccatggttgcaggtgaagcttaaaccgcagaaaggtcaaattgctactagcacgaggaggcacaaacccgcggaagcgaaggaggcggcgtggggggaggaagcggctactagtcggggtggc

SEQ ID NO: 17968 - DNA, 271 bp, Setaria italica
  Peptide Sequence Number=SeqID_83942
cgagttcatggccatgtacagcagcaacgacgacgacggcccgtcgtcgtcatcgttgtcggaggagacgacggtgatcacaactcgcgctggccccgtccacgagggcaccgccgccgtcgaagagccgccacctcgtcgtaccaacctgacggcggcggtgcctccgagcgtcgattggagggccaaaggcgtcgtcacagcagccaagtttcaaggggtgtcctgttgtaagtaacatccaaaacaatcatgcatgctatctcgttgt

SEQ ID NO: 17969 - DNA, 185 bp, Setaria italica
  Peptide Sequence Number=SeqID_83943
agggactcgccgcccttgggcttatgcggccttgcggcgctcccggtttaccctatcatctgatgacgaccccagccgccgtgcacctccatcatgtgtgcgtccctccgtgcatacttattatatataatgaataattgcacggtactacctagctatttacatgatggagtacacaagtgaat

SEQ ID NO: 17970 - DNA, 445 bp, Setaria italica
  Peptide Sequence Number=SeqID_83944
ccgccgttgatgaagaagaagccgccgcgtcgtacccaaacccgaacaaacgactagactagcctccgagcgttgattggagggccgaaggcgtcgtcacgccagtcgggttcaatggatggtgctcgtcttgctgggcgttcgtggcggcggcgacgatagagagcgcgcaggcgatcagcaccggtgacccgccgccggtgctgtcggagcagcagctggtggactgcgacacgctcgacaagggctgcggcggcggatggatggacacggccttcaagtgggtgatccagaacggcggcatcacgtcggcggcgtcgtacccctacacggacaggaacggcacctgccaggaggggaagccggcggaggttgtacgtcttaagtcggtcttactaagtcggtcttgtccgtcgcggcgacgaggcggcgatcatggaggaca

SEQ ID NO: 17971 - DNA, 262 bp, Setaria italica
  Peptide Sequence Number=SeqID_83945
gctcaggttcggttcagggtgaggcatgggctcaggtttcggctctggatgtggcattggctttggctccggcttgggttctggcttaggttctggctttggctcgggcatgggtttcggctcgggcttaggttccggctttggctcgggcacgggtgctgtcgcggagatgcctcagccggaacccaaacctgaaccgaaaccagagcccatgccacatcctgagcctaaacctgaaccaaagcccatgccggagccaaag

SEQ ID NO: 17972 - DNA, 164 bp, Setaria italica
  Peptide Sequence Number=SeqID_83946
gttccggctttggctcgggcacgggtgttggctcaggcttaggcttgggcatgggttttggttcaaacctgaaccaaacctaagcctgagccaaaacctgaaccaaacctaagcctgagccaaaacccatgcctcaccctgaaccgaaacctgagccaaagccc

SEQ ID NO: 17973 - DNA, 364 bp, Setaria italica
  Peptide Sequence Number=SeqID_83947
acgtacgggtaacggcaaccatgcccggcgggaccaagtactggatcggcaagaactcgtggagcgccaggtggggcgacaacggctttgtctacgtgaactacagggactcgccgcccttgggcttgtgcggtctcgcggtgcgccccagcttccctatcatctgatcgatcaccggccggacccccggccggtcgatcgccatgcacctccgagccatgcatgatctgtgtgtgcctctcgatccagaataatggtgtgtacacacgccctgcgtgtctatatacagtatgtatcgttgcaaagattatatagggtgctgacatgcatcctagcttgctaataaataaataaaataaaaaat

SEQ ID NO: 17974 - DNA, 507 bp, Setaria italica
  Peptide Sequence Number=SeqID_83948
cgtcccaacccgacaacgctgctgcctccgagcgttgattggagggccgaaggcgtcgtcacgccagtcgggttcaatggatggtgctgtaagtaggccattttaatgaaactaacatccaaatcaatgcaagctaattaattaagtgtccatatataccatcagcgtcttgctgggcgttcgtggcggcggcgacgatagagagcgcgcaggcgatcagcaccggtgacccgccgccggtgctgtcggagcagcagctggtggactgcgacacgctcgacaagggctgcggcggcggatggatggacacggccttcaagtgggtgatccagaacggcggcatcacgtcggcggcggcgtacccctacacggacaggaacggcacctgccaggaggggaagccggcggaggtgacgctaagcggctacaagcggctgccgcgcggcgacgaggcggcgatcatggaggcggtggctcggcagcccgtggcagccgcttgtagccgct

SEQ ID NO: 17975 - DNA, 731 bp, Setaria italica
  Peptide Sequence Number=SeqID_83949
cttgcttttacactataatttcctacagagaaataactcttataaggatgattgggtggtattgaacaaagctgcgtgatatgattacaatttacatgaagaaattaacaaatcattgtctattatgtataatagctctacaagaaattacagtattcgaccttgtgatcgacacaaggtagtacggaaagttgaaaaatctggagtctgtaccatgattattttgctggaaaacctttttccaattgcactcagttgcaaaggaaatgattatttgcttttggaaattcttgtaaagttctgatagaacttttaaaattagcttatctcttcactttttgaaaaaaaaagagagagccttttcctaccgatcaaaattcatgaagtgataatgcactgtggcacttaaattgagttcttatgtttcacaatccactcacataaagtatgtcagaatcttggttaggatcgttgtgtagaggacacatagcacggcaccagctggaattgtgaccaaccaggagaccacaatttcgcgaactgtctctactctgactctgttgagccctcttgaaaatccgacacccatcactgctccaacaagtgtatgtgtggcagaaattggcaaacctaagcctgagccaaaacctgaaccaaaacctaagcctgagccaaaacccatgcccgagccgaaacctgaaccaaaacccatgcccaagcctaagcctgag

SEQ ID NO: 17976 - DNA, 425 bp, Setaria italica
  Peptide Sequence Number=SeqID_83950
ccagcctcaaaaccaccagtggtggagtcaatgatgaggacagcacagtcagcctgggaggtaccggtaatcatgttcttgatgaagtcacggtgaccggggcatcaatgaccgtgcagtagtacttggtggtctcgaatttccacagggcaatgtcgatggtgatacctctctcacgctcagccttgagcttgtcaagcacccacgcatacttgaaggacctcttgttcatttctgcggcctccttctcgaacctctcgatcacacgcttgtcaatacctccaagcttgtagatcaggtggccagtggtggtcgatttgccagagtcgacatggccaatgaccacgatgttaatgtgagacttctccttgcccatggctacaagtagagcttaactcgcggagaggagggtgcggagggacggc

SEQ ID NO: 17977 - DNA, 537 bp, Setaria italica
  Peptide Sequence Number=SeqID_83951
tgtaagtccggtcggtaggttgtacgtcttaagtcggtcttacaagcggctgccgcgcggcgacgaggcggcgatcatggaggcggtggcgcggcagcccgtggccgtggccttcgaccacaacgacccctgcttccagcactacatcgacggcgtgtacgacggcaagtgcttcgcgtccggcgtctatgttggcgggggcatgcgggacgaaccagacgcatgggctcgccctcgtcgggtacggcaccatgcccggcgggaccaagtactggatcggcaagaactcgtggagcgccaggtggggcgacaacggctttgtctacgtgctcagggactcgccgcccttgggcttgtgcggtctcgcggtgcgccccagcttccctatcatctgatcgatcaccggccggaccccggccggtcgatcgccatgcacctccgagccatgcatgatctgtgtgtgcctctcgatccagaataatggtgtgtacacacgccctgcgtgtctatatacagtatgtatcgttgcaaagatta

SEQ ID NO: 17978 - DNA, 781 bp, Setaria italica
  Peptide Sequence Number=SeqID_83952
ctagaggagggaattgggggcggcgattgggagcgcggagggcgaggcgacggctgaggaggaggattgatggacacggccttcaagtgggtgatccagaacggcggcatcacgtcggcggcggcgtacccctacacggacaggaacggcacctgccaggaggggaagccggcggaggtgacgctaagcggctacaagcggctgccgcgcggcgacgaggcggcgatcatggaggcggtggcgcggcagcccgtggccgtggccttcgaccacaacgacccctgcttccagcactacatcgacggcgtgtacgacggcaagtgcttcgcgtccggcgtctatgttggcggggcatgcgggacgaaccagacgcatgggctcgccctcgtcgggtacggcaccatgcccggcgggaccaagtactggatcggcaagaactcgtaaggaaagacgccaggtggggcgacaacggctttgtctacgtgctcagggactcgccgcccttgggcttgtgcggtctcgacggtgcgccccagcttccctatcatctgatcgatcaccggccggacccccggccggtcgatcgccatgcacctccgagccatgcatgatctgtgtgtgcctctcgatccagaataatggtgtgtacacacgccctgcgtgtctatatacagtatgtatcgttgcaaagattatatagggtgctgacatgcatcctagcttgctaataaataaataaataaataagggaggtaaaagttttttaaaaaaaaaaaaaaaa

SEQ ID NO: 17979 - DNA, 534 bp, Setaria italica
  Peptide Sequence Number=SeqID_83953
ggataataatgcatgtacaaagaacaaatgaagctgcactagtaatgtactcagctcaatacaatggaaagaaagaataggtacaacaagcagcagcgagcaccaatctagatgatgcaactcccggtccagccggttttattcagatactaccatactctgcaacgtcatacaaaacagctagcggccacttcgtcagttgtcagctgcgggagggatgtgcggcgggtctggcttcggcttgggctcaggcttgggctcgggtttgggcttgggttctggcttaggttctggcttgggttttggttccggcttaggatacggcttcgggcatgggttttggctcagcctgagccaaaacctgaaccaaaacctaagcctgagccaaaacccatgcccgagccgaaacctgaaccaaaacccatgcccaagcctaagcctgagccaacacccgtgcccgagccaaagccggaacctaagcccgagccgaaacccatgcccgagccaaagccggaacccaagcccgagccaaag

SEQ ID NO: 17980 - DNA, 464 bp, Setaria italica
  Peptide Sequence Number=SeqID_83954
gcctcaaaaccaccagtggtggagtcaatgataaggacagcacagtcagcctgggaggtaccagtgatcatgttcttgatgaagtcacgatgtccaggggcgtcaatgacggtgcagtagtacttggtggtctcaaacttccacagggcgatatcaatggtgatacctctctcacgctcagccttgagcttgtcaagcacccacgcgtacttgaaggaccgcttgttcatctcagcggcctccttctcgaacctctcgatcacacgcttgtcgatacctccaagcttgtagatcaggtggccggtggtggtcgacttgccagagtcgacgtggccaatgaccacaatgttgatgtgggacttctccttacccatggctgccggtgaagcttaaaccgctgaggaagcggatgagaaggggcgtaggaaggaggcggcggcgcaggtgacggcgagggggagagg

SEQ ID NO: 17981 - DNA, 590 bp, Setaria italica
  Peptide Sequence Number=SeqID_83955
ttaggaagtaacttagggaagtaggtaggacaatccatcttgttgcagcaacaaatcatctgtttcactccaagagtgaaagcaaggagagcatgctcacgtgtctggccatccttggagataccagcctcaaaaccaccagtggtggagtcaatgatgaggacagcacagtcagcctgggaggtaccagtgatcatgttcttgatgaagtcacggtgtccaggggcatcaatgactgtgcagtagtacttggtggtctcgaacttccacagggcaatatcaatggtgatacccctctcacgctcagccttgagcttgtcaagcacccacgcatacttgaaggacctcttgttcatctcagcagcctccttctcgaacctctcgatcacacgcttgtcaatacctccaagcttgtagatcaggtggccggtggtggtcgacttgccagagtcgacgtggccaatgaccacgatgttgatgtgggacttctccttacccatggctgcaggtgaggcttaaactgctgaggaagcgaaggagagggggcgcggggcggaggcggcgcgggtgacggcaaggaggggaggcta

SEQ ID NO: 17982 - DNA, 489 bp, Setaria italica
  misc_feature (58)..(58): n is a, c, g, or t
  Peptide Sequence Number=SeqID_83956
acgggtctggccatccttggagataccagcctcaaaccaccagtggtggagtcaatgntaaggacagcacagtcagcctgggaggtaccagtgatcatgttcttgatgaagtcacggtgtccaggggcatcaatgactgtgcagtagtacttggtggtctcgaacttccacagggcgatatcaatggtgatacccctctcacgctcagccttgagcttgtcaagcacccacgcgtacttgaaggaccgcttgttcatctcagcggcctccttctcgaacctctcgatcacacgcttgtcaatacctccaagcttgtagatcaggtggccggtggtggtcgacttgccggagtcgacgtggccaatgaccacgatgttgatgtgggacttctccttacccatggtcgcaggtgaagcttaaaccgctgaggaagcgaaggatggcgtggggaggaggcggaggcgacggcgcgtagggaggctgccttgg

SEQ ID NO: 17983 - DNA, 543 bp, Setaria italica
  Peptide Sequence Number=SeqID_83957
gtggcatccatcttattgcagcagcagatcatctgcttcactccaagagtgaaagcaaggagagcatgctcacgggtctggccatccttggagataccagcctcaaaaccaccagtggtggagtcaatgataaggacagcacagtctgcctgggaggtaccggtaatcatgttcttgatgaagtcacggtgtccaggggcgtcaatgacggtgcagtagtacttggtggtctcgaacttccacagggcaatatcaatggtgatacccctctcacgctcagccttgagcttgtcaagcacccacgcatacttgaaggacctcttgttcatctcagcggcctccttctcgaacctctcgatcacacgcttgtcgatacctccaagcttgtagatcaggtggccggtggtggtcgacttgccagagtcgacgtggccaatgaccacgatgttgatgtgggacttctccttacccatggctgcaggtgaggcttaaactgaggaagcgaaggaggcggcgtggaggggcggcggagtcgagttaggg

SEQ ID NO: 17984 - DNA, 611 bp, Setaria italica
  Peptide Sequence Number=SeqID_83958
ctcccaagtactccaaggcccgctatgatgagattgttaaggaagtggtggcatccatcttgttgcagcagcagatcatctgcttcactccaagcgtgaaagcaaggagagcatgctcacgggtctggccatccttggagataccagcctcaaaaccaccagtagtggagtcaatgataaggacagcacagtctgcctgggaggtaccagtaatcatgttcttgatgaagtcacggtgtccaggggcatcaatgactgtgcagtagtacttggtggtctcgaacttccacagggcaatatcaatggtgatacccctctcacgctcagccttgagcttgtcaagcacccacgcgtacttgaaggaccgcttgttcatctcagctgcctctttctcgaacctctcgatcacacgcttgtcgatacctccaagcttgtagatcaggtgaccggtggtggtcgacttgccagagtcgacatggccaatgaccacgatgttgatgtgggacttctccttacccatggttgcaggtgaagcttaaaccgccgcggaagcgaaggaggcggcgtggggggaggaagcggctactagtcggggtggctgccttcttggt

SEQ ID NO: 17985 - DNA, 639 bp, Setaria italica
  Peptide Sequence Number=SeqID_83959
ggccttggagtacttgggagtggtggcgtccatcttgttgcagcagcaaatcatctgtttcactccaagagtgaaagcaaggagagcatgctcacgggtctggccatccttggagataccagcctcaaaaccaccagtggtggagtcaatgatgaggacagcacagtcagcctgggaggtaccagtgatcatgttcttgatgaagtcacggtgtccaggggcatcaatgactgtgcagtagtacttggtggtctcgaacttccacagggcaatatcaatggtgatacccctctcacgctcagccttgagcttgtcaagcacccacgcgtacttgaaggacctcttgttcatctcagcggcctccttctcgaacctctcgatcacacgcttgtcgatacctccaagcttgtagatcaggtggccggtggtggttgacttgccagagtcgacatggccaatgaccacgatgttgatgtgggacttctccttacccatggctgcaggtgaagcttaaaccgctgaggaagcgaaggagggggcgtcgggaggatgaggaggcggaggcgcaggtgacggcgcgtcggcgactcgccgctcgtgcactcccggtctgcggcggacaagaactaagaacgtaac

SEQ ID NO: 17986 - DNA, 1031 bp, Setaria italica
  Peptide Sequence Number=SeqID_83960
ggctcgggtttaggttccggctttggctcgggcatgggtttcggctcgggcttaggttccggctttggctcgggcacgggtgttggctcaggcttaggcttgggcatgggttttggttcaggtttcggctcgggcatgggttttggctcaggcttaggtttggttcaggttttggctaagcctgagccaaaacctgcaccaaaacctaagccagaacctaagccagaacccaagcccaaacccgagcccaagcctgagcccaagccgaagccagacccgccgcacatccctcccgcagctgacaactgacgaagtggccgctagctgttttgtatgacgttgcagagtatggtagtatctgaataaaaccggctggaccgggagttgcatcatctagattggtgctcgctgctgcttgttgtactcagctcaatacaatggaaagaaagaataggtacaacaagcagcagcgagcaccaatctagatgatgcaactcccggtccagccggttttattcagatactaccatactctgcaacgtcatacaaaacagctagcggccacttcgtcagttgtcagctgcgggagggatgtgcggcgggtctggcttcggcttgggctcaggcttgggctcgggtttgggcttgggttctggcttaggttctggcttgggttttggttccggcttaggatacggcttcggctctggttcaggcttgggctcgggtttaggttccggcttcggctttggctcgggctttggcttcggttcgggctttggctcgggcttgggttccggctttggctcgggcttaggttccggctttggctcgggcttgggttccggctcgggcttgggttccggctttggctcgggcttgggttccggctttggctcgggcttgggttccggctttggctcgggccaaagccgaagccggaacctaaacccgagcccaagcctgaaccagagccgaagccgtatcctaagccggaaccaaaacccaagccagaacctaagccagaaccc

SEQ ID NO: 17987 - DNA, 658 bp, Setaria italica
  Peptide Sequence Number=SeqID_83961
ggccttggagtacttgggagtggtggcgtccatcttgttgcagcagcagatcatctgcttgactccaagagtgaaagcaaggagagcatgctcacgggtctggccatccttggagataccagcctcaaaaccaccagtggtggagtcaatgatgaggacagcacagtcagcctgggaggtaccagtgatcatgttcttgatgaagtcacggtgtccaggggcgtcaatgacggtacagtagtacttggtggtctcgaacttccacagggcaatatcaatggtgatacccctctcacgctcagccttgagcttgtcaagcacccatgcatacttgaaggaccgcttgttcatctctgcagcttccttctcgaacctctcgatcacacgcttgtcgatacctccaagcttgtagatcaggtggccggtggtggtcgacttgccagagtcgacgtggccaatgaccacaatgttgatgtgggacttctccttacccatggctgcaggtgaagcttgaaccgctgaggaagcgaaggaaacggcgtcgagaggaggaggaggaggccggaggcgcaggtgacggcgcgctggcgactcgccgctcgcgtgctcgccctcgcgtcgctcgtgcactcccggtctgcggcggccgactgacgta

SEQ ID NO: 17988 - DNA, 760 bp, Setaria italica
  Peptide Sequence Number=SeqID_83962
ttttttacgttttaactttttaactttttaagtttttactttaaactttagttagttacctacttcggttctacttaacgtttcttcttcggttccaaagagagagggaaagcaacacaggcacacacagagagagagagcaagcaagagttcgtcggagctgcagcaatggcgacgcgtcgcctctcttcctgctgccttctgctcgccgtgctcctggtggcggcggcggcggccacggccttcgacgaggcggcggcggctgccggcgtcgggctgggtcacggggcgcgtttcgcgcgaaagcctgggcgtgctgtcgcggagatgcctcagccggaacccaaacctgaaccgaaaccagagcccatgccacatcctgagcctaaacctgaaccaaagcccatgccggagccaaagccaatgccacatccagagccgaaacctgaggcccatgcctcaccctgaaccgaaacctgagccaaagcccgaacctaagcctgagccaaaacccatgcccgagccaaaacctgaaccaaaacccatgcccgagcctaagccggaacctaagcctgagccaaaacctgaaccaaaacctaagcctgagccaaaacctgaaccaaaacctaagcctgagccaaaacccatgcccgagccgaaacctgaaccaaaacccatgcccaagcctaagcctgagccaacacccgtgcccgagccaaagccggaacctaagcccgagccgaaaactagtgcgactgag

SEQ ID NO: 17989 - DNA, 1801 bp, Setaria italica
  Peptide Sequence Number=SeqID_83963
atgtctactcaactaatgagccattggcatgatcaatggtggatggtgtcgaaggagactggtgatgtctactcaactaatgagccacagatagctttcaactccaggattgcattttgcctgaacatgcacaacgaggccgtcaaagctctaagattccctccaaactctcactaggaagcagaggctgaaagcatcaaaaggatgcactagtctagaaatcatcgtcgtcttcctcagccatgtgttttgccagttcttcctcctgctggagcctctcacgcctcttctcggcgctctccttttccttgtgagagtttggagggaatcttagagctttgacggcctcgttgtgcatgttcaggcaaaatgcaatcctggagttgaaagctatctgtggctcattagttgagtagacatcaccagtctccttcgacaccatccagccattggcatgatcaatggtggcatcaattgccccatccctgatggccttagctacaatgctttcagcatctgcaacagggttctccgagtccaacctcagcttcttggcaatatcagcaagggaaatccttgagtatgagatgctgatgttacgcaatccagtccggataacgttgtggcgcagcctcactatcaaattgcaggtcctatctgcactgaaagtgcttgaaaatttatctgcaacagatctgaatagctccaggtccccaactcgaacagcatttgtaagctcaaaatagggagtcaaagcttctttcattcctttctgcatgaaaacagttctctctggaatctctcctaagagtagccttacaataatggcccatttgttgcactggatccgaaatccttgagctgtagtgggtgcctttctagcagcttgcaagaggctttctttagcatcagtgtactccaactgaattgtccttattttgcccaagtaaaaaaggtaccggcagaactgttgatttgaatgtgcttcaaaacgcggtgcctttgatcgaagcttttctgcctggtcatacaagttgtagtgcaggtaattgcgaagaagaagattgagaagagtttcctgaccaagctcatcatggtgtaaagtcgccattctgtgcaatgccagaagagtcccacgaatctcggcaagggtgttggtaagctcatggacatctgagtaataggagtacagcctagaagctaaaacatcaactgtcctcctgttgagactcttcagacgagcaatgcttgcggaggcacaagttttagcctcatcatatttcttattatcaataaggaatataagcacaagcaggtaacaataaatttcaatctctggaagaccatgcttgattgaaacttgagctgttggagctgccgcatcaacatccatttcactcccatcttccttgggcacgagggcggcgaggcgggcgaaggcttccgaggaaggaggcagcgcgaaggcgaggaaggcggcgacgtcgcgggcggcgaggcggcggcgtagggcgatggtcaggcggaaggcgcgtgagatccggcggacctccttgctcagcgacccggcctcgatcaccgacgcgatctccttcagatggtggagagtggactgagcgggcgccggagcgtcggcggcggccgcagtggcggcggagtcgttcatctcgacgtcttccggcatcgtggcgtcggcgacgaggtcgaagagtgcgcgcggtgagatacaggaagccggtggccggtggggtgttgcggctaaactctgaagccttgcggtttggttttattttattttcga

SEQ ID NO: 17990 - DNA, 1055 bp, Setaria italica
  Peptide Sequence Number=SeqID_83964
ggagaaggaggagatgatgatcaccactcacgctggccccgtaccaacgagggtggcgtccatcgcagtgacctccagctcgccgccgttgatgaagaagagccgccgcgtcgtcccaacccgacaacgctgctgcctccgagcgttgattggagggccgaaggcgtcgtcacgccagtcgggttcaatggatggtgctcgtcttgctgggcgttcgtggcggcggcgacgatagagagcgcgcaggcgatcagcaccggtgacccgccgccggtgctgtcggagcagcagctggtggactgcgacacgctcgacaagggctgcggcggcggatggatggacacggccttcaagtgggtgatccagaacggcggcatcacgtcggcggcggcgtaacccctaacaacggaacaaggaaacggcacctgccaggaggggaagccggcggaggtgacgctaagcggctacaatcggctgccgcgcggcgacgaggcggcgatcatggaggcggtggcgcggcagcccgtggccgtggccttcgaccacaacgacccctgcttccagcactacatcgacggcgtgtaacgacggcaagtgcttcgcgtccggacgtctatgttggcggggcatgcgggacgaaccagacgcatgggctcgccctcgtcgggtacggcaccatgcccggcgggaccaagtactggatcggaacaagaactcgtggagcgccaggtggggcgacaacggctttgtctacgtgctcagggactcgccgcccttgggcttgtgcggtctcgcggtagcgcccccagcttccctatcatctgatcgatcaccggccggacccccggccggtcgatcgccatgcacctccgagccatgcatgatctgtgtgtgcctctcgatccagaataatggtgtgtacacacgccctgcgtgtctatatacagtatgtatcgttgcaaagattatatagggtgctgacatgcatcctagcttgctaataaataaataaataaataagggaggtgttttttattctaaatgtccaaaaaaaa

SEQ ID NO: 17991 - DNA, 1417 bp, Setaria italica
  misc_feature (1352)..(1352): n is a, c, g, or t
  Peptide Sequence Number=SeqID_83965
ggcttccatgcgctcgtcgtcctcatccatggctctcgctctgctgccgctactggtggcagccgcattcttcatcccctccctgctggcttcatcagcttcacgtaccctcgacgaccatggcttggacggtgaggcactgctgatgctggggaggttccatgggtggatggcggcgcacggccggtcgtacgccaccgaggaggagaagctgcgccggttcgaggtgtaccggagcaacatggcgttcatcgaggcggcgaaccgggacagccggatgagctaccgcctcggcgagaccccgttcaccgacctcacccacgacgagttcatggccatgtacggtggcaacaacggcgacccgacgtcggagaaggaggagatgatgatgatcaccactcgcgctggccccgtccacgagggtggcggcgtccatggcggtgacctccaccagctcgccgccgttgatgaagaagagccaccgcgtcgtgcaaacctgacagcgctgctgcctccgagcgtcgattggagggccgaaggcgtcgtcactccagtcgggttcaatgcatggtgctcgtcttgctgggcgttcgtggcggcggcgacgatagagagcgcgaaggcgatcagcaccggtgacccgccgccggtgctgtcggagcagcagctcgtggactgcgacaccctcgacaagggctgcggcggcgggtggatggacagggccttcaagtgggtgatccagaacggcggcatcacgtcggcggcggcgtacccctacacggacaagaacggcacctgccaggaggggaagccggcggaggcgacgctaagcagctacaagctgctgccgcgcggcgacgaggaggcgatcatggaggcggtggcgcggcagcccgtggccgtggccttcgaccacaacgacccctgcttccagcactacatcgacggcgtgtacgacgccggctgctccatttccggcgtctacaccaaaggggcgtgcaagacagcgcagaaccacgcgctggccctcgtcgggtacgggaccaagcccgacgggaccaagtactggatcggcaagaactcgtggagcgccaagtggggcgaaaacggcttcgtctacgtcctcagggactcgccgccgttgggattgtgcggcctcgcggtgcgccccagcttccctatcatctgatttgatcgatcgccatgcatgcacctcccagccatgcatatatccatgatcatccttacgtgcacatgtagttgcaccgtacgtgcctcgctatgtactcacgtgcacacacgtgctgcgtgtgtgtgcacgtaatatatcgttgtaaagattgtatggggtnctgacatgcatcctagcttgcttataaataaataaataaataaataaataagggaggtgttttta

SEQ ID NO: 17992 - DNA, 1316 bp, Setaria italica
  Peptide Sequence Number=SeqID_83966
ggttcatgatgatgacctgggaggtgaagttggcagcctccttggcagggtcatccttggagttggaggccacgtacccacgcttgagatccttcacagcaacgttcttcacgttgaagccaacattgtcaccgggaagggcctcctggaagacgacctacaatggtgcatctcaacagacttcacctcagtggtcaggccgctgggaccaaaggtgacaagcataccaggcttgatgacaccagtctctacacgaccaacaggcacagttccaataccaccaatcttgtacacatcctgaagggggagacgcaggggcttgtccgaaggcctctttggctcattgatcaagtcaagagcctcaagcagtgttgggcccttgtaccagtccaggttggtggacctctcaatcatgttgtcgccctcgaaaccagagatgggaacaaagtgaatcttgtcagggttgtatccaaccttcttgaggtacgaagagacttccttcacaatctcatcatagcgggccttcgagtacttgggtgtggtggcatccatcttgttgcagcagcagatcatctgcttcactccaagagtgaaagcaagcagagcatgctcacgggtctggccatccttggagataccagcctcaaaaccaccagtggtggagtcaatgatgaggacagcacagtcagcctgggaggtaccggtaatcatgttcttgatgaagtcacggtgaccgggggcatcaatgaccgtgcagtagtacttggtggtctcgaatttccacagggcaatgtcgatggtgatacctctctcacgctcagccttgagcttgtcaagcacccacgcatacttgaaggacctcttgttcatttctgcggcctccttctcgaacctctcgatcacacgcttgtcaatacctccaagcttgtagatcaggtggccagtggtggtcgatttgccagagtcgacatggccaatgaccacgatgttaatgtgagacttctccttgcccatggctacaagtagagcttaacctcgaggagaagaggggaacgagaggcggcggctgcaggcgtcgggctgggtcacgggggcgcgtttcgcgcgaaagcctgggcgtgctgtcgcggagatgcctcagccggaacccaaacctgaaccgaaaccagagcccatgccacatcctgagcctaaacctgaaccaaagcccatgccggagccaaagccaatgccacatccagagccgaaacctgagcccatgcctcaccctgaaccgaacctgagccaaagcccgaacctaagcctagacgccgaaa

SEQ ID NO: 17993 - DNA, 1576 bp, Setaria italica
  Peptide Sequence Number=SeqID_83967
cgcgcttccctcaacgcgatacaagcaagccacgcacacacgcttccatccccacttccagacccaaagcccccaagccaaaccctcgctcgccacctgccatccgatcaagcagcctgcagccggccgatccgccatggcgtccgcgtactacgagagctcccggggcggcgccgccgacgagggggacgacttcgacgagttcgaccccacgccgtacggcggcggctacgacctcttcgtcaccttcggccgcccgctgccgccgtccgaggagacttgctacccgtgctccgagccttccacctcctacgacgcaccccactactccgcgtccgagcccgtccccctacgggcaccacaccaaggcgaagcccaactacggtttccgcccccagcaggagcagcagccgtcctacggatcctccggcggcagctacggatccaggcccgagcccgccgcggaggagggcggcggcggctatggatctggctacggatccgggtacggtaggaagaaccaggaggaggagagctacggatccgggtacggaaggaagcctcaggcggaggagagctacgggtccggggggtacgggctctggctacggcggccaggcccggccggaggcgggctatgggtcagcagcgtatggatctggatatggctccaatccgcaggctgagagctacggctccggctacgggaggaagccgcaggtagaggagagctacggatcggagtatgggtctgggtacggcaggaagccgcaggtggagcagagctatggatcggaatacgggtcagggtacgggaggaagcctcaggctgaggagggctacggatcggggtaaaacggcagcagaccgcagggtggggaggagtatggcagtggtgggtatggcaggaagactcaggaggagagctatggttcctcggggtatggctatggcaggaagactgaggaggagggctatggtggttctgggtacgggtatgagaagccgaagccgaagccgtttggggaggagcatcagagcggtgggtatgagaggccgagctatggcggcggtgacgagtaccaggggagctatggccgcaagaagcatgatgatgactctgatgatgagaagaagcagcattatcagaagcaccaccaccaccgtcgccatgactacgacgattaagcacccattgtgggtaccttctgctgggcgtggcctcggtcttaccgcgacggccactgtatctggttactgcataaataaagatggatgtgcttgccttctggacactggaccattatgggctgctttgagttggtacttctcgcccctgaagtgtgctatgtgcctgtggtttgtatgttcgaatctttaccaaataagtatcgtctgtatgtgtgacgaacctggtgtgcacgcctgttgaggctgaacgttatactttgtacctcttcctgtggtgtttctttcagtgattgggacttgtcttcgcatcaggcgtgactcttctcttctggcccccctatcatcttagggggtgtttggatctatggattaatttttagttcgg

SEQ ID NO: 17994 - DNA, 1518 bp, Setaria italica
  Peptide Sequence Number=SeqID_83968
cgggcatggcttccatgcgctcgtcgtcctcatccatggctctcgctctgctgccgctactggtggcagccgcactggctccctctctggcttcagcttcacctgccctcgacaatggcgaggagctgctgatgctggggagattccatgggtggatggcggcgcacggccggtcgtacgccaccgaggaggagaagctgcgccggttcgaggtgtaccggagcaacatggagttcatcgaggcggcgaaccgggacagccggatgagctaccgcctcggcgagaccccgttcacagacctcacccacgacgagttcatggccatgtacagcagcaacgacgacgacggcccgtcgtcgtcatcgttgtcggaggagacgacggtgatcacaactcgcgctggccccgtccacgagggcaccgccgccgtcgaagagccgccacctcgtcgtaccaacctgacggcggcggtgcctccgagcgtcgattggagggccaaaggcgtcgtcacagcagccaagtttcaaggggtgtcctgttcgtcttgctgggcgttcacgtcggtggcgacgatggagagcgcgcaggcgatcagcaccggcggatcgccgccggtgctgtcggagcagcagctggtggactgtgtcactctcaaccacggctgcaacagaggttggatggacaacgccttcaagtgggtgatccagaacggcggcatcaccacggaggcggcctacccctacaccggcaaggacggcaagtgccaaacgggcaagccggtcgcggtgaggctcagcggctacaagaaggtttcgccgcccggcaacgaggcggcgctcatggaggccgtggcgcagcagcccgtcgccgcatccttcgactacagcgacccctgcttccagcactacatcggcggcgtatacaacgccggttgctccaagtccggcgtctacaccaaaggggcgtgcaagacagcgcagaaccacgcgctggccctcgtcgggtacgggaccatgcctgacgggaccaagtactggatcggtaagaactcgtggggtgagaagtggggtgaaaaaggcttcatctatgtccttagggactcgccgcccttgggcttatgcggccttgcggcgctcccggtttaccctatcatctgatgacgaccccagccgccgtgcacctccatcatgtgtgcgtccctccgtgcatacttattatatataatgaataattgcacggtactacctagctattcacttgtgtactccatcatgtaaaggttcggatgctacacatgcatccttgcctataataaataaacaattaatatatgctactcattccattctaaattgtaaatcgttttgacttttttagattcatagctttttgctatgcacctagataatacattatgttttactatgtatctagaaaagtcaaaacaacttacaatttggggtagaagaagtacctccgttctaagttttaaaaaaaaaaaaaaaaaaaaaaaaaaaa

SEQ ID NO: 17995 - DNA, 1651 bp, Setaria italica
  Peptide Sequence Number=SeqID_83969
caacaagtgagatctatcggctatataaaggaaccaggttctagccaagcgttcatatggctgccatgcactactcgtcctcctccatgtctctctctctgctgccgctactgcttgcagccgcactggctccctctctggcttcagcttcacctgccctcgacaatggcgaggagctgctgatgctcgggaggttccatgggtggatggcggcgcacggccggtcctacgccaccgaggaggagaagctgctccggttcgagatataccggagcaacatggagttcatcgccgcggcgaaccgggacagccggatgaggtaccgcctcggcgagaccccgttcaccgacctcacccacgacgagttcatggccatgtacggtggcaacggcggcgacccgtcggagaaggaggagatgatgatcaccactcacgctggccccgtccacgagggtggcgtccatcgcagtgacctccagctcgccgccgttgatgaagaagagccgccgcgtcgtcccaacccgacaacgctgctgcctccgagcgttgattggagggccgaagggcgtcgtcacgccagtcgggttacaaataggaataggtagactacgtacttagactagggacgttacgtggcggcggcgacgatagagagcgcgcaggcgatcagcaccggtgacccgccgccggtgctgtcggagcagcagctggtggactgcgacacgctcgacaagggctgcggcggcggatggatggacacggccttcaagtgggtgatccagaacggcggcatcacgtcggcggcggcggtacccctacacgggacaggaacggcaccctgccaggaggggaagccgggcggaggtgacgctaagcggctacaagcggctgccgcgcggcgacgaggcggcgatcatggaggcggtggcgcggcagcccgtggccgtggccttcgaccacaacgacccctgcttccagcactacatcgacggcgtgtacgacggcaagtgcttcgcgtccggcgtctatgttggcggggcatgcgggacgaaccagacgcatgggctcgccctcgtcgggtacggcaccatgccccggcgggaccaagtactggatcggcaagaactcgtggagcgccaggtggggcgacaacggctttgtctacgtgctcagggactcgccgcccttgggcttgtgcggtctcgcggtgcgccccagcttccctatcatctgatcgatcaccggccggacccccggccggtcgatcgccatgcacctccgagccatgcatgatctgtgtgtgcctctcgatccagaataatggtgtgtacacacgccctgcgtgtctatatacagtatgtatcgttgcaaagattatatagggtgctgacatgcatggctcggaggtgcatggcgatcgaccggccgggggtccggccggtgatcgatcagatgatagggaagctgggggcgcaccgcgagaccgcacaagcccaaggggcggcgagtccctgagcacgtagacaaagccgttgtcgccccacctggcgctccacgagttcttgccgatccagtacttggtcccgccgggcatggtgccgtacccgacgagggcgagcccatgcgtctggttcgtcccgcatgccccgcc

SEQ ID NO: 17996 - DNA, 561 bp, Setaria italica
  Peptide Sequence Number=SeqID_83970
tccctgttgatggtttcaaacatcttgtatgctgcagcctgcccagctgcaaacgctttcatgctcggtgatgcctgacccagagctagtgagccagtgagcactgcgaagatgacattcatgacctgggcgccggagtatcccttctccaggatcagcttggcgccgtaccaaatccccagggagtagccgcagaagaggagcaccatgacgatggccatgccgatgccggcggcgaggccctcccggacgccggagctgtacgcgctcttgagcgactcgttgtacttctccaccgcccgcttctcaccagtgaaggacgccactgttctgattgagccgacggtctgctcgacgacggcagcagcctcggcgtaggcggcctggccgagcgaggccattctggcgacgacgccggacataacggcgccggcgagcacgagcggcgggatggtggcgagcatgacgagcgtgaggagccagccctgcgcgaaggcgacggcgaagccgccggcgaaggtgacgaggagctggatgaacttgccgaccttctcgcccatg

SEQ ID NO: 17997 - DNA, 1031 bp, Setaria italica
  Peptide Sequence Number=SeqID_83971
tacaagctcatggtgtgaaccttttctaactactgatcctcgatgaatgacagcaatggtatcggcattcctgacggtactcaaacggtgagcaacaatcacagttgtccggtttgtcataaccctgtcaagagcctcctgcacaatcctttcagattcagtgtccaaagcgcttgttgcttcatccaaaagaaggattcttggattttttagaattgctcttgcaatggcaattctttgcttctgaccacctgaaagttgtgttccatgttcaccaactgaagtagataaaccctggggcattttatctatgaatttggaggcattagcaagctcagctgcagctctgatttcctcatccgtcgcattgtccttgccataagctatgttgtctcttatgctagcagcaaacaggactggctcttgactcacgaggccgattttacttctgatccacctcaactgaaactccttgaggtccacaccatctatcagaacttcaccaagctgagggtcgtagaacctctcgatcaagctgatgactgtcgatttgccactaccactctggccaacgagtgcgacagttgtaccactctgtacggcaagggagaaacctctgaagatctgctcgtcaggccttgttgggtatgaaaaatgaacttctctgaactcaatgtccccctgaatgtcgtccagcttcctacctgttgcgctgtacgcatcgatctctggctccctgttgatggtttcaaacatcttgtatgctgcagcctgcccagctgcaaacgctttcatgctcggtgatgcctgacccagagctagtgagccagtgagcactgcgaagatgacattcatgacctgggcgccggagtatcccttctccaggatcagcttggcgccgtaccaaatccccagggagtagccgcagaagaggagcaccatgacgatggccatgccgatgccggcgggtcgtaaggtcccttcccggttaacgttaccggttaagttactttagtttaacgtttacttta

SEQ ID NO: 17998 - DNA, 391 bp, Setaria italica
  Peptide Sequence Number=SeqID_83972
ttttcgtttttactttttctttttagtttttctttttagtttcgtttacctccaggacaattgggtccattggcaacagcatgctcctttgcgaatttgcatgcttgcttcacagcaagaacatccattccatcaaccttcaatccaggcacatagtcgccacgcttgtagtaggcagggctcttcgctgccctccactctgctgttcccatgccataatggttgttctcgcaaaccaatatggcgggcagcttccaaagggccgaaatgttgagcgcctcaaagagctgtccctggttagccgcaccgtcaccgtagagcgcagaagtacaagaaggaggacactgccactttcgcgctccctggttagccgcaccgtcaccgtagagcg

SEQ ID NO: 17999 - DNA, 599 bp, Setaria italica
  Peptide Sequence Number=SeqID_83973
cctcctgacaacgcatctctatacaggttcctttcccacgaaaaattcgagcaatgcctgaggtcttcttcgtcaatattatttctcctgcctatatcatgtttgcaaggaatgacagtatcgtttccagcttatggaagggaagctctcaactccttcctgtctggtccgaatgactgcacaatcaacgagccaggtcagaactggcaagcatgtcatcaaaataaaatttgtagttggagcatgttatgtgagttgctagtttgttagataaaacaaaacctgatcattcatgagcttgttatgtgagttccttgtagaaacagatataagcactaccatgacaataagactaatggaacactttctggtcataagaaaacttataaaattttggctattaacatctttcgaatacttataatgcaaacatgaaacactttcatagtaatattaagattaaatttagcaatcaaagttgtgtttcaagactatgctaatttcagaacagccagcaaaacatttcaaatttgtagttgaatggtgacaaaagtactatagaagcaccgttagaaaatggagattgcagaaactcaact

SEQ ID NO: 18000 - DNA, 444 bp, Setaria italica
  misc_feature (10)..(10): n is a, c, g, or t
  Peptide Sequence Number=SeqID_83974
ccagcggcancttcacagggtttatctccagcgaggccgcggggccgcgccaccaatggcgctcgcgggcccgtcctcggcactcctctcctcatcctcctccgcctgcctccgccgcctcaacccgctcctcctctccgccgcctgccgccgctcggcttggggccagcgccgcgccgcccgcaggttctgcgcagcggttgcctccgaggcggatgtgttcacctccccggaagtcgcgaagtcgttcgacttcaccaacgaggagcggatttacaagtggtgggaatctcaaggattttttaagcctaactttgatcgtggaggagatccatttgtcatcccgatgccacccccaaatgttaccggttcactgcatatgggccatgctatgtttgtcacccttgaggatataatggttaggtatttccgaatggaaaggga

SEQ ID NO: 18001 - DNA, 281 bp, Setaria italica
  Peptide Sequence Number=SeqID_83975
gtcggggcgggcgagcccggggaacttggaggcctccgcgccggcggggcccgcggcgacggcggcggagcttgggttggaggagggcgggaggatagcgtggatgatggtgaggagcgtgcggacgaagtagtcggggaagtcggcgcccttctccttgagccgggcgtcgaactcggcgacggtggcggagtcgcggccgagctccgtgatgaactccgccagcaccttgtcgccgacgccgatgtgggtctcgagctcggagcataccttcgagacgg

SEQ ID NO: 18002 - DNA, 1296 bp, Setaria italica
  misc_feature (1)..(51): n is a, c, g, or t
  Peptide Sequence Number=SeqID_83976
nnnnnnnnnnnnnnnnnnnnnnnnnnnnnnnnnnnnnnnnnnnnnnnnnnngtcacctcaaaaaccaacaacactatccttggaaatatattcatcaccaggtgtccaggttcatactcatacctactacatgtggagatacgacacaacaggctctacagatgagctaactaatgtggaagtacatcagcaacatggcacaggttaaacggcagctgcctcacaaaacggcgacgacctgttacaagtcagaacaactagagtatgtatgcaacgccagcagcagcagcagcagtccatgcgtgtgtagaacaaacaaccatatatagctcagatttggggcagaggcaacacgctacttgcactgccttgggtggaacttctcctctgacagcagcgacgtcatcagccgctgcaggcgcaccgctccacgcccaggccgaaggaggctggtgtcacctatcaccgagcaagggtcgctcccattctctcgcgttcctgcgcaccagcctccaggggtcggcatgtccacgctgcgggacaggatctccccgtctatcctgtctagcacagggtcgtctgcgtggaacttccgagcgaacggcgcatcgctagcgaccatcctgtccaagtcttccaccgtcaggtagtgcggatgctgcttcggagggttgtcccacgagatgtagtgcaggtcgtggttcacggtcgtgttcttgaattcctcagcgttgcagaccacggtgtggaaatagccttctggcgaggagatgaaattggagtagtacatgagcactgtgcgaggtaggttgtcccagccccatatgcagtattccacaaagggcctagacagtgccatccaagcggaaccagtgaagagcttgaaggctgtgggcacgctccgcctctgtggtatccagaacacatcggccttcttcttcatgtagagaccagggtcaatgatcacgggcttggccctctgaaactccttccatccgatgtcgctagtgtggtcaatgaagttgagatcacgcggcagcttggagaagacatgtatcagatcatcctgcgtgacgagcgggtaatcggaggcggagaggttgatgaaccagtcccagtctgagccgccgtcgccggcgtggccccagaggaaggcggcggcggcgtggagcgtgttggcgaccatggtgggcccgcggtaggtgatgaggttggcgcggtcgacgacgcggacgttgtccgctgcggcgatgacggggtgggcggcgagggcggcggcgaggtccctccggtcgg

SEQ ID NO: 18003 - DNA, 522 bp, Setaria italica
  Peptide Sequence Number=SeqID_83977
ctgttcttctgaagcattaacctctcttttttcagaattaattatgtcgactgctaactctttatgcaccagggcaggtttggccttgcagccttgcaggaagacactgcaataattagaacctcggactacagctgtagtcatggtgagaaccgtgttcattagaccatctatcctgggcagatattatattgagacttcaccttttcctaatctttaaaaagggtcttcagtaaacgtcgagcttcccaagtcatccctggctttgaaaatgctctggatacaaaactaagagtgcctttagatggtctaaatcctatctctttcatatctttgaaaagttttctcacctctattccatttctaagctttgaccatccattcaaaaggatatcataagttgaggacgtatgtaaaacccctctccttttcatttctttgaacatctctttagcttggttcatcattccagctttagcaaaatcacttatgagtgaattatacgtgcttgcttttgggtaa

SEQ ID NO: 18004 - DNA, 532 bp, Setaria italica
  Peptide Sequence Number=SeqID_83978
caagctggttgtcatatcctctagaaagaaaaaagcacaatcagcacaccaccacagtgaaaacacaaaccactctggaaaacacactgagcacgacctacaccaccaccacagcagctcgttatgaaagtgtgaagtggtcctggcagccaggcaagttgtcttcaggtgtggcgatgcgaaggaagccgagttgcttgcttgccaggaggggttgagcttagctatccaatggagacactcaccactaatactggaatcggattgtcaaaatgtctgcaatgctttgaacttgacattggaggacagaagtcgcctcgcctttctcatccaggaagttaaatttctcactgaggagcacatgttttagctcggagttcttgtacaccatcctgaaatgatgcatcaaacgcagcggagcggggaagtatctccaaggctggacgacgttcctgatccttcttgaaaccaaaggggattgatgccgcgcgctgaagaaagaacctaatcgagcggcaaaagaagaacccga

SEQ ID NO: 18005 - DNA, 981 bp, Setaria italica
  Peptide Sequence Number=SeqID_83979
ttccagagatttgacaatgcaattcatgctatagctgctggactaatgctattttttggagaatggcattaactgtttgtgagggtaccttagttttgtttgtcgactttgataggaaggagatgtgataaccactagcttcttatgccactggtcatccagatgctgggatggtatacgtctgagatggaactagttttggcctgctccttggcacaattgctcagtgtatatttgtttgcatgaatgcagtgtgaacctagggtagtgctgctcacaagctaattttgtggtatgcatctggtggctaaattctgctgcttcctcctatccaagtcggccatatctatagcagcatgccaattttgagctcccctctcatcaagtgctatatgcttcccagtgttcactggttcccacaaagatatttgcaatgtctgcctgcatttcaactggataagagtaaatcatggtatcttgtgatctgtcttggtaaagagttctcccagtatgctgagctgtatggatgctatcttttcaaggtcaactgatggaatctattttcatgattccatatgtcgccttgttggttctggataaatgatttttaattacatgacatgagtttatcggtccattcaatcagtaaattatgtcaacttggagacattgttgaaccttatgcgttcaaatttggtggaagtaaacagcatgggtaaacagtctagatttttgagggccttaaaccaagaggatgcactatatatttgcaatgtatttatgtttgattttatttcaaagtatggtatgatatgtatattgtgactaccctgaaaattgtatcctagtcttgaggggttatggggagtttactgcatacatgctcggaaaacaatatggctgttggtcctcggttgcatattactcttggtacttgagcactcccactcatgacactaatgttttgattttgatgcagtg

SEQ ID NO: 18006 - DNA, 1041 bp, Setaria italica
  Peptide Sequence Number=SeqID_83980
cccgacgcacacgcacgtcccaccgccgaaccctaggccgccgcccgcccgcccctcccactgctcctcgcgggatcgcccgccgcgtggtccccgcacgcgtcgactaccgcctcgccgagtctccatccgccgccgctcggatcctagatggagtcacttccactcacagctgaagctattgcttttaccgagaaaaagatggacatgactttggaggatatcatcaagatgtcaaagaaaaagaatcctggaggcaagaaaccccctagacagccgatcaaaaaacacccattccagagtgggaactctaatcaagggaatgccaaggttcaacggtttatggaatctagatcggccattagacaaggttttcttgcacaaaggaggtcaaaccttggtggaaatcagttccctgttacaaagcaggctgcgaagaaggctgctgctatgccaatgcgcaacaaggctgtcagatggaacaagccaagtgcgagtaccttagtgcagaggcggcctgtaggcgatgcttttcagaatggcaaggccaaagagacacagaaccagggagcaccaaggacgatggatgcgctcttcgcacagatgaaggcgcaacgcatgaggaccgtgccacaacagcaggcaaatcctgcccctgggtgtcagttcaaccagcagcgacgtgttcagcagcagcaaaggcggggcagaggatatggtggccgaaatgttggcaaccaatgaactagtcttgatcatcagctgcactgaagcattgttgcactagcttcttggaacaaaggacgaaccccctggaaatctaacttggctgcgtttgtttctcatattttagttattggaagcttgttgacagaatatttagtgaagtttgtctgcagttctctggttgcctgcttccgtttcagcatgtataatgtccaacacaatgtatggaaattatttgctgctagattatgctgtcatttttttatttgaactgattaggtacctttctgttccaaagaacttaaaaaaaaaaaa

SEQ ID NO: 18007 - DNA, 453 bp, Setaria italica
  misc_feature (1)..(1): n is a, c, g, or t
  Peptide Sequence Number=SeqID_83981
ntttttttttttaaacttttgtatgacattgctgacttgagatcagctcaatcatgtagtctatattcagaaagaagaaaaaattagagtgatacatcaggcgcccttcaggcttcaggttctttgcactctaaagtatgtacagcagaatgtgactatacgtacactgtacagcagttgaagaatgagagtattttgacatcatacagcaccatatgaaggcgcaatactatccacgtctctgatagacacaagctcttcaagattagcagtaatcttccctatcaaaactgcagcgtatatatatgcaaactgccagtaacttaaaagcgacgaaacctgaaccggatctcgtccacctttcagcacaggcagcctatcttccgaactgcgcatcctctatacggtctacgagcgtacgcagcactttcttggttctattcgggtcagttt

SEQ ID NO: 18008 - DNA, 330 bp, Setaria italica
  Peptide Sequence Number=SeqID_83982
ttcagaagtacatgagaaatcatctagcattgatgggacctttagatagacgtgacctttattttggcctcttcatggtgtgtgacatgctgcgtgataaggatgatcgtggatataagccactttatggaaaaaaggatgctccagaatggcgatcaaatgccaaaaagtttcacccctatcattcagtgtattatcatgatgtttccgaggaagataagaataacccagattatcaaccatattggaataattattgggagttacttagattcctaagaaattatgggagaaatgcttctaattactcattaaattactaactaacta

SEQ ID NO: 18009 - DNA, 373 bp, Setaria italica
  Peptide Sequence Number=SeqID_83983
taggaggcgctggagctgctccgcatgatggctgatgatggaggtggtagctgcccaccagacgtggtggcgtacaacactgtcatcaatggcttctttagagagggtcaggtggacaaagcttacggcctatttcatgaaatgctcgatcgggggattttgcctgatgttgtgacatacaccacagtcgttgatggtctatgcaaagctggagcagttagcagggccaagggtgtccttcaggagatgattcataaaggtgttaagccaaacatgaacacatataattgtctgatcaatggatattgcacttcaggacaatggaaagaggtggttcgaatacttaaagaaatgtccacacagggtcagcgaa

SEQ ID NO: 18010 - DNA, 958 bp, Setaria italica
  misc_feature (1)..(28): n is a, c, g, or t
  Peptide Sequence Number=SeqID_83984
nnnnnnnnnnnnnnnnnnnnnnnnnnnngacatacccaatttcgaggatagaaactgcccatgagcttcttggaatttgaaagacagagactagacaaccaaacaaaagcaattttagcttcatttcctattactgtgataatacatcgcaaattaattccaatttcttgatgagaatgttgccgttctccaagtgagctcagttctctgttacggtaccctctttagaagattcacaagtgccggatgcatacactgtcttgcgatcacagccagtgcttcgagtaagagaagcacccagctatttgtcagcaagccacttcactcgcatattagaagcctttgagctggccactcagtccggctaacgctatccatttctccaacgctgtggctgacgacacaaacgccgacttggaggattcagcatcaagcttgttcactgatgtgaacaatgaggccaaggaggcgttgaagctatcaaccgtgctcctctcctctgggctcgagctgaacttggaaaaagctgcattgatgttctgcacccactgggcatctgtacttggacccaggacgctgctcgcggctgggagatcgtccttgtcaatggcctgcccaactttgctcaacttgtagatgaggtcctgcaagtacccagtctcggtgcctgaggcgctgatgatcccttgcttctccaggcgcttcttcctgtcctccttgacgcgctccagcagctcgatgtcatcgtcctcctcgagcacaagagcccgcgcggggcggtcggcggcgagcggggagaacgacgccgccagggcggcgagcacgcatgacgccaggccgctccgtcggccgacgacgacggcggcctcacgccggtcctggcctccgttgatgctgacgcctctgaacttggccctgcatgctgccgctgggggatgctgctgcgctggcagcttcc

SEQ ID NO: 18011 - DNA, 406 bp, Setaria italica
  Peptide Sequence Number=SeqID_83985
aggtcactgatatcataagtcaagttcctgaccatcgggttgatgttcctgattttcctttcataaaggccacagattccatccagtgcgtggttaactgaatcgaagtccaaaaatgtccttgtcgctctgttctgggacggctgcatgagaatgatggtatgccttcctgccatgccctcgggcctcggcgcggaaccgcagctggcgactggaattcggggatcccgccgcgatccgccgcagagtccaccgaccaaaaccaagaagcaggaatgctgccgattgcccccgcccgcaacagctggtagagcgttgaagagggattggtgggtttggccggtcgggcaaaggggaagaggcggaggttgcgtacgagcaacgcagagagagctttgcaaatgcg

SEQ ID NO: 18012 - DNA, 275 bp, Setaria italica
  Peptide Sequence Number=SeqID_83986
gtgaaggtcctgtgaaggtctagtccgccatcaaagccagctcttgatcacgcggggcatccgcggccctctcctctcttcgcccctgcaggccgcggtgccgtgccagccatgcgcatcttcgtgctctccggccagagcaacatggccggccgcggcggcgtgcaccaccggcgctgggacggcgtggtgccgccggaggccgcgccggacccgtccatccagcgcctctccgcggcgctggactgggaggaggcccgggagccgctccacgc

SEQ ID NO: 18013 - DNA, 248 bp, Setaria italica
  Peptide Sequence Number=SeqID_83987
cgggcctcctcgtccaggccgtggatcgcctgcgcgatgcggtcgccagattcgccgcccagggcgacgccaaccgcacgcccgtgctccgaccgctcggggacctcgcagactatctcggtgcctgggctcgccacgccgtgcgggacctcacccttagctcgccaaggaagaagcaggcgccttccaagaacaacaccaattcagatgtggccaagcctgctgctgctacacgtcctcagccgcaa

SEQ ID NO: 18014 - DNA, 1889 bp, Setaria italica
  Peptide Sequence Number=SeqID_83988
cccggccggggctcgtcttccccttagcggccgccgcctccctacgttaggggccaaaacctggaactttgcccccgcggacggggaggagccacggggagtcatttttttcggctccctccccgtctaacggctccagtcaccgcattttgcggagctcccgtggtgaagccgtttcttcgtcaccccctttggcagggcttcaccagaagcccgtggtgaagccggtcgggaagacctgccaaacggggtggtgatgacgatgaggagggaaacaaaatgaggggtggtgtcagtgggggtgacgaacgggaagacatccactgctgccatcttggagatgggaaagcaaaaaggaagggagagccagcagcaacaagaatatgatggctgatgaccgggagaaaaaaaacaagacgactacatggaatggtcacaataaggtgaagagtagtaagaaggtgtccactacatctcttgagaagatgaggaaaaaggaaaactttgcaatgccaacaacaagaagaaaatgcaaatttgtgatgatgaggagggaaagaataggaaggagtccaccacgatatctgagaggaaggataaggaaaagatgaataaaacacacaaagagaagatgagggctgctaacagcaaggagagaaagatactgagtggccacgatggggtaaagaagagtgtggaggtgtccactgcattctttgggaaggaaaagaaagggaaaaggctgaacaagaccatcaatttggagctgcagagcgatgaagatgaagaggagggggtgtggaattacgatggcaaggtgaagaatgggaaggtggccacagcattttctgaggaagagaagagaaagagaaggccaaacaacaacactgagaaagagactgcagcattaacacctgctgttaaggagaagagaatgaggcccagtgagagcacggagatgatgatgctccatgacaaaccgaatgggagaaatgtggcgtctaatgtatccaaagagaagaagatggatacatcaagtggttctaactataaaaaaggaagagggaagaaccagactcactatcgaagaaagaaaagagggtgtggtgcaatgctagtgataagaagatttatagtggtacggtgcaggaaaagaagatatgtggcagtggcaaggaaaagaataggcaggctcccttcacattcttcaagttcatatacaactatttcgaggaatttctgcttataccaccagctgttgcacccaaattggaggatttgactaatcgtgatgtatatcttgaagattcagagaaaagacgttcaaaggtcaggctatctgtggtggatggttcgctcgcttttcatcagggatgggatatttttgtttcagaccatttgattaaactgggggagtttttgttgtttgagtacactgctaggaaaagattttctgtgcggatttttggtatagattcttgtgaaaggttggattttaaaaaagaccccaaaagagttgaacaggggattgggtatggaccgccacaagataacaataatggaagtttgatcgatcgtcaatgcaaaacaaagggtacttctccacttcacagcaaaaagaaaacagtaattctgatttcggattcaggaatttcagcagacaatgaggatacgttgaatatcacatcagatgcagattcaacacatcatgtgactattaataccaacaaagacctgaaaagagttcaaagtggtgttggaaatttgcctgatggagtgtgcagaaccaagtgtatttcaccaccttgcagtgaaggaaaaacaagttctgaaataattgtaactggtgcagctcccttaatgcatgaaaatgatggtagagtggggca

SEQ ID NO: 18015 - DNA, 249 bp, Setaria italica
  Peptide Sequence Number=SeqID_83989
tggcggcaaggccgtataagtacttgtagtcgcactccgcgccaccggcgccgcacgtcgccagcgaattggccttgagattgccgcagaggccgctggagcacggcagcttggagaaagacgaggaggtgttggggtagtaggaaggggagccctgcggggcgcagtgagcgcacgcgccgcacttgacccagacgaggtcgctgccggtgtcggcgacggctgacagctcctgcggcggcgtgccga

SEQ ID NO: 18016 - DNA, 675 bp, Setaria italica
  Peptide Sequence Number=SeqID_83990
ggggagtttcaggtagcaggcaggcaggaagacgatgggggcgtcgccgtcgcggcatgaggcgtcgtccgactcgtcgcgcgccggcaacggccgcgccgtggcggtggcgacgagcagcgccgcttctggcaccggtagcaacagcaaccaggcccagtcgaagcgggcgccggctcctcacatgttccatgagatcgtcgcgcaggagaagactgccactactgcagccgagctggaggatcaggtgcatggcgcagggatctacctggctggaaaaacaaagaagtactgggtgcacgagaaaaccaggtgcaactgcttcatgctgttccccagagggctgtccgtcacttggagtgaggaccccaactactggagctggcatcccctgaaagagacaagcgactccgagatcgaggcggtgtcgctgcagaacgtgtgctggctggagatccacgggaagctggagctgtcccacctcacgccaggagtcacctacgacgtcgtcttcgaggcgatgcttacagagccaacgtacgggtggaccgcgccggtgaacctccggctgaagctccccgacggggcggtgcaggagcggaaggagaagctgcaggagaagcccaggaaccagtggctggagctcaaggccggggagctgacggcgcagccggg

SEQ ID NO: 18017 - DNA, 623 bp, Setaria italica
  Peptide Sequence Number=SeqID_83991
gcgagggaccaagatccccgtagccccgtcgtcttctctcctctcctccaacctcgcgctgggatacgcgtgtagattcagtcagcgcccatgatccagcggcggtaaccggcgcgtcccaagaaccgacttcatccagcaggcccctgcttgctgccgtcccgccggtccaggtttccaggtcgttagcatgtgagagtgatggcggctgctgaagcaagagctgcctggcaacgcgccgcgaaccgctgcttggttcaggaggatgcaaagagagccccgaagctggcctgctgtccacagtccgtgcaacagcatgacatgagcggtgcaaatcctacgaacccgcaagatccccatatccctaactttatgccgataaactggaacctgatgagttccaacctgccgacagacacccagtggtggctccagttgcagcccaactttggatgccagatggctcttgctagagagcacctgagctatattggtggggaggctggagagaagaaaatggagggtttagtgccagtgtctaaacctgacgatgtcagagctaagaaggatgccgatccttgtgaacctccgtggatcgtttcaacagcttttatgaagcaatc

SEQ ID NO: 18018 - DNA, 1710 bp, Setaria italica
  misc_feature (1617)..(1710): n is a, c, g, or t
  Peptide Sequence Number=SeqID_83992
ttctttgttctttagttagttagttcttaccttgtagtcttattatttggttggggtaggtcttggtaagggtaagtaaaattggtagggttttatagtgccagtgtctaaacctgacgatgtcagagctaagaaggatgccgatccttgtgaacctccgtggatcgtttcaacagcttttatgaagcaatcatctgaaacaggtttggaagagttgaagaacctcgctggctatactccgacgagtctcaagtgcaaaggaaatgccaacaactgcgtttatgaggataaagagtttacagagttcaaagctttcgatcctttgtttcccaagcagcagcaaaaggtatactgtgagatgggtgcaccttgggaagaaaacaagaagtctcagccatggtggcaagttgctgatgttgatggtttggcgtcccttgtcgctgaaagagcaatggaaagcattgtgaacaatgatcttccaagacctactcagacagtacgggttcatggagctgaattgaacagccctggaaacaaggttgattatgagttgccattgccaccttctggtaaagagccagatcctgtgcatgacactatgacatgcagctacagtgtttcaagcaacaccaacgagacaaattcatctgatgggggaggttgggaacagcagcgaagaaataatgtgcctgggggtgcacaagattcatatagttccactaacagtactccaggcagcaagccgacataccagaatgcctctgagagggccaagctgctagatgctctccgtcattcacaaacacgtgctagggaagctgagattgctgccaagaaagcctatgacgagaaagaacatgtaattaagctgttgtttcgccaagcctcacacctctttgcgtgcaagcagtggctgaaaatgttacagctggagaacatttgcctccagctcaggttcaaagagcaccagatagcaaccatgttcccagaacttccctggatgacgatgaaggagaaggtggcaccaggtcaagagcacaaagatgggacaaggaaaagaggcaggaggccaaacaggaaaggcggtctccacaacgcatttgcggttgcagttggtgttgggattgttggcgctggattgcttcttggctggactctcgggtggctgctgcccatgctgtaatctcctcaatctttgatgaccacaaaggtgatgagataaatactttctatgcacatgaaaaatgaatcagtgaaggaagcaagagggtgaagttattcttagaacacattcatgctagtctgttgattcagttaagctgcagtgatgaattcatggtagcttggtaccttatgctggttcctgtatatatagggaggatttggtgtacatattaccagaaaactgggtgcccgtgttggtagcatggatgggatgtttatctgtgtgctgtacatagggggtcagtgggtggtctggtggaagatgaaatcagtcgacttcaacaatgtatgcattagtactgtaaatctgtagcttttatttgcttaactagcatgaattattgtattaataagcttgctgtaaagtgtgttgaacatatttgcaataaaacnnnnnnnnnnnnnnnnnnnnnnnnnnnnnnnnnnnnnnnnnnnnnnnnnnnnnnnnnnnnnnnnnnnnnnnnnnnnnnnnnnnnnnnnnnnnnn

SEQ ID NO: 18019 - DNA, 479 bp, Setaria italica
  Peptide Sequence Number=SeqID_83993
gtcaacatgctccacctctacacgcagccgctgctcccgaggatgcactacctgcacccgttcacggtgacgcagctcgacgcgctccggcaccaggcgatgggcatcgtggcggcgcggctgggccgcgcggagccgccgctccggcgcgaggtcgtcgagtacatgctcgacgtggagtcccacatgtggagcatgcggcggagcaaggccaacttcttccgcgccgtctccctcttctccggcgccgccgccgccgcgcggtggttcggcgacgtgtgccggtggcggaacgtggccacgacggcgctggtgcacgtgctcctgctcatcctggtgtggtacccggagctgatcctccccacggtgttcctctacatgttcctcatcgggctgtggaactaccggcggcggccgcggcacccgccgcacatggacacgaagatgtcgtgggcggaggcggcgcaccccgacgagct

SEQ ID NO: 18020 - DNA, 270 bp, Setaria italica
  Peptide Sequence Number=SeqID_83994
ggcactagtttttgacttttttttccttgtagatctggaaacagatgaatcagtcttcttatggtgttaagatgcaactcgagcacatcaggattatttcatgacacccgcggcggctggaggagccggcgacgagtccgcggcgggcgggaggcctcggagctgaacgcgcaatgggcggtggaggaggcgcctctcgccactcgtcacgccgacctcacgggcgggcgggcgcttggcagcgagggcaccggcggtgcctctgctgcg

SEQ ID NO: 18021 - DNA, 604 bp, Setaria italica
  Peptide Sequence Number=SeqID_83995
gggggtgtggagcaagatggtatcctacagacatctacaggaaaacttgaactcaaggagccatactacaggttgtctcagccgcaatcctacatgttgcaacaagatcagcagcagcagcagcagcaactaccatctctgaagccacagggttcagagcagcacatgcaggaagggcttagcccaggcatcactatagaccaagtagaccaggagtgtggccttcactagatagcgaggaaaaacctgagtttgcatgctttgcttccagcaacgagctcaggtctgtacaacagttccactcattcactgtgcccctcagcctatgttgttaggcgttagctgccaaaggctaataccacattcgaggtgtacgagatcattcttgagtagtgcagctgcagctaattgtgctcgtgtctgctccgtttcttgcgagggagtacaaaaagcaattataaagtgtatttggtttcaggagaagctaaacagcggaggcatatactaatgtcctagtttgtatgttgtttccaatattcttgttactagaaattacttgtttgatcttgaatacgtattcttgattcagttggcctaaaaaaaa

SEQ ID NO: 18022 - DNA, 683 bp, Setaria italica
  Peptide Sequence Number=SeqID_83996
ggtactccaaaatctcccgatatatcatttctcttacatcatcctttgtaattttctccctcaaattcaaagtcaagctttgaaattggttgtgctgaaggctcacattccaatttagcaaggcctctaaaatattgatcagctaaagcctcttcagcagtaggtcgatctttagggtcaaacgcaagtaaacgctcgagcaagcggagagccaaaggatcagcatcatggaacttatgagaaaaaggaatagggtgcttcattcgcatgtcaattaaatattgcctggccctgtcactatgaatccgggataaagattccgatgatggtgttccgaggagatctgttattaaatctagttggtgcacaacattcttcccaggaaataatggagttccagtgagaacttcagcaaatatgcaccctatactccaaatatcaattgcaggggtgtaactggagtaaaaggagccacataattcaggagctcggtaccaccttgttgccacgtaatctgtccaaaagatagatgaaggggagtcattaaatgatgcacgtgctagtccaaagtcacaaatctttaatttgctgtctgaattggccagtatgttcctgggctttaaatcacgatgaaatacatgggctgcatgaatgtacttgagagcacgaaggagttggtacaa

SEQ ID NO: 18023 - DNA, 249 bp, Setaria italica
  Peptide Sequence Number=SeqID_83997
gtgctgaccgactactgcatgccgagctcaacccggctatgaccttctcaaggccatcaaggcgttgagctccccgaacccgatcccggtggtcgtaatgtcgtcggagaatgagccccagaggatcagcaggtgaaattctccccctttccccaccttcatcatattgtgcaagtgcaaagcagatgccgttatatacttacgcgaacgaaagccgcttttgcgctctgactatgttctgaccatggt

SEQ ID NO: 18024 - DNA, 766 bp, Setaria italica
  Peptide Sequence Number=SeqID_83998
ggggagcgagaaagagacggaggaggtgtcgatgattcggtggcggaggaaaaggaagggtgctgggaatgttggtggccgtcgacgcggagggaggcggtggagcttctcgggccaaagggacaagggaggctggattcatcagctgctgacgctaatgagctaaccgttgacatcgtgctgaccgactactgcatgccggagatgaccggctatgaccttctcaaggccatcaaggcgttgagctccccgaacccgatcccggtggtcgtaatgtcgtcggagaatgagccccagaggatcagcagatgcttaacagccggtgctgaggatttcatcctcaagcccctcaagtccaaggacgtgcagcgcttgcgcaactgctccaactctgccaagcccaagggcgcagatgatgctcatcagtgcaagagcttgagcagcaggaggaagatcacgtccgagcagagatcacaaattacacggctagccatggtgctgaatgcctccagcatcgagctatctcactacttccagttccttttcaagttcatcctgctcgcctacgcggtgctgtgcttgggtgagctcctccacagatggtccaatggctccttcctctccctgtggtcatcctgagaactgaaacccaagcaatatgagtgtaactaaggttgcaaccttttcgttttaatttgattttccttgtaatccaggcatgaggagctagttcgtcctcgctcgctccatatatttcagtttcaga

SEQ ID NO: 18025 - DNA, 1441 bp, Setaria italica
  Peptide Sequence Number=SeqID_83999
gtctccttcctctctctctctagcctctctgtcctgcactgtgaggaggctgtgacccgggttaccggagagcccctcctccctcctcctcctcctcctcctctctcctctctcatcgccatccttcgccttatttactggttcgagcccccgcggtttttcctggaccctcgtctggttagttcttctcgccacgatacagcaagaagagcagagcagaaggaagaagcgccccgcctcccattacgtgcgcgcccggagcgagcaaggatgggagcgggaggagaagggaaggcggcggcggcggcggtgagggtgctggtggtggacgactcccccatcgatcggaaggtcgtcgagctgctgctccggaaccacaagggcggcgccgccccattccacgtgaccgccgttgacagcggcaagaaggcgatggagcttctcgggccaaagggacaagggaggctggattcatcagctgctgacgctaatgagctaaccgttgacatcgtgctgaccgactactgcatgccggagatgaccggctatgaccttctcaaggccatcaaggcgttgagcctccccgaacccgatcccggtggtcgtaatgtcgtcggagaatgagccccagaggatcagcagatgcttaacagccggtgctgaggatttcatcctcaagcccctcaagtccaaggacgtgcagcgcttgcgcaactgctccaactctgccaagcccaagggcgcagatgatgctcatcagtgcaagagcttgagcagcaggaggaagatcacgtccgagcagagatcacaaattacacggctagccatggcaaggctaaccattccttgctgttccttcaaatgtaaacacatcaacttatcatgacgctgatgaagcgatgctttgtgctattctctttgcaggtgctgaatgcctccagcatcgagctatctcactacttccagttccttttcaagttcatcctgctcgcctacgcggtgctgtgcttgggtgagctcctccacagatggtccaatggctccttcctctccctgtggtcatcctgagaactgaaacccaagcaatatgagtgtaactaaggttgcaagctttttcgtttttaatttgattttccttgtaatccaggcatgaggagctagttcgtcctcgctcgctccatatatttcagtttcagcagctgcttcttaggtagattattgtttgtttggaggccctaacagcgcgcgactcgggttaatctagctctccccggttcttgagcgtcgcttcccgggagaaagatcagaagaaccgcgataatgtgatgatatgatatcccccttttgctgatttgtataaatgcatgatttgagagggtatctaatgtcgttgttaatggagatctcgacttgatccgctgatgcaaaaaaaaaaaaaaaa

SEQ ID NO: 18026 - DNA, 288 bp, Setaria italica
  Peptide Sequence Number=SeqID_84000
tccacaactctctcccctctgtcccccctcttcctctctaggacccagaaaagaggaacgaggcgatggagatggccatcgacacgccatcgccggcgccacccacgccgccgacgccgtcggcggcggcggggcggcagacgcgcgcggcggagtctgtgcggctggagcaccagctggtgcgcgtgcccctggaggccctccggtccaccgtccgctccaacaaccgcctcgccgagaaggagatcgccgccgccctctcctccgcctcagccgcccccgcgagag

SEQ ID NO: 18027 - DNA, 383 bp, Setaria italica
  misc_feature (369)..(369): n is a, c, g, or t
  Peptide Sequence Number=SeqID_84001
gagcgtggcggcgacggcgtcctcggtggtgcgggtgtagtgctggtcccggaagaagacgtcgacggagtcgcagtcggagacgatgtacccgtccagcccccacttcccccgtatcgtccccttgaggaacccctcgtcggcgcaggtgggcacgccgttgacctggttgtaggagcacatgacgctggcggcgttcccgttcgcgacgcaggcgcggaagggcacgttgaaggtgtcctcgaggtcctgcgccgccacgacggcgttgaagtggaaccggtccgtgccgccccaccggtccaggtcgtaggccgtgaagtgcttgcagcaggcggcgagcttgaggctgtcgccgggagggggacncctgctggaggccg

SEQ ID NO: 18028 - DNA, 268 bp, Setaria italica
  Peptide Sequence Number=SeqID_84002
agaagactaaggaagataaggcagcagagattgcactcctttgtgtcccttcttccttttctttgtgcctgtttctgggttggctctttggcattggagctggggttcgtgaatgggtgacaatatggtggattggcttgctggttggttatcggttggttggttctgttctcttcaacgcgggagctctatacagaagaaagagagcgagggtggtgatggtcctgtccagctttccaagtttcttggacgcgacaaagaaaaggaa

SEQ ID NO: 18029 - DNA, 296 bp, Setaria italica
  Peptide Sequence Number=SeqID_84003
ggaccggaggtcccgccacaagcggcgccgccgcgagcgggaccggcggcggtccccgtccgacgacgacggctacagcagcacaagctcctatgaaagtgaccgcgaggcgtctggcagatctcggaagcataagaagagcagcaggtcaagaaagtctagggagagggagcgaagtaaagatagacaccatagacgagacaagagtaaacacaaagaggagaaagagagcgagggttgatggtcctgtccagtaatttcctatttattcagacacttgttttccttttacgatg

SEQ ID NO: 18030 - DNA, 554 bp, Setaria italica
  Peptide Sequence Number=SeqID_84004
cgggcgtgggagcaggagtcggtgccggtgtcggagcaggggttggtgctggcgtcggagaaggggtcgggacgggcgtgggagcaggagtcggtgccggtgtcggagcaggggttggtgctggcgtcggagaaggggtcgggacgggcgtgggagcaggagtcggtgccggcgtcggagctggtgtcggtgcacgagtcggagtcggagctggtgctagcatgggtggattagttggagctggtggtgatcgtgtgggtgctgacattggagctggagttggtgcaggggttggagcgggagtcggtgctaccgtaggtggattactcggagctggtggtgcccgtgaaggtggtgcccgtgaaggtggtgcccgtgacggtgtaggcggcggaccacgtggcggcgctggcgtgggcgctcgtggtggtgacgacccctgcgcccggacagaaaccgcgagcatgagtgccatggcgaggaacatgagcgcatgggaagccatggacttgaacgccatcatatcgctactagctgcggatgctctcaaccgt

SEQ ID NO: 18031 - DNA, 850 bp, Setaria italica
  Peptide Sequence Number=SeqID_84005
tctgacactgggaacggttatgatgccgatcgtggtgctagttgagaaatagcaaaggcatgttgttttgatggtgggcgggaagagagcaatgctcggcttagataccaaaagcagaatagtgcggcgtaaagcatagggtagaacggcagagttaaacgcttctaggttactgaagccggcaggacacacagcttggggtggtggtggtggtctgggcgttgaaggtggcggcaccggtgcaggggttggtgcaggagctggagctggtgtcggagtaggggtcaatgtggacgttggagtaggagtcggagcaggtattggtgagggcgtcggtgtcagggttggtgcttgtgtaggagcaactatcgatgctggtgtaggtgcaggggttggtaccggcgtcggagcaggagcaggagtcggagtgggtgccggagcaggggttggtgccggcgtgggtgcaggggtcgggacgggtgtcggagcaggagtcggaacgggtgtgggagcaggagtcagtgccggtgccggagcagtggttggtgctggcgttggagaaggggtcgggacgggtgtcggagcaggagttggaacgggcgtgggagcaggagtcggtgccggtgctgaagcaggagtcggtgccggtgtcggagcaggggttggtgctggcgtcggagaaggggtcgggaggggcgtgggagcaggagtcggtgccggtgtcggagcaggggttggtgctggcgtcggagaaggggttcgtgaatgggtgacaatatggtggattggcttgctggttggttatcggttggttggttctgttactcttcaacgcgggagctctatacag

SEQ ID NO: 18032 - DNA, 913 bp, Setaria italica
  misc_feature (835)..(913): n is a, c, g, or t
  Peptide Sequence Number=SeqID_84006
caccgccaccgccagcagccgccggaaggagggcgcgtcctcgtcctcgtccgcgctgaaggcgcgcaaggaccggaggtcccgccacaagcggcgccgccgcgagcgggaccggcggcggtccccgtccgacgacgacggctacagcagcacaagctcctatgaaagtgaccgcgaggcgtctggcagatctcggaagcataagaagagcagcaggtcaagaaagtctagggagagggagcgaagtaaagatagacaccatagctgggttggctctttggcattggagctggggttcgtgaatgggtgacaatatggtggattggcttgctggttggttatcggttggttggttctgttctcttcaacgcgggagctctatacagaagaaagagagcgagggtggtgatggtcctgtccagctttccaagtttcttggacgcgacaaagaaaaggaagaagggacacaaaggagtgcaatctctggtaaaaagataatgatgaagcttgagaagactaaggaagataaggcagcagagagcaagcgcaatgaactgttgaagttcctgaatgccagttatgattagcagtttgttggttctggtgatgcggaaggaagtgcagaatgcccttccggatgtctcctcacttgtgctttaggtgatactcttgagggcttcgtgtttggtttgtttcgtcacttggccaccaaggttttgttggtgcttaactagcgactgaatgatggtctactgtaactgttttgaggttggggtgttaatgttacctgaattccgtgctatcacttagaatttactttgttttaatgtaaacnnnnnnnnnnnnnnnnnnnnnnnnnnnnnnnnnnnnnnnnnnnnnnnnnnnnnnnnnnnnnnnnnnnnnnnnnnnnnnn

SEQ ID NO: 18033 - DNA, 599 bp, Setaria italica
  Peptide Sequence Number=SeqID_84007
ttccgtacttctagttgttgtagttagttggtctttgtcggttggtattaccttaggtctaccctagtagtacgtaggtaagggcgtagcaagcgacgaaatgcttcggggagttgaaaataagcatagatccggagattcccaaataggtcaaccttttgaactgcctgctgaatccatgagcaggcaagagacaacctggtgaactgaaacatcttagtagccagaggaaaagaaagcaaaagcgattcccgtagtagcggcgagcgaaatgggagcagcctaaaccgtgaaaacggggttgtgggagagcaatacaagcgttgtgctgctaggcgaagcggttgagtgccgcaccctagatggctaaagtccagtagccgaaagcatcactagcttacgctctgacccgagtagcatggggcacgtggaatcccgtgtgaatcagcaaggaccaccttgcaaggctaaatactcctgggtgaccgatagcgaagtagtaccgtgaggcgtagatagcaaactgggagttgggcacgtatattgagagagaaatttagatcatatttaaaaaaaatagtaatagcatatatatatat

SEQ ID NO: 18034 - DNA, 2075 bp, Setaria italica
  Peptide Sequence Number=SeqID_84008
atttatctatctcttgactcgaaatgggagcagagcaggtttgaaaaaggatcttagagtgtctagggttgggccaggagggtctcttaaccccttcctttttctgcccatcggagttatttcccaaggacttgccatggtaagggggagaagggggaagaagcacacttgaagagcgcagtacaacggggagttgtatgctgcgttcgggaaggatgaatcgctcccgaaaaggagtctattgattctctcccaattggttggatcgtaggggcgatgatttacttcacgggcgaggtctctggttcaagtccaggatggcccagctgcgccagggaaaagaatagaagaagcatctgactctttcatgcatactccacttggctcgggggggatatagctcagttggtagagctccgctcttgcaattgggtcgttgcgattacgggttggctgtctaattgtccaggcggtaatgatagtatcttgtacctgaaccggtggctcactttttctaagtaatggggaagaggactgaaacatgccactgaaagactctactgagacaaaaaaatgggctgtcaaaaaggtagaggaggtaggatgggtagttggtcagatctagtatggatcgtacatggacgatagttggagtcggcggctctcctaggcttccctcatctgggatccctgggggaagaggatcaagttggcccttgcgaatagcttgatgcactatctcccttcaaccctttgagcgaaatgtggcaaaaggaaggaaaatccatggaccgaccccattgtctccaccccgtaggaactacgagatcaccccaaggacgccttcggcgtccaggggtcacggaccgaccatagaccctgttcaataagtggaacacattagccgtccgctctccggttgggcagtaagggtcggagaagggcaatcactcgttcttaaaaccagcattcttaagttaagatcaaagagtcgggcggaaaaaggggagagctccccgttcttggttctcctgtagctggatttcccggaaccacaagaatccttagaatgggattccaactcagcaccttttgttttgagattttgagaagagttgctctttggagagcacagtacgatgaaagttgtaagctgtgttcggggggagttattgcctatcgttgtcctctatggtagaacccgtcggggaggcctgagaggcggtggtttaccctgtggcggatgtcagcggttcgagtccgcttatctccagcccgtgaacttagcggatactatgatagcaccaattttgccaattcgtcagttcgatctatgatttcgcattcatggacgttgataagatccttccatttagtagcaccttaggatggcatagccttaacgttaatggcgaggttcaaaagaggaaaggcttgcggtggatacctaggcacccagagacgaggaagggcgtagcaagcgacgaaatgcttcggggagttgaaaataagcatagatccggagattcccaaataggtcaaccttttgaactgcctgctgaatccatgagcaggcaagagacaacctggtgaactgaaacatcttagtagccagaggaaaagaaagcaaaagcgattcccgtagtagcggcgagcgaaatgggagcagcctaaaccgtgaaaacggggttgtgggagagcaatacaagcgttgtgctgctaggcgaagcggttgagtgccgcaccctagatggctaaagtccagtagccgaaagcatcactagcttacgctctgacccgagtagcatggggcacgtggaatcccgtgtgaatcagcaaggaccaccttgcaaggctaaatactcctgggtgaccgatagcgaagtagtaccgtgagggaaaggtgaaaagaacccccagtgggtagtgaaatagaacgtgaaaccgtgctgagctcccaagcagtgggagggaaagtgatctctgaccgcgtgcctgttgaagaatgagccggcgactcataggcagtggctggttaagggaatggaacccaccggagccgtagcgaaagcgag

SEQ ID NO: 18035 - DNA, 291 bp, Setaria italica
  Peptide Sequence Number=SeqID_84009
tttcgtcgttgtgcaggctgcccgcagccacaccttccagaactttccctagacgctctccctggcggaggtaggaggacccctcgagaattcaaatcccatcccaaaattttccaagcagaagcaacgaccgccgcttccctctccactcctcctccgcgcctccctccaaaactcgaatcgaacctagcgaacctcccccacaccaaatcccccaaatccggaggcatccgcagatcgccgggcccgatgaagacggcgggggaggaggccgcggcggcaggcgaggag

SEQ ID NO: 18036 - DNA, 536 bp, Setaria italica
  Peptide Sequence Number=SeqID_84010
ttctacttctaggataacgccatgatgtgtagtagtcatgaaggaacagtggtcagaaatgcgttaacttgaccatccacttatgtatacagcagttcaaggagaaccacagcagtattacaaaaatactggatcagttgtgtacaatatttttgtgatggtgtttcagtaaggaaaatggaactctagtttgatgataattatatcatctggttcagttccacgatttgcaatccttttccaacttgatacaagatgcaattctcagtacaatcataagatgtaacatcccgataattaaactaaccaccatgtaaggtggatatgaaaaccacaacatccttctcttccaactctgcatcaagaccaccacacagctcccaatcgcagtcatttataaggacaagaaccccaggcctcacggaatcgccatcgacgaacatctccgggcgctccttgatcagattggccttgacccaagagagcagacccttcatcgccaccttgccttcgccatccatgatcgggacatccac

SEQ ID NO: 18037 - DNA, 484 bp, Setaria italica
  Peptide Sequence Number=SeqID_84011
ccgcgtcttctccgcagcgccggcgtccggcgacctcctctaatctccgctcgcgccgcgccccctcgtcctcggcgtcgacggccctcaggcaactttccccaattccgccaccccaccgttaagaaaccctaaaccccggaacgaattcgcagcccctcgggagctctggcgatgcatctcactctcgaattcgggggcgggctggagctgctcctggagaactccaccaaggtgcacaaggtggatgtcccgatcatggatggcgaaggcaaggtggcgatgaagggtctgctctcttgggtcaaggccaatctgatcaaggagcgcccggagatgttcgtcaagggcgattccgtgaggcctggggttcttgtccttataaatgactgcgattgggagctgtgtggtggtcttgatgcagagttggaagagaaggatgttgtggtttcatatccaccttacatggtggttagttaattat

SEQ ID NO: 18038 - DNA, 470 bp, Setaria italica
  Peptide Sequence Number=SeqID_84012
ttactgcggatcaatggctactatcttctccaatgtcccagtggaagtcttacttgcacaacggaaggctgtggatgtttggaaggtggtaaagtctcactggattctcaggataaaatttggagcattgccattacctttgatggtaatataagcatcaaggggacaattgggaatcaatctgttagagttacttcagcggaggttgatgagccatttcccagaaacatcatccgtgatgagctgaaattagtacagtcttggaatgacttttactgtaattcttatttccatttggatttttcttgtgaggcaatgagcacaaaaatggaagaatataacaccgtatgccatgtattgaatcagctgcgtgcttcctccactgaagttttaagtgtgtcatcatgcattgatattatgatgcctaaggaggcttctgggtctgctaacttgaaactgaagaagcggtt

SEQ ID NO: 18039 - DNA, 385 bp, Setaria italica
  Peptide Sequence Number=SeqID_84013
tcttctttggcacacaaatatcacttgacactgacatattgctccaactctaaactactctcgtgggatctgatggctagaacaaagatcagaggcaacatcgacaaaacctctagatgaatgtggatctctagccaacactcaccagcgcatcaaaagatatccatctgacatgaccataggaaaagattcaagacttaacttttgctgtagcatcagtagttgcaatatccgttgtgtttatggacagtggctgccaccctgaagaatggggcacaatccactttttcctaacaattacaatatgtaggacctggagaatatcaccgagggcacagtgctgcaagcacgatctcttcaagatcgttgcagcttggtacctgga

SEQ ID NO: 18040 - DNA, 1859 bp, Setaria italica
  misc_feature (1)..(59): n is a, c, g, or t
  misc_feature (759)..(759): n is a, c, g, or t
  Peptide Sequence Number=SeqID_84014
nnnnnnnnnnnnnnnnnnnnnnnnnnnnnnnnnnnnnnnnnnnnnnnnnnnnnnnnnnnaacttttgcattcaagaatggaaaacgaaatgattatcacataccagaagttgcaatatggtttatggacagtggctgaccctgaagaatggggcacaatccactttttcctaacaattacaatatgtaggacctggagaatatcaccgagggcacagtgctgcaagcacgatctcttcaagatcgttgcagcttggtacctggactgcgagttctttactgctgaataaccatcaggggatgatatgtacttatgaactctctctagctcctctatgggattctttgctttgctatttgttacattcacacatttccagaggctctcatcttttgcaacaaatagtggcatatcatgtagtaacttcttcataacaacagcttcatgtcgaatggccagttcaagagccttcttaacatcaaagcctgttaaattcatctctccataacatatacagtctgcaatatttgattctgtagggaatatcttttcagtcttcagtatgcccaaagcatgtaatattattcctatagtaccttcattcctaggagaatctggcagatattctggcttatctccagaatgtctgtaactttgcatgtcaatggatagattaggttgatgccctgctccgcaattatcgctgcatggaggatggctacctataggatcactagagtgattaagatagcagctggngttagaaccaaggtgaaaacatgatctgctatcgtgaaaacctgtaagatgtccagaaatatctggcattttcatagaaggatcattagtaggtgcaccttggaaagatgtggtctcagcagttcctctagggcattcagaaatattcaatctactaaaaccaatgcacatataatccaaaccatcaaaaggtgagccactggaccatgtttgtatttgtgcagaagaaaccccattatgcaccactgattgcgaagcagagctgcctctaggtgactctatatgaggatgagtacctgaattatgttgctctggtagcagagaagactgggcttgcgggtacgtcgggtggtactggccactactaacaccaaaaacaaaagtttcatctttgcctgtgcactgaaatgatgtgctaatcttgttaccaaaagcggatgctgctccatcttgatgcaaatgatcagtctttaaagatttatgagctgataacagcggaattgagtcattcgcctttgcgctctcaagtgatttagagcttggtattgctgtcaaagattgacttggatagctcaaagtgattcctttagaattatcaataagtccattaaatggattcatttcattgcttgctgaagctgatgaaacatttatacatcttacatagacttgatctttattgagcttgtgttcatttcctacctttccaccactatcacccatataagagtaacatgggagcttattctgtgcttcagaaggatgggattgctgacatgctggatgacaattggtagtactaacattaaaatcatgagttacggttcttgatgcatactcagctgatgtgctaggtttcttaccaaggatggactcatgtgttactctcgcttgctcaaccggtgtgctaggcttaccaaggatggactcatgtgatgctttcacttgctcaagtgatgtgctaggtttcttaccaaggatggactcatgtggtgctttcacttgatgcaaatgagcagaagctacaggttttttagctgatgaatgggacggagtagaagttggcgatgatgaaacagaagcttggtctatctcaattt

SEQ ID NO: 18041 - DNA, 307 bp, Setaria italica
  Peptide Sequence Number=SeqID_84015
gcctcgcaaaccgggaaacggccatggacgccgcccgagcgcgtcggccgcgaggcggagcgcggtggctgcccggccgtcgatgtgctctctatggacagcttcgatcccagtcgcttgccgagcgagcggttcgtggtcttcgtcgtgtctaccacggggcagggcgaccccccggattccatgaaggggttttggaggtacctgcttcggaaggatctgggcgcgcaatggctcgagggggtccgtcatgcagtgtttggactcggggattcaggctatcagaagtacaattttgctgacaaag

SEQ ID NO: 18042 - DNA, 1202 bp, Setaria italica
  Peptide Sequence Number=SeqID_84016
attagagaaaagttcattcaagctttgtgtgcttcagaagccagtggtaatcgcaatctacttttttttctgaattacaaactaggacagcataataaactgggaaagaagctaacggtccatccaaaacctaggaacaatatccccaatttgtcaacaccaactttattgcaaatccaaagatccatgcacgtcagcattaaaccggccatttcaacatgaaacagttgagttcgcagcttcaagtcagctctgggggaaactggtaagcatgcagctccaggcgattaaagcacagttgctggctataagaaacaatggtctgactcgaatttctccttgctagcggttgatgggggtgtgcatccgctccacgattctattgatagcggctcgagtcattacaagggtgtcatgctggaggatgctgtatacattgagaccaatggaaggaaggacattcacatagtgaaggttttgagtggccagctttagcttcttatcaatgtcacctccatccaccaataaaaccttctttgtatcatccatctggcttatgtattgcacaatgttttttgtcttgtggctagggacttccaagtcctcaaagaccaagagcttcccctccgcggttcgagcagacagggcaatcttaagccctagccgccttactttcttttgcagcttgattgcatggcttcgtggtttaggcccatgcatggtcgcaccaccacgaaactggcaaccgcgtagtgttccatgccgtgctcttccagttcccttttgcgcataaggctttcttcctgtgccactgacttcactgatagttttagttgagtgtgtcccctgctgtctttttgcaagctgccaccttactactcggtgaacaatatccttcctaattggaacatcaaaaacatcaccatccaaaaccatgaagcccttgtcctcattatggaagtttgtcaccctagctaccaggtcttcatattgcccaagttcccgatctggtgtccagacagtcttgctagatagaagttctggtggaatcagcacttcatttgccggagccaaaagtgtagaatacccattgaaacagaaagctggcaaattcttggcgagactcggccccgcgccgggcagcgagtggcgcggcgccacgggagccggagccggccccgcggcggcgcggcggaggagcg

SEQ ID NO: 18043 - DNA, 338 bp, Setaria italica
  Peptide Sequence Number=SeqID_84017
gacccgatgaagtggctctacatatacggcgtcgacggcctgtccgtcagcggcggcggcaccatcgacggctccgggcagcagtggtgggcgagcacctgcaagcgcaagaagaccccgccttgctactcggggcctcgtccaaagacggtgcacttcgaggagtgccggggcgtgagcgtgcagggcgtgacgctgcagaacgggcagcagttccacctgacgttcacgcggtgctccgacgtgaaggccagcttcctccgggtgatcgcgccgggggacagccccaacaccgacggcgtccacctcaactcctcctcccacgtccagatcacgga

SEQ ID NO: 18044 - DNA, 701 bp, Setaria italica
  Peptide Sequence Number=SeqID_84018
gatctggccggtgcagctctacgggccctgcaagaggaagctcaagctgctgatttccggctccatcgtcgcgccggcgagcccggacgagtgggcggggcgggacccgatgaagtggctctacatatacggcgtcgacggcctgtccgtcagcggcggcggcaccatcgacggctccgggcagcagtggtgggcgagcacctgcaagcgcaagaagaccccggtaataaattgatcggccggtccggtttaaccaccaaccacctaacctgtctgggctcctctgccctttctgcctgcactgcactgatgaagtcacctgaattctctgaacccgtgtctttgctgtgctcctgctcttgcagccttgctactcggggcctcgtccaaaggtgaacgctctgcttgctcccgttacgttcctcagagttcagacgtgctcgtcgccggcggcgaggggatgatcgcgagatcgcgcctgatgctttggttgttctctccttggcgtgcagacggtgcacttcgaggagtgccggggcgtgagcgtgcagggcgtgacgctgcagaacgggcagcagttccacctgacgttcacgcggtgctccgacgtgaaggccagcttcctccgggtgatcgcgccgggggacagccccaacaccgacggcgtccacctcaactcctcctcccacgtccagatcacg

SEQ ID NO: 18045 - DNA, 574 bp, Setaria italica
  misc_feature (516)..(516): n is a, c, g, or t
  Peptide Sequence Number=SeqID_84019
gagacctgtgagttcccttctccggccgccagccgccgccttcgtgggcaaccgcgtagccgacacacggaatcgccaccagcgcggcggtccgcagcccgccctaccgcacccctactagtcatccaccgcaagtcctaaaccttctcttgagccgagcgaagccgccgccgggaagccgtccgggatgggatacaaccgccacaggcgcggccgcggatcctcctcctcgtcttcgcgccgcgccaagcaagaagcatccatggatgatggtcctgggacgtcacttccaaggcaggaagaagacactgaagaggaattcaaaggttcaagaattcagctcgcaatgtgggactttgggcaatgcgatgttaaaaggtgtactggtcgtaagctttcaagatttgggcttctaaaggagttgcgagtgaccaatggttttggtggtgttgttctcagccctgttgggacacaatgtgtatctaaggctgatcattctattgtgcaaagaaaggnttggctgtggttgattgttcctgggcacgcttaagtgatgtcccttttgtgaaactcc

SEQ ID NO: 18046 - DNA, 1107 bp, Setaria italica
  misc_feature (764)..(764): n is a, c, g, or t
  Peptide Sequence Number=SeqID_84020
aagaggaattcaaaggttcaagaattcagctcgcaatgtggggtgattatgtggttgttgtataggactttgggcaatgcgatgttaaaaggtgtactggtcgtaagctttcaagatttgggcttctaaaggagttgcgagtgaccaatggttttggtggtgttgttctcagccctgttgggacacaatgtgtatctaaggctgatcattctattgtgcaaagaaaaggattggctgtggttgattgttcctgggcacgcttaagtgatgtcccttttgtgaaactccgctgtggtgctcctcgtctctgtaagataattatatctaaataacttcaataagacagtgcatctttgatgttcattaatcatcattacgagttatgcatgtggtccttgggattattctgtcctatctgttctgcatggatcctagtaatgcacatgaatacaatctactaaatgattatgtataatgtagaaagcagctatcatttctaaatttgatcattttgtcaaatttactgttgttcgaagtttgatcctgtacaattccattttgggttgtgactttggctcgttgttctttgcaaagctgattttcttgtttttctttatccaaatattgtcccacctacaaatgggagagagcctatgcaactaagtagtctgagaatgtggctttatatattatacaaatcagaattgtatctgttcaatggaactggttattttgacgtttgcagtgccatggttggtagcagnaaaccctgtgaactatggccgcccatgtgaactgtcttgtgtggaagctttatcagcagccctcattaattattgttggggtaggaagatacagcacatttactgctagggaaattcaagtggggccacgcattcttgtcgctaaacagagacctcctgaaagcatactcccaatgtgaaagtggctctgagataatcaatgtgcagaactcctggttatcaagtaactcgagtgttccaaagccacctgtaaatgaaaaatcacgtcgaagcacagaggaaggatctgagggtgattctgatgatgatttgccacctctggtggagaatttgaaccacttga

SEQ ID NO: 18047 - DNA, 1155 bp, Setaria italica
  Peptide Sequence Number=SeqID_84021
ctgtgagcaggtttctcccacccccagccgccgccttcgtgggcaaccgcgtagccgacacacggaatcgccaccagcgcggcggtccgcagcccgccctaccgcacccctactagtcatccaccgcaagtcctaaaccttctcttgagccgagcgaagccgccgccgggaagccgtccgggatgggatacaaccgccacaggcgcggccgcggatcctcctcctcgtcttcgcgccgcgccaagcaagaagcatccatggatgatggtcctgggacgtcacttccaaggcaggaagaagacactgaagaggaattcaaaggttcaagaattcagctcgcaatgtgggtaggtgcactatttcgtatacaatcatttggtgctcatttgacacttgtgattatgctctgcatttgttgttgtataggactttgggcaatgcgatgttaaaaggtgtactggtcgtaagctttcaagatttgggcttctaaaggagttgcgagtgaccaatggttttggtggtgttgttctcagccctgttgggacacaatgtgtatctaaggctgatcattctattgtgcaaagaaaaggattggctgtggttgattgttcctgggcacgcttaagtgatgtcccttttgtgaaactccgctgtggtgctcctcgtctcttgccatggttggtagcagcaaaccctgtgaactatggccgcccatgtgaactgtcttgtgtggaagctttatcagcagccctcataatatgtggggaggaagatacagcacatttactgctagggaaattcaagtggggccacgcattcttgtcgctaaacagagacctcctgaaagcatactcccaatgtgaaagtggctctgagataatcaatgtgcagaactcctggttatcaagtaactcgagtgttccaaagccacctgtaaatgaaaaatcacgtcgaagcacagaggaaggatctgagggtgattctgatgatgatttgccacctctggtggagaatttgaaccacttgaaccacaaccaagatgaggaaagcgaggaaggatctgagggtgattcggacaacgatttgccgcctctttgaggagaatttgaaccacttgaacctcaaccaagacaaggaaagcgaggaaggaatact

SEQ ID NO: 18048 - DNA, 1296 bp, Setaria italica
  misc_feature (1272)..(1296): n is a, c, g, or t
  Peptide Sequence Number=SeqID_84022
cgcccttcttgaccgccgccgccgccgccgccgccgccgtcaacaagccgagcaagcagccatggagggatccgccgcggcgccgctccgcacgcgcgtctgcatcatcgggagcggcccagccgcgcacacggcggccatctacgccgcccgcgcggagctcaagcccgttctcttcgagggctggatggccaacgacatcgccgcgggcgggcagctcaccaccaccaccgacgtcgagaacttcccgggcttccccgacggcatcatgggcgccgacctcatggaccgctgccgcgcgcagtccgcccgcttcggcaccaacatcctctccgagaccgtcaccgccgtcgacttcgcggcccgccccttccgcgtcgcctccgactccaccaccgtcctcgccgacgccgtcgtcgtcgccacgggggccgtcgcccgacgcctccacttccccggctccgatacgtactggaaccgcggcatctccgcctgcgccgtctgcgacggcgccgcccccatcttccggaacaagcccatcgccgtcataggcggaggcgattccgccatggaggaggccaacttcctcaccaagtatggctcccacgtctacatcatccaccgccggaacaccttccgggcttccaagattatgcaggccagggcgctcgaaaaccccaaaatccaagtcatctgggactcggaggttgttgaggcctatggcggcgcaggcggtggcccattggctggcgtcaaggtcaagaacctggtgagtggtgaggtctcggatcttcaagtgtccggcctcttctttgctattgggcacgagccggcgaccaagttcctcggtgggcagctcgaactcgattcagatggatatgtggcaaccaagccgggctccactcacaccagtgtgaagggtgtcttcgctgctggcgacgtgcaggacaagaagtatcgccaggccattactgctgctggatcagggtgcatggccgctctggatgctgagcactatctgcaggaggtcggtgcgcaggagggcaagtctgattgactatattttggtgtaccaaccaccagccaatcagaatgccacttgccggtgctgaaatctaccctctgatgtgcgttatgccatgagtattcatgatcgaatttggacttttgtgctgcttatcagtatagcacactattcttctcattagtattcggatgtctgaacgagggaactatcaatgtactcgaaattgattcgtaatttaaaacttnnnnnnnnnnnnnnnnnnnnnnnnn

SEQ ID NO: 18049 - DNA, 486 bp, Setaria italica
  Peptide Sequence Number=SeqID_84023
tttttttttttttgagcgacaacagagatcgcacatatgcttatctggttatgctataggtccatccatcactgctatggtgatggaaattacaaacaggattcctgcatttgtgttaactgttaacccaaagaaagtggttccagaattgatataggcaagacagcaactgagaagtcctaacccccatccccattgcacagtactccaattgctaaggtgaaagcattcaaaaaatgaacaaaagtgatccaacgcctgaaaaaaactagcagcagtaaagacctcaccgagcattgcagacgaacagttcgcctgtgtcatcagattcagatgtagtgatgaaaattgccaagagacgacatatccatactaatgaagttggtccctgcttttccgttcacattccatcttgcaagcaaacaaaagcctgccccgtatcctaggtgaaatctgaaattcagaactgagaaatcaccatcggaa

SEQ ID NO: 18050 - DNA, 321 bp, Setaria italica
  Peptide Sequence Number=SeqID_84024
ctctcttccatcttctctctcacaaaactcactgaattgcctcgcatgttactcttcctctctctctccaccagaactcccaaagccactccctctgcctcctcatcaattgcaacgatctgttttgcatctccttcctccattcccagtgccatgcgtaatcttctttcgggattgaagctcgcggtctcctgccggatcgtgcgagtcccgctccagccagtgagagaaatgtaggcgccaccagatcaccccaacatccctgctctaccgaaaatcccaatcttttcccagtcgaatccgcctcttcctgccattaaa

SEQ ID NO: 18051 - DNA, 533 bp, Setaria italica
  Peptide Sequence Number=SeqID_84025
cttcttcgtcacgtgcaatccctgagaagtaccggtgtcgacatcattattgaaataatcaacaaactctgttcatctcaggaatatagaagcaatgaaccagccatctctgaagaagaaaaaacagatatggaaactgatgttgaaggccgtgatttagtaagtgctatggactccagtgcggagggcatgcatgatgaacagttctctcatttaagcattttccatgtgatggtcctggtgcaccggacaatggaaaactctgaaacctgccggttatttgttgaaaagggaggtctacaggctctttggcactcttgttgaggcctagcattacacagtcatctggaggaatgcctattgctttgcatagcacgatggtgttcaagggctttactcagcatcactctactccacttgcacgtgcattttgctcatctttaagggagcatttgaagagcgcattggaggaacttgacaaagtttctagctcagttgagatgggattgctcctttttctaacttggacatct

SEQ ID NO: 18052 - DNA, 1190 bp, Setaria italica
  Peptide Sequence Number=SeqID_84026
ttgctttgcatagcacgatggtgttcaagggctttactcagcatcactctactccacttgcacgtgcattttgctcatctttaagggagcatttgaagagcgcattggaggaacttgacaaagtttctagctcagttgagatgtccaagttagaaaaaggagcaatcccatctctgtttgttgttgaatttctactattcctagctgcctcaaaagataatcgttggatgaatgctttgctctcagaatttggagatgccagcagggaggtcctggaagatattggacgagttcaccgggaagtgctttataaaatttcactttttgaagaaaacaagattgactctgaagccagttcatcttctctggcatctgaagcccagcagcctgactcatctgccagtgacattgatgatagcagatacacttctttcaggcaatatcttgatccacttttaaggcgaaggggttctgggtggaacatagagtctcaggtgtctgacctcattaatatttaccgtgatattggccgggcagctagtgactcacagagagttgattctgatagatattctaatcaggggttgccctcaagttcccaggaccagtcttccagttcatctgatgcaaatgctagcacaagatcagaagaagacaagaaaaaatctgagcattcctcctgctgtgacatgatgaggtctctctcgtaccatattagccatctttttatggagcttgggaaagcaatgctgctcacatctcgtcgagaaaacagtcctgtaaatttatccccatctgttatatccgttgctggcagtattgcttctattgtgttggaacatctcaattttgaagggcgctcagtaagttctgagaaggagattaatgttaccacaaagtgccgatatctcggaaaggtggttgagtttgttgatggaatattattggaccggccagaatcctgtaatccaatcatggtgaattcattttattgccgtggtgtcattcaggccatcctgaccacatttcaagctacaagtgagttgctcttcacgatgagcaggccaccatcttcgcctatggatacagatagtaagactggaaaggatggaaaggagacggattcttcatggatttatggccccctctccagctatggggcagtaatggatcatcttgtgacctcatca

SEQ ID NO: 18053 - DNA, 2065 bp, Setaria italica
  Peptide Sequence Number=SeqID_84027
gccgagggggacggcgccgaggggtggacgctcgcgcggcggaagggggaaacggagcgaggaggggaggaaggagtgggaggtggtgaggatgatacggagcgggctcaaggagttcgagcgccggagcctgtcgagcgacatgtttgctggattacatggccgcggcgagttcgtggagaaatttaagttgagattgaaatcgctgaacaaggactatcaggaatccaaggtagtcccaccactggatctatctgaaattctggcatatctagtccggcaatctggtccatttttagatcaacttggcataagaagagatctatgtgacaaactagtggagatgttatatagtaaacgaaatggtcggctcatgtatcattccctttcagaggatagaaccttagctgagaacataaatgaggaccttgatctaagaatagctagggtgttagaaagtactggctatcatgcagatgaaggtttttggaatgaccctgcaaaatacaagatctcagacaacagacggcatgttgctattgtcaccacagcaagtcttccatggatgacagggacagcaatcaatccattgtttcgtgctgcatatctggcaagaagtgcaaagcaaaaagtgacgctggtggttccttggctctgtaagtcagaccaagaattggtttatccaaataacatcaccttcagttctccagaagagcaagaaatttacataaggaactggctgcaggaaagagttggctttgaagctgattttaagatatccttctatcctagcaagttttcaaaagagcgccgcagcattattcctgctggggatacttcccagtttatctcatcaaaagaagcagacatagcaattttagaagaacctgagcatctcaactggtatcatcatggaaagcgttggactgacaagttcaatcatgtcatcggcgtagttcatacaaattacttggaatatatcaagagagagaaaaatggtgctattcaatctttccttgttaagcatatcaacaactgggtgactagggcatactgccacaaggttttacgtctttctgctgcaactcaagatctaccaaggtctgttgtttgtaacgtacatggtgtaaatccaaagtttctcaatatcggtgagaaaatagcagctgatagggagcgtggacagaaggtcttctttaagggagcatattttcttgggaagatggtgtgggctaaaggctatagagaactaatagatttattgtcaaaacacaaaaaagatctggaaggcttcaagatagatgtatatggaaatggtgaagactctgaagcggttcagactgctgctagaaaatttgatttgagcatcaattttttcaagggaaaggaccatgcagacaattcactccacgggtataaggttttcatcaatccaagtgttagtgatgtgctatgcacagcaacagctgaggctcttgctatggggaagtttgtagtctgtgcagatcatccatcaaacgattttttcaagtcattccccaactgcttaacatataaaacttcagaggaatttgttgctcgtgtcaaagaggctatggttagtgaaccacaacctctgaccccagagcaacggtacagtttatcatgggaggcggcgactgagaggtttatggagtactcagagctggacaaagttctgaacaatacaaatggtcaccctggacgaggtgggaagataaataaattgagaaagatacctttacttcctaagctgtcagatgtggtggatgggggactagcatttgctcatcactgcctgactggcaacgaaatcctcagattggcgacaggagcgattcctggcacacgtgactatgataaacaacagtgcatggatttgaatctcctgcctcctcaagttcagcaccctgtatatggctggtgatgtgtaccagcttgcatttaactaatgtatagttgaagtatgtttctccgtaggtatgtgcacattaagcgatccagttcccatgtattgaccggagcatgaatagaaaaaaaaaaaaaa

SEQ ID NO: 18054 - DNA, 380 bp, Setaria italica
  Peptide Sequence Number=SeqID_84028
gtctgatactaatcctagaagttcagttccaggaaaagaagcacgccaaagggccttcagtgctttctgatgctctaggtttgaactatcatactgcacttctatccggttctgcaatctctgcaagcactcttcctgaatggggctcagatcgaatgagaggcgcgcgtcactatcccttctctgcgcgcagacgcacgagagccccctcccgatccacgccgtggacaagcccacgacctccgccggcgaggagtgggagtggtggtggtggacgatgccggcgccggagaggcggcgcacggcgaggaaggagccggcattctggtccatgccgaacgagcgcgcgcgcgcgctgctctccgcctcctcgacctcgc

SEQ ID NO: 18055 - DNA, 1220 bp, Setaria italica
  Peptide Sequence Number=SeqID_84029
ccgatttttccacgtcgccttgctgcagcaactcagcaccagtccagtccaccaccgcggcggtagactgtagcacgagagagaaatctataggcagctcgtcgagcatggcggccgccgtggcgctggccccggcctctcccgctctcctcccctccttccgcggctgccgcgatggccgggtgcgcctctcgccccgccgcccccgctactcctcggggcgctgcagggccatggcgcagaccttccagggaggccccgccgccagctatgcccgcgagatggagcgcctctccgccaaggagtccctcctcctagcctttaaagatgctggtggattcgaggccttggttagtggtaagaccacggagatgcagagaatcgatgtcaatgagcgaatcgttggacttgaacggctgaaccccacactgcgccccacaacatcgcccttcttggaaggtcgatggaactttgagtggtttggtgatagcagtcctggagcatttgcggcccggcttttgtttgagagatcacctacaactgttgcacactttacgggacttgatgtgttgatcaaggatggatactccaagctctcatctaacctcaagttcttaaatacgatacaaagcaaattcctactgactactcaattgtccgtcgagggtcccatcagaatgaaagaagaatccgtcgagggccttatagagattcccaaaattagtgaagaaacattgcctgaacaattaaagggcttgcttgggcaaactgcaggagctctacaacaacttcctagccctataagagatgctgttgcagaggggcttaaattgccgcttagtggaacattccaacgcttattcatgatctcttacctggatgaagaaatactgattatcagagatgctgctggagcacctgatgtcttaaccagattggaggggccacaaccaaatccaattgatggcacagcagatgcagtgatatcagaatatgaaagctaatgccacagcaccaactgaactccacgcatagcttttgtttatggtttttcttcttcggttttgttcattttctgagtcttgcacatacaggctctagtgcacgttgacaaacacttgaatattcttactcacgttcctttcagctattctaagtgcaatcaactctaaatggccatcaatagttcatgaagatgttgcatttcagtttaaaaaaaa

SEQ ID NO: 18056 - DNA, 624 bp, Setaria italica
  Peptide Sequence Number=SeqID_84030
ccatcctctttatattgcataagtattttatcaaagtattgtaggtagccacatctgcttgacaacgacgatcattcatctcaccaaaaatctcaagtgcttctggaatccttttcttgaagcacaactggtcaatgatacagttgcagatcgccacatcaggattaatgcctttctcccacatgctgttgaacagcttcactgcggaaccaattctgccatctttggtcagtgcttttatgaatgtgccataggtgaacaggtcccgttcaaccttggatgcaatgatatcattccaaatcctttgagcgtctctcatgcttcccttgacacaccaaccattaagtatgatgttccagctctttatgacatgtgggaactcatctttcttctcgcggaacagaacctctgcctcctcaacatgcttgtatcggcacagcgacatcaggagtatctggaacccaaccaagtcgagctcaaacccatagtccttcctcaagtagaacacctctattgcctcctgcaccttgtgcgcacccgcatacctgttcaacagcacggcaaacgtcctgttggttaccacgacctcccaccgctcattgggaatctcatcaaactagtctt

SEQ ID NO: 18057 - DNA, 351 bp, Setaria italica
  Peptide Sequence Number=SeqID_84031
cccaaaacttagaagaagcaagacaagcattcaaagattcttgttcggttcaggtctacagtatccaggcatctattccaaaagatactgcggtactatggaatcctgaatttgttcaggcagaagagcttttcaaccaaccttttgatgaagagaactgtttgagagataatagattttgtggtgttttcaattcttttgtcaagcgaacatccagtgggaagcatgtgagctcattgcccaccaaagcctgtaaatggtgctgcggtagctgcacagtcaaaacctagtgttaccccaaaggagcagtctggaactgctcggcagcaggatttgcctggagtgtctagt

SEQ ID NO: 18058 - DNA, 952 bp, Setaria italica
  Peptide Sequence Number=SeqID_84032
tttagtcgcaaaaataggagccgacctccaagtgatttacagtgtgtcagggtggctgaagaataatccccaaaattattgtgtaaagctcacttcaggcccaaaacttgaagaagcaagacaagcattcaaagattcttgttcggttcaggtctacagtatccaggcatctattccaaaagatactgcggtactatggaatcctgaatttgttcaggcagaagagcattttgatttttcagatgatgaggaagatgacaatattgtaagcattgcatctcctgagctaccaaaaccgcaagccccagaccctgttacccaaactgctgaagacactgaagcagatcaaaagaacatggaaaataaagaagatataccaagcaatgtgaaaggttgctcaagggggtggattttgagttaacttcagaatgtaaaagtaaaagtgtcaatactataaattattctgggattactttaaaagaaaagagcagtgatcctccaatcaatgacaataagcaggattccacagctgagcctgcttccacctcaccgaagagaagaaaggttttgaagacacgtatagatgagcgaggaagggaagttactgaggttgtctgggagggtgaagcttctgctggtgacaagacagagaagaatgcgaacactactactgcgagcagggcggctccttcaagcaagccacagccagcagcaaacgctgacaagagcaaagctccaagcaaagcagcaggcagcaagaaacctgcgaaggccggcactggcaccaagcaagggagcatcatgtcattcttcaagaaggcataaagactgcagggctgcacacacttgtcagatgggcttgctcagcagattgtcgtgtttccgctgcacactggcattcagccgctactaaactgggccccccggccaggcgaactagaaagtaggacta

SEQ ID NO: 18059 - DNA, 536 bp, Setaria italica
  Peptide Sequence Number=SeqID_84033
tacgtagaaattaggacggaaaaatagaatctaacataatatatctgttacgaaggatatggaaattgtacagaagaccccaataagagtacttcaccgtagaagcccattagagcggaaacgtattatacactggatggagattgagaaagtcaaaggcagctcaaactattacttgttgcatctatgcacgcaggctggaacatacatcaaggaattcgtgcacggcgatcttggacgcacgcaccccagtatcggagccatatttgggtgcagagctgagattttgcaactcgacgtcactgatgttaagatggacttcctccaataggccatgctcaattagcacggatggctctcgcgggtgcccctgcattgcctcattatctgcagaagactgcaggggttgcggccgataatgaggcaatgcagcattgagaagcggctccaaaatatgttccgctcgctgcccgtacaagctcggctatatttttttactcctgcgttgttgagaaactcaacatgttattccttgt

SEQ ID NO: 18060 - DNA, 672 bp, Setaria italica
  Peptide Sequence Number=SeqID_84034
ttttttccttttttaattttttcttttttgtttttgttttattttatttcttttgttctattgtagtattccccttattattattatttggttggaaggttatttgaagctgtcaaggaatgtcagtcaatcatgttggataatagatgatgagagaatgggggaagcttcagttgaggagataattggggagaacatccgtgtcatctgcagaggtgatagctgcaagttccatgctgctggaagagaagacattgatgtaatgttatgatctggattctggaactgtgcctgttgatatttgctatgctgaacatatcatatatgcaggtcagagtccgaaatctcaagttggtaggcaatgaaatatggacaatgatgcgtgaaggggaatcagagaaacagaagcaatatactgcccttatatggacttctcgtgaattggcggaaaatgatctacataatatatctgttacgaaggatatggaaattgtacagaagaccccaataagagtacttcaccgtagaagcccattagagcggaaacgtattatacactggatggagattgagaaagtcaaaggcagctcaaactattactgttgcatctatgcacgcaggttggtactgcaacatcttgccattttccacagataatttcactgtatatca

SEQ ID NO: 18061 - DNA, 602 bp, Setaria italica
  Peptide Sequence Number=SeqID_84035
gaatcagattcattcatcagaactacttagaagggcatccaagatcaagaattatgtaatttaattcagttgcctccggaaaaggtgtccaaaccctgccatcttgtgatatcttgcatgagatcccctatatatattggtggaaggtatttgaagctgtcaaggaatgtcagtcaatcatgttggataatagatgatgagagaatgggggaagcttcagttgaggagataattggggagaacatccgtgtcatctgcagaggtgatagctgcaagttccatgctgctggaagagaagacattgatgtacggatgcttggatctggtcgtccatttctagttgaactattgaacgttcgttccatcccatctgaaattgaagttcaacaaattgaagacagaattaacaactctgaaaagaaatatgtcagagtccgaaatctcaagttggtaggcaatgaaatatggacaatgatgcgtgaaggggaatcagagaaacagaagcaatatactgcccttatatggacttctcgtgaattggcggaaaatgatctacataatatatctgttacgaaggatatggaaattgtacagaagacccc

SEQ ID NO: 18062 - DNA, 1580 bp, Setaria italica
  misc_feature (1525)..(1580): n is a, c, g, or t
  Peptide Sequence Number=SeqID_84036
ttccccgacctgtccccatcggcctcgcctcctccctcgcctccctcctcacccacgacaatgccgacctcgccgccgccgccgcttccctcctcgccgacctcaccgactccgacgaccccgacgacctcgccgccgtccaggcactcgccgacgccctcgtcgaagccaacgcgctcgacctcctcgtccacaacctctcccgcttctccgaggccgaccccgacgaggccgaggccgtccacaacaccctcgccgtcctcgagaacctcctcgacctccgcccccacctcgccgacaaagtatgcgacggcaccaagctcctgcgctggctcctctcgcgcctcaaggcgcgcgaattcgacgccaacaagcagtacgcctccgagatcctcgccatcctcctgcataacagccctgccaaccagaagcgcctgggccagatcaacggggtcgacggcctgcttcaggcggttgccatgtacaaatccagggacccaaagacctctgacgaggaggagatgctcgagaacctcttcgactgcctctgttgcgtgctcatgcccctggagaacaaggagaggtttgtcaaggctgaaggcgttgagctcatgattatcatcatgaaacagaagaagctggcgtacagctctgccatccgcacgctcgatttcgccatgaccaggttcccgcctgcgtgtgagcgctttgttgatgtgcttggccttaagactgcttttgcggccttcatgggtaagattcccgtcaacaagaagaacaagaaagagagttatcaggaggagctagaagagcgtatcatttcaattattgcctcattgtttggtggtattattaagggctcacgaaggatgaggctactaggaaagtttgttgagaatgaatgcgaaaagatagaccgtctgatggagttttacacaaggtattcagacagagtgaaagaagagactgagaggcttgatagtcttgatttggaagatttagagatggatgatgatgagcgttataaccgaaaacttgaagctgggctttacacattgcagctaattgcgcttattctgggacacatctggcactctgggaattcccagatgagggcaagagtagaattgcttctaagacaaaacaaacttacgaagcaagatgtgaaggacatacttgaggaatatcatgacaacattggggacttggatggacctgaagagaaggaaagagcacaagcgcgggccaaggaaattatagcagtgttgtgatgcgcgtggtgggctggagtagttggttgtagagcaagacgagagagatatagtgagggttgaggagaagagcagtcaggtagtgtagatgttggatggcagaaacaaagagagtaggtggcctgctatctgctgataatgcagctccgtattctgtttgtgttgtattatttttcttgtgtaaacattctctataactatgaaagaaaaatcctataatcatctgatatttggataaccaaaaaaaaaaaaannnnnnnnnnnnnnnnnnnnnnnnnnnnnnnnnnnnnnnnnnnnnnnnnnnnnnnn

SEQ ID NO: 18063 - DNA, 442 bp, Setaria italica
  Peptide Sequence Number=SeqID_84037
gttagttaaatgtcaacagaaaacaagccatgatggcatatttttaagggggtgagaaagaattgaagcgcctcataatcgtttaaaactattccacagcatgaataatccttttagggaaaaaaggaaaacctagcatctcctcagaaatgcattttttttaagcagtcagggcttcttcaagggttcaaaaccccaaaagaagaaatccataaggaaataaatcttatagtcaacacatcagagactgaggatttaccttcgcagttgcccaaaattgagcaaaatcagctacccgcagattgcggtcatccactaaaaacgccaggaataccagcagtaaacaagtcagttaccagaatagaatcagccgttggtgaaattgaaggtattctcttggcacacggtcgctgtattttgctagggcagctaaggtgttatt

SEQ ID NO: 18064 - DNA, 705 bp, Setaria italica
  Peptide Sequence Number=SeqID_84038
cggcggcggcggcggcggggaggatggacgacgggctggaggtgacgtggggcgacgggcgcgggagcgtgtcgccggacggccagacgctgacgctgtcgctggaccacacctccggctccgggttccgctccagggacacctacctcttcgcgcgcgctgacatgcagatcaagctcgtacccaacaactccgccggcaccgtcaccaccttctacgtaagccggccgccgcgctaacactctctccgtgttgacgcgctgcgctatggattgtgtttctaacaagctttctgccggacccgtgcgtgcagttcatctcggagggtccgtgggacgtccacgacgaggtggacctcgagttcctgggcaacgtgagcgggcagccgtacacgctgcacaccaacgtgttcggcaacggcaacggcggcaaggagcagcagttccacctctggttcgaccccaccaccgacttccacacatactccatcgagtggacgcagcaccacatcctgtaagttacacatcagcagctcgcaatcacctagcagaattgctattccattcgtcgatcgagagctgacgatcaatcgaatcgattgcctgcagggtgctggtggacgggacgccgatccgggagttcaagaaccacgcggaccgcggcgtgccgtacccgtcgtcgcagcggatgcggctgtacggctcg

SEQ ID NO: 18065 - DNA, 1218 bp, Setaria italica
  misc_feature (1207)..(1207): n is a, c, g, or t
  Peptide Sequence Number=SeqID_84039
gatccgtcctcccaagtcccaaccatccctgctgctgccccgccaaactctatataagcctggcgagtcgggactcacaacacagattcatccatctctcgtctgctcctttcccttgttctcacacaaactctttcgaagccatccgagcttgctggtgcgaggcttaagcaacgacggcgatggcttttagctcgggtgctcgcgcgctggcagtggcgctgctcctggggctctgtacggcggcggcggcggcggggaggatggacgacgggctggaggtgacgtggggcgacgggcgcgggagcgtgtcgccggacggccagacgctgacgctgtcgctggaccacacctccggctccgggttccgctccagggacacctacctcttcgcgcgcgctgacatgcagatcaagctcgtacccaacaactccgccggcaccgtcaccaccttctacttcatctcggagggtccgtgggacgtccacgacgaggtggacctcgagttcctgggcaacgtgagcgggcagccgtacacgctgcacaccaacgtgttcggcaacggcaacggcggcaaggagcagcagttccacctctggttcgaccccaccaccgacttccacacatactccatcgagtggacgcagcaccacatcctggtgctggtggacgggacgccgatccgggagttcaagaaccacgcggaccgcggcgtgccgtacccgtcgtcgcagcggatgcggctgtacggctcgctgtgggacgccgaggactgggccacgcagggcggccgcgtcaagacggactggtcccaggcccccttcatggcgcagtaccgcaagttcacggccgcggacgcctcgtcctcctccacgtcggcgagcgggtacgggcaggagctggacgcggcggcgcagcaggcgatgaagtgggcgcgggacaactacatggtgtacgactactgcgccgacagcaagcggttcccgcagggcgtcccgcccgagtgctccatgccgtagtagcgtggagatgggccaagcgccgggccgctttgattgcgaagtcgatcagagcattagggcaggctgcacgcatagtggatgtattataagaacccattggtctcattctttgtttatactattcatctattctttggtgtgcgaatatatagtagtatcattcgtttggtctaaaaaaaaaaaanaaaaaaaaaac

SEQ ID NO: 18066 - DNA, 391 bp, Setaria italica
  Peptide Sequence Number=SeqID_84040
agaaaatgaattaattattctttatattaaataaaatttacaaatagatgagagaatgattaattcctcatttatctcagaataattttgcacatatatatacaccaacgatggtggatatggacagatatgtatatgtacggtgcattttgcttcctctataagtacctttggtgttagatttctatttgcagcatgcctctttcacaaagcattacaacttgctttggatgcatccctagttaaatatatagataaatcattggcgatgagaagcagccccaacctccaggaaatctatgaactgcacctgcccttcagcttgatcatcccgattctcctcttgctcctcaatgctcgaaccgcacttggtgtcgctcgagttcgcatt

SEQ ID NO: 18067 - DNA, 1465 bp, Setaria italica
  Peptide Sequence Number=SeqID_84041
acaagctagacaagaataaaactaagggaaggtcatcgtccaggctaactgtcaggaacaccaagaaacctaaaagaccagctaactgtcagcactcagcagcgcagcaaactatccaagttttctcactactttgtacaataagaaggccaagagatggtagtcttcatcagaggaaaatcggattagctgcctcgacatccactccatccctgtgcttgaacattttcagctgcacgcatagccttccactccttcggaggtcatctgtgtcccttggaatttgagtttcatccccatcttgctgaccctgcttcattgattctggtgagcttgaatctagagatgaggacgaaggggtcattgtcaaatgggagatttgccatggctccatggcctcgtgttctttgaactcctcacccccatttagtagaggaacggtgccatcaaacaccgtgtcacacttgcttgcctgatatgggactagcgcacctggatactgatgagggttcgatggatcctgaaagagtgaaggtttcccccttttccttgggttctttgacctgacagggccagttggcctctgagctgcttgatgtttcctccgattgccctgtggtggggagtagttcttgatcattgtgcccaccctctctaagaagcttgcaacctctgcaggaagtaagtgtccctcaagatatcgatcaattactgggagatcattcttcaaatcttcaaccattgaagaaatgtcatgagaggtattccgattacatccagtagcattctgtccagctacaggctcatctggtggtagggagttgatattggtttctgctgaaggggtgaaacggcagccaaccaattgatggaactcctcaatctcacgagcatactcaaccctccagtctttccacttgctccaagttcttcttgcccacattggcacgccatggaggcgaccctgttcccttccaaactgcctagcaaacctgtcaggaacatacacctcctttatgttaaagctgatcagccaagtccgggagtagcagatgttatctgcagcaatgcaatattctggaacaattgctggattcatgtccttgtaagggttccaattgacctcagataactgaagctgctcgaaaacttttctccactccataactttttttctttgcccacgtgttgctcctccaaagttccaccggcaagcacggggcagcaaggtgctctggttcttctgttgtggttgagttataggaaggtactcgtaaatccaggccatcagcaaagttgcactgccaagaaactgtgttgtggcattaggtgttactgcaacagacaatcccctgtacaaatgagcaagggctgcagccccccaagcatactcacgaatcttcctaaaatccgccaacagtggtagatatctcggggatacaaatcccctcatggtgtcaggaaa

SEQ ID NO: 18068 - DNA, 237 bp, Setaria italica
  Peptide Sequence Number=SeqID_84042
agcatcgtcaaatgaatactgaggtgcttatttgagatgggactgaacgaggtggagttgatttgggatggtgctgatcgatggatgagttgcttgtgaatcttgtgatcacggcagtagtaaggacagctggtgtagtgctattgaggagagtagaagacgatgctttgacctcctgcaaatatctgaattctcgccccccaaatctcttattacacacattattaagaaaaaatt

SEQ ID NO: 18069 - DNA, 1931 bp, Setaria italica
  misc_feature (1905)..(1931): n is a, c, g, or t
  Peptide Sequence Number=SeqID_84043
tccacgccgccgagctaggggccatcgccggatcctgccccagcctccggaagctcgtggcgccatgtgttttcaacccacggtacgttgacttcgtcggcgacgaggcgctcctcgccatcgccaccaggtgctccaagctcacggtcttgcggcttcgggaaccgttcgagccggcatccaccagccaaggggaggacgtggccattaccgtggcagggcttgtctccttctttgctgcactccctgcgctggaggatttcacgcttgacctgcggcataatgtgctggagacagcgccagcgatggaggcgcttgcccgcagatgcccgcggatcaagttcttgacgctggggggcttccaggggttgtgcaaggcatcatggctgcatctcgacggcgttgcggtgtgcggttcgctggagtcgctatgcatcaagcgttgtctggatctcaccgacgccagccttgcagcaatcggccgtgggtgtgggaggcttgctaagttcgccatccatggctgcgatcttgtgacatcagctgggatcaggaggctagcaatggcgcttcggcccacaatcaaggaagtaagcatcttgcactgccggcttctggacacagcaacatgcctcactgctctgagtccgatccgagatcgcattgagagacttgagctcaactgtgtctggagggaagttgaacaacccgaaagcgtagccaatggcacaaccggatgcaaccatgaggatgatgatctgggtgaagtgtcatatgagtctgcatcaaagaaatgtaggtacatggagttggatgatctagtcagctgggagatgctccgttcactctccctctggttccctgctggtgagctactctccccgctcatttctgctgggcttgatagctgccctgtgctagaggagatctcaattaaggtggagggtgattgccggacatgtgcacgacctggccctcgagtttttttcggcctgagtgatcttgcaggcttcccagttctggccaagatgaaactggatctgagtgaggcagttggttatgccctcactgcaccagcagggcagatggatctttctctgtgggagcgattttatttgcaaggtattgattcactaattactttgtatgagcttgattattggcctccccaagacaaggaagtgaaccaacgcagcctgacactgcccgctgtgggactactccagcgctgcatcggactcaggaagctcttcgttcatggcaccacacatgctcatttcctgagcttcttcttgatgatgccaaatttgagggacatgcagttacgggaggactactatccggcaccagagaatgatatgatgatcacggaaatgcgagccgaatcttggcttcgatttgagatgcagctgaacagccggctagttgaagattaatgttgaatgtgagagcatcgtcaaatgaatactgaggtgcttatttgagatgggactgaacgaggtggagttgatttgggatggtgctgatcgatggatgagttgcttgtgaatcttgtgatcacggcagtagtaaggacagctggtgtagtgctattgaggagagtagaagacgatgctttgaccgtgcggaaaataaaggtggtcttctctagttgcatttttttctaataatgtgtgtaataagagatttgggggcagaattcagatatttgcaggaggtgagacgataaactagtatttgaggaaattttgcaaggagtgagaattttccccttttttgagctgaggttagttgaacaccggcacgatagattggaattgttcctgtgagctgtaacaatgtagctctgtaaaaagaataaaagaaatgtcactcagtcatcttacctttaaaaaaaaaaaaaaaaannnnnnnnnnnnnnnnnnnnnnnnnnn

SEQ ID NO: 18070 - DNA, 438 bp, Setaria italica
  Peptide Sequence Number=SeqID_84044
aagatttgcattctcgccccatgcagtatttgtgaacagaggaaagacctcccaaagtgctcgaagtgtcccaattgttccagatggcatgaggaaaatggacaccccattacgtttcacatattcatactcagcctcactttcccattctttgaaatcaagggtgtgctctcgccccaaaaagtagtaatcccatgtaacacggtaaggtgtggcaaatacgtagagatctatgcaagtccagctgtgtgctttggttgtcttgatgtggagcgtgcctccgccgtacttggacccgctctcgttgtggagcacgagccacgcctcgttctcgtagaagcaggcccccttccaccgcacctcccctccgctgtcgctgccgggcgccgcgcccggcgctcccgccaacgccgcgccgacgaacaccgggaagatgtc

SEQ ID NO: 18071 - DNA, 348 bp, Setaria italica
  Peptide Sequence Number=SeqID_84045
acaatacaaatttactatatatttatagttgtcctcaaaaaagttgagggtgtaagcatcttttattgtgaattcagtaacttcaacagagttggtaatagggccaaagagtccagcctccttgtacatcataaggacgaaagcaatacaagatgctgactgaccatcttcatagacccaattatctttctcaggaacagttagtaacttgtcaaatgtaatcccacgtctctctgattccacaatgatttcaggtaaatcaagaccctgaaagaaatggtgtcactttagaaccaaacaaaagcactaaataacttttaagcacgataaaatcgtaaagtacaaaat

SEQ ID NO: 18072 - DNA, 1795 bp, Setaria italica
  Peptide Sequence Number=SeqID_84046
ggaccttttctagaagttaggcctaaaatacagccatcaccacatgcaggaatcaagggaccaaattgtgcatcaatccaaatgtaataaatacccatgtaaaataaataacagctactggaaaacacttaacagaagcatagcaaacagatctttttttttttaagtttaaacgacccctcagggtacgttggtgatgccacagatgacaaatcaaacagcaggacggtttcaaccgtgtacaatcagcttttgatacaaggatgcacgtacacttcatcagagaaactgaatgaaagcactagagatgtttccaggaccctagagctgcgtgacttttgggacatcaggtgttgatctttactgtacattcatggtcttccatattcgaggaagttgacataactttcctgcaacctatgcatttatacctaaagtattatgtacaactgaagattatggctacaagacagcgtgcgtaaaaagcacacagcatatctagatagcactagctgtgagggacaagtaaatttagtgcttcaggtacagtgatgcctgacactagcagcccttcgtccttttgtaatccggaggcagggatggacatctttcgttcatgtgggcatatggtttcatggtgttgtatccaggcagctccatccggtacctacccttgatttggcaaaaggggagcttaacactgtcacccttgttgcaccactcgggaagccgagtcgagttgtcctcaaaaaagttgagggtgtaagcatcttttattgtgaattcagtaacttcaacagagttggtaatagggccaaagagtccagcctccttgtacatcataaggacgaaagcaatacaagatgctgactgaccatcttcatagacccaattatctttctcaggaacagttagtaacttgtcaaatgtaatcccacgtctctctgattccacaatgatttcaggtaaatcaagacccttagttccaagccgtttgttaagggcttctttccacaaattagcagcatactctggttgaagcttggtccatacagtcataacagaagcaaccacatgagcatctaatggtggtggatagttatcgctgatggtatcgatccagctaaatatcatattgtgatacccataaggcttcccactcatgttttttgcataattccaagctgctgtctcattaaattttgctcgcaaatctggatgcaaaggaagcagtgcaatctgaggatttgaatcatcctttgtcacttcaaactcccaccattcctcccagggcaagatagcaataacatcttctcccttttcgttttcattacccgattccccaacccaaagctttccatcagagtccctaaggcaaactgcagtatggcctgcgtaagcaccagtaacccacttctccagtgtttcaaaaccaccccagcgcccacgaatcttggataaaaccaagaaatctccagagtggatgtcatcagtatttaactctgatacccaaggcttcggccgttcctcaaatgtagcacccatatgcttcttgagaaagttaagatttgcattctcgccccatgcagtatttgtgaacagaggaaagacctcccaaagtgctcgaagtgtcccaattgttccagatggcatgaggaaaatggacaccccattacgtttcacatattcatactcagcctcactttccctacttttgtatccctagggtctaagtattagtctaattaacttatttcttttcttttccctttttcgttttctttattttaccttt

SEQ ID NO: 18073 - DNA, 539 bp, Setaria italica
  Peptide Sequence Number=SeqID_84047
cccgcgcttgtgctccgccccgcggaccactgctgcggcgcagaattgacaaggtctcactgcgctcaatagcaatggctaccacacaagcctcagaagcagaagctgacaaaggattgcctttggggatggatgcaaccatggtcgatgagtatgccctcccagtcaaagttgctgcaagaatttgttaagatccccagttgtggcaaggcttggatcttcaattccaaggatgaaaacacatccagagcagtggtttccattggccaatcagatcttttgggaaataagaggagaaaattccttttgaattctcacatttcaaagagtgcctcaaagtccgtcgatttccactggtctcccttcccaactgaaataagtggagtgtcagcagtaattccatcgccatctggagaaaaacttcttctagtacgcaattctgaggatgattcccctacaaaattagagatttgggggtcatgccaattaaagaatgagatacatattgcaaaatctgttcatggatcactctatactga

SEQ ID NO: 18074 - DNA, 645 bp, Setaria italica
  Peptide Sequence Number=SeqID_84048
accgggtacctagacaacccgacgcgcgcgacaccaccatgccggcgcgcgcatccgccttcaggtggagctcccacccgccccaccgcaccgtgtgcccgtccaccagctcgacgcctgggcccgacggcgccggctccatcgacggcgcgcgcaccttctggtacccgaggccagcatcttgtcgttcctgcatgtggcgtgcgaggcggtagtcggtgttggcggcgtccgggatcgggatgccggcgccgcggtcggagatgtggacgacctcactcgtgtccatgtcgaccagcacggtgaggccctcgatggggcgcatgtagaagttggccgtgccctcggcggagaagcactgaaccttgatcagccggcggttctcctcggtggggccgtaccacccgagggagatgggcaggcacgcgacgtcggacataccggacgaccgcgccgccggatggtggcgttgaacttggggtcagcgaacggcgcgaagcagagtgacacctgctcgtccatggtcatggtcgggtacccgaggcgggacgggagaggggtcacggcgctgccggcgaggtcaacggcgagcacggaggcctcgccgcggaaccggacgaccgccacggcgtggcgggaggcagc

SEQ ID NO: 18075 - DNA, 453 bp, Setaria italica
  Peptide Sequence Number=SeqID_84049
atccccagttgctcttcccaaagcatatcaagcatgcggcataatgacgaaatcatccctttatcaagccaatatgtggagatagtgaaaaagggagggcggtgacttgggtatgatgcaggcaggagacatgttagcaggattggaggcaaatgctcaactctaaacttgtaaacaaggtcatcagcatcagcaccagcatcagatgctgccccatattttaatgttccatcaccataactgagccttgttgatacatctatagcatctggaatctcaatgtgaacatggacctggaaacaacgctgcccaccctttctgtccaaaattactacagcatcttcaaaaattgcttcaagggcacagatctcatcctcctgcctctgatcattggcgtgcacctcctcctcagtcaacgccacctcttccccaccggcctccgcaagctcgtgc

SEQ ID NO: 18076 - DNA, 329 bp, Setaria italica
  misc_feature (324)..(324): n is a, c, g, or t
  misc_feature (327)..(327): n is a, c, g, or t
  Peptide Sequence Number=SeqID_84050
tcgtgcgaaaacttcttgacgagcaatgggaagacctgttcttcttccttggacatatgttgggttacagacgtttgaattgctccagtacaggatgcaagttccctccggatagcatcgtcattctgcacatctagctgtagcagagcgaacagatgtgcaaacagatcattttctcctttgtgttcaagagaatatgtccctgcgacatttttcactcgaatatcaagtgctggaaaaataaccgcgtcctcggcgtggcagtggtgcctgtagacggcgaagaggaagcggcagcgcgcctcgagcgccgccacgccctcnccncc

SEQ ID NO: 18077 - DNA, 268 bp, Setaria italica
  Peptide Sequence Number=SeqID_84051
accacccctcgcacgacgtcgcccacggccagcgcctcgtcaaggaggtctacgaggctctccggtcgagcccgcagtggcacgagaccctcctcgtcatcacctacgacgagcacggcgggttcttcgaccacgttcccaccccaaccgagggcgtcccgagccccgacggcatcgtcagcgcgccgcccatcggcttcgccttcgaccgcctcggcgtccgcgtcccggccatgttcatctcgccgtggatcgagccgagcacagt

SEQ ID NO: 18078 - DNA, 418 bp, Setaria italica
  Peptide Sequence Number=SeqID_84052
tttttttttagtaaaatattccataggcaatattatattccattcagccacctataccattgtataagtagtccatacaaagaatataataaaagtcacccatagcactatgggctgctcatagggcatttaaaaattatatttgtatactgcagctaatggggtagatgattcttttttattgatactgtgtcaaacaatcccaaaaaagaacggtgtgtgtgcgtctctaagtccaacgaatggatataggcctctgggctgtaacccaaaccaggcacagagccaaccaaccagaccagcccaactaataaccgaaaacgaaacagagctggtgtgggactgatctgaaacattgaacccactgagctcgcacttgcactattgcaagggaaacaaagtacaaataatagtaaga

SEQ ID NO: 18079 - DNA, 425 bp, Setaria italica
  Peptide Sequence Number=SeqID_84053
agcggaattttgcttctgtggggataccgatatcgccgttctcaggatagcgtgaaagccatggcgtccgccgtccaccacctcctcgcgctcctcctccgacctctccctcccccggcttaccatccccgccactccttctcgccacgccctgcccgcctccattccttcttcccggctcccggttgccgcctcggcacacatgccgttgcgcttgcagagccagacttggtgcccccggatgaggaggaggaggacgacgacgcccggttcgtcgtggtgaccttctacaaattcgtgcccctcgaggatccccgcgccgaggtcgccagccacctccacttcctccagggacgcgatatacatggtcgcatttacttgaatgagcagggaatcaatgctcagtacagtggtccacgcaaaga

SEQ ID NO: 18080 - DNA, 287 bp, Setaria italica
  Peptide Sequence Number=SeqID_84054
cggcgggtaggggtagaggttgtcaccgtgggccgccagggcctgcggcggcgggtagaagccagcggcgggggagaaggaggcggcggacctgacctcatcggcgctgacctcgggtcctccccaggccaggccgccgccgcggagtaccgaggagctgctccggcccaggaactggtactgctgctggtgctgctccgccgccgatgctgccggagaggatgaggaggtggaggagaggagggggcggcgctgctcctcgccgtcgcgctgcggctccgcgccca

SEQ ID NO: 18081 - DNA, 447 bp, Setaria italica
  Peptide Sequence Number=SeqID_84055
tcgatctcagctccctcactgccatggaggcaactggctcattcactcgcgttatcgcgttgctcgcggcggcaagtctcctttggaaggaagccgcgtgcttctcggcgtccggcttgaacaaggccttcgccactttctatggcggtagcgacgcctcaggaacaatgggaggcgcttgcgggtacgggaacctttactcgacggggtacggcacgaacacagcagcgctgagtacggcgctgttcaacgacggcgcctcgtgcgggcagtgctaccggatcacgtgcgactaccaggcggacccgcggttctgcataattggcacgtcggtgaccatcacggccaccaacttgtgcccacccaactacgccctgccgaacgacaacggcggctggtgcaacccgccccgccaacacttcgacattggtccgtagtcccgtcctt

SEQ ID NO: 18082 - DNA, 826 bp, Setaria italica
  Peptide Sequence Number=SeqID_84056
gctcaaagccggtcagggcgcccgcgccggcatgtgagcgagtgcctgagtgggcagtggcggtgctaacccctgagccccgcgcccccacggagagggttccggaagcttcaccggtgcagctcggctcggcgcgcgcgcgcgcggggttctagatggcggactccacggccatgactgtcgacttcctccgcgcgcggcttctctccgagcggtcggtatcgcgcgccgcgaaggagcgcgcggacgagctcgccaagagggtcgcggagctggaggagcaggtccgggcggtgacggcgcagaggcggcaggcggagcgggcggccgccgaggtcgtcgccatcctggagtcccagggcttcggcggccacctctcggacgacgtggccgacgactcggactctgaccaggacggcgagcgccaggaggacgacgccaagggccggggcgacacgccgagcgccccgggggaggaggagccggtggcggtgaaggtcgaggcggaggacgctctttccgggacggcccagcctggcgggctgtcgtggaaaggccgcagcgtgagcccgcgcaaggccacgcagctcaagcacaagcacgggcggcgctacttctacctgctctcctcctccgattcctcgcccaagtaccgcatggggcagtcgtgccgcaagaacaagaggcggattgagctgatgagcaatggcagcaggtcggcggcaccggaagataacggcggtagagcggggagtcagaagcggaggcaggatgggtcggattgcacggaggatggccaggcggacatgggcggcgaggtgggtgg

SEQ ID NO: 18083 - DNA, 372 bp, Setaria italica
  Peptide Sequence Number=SeqID_84057
gttttaaatcaagccatgaacgcgactaccaacgaaacttacaaggatcgagttcgcttccacgatctcatgttagaaacaatatcagatatctagcgtatttaattaagcaccgaatacaaacctgatggtacagttcttgctggcacagaaacaggtgcttggtttctttccactgatgtacctagggaagcacttgcagctgaaccaaatgatggcagatgaatggtgtttgctgtgtaagttggagctggtctgggttccagtgaaacattatgattgtgccgtgctctcacattcctctgaaatccttcttgatggattaagtgttggccattccaaccactttgcccaatgcttaaaggcatttga

SEQ ID NO: 18084 - DNA, 1969 bp, Setaria italica
  Peptide Sequence Number=SeqID_84058
ttttgtagcatgtaaccacttgatggttaatttacttttaacttgattgttacagtacaataaaagaatttgggctttactgcgacccacggaataactgatttgagcatttatttacatggctaggagggaaagaattagaatgggacaatatgacctgagcctaaaatgaatggatcgaggagcacaattgctgctcctctggtgtcctaagccgcggctgctttgcacaccgggcatgaattcttcgtctgcagccacttcttgatgcagtcggcatggaagtcgtggttgcatttcagtgttcccagcacatccttgtctttgtaaccctccaggcaaatgacacagctcccatcatcttggtcatcttgatcgttttgtgttaggtcagaactgcaacagaccacttctctcacacacttagcaattttttcatcagccaaccctgtgttgacattacccataaattctcccaaagccaagagctcctcataactcatgttgtcaatgtccagtctcatgttcctgtgggggtcagctgctgctgctcttgattcgtaaaagaccaactggtccagcatcataaaccgctcagcctcgagcatcaaaggatgaagagcatagtaagagctcctagcccttctattccttccattgctagcatgccctacagagacatgccttccatgcctagaagatgcagcagttctggcaggtaatggttgagcgatccgcatggatgtagaggtagctgcagaagtagcaggtggatagctccgaatgaccgccccatggggcattgctctggagccagaggaagctgcgggagctggatgagggtagatgggaacagagccaccatgaacagttctaggagcatagccaccattagcaaatgttgcactgccagatgatgggacagttggaacagcaccaacacttaagttgatgcttccaatagcaggatagtaagtcctctccagagctctgctagtgagtcctggtgcacctgatggtacagttcttgctggcacagaaacaggtgcttggttcctttccactgatgtacctagggaagcacttgcagctgaaccaaatgatggcagatgaatggtgtttgctgtgtaagttggagctggtctgggttccagtgaaacattatgattgtgccgtgctctcacattcctctgaaatccttcttgatggattaagtgttggccattccaaccactttgcccaatgcttaaaggcatttgaggaagaaagggctcagcaggtggagcaggatttggctgcactgagttagataactgagtattggaagagcttccaacataataaccattagcactgaaccctacagggtttatgatgggattttttcgtttcattgcagtccttctgttgtccatatgggaactcactggaggaaagccttcctcagatctatgtggataactcacagcaggctctgctaaatggctgctggagcttccagcaggacaatgaacaaaggaagcatgtgcggtcccttggttcccaactctataacctacaggttgcacagcatgacttgaagatggaaggtcatttgatctaactgtcatattcccatgacttgaaggatcaattctaagaggtgcatcacttcgacggtgcactagaagcttctgacctaaaggcagggattcattgtgtggaacattcttgggttgaatatgatccatctctggcagctggatatggctgtggttacttctagccaataaaaaaagaagtcaggtctggccgcccttaatctcaaacgcgagccgatccgtggtccccgccgaatcggcgacgaaatcccccgggcgccggcggtagggggattcctcgggcggtcgggatgaggaaggaagaggtcgccgtacggcggaagcttcggggaggggatggggtggggcggagacgcaaccccgcgccg

SEQ ID NO: 18085 - DNA, 407 bp, Setaria italica
  Peptide Sequence Number=SeqID_84059
aggagcacgagttccagatctttctttcctgtaacagcatatcgaatgcaagctgcccattcaggagctgattccacagatggcattcgatatgctgttacaggaaagaagatctggaactcgtgctcctgttctcagacaaaaagtattagagtgcttatgtagtcctgttcctcaatccatggcaactagcgtacttgccaagagatatgcctttttatctgttgctctaatagaaatatctgcaccgaaaatgtctccagcagagaagcaataccatgttaaaattcttgatgaactacttgacaacatgaaccattcatctgcacagatggagctaatgaattagctgtaagtatacaaaacagtattcaatctaagcaaccggagttgactattctagtatt

SEQ ID NO: 18086 - DNA, 570 bp, Setaria italica
  misc_feature (484)..(484): n is a, c, g, or t
  misc_feature (497)..(497): n is a, c, g, or t
  misc_feature (507)..(507): n is a, c, g, or t
  Peptide Sequence Number=SeqID_84060
ctattagagcaacagataaaaaggcatatctcttggcaagtacgctagttgccatggattgaggaacaggactacataagcactctaatactttttgtctgagaacaggagcacgagttccagatctttcttttcctgtaacagcatatcgaatgccatctgtggaatcagctcctgaatgggcagcttgcattgccatctgtggaatcagctcctgaatgggcagcttgcattcgatatgctgttacaggaaaagaaagatctggaactcgtgctcctgttctcagacaaaaagtattagagtgcttatgtagtcctgttcctcaatccatggcaactagcgtacttgccaagagatatgcctttttatctgttgctctaatagaaatatctgcaccgaaaatgtctccagcagagaagcaataccatgttaaaatcttgatgaactacttgacaacatgaaccattcatctgcacaggtaanagaagcaattggngttgccatgngtgttacatgctctaatattagactttctgaatcatttggcactggttgctcaccggaagagc

SEQ ID NO: 18087 - DNA, 5658 bp, Setaria italica
  Peptide Sequence Number=SeqID_84061
aacaagtttgttgttcagattaagtggggaggtttgctcgtcaggcttttaagaaagcatgggaagaggctgtcacttgctgtgcaatggaggccactgtatgatacattgataaagactcatttcaagagaaacatgggacctgagggctggaaagtaaggaagcaacactttgaaactgttacctccttggtgcgtgcatctaggaatttctttcctgaaggtgcggctgccgagatttggtcagaattcaggcccttgctggataatccatggcataactcagcatttgaaggtgttggatttctcaggctgtttcttcctgtgaactcaaggaatcaggaccactttaccattgattggatcgcacaatgccttgacatatgggattctgtcacaaattgtaacttctgggatatccaatgggcttccatcatagcacgctgtataaaaaaatttaaatcagtgaactgggatgattttttgccgttgttattcacaagatacttgaacatgtttgaggttcctatatcaagtcggaatgggtcatacccctttccggtggaggttcctgggaacacaaggtttttattttccagcaagacaagaacactttccaaggcaattgcaaagtcaattgtataccttatgaagcctaaaagtttagcattcgagtattttgagaagctcattaatcttttggaacagttctatcatccatctaatgggggtcgatggacctactcattggagcggttcctgcggcatcttgttgtttactttgaaaaacgccttcaacaagaacaatttgatacgacggttgaggaacatgatcaaacttatctgggaaaggaagaaagggttgtttttatcaaagctatcttgaaattactggatcgtggccagtacagcaaggacaattctcttgctgaaacagtttccattgcaatttccatcctgtcttatgtggagccaaccctcgtgcttccgttcgttgcaacgaacttccaactagccttagagacaactacagctacccatcaattgaagaatgctgtcacatctgttgcattttctggacgtcctcttcttctgtgttctttatgttcatctcagtctgatgatagtagtgttgttgattcattcagtgatcttattgtcacttccctttcaaatgcattacttggcatggatgccaacgatccacccaaaactattgctacaatgcagttaattggttctatattttcaaatctagctacagttggtgataatgatgatgtgcctgcatttctccaatctacctctctatcgaactggctagatgaattcttttcccggctgttttctgtgcttcaaaatttggaatcaagtagtccaattaatgaaggataccaaacctccttcatgtcagggacttttcttgttgaggacagttcatattacttttgcatgcttgaaattcttcttggaaagttatcaaaacctttatttaatcagtccctgaagagaattaccaagtttgttaatgcaaatatcctccctggtgctacttcagaagttgggcttctttgttgtgcctgcgttcattcatatcctgaggaggcttcagtccaccttgtaaaacctatcttaatgactatcatgtcctcctttgaaggcaccccgacaacaggttatgttggaagagcagttcctgacaaaatgtctaaaaaggctgcactttctcctgctctggaaacagcattagactactatctgagggttttggccatagccatcacttatgctggtcccgtgtcactcaagtataaggaagaattaaatcacataataacagctgcatttcaggccccttcatggaaggtcaatggagctggggatcatctccttcgctctctgctaggaactttggtttcctattattcgacagatcagcacaagccattcacttgtcagcctattggtaatattattgaaccatggggttgttcaaaagctcatcaggatagggaggttgaaatgcttaatttccctccaaagtggcatgatcccagtcaagatgaactctcttttgcaaatgaattactacaatttcattttcaatcagctttagaagatcttttgactatttgtcagacaaaagttaattctgagacaggagatgagaaggagcacctaaaagtaactctattgcgcatcctctctgcattgcatggtgtcatgtcttgcttgccagaaatgcgcccatcgtacaaagatgggaggtcgaaggaagtggagcccatattcttcatcgcaggatcttatggtagcaatgttggcagctctgaaatgcgtgaaaaggctgcagaatttgtgcatgttgcgtgcaggtacttattaaaggaaagaactgatgacagtattctcctagcacttgttgtccgtgtcattgatgctttggtaaactatggcagcttgtaatatctagaatggtcaagccatgttcaagcttggaagctagagtctgcttctataattgagcctccatgtaacttcattgttccatttcatgctcaaggaaaaaagaggcctagatgggcgcttgtagacaaagcaaacttgcatagtacatggagatgttcacaatcatcatatcacagatacagaacgaatgcagatgtatctccatctgtcctcatgactgatttgatgagtgatctcatagatctctcactacacaactatgaaactgttcgctcgtatgctggaagatccctaacaaaattattgaagcgctggccttctctaatttctaactgtgttcccacacttactggatatttgcgcgacccgaaagctcctgaacatgtggtacttggttcttgcagcattctgtcatcacggactgttttaagacacttgaccactgattctgtttccctctcttcttttatcatgggcattctggaaagctctcatcatgaatcgttgaagtgtcagaaagctattactgagctctttgtaatgtataatatatgtttctctggaatatcaaggagtttctttaaaaactctgaaagtcaagtcgacaagccggtatttctcagtttagttcctcaaatcaatgctttgggctttgagactaacagcctacattggaggtacaatttgatggccaacagagtacttctgctgctaattttggcatccagaaatgaatctggcatatattcacaaatgctggcagagactgctggtcatttcttaaagaatttgaagagtcaactgccccactcaagaatgcttgcaatatctgcgctgaacacattattgcaaggatcgcctcataaggcatgtccacaaggttcacagcaatcactagatcaccctgaatattgcaacacttcatcgacaggagaaattttgaatcagataattcaagaggaaggattcatgaatgagacactgaacagtttatcgaatgtccatattatttctgataatgatggttcgtcaaaagcgagttatggggcttcatcttttcaaagcggatctgacaaagcaatcactaatttctattttgatttctctgcctcatggccacgtactcctagttggatttctttagtgggtggtcacacgttctattccagctttgctaggatattcaaaaggctcatacaacaatgtggcatgccagtaatgtcttctcttcagaccgcactggaagatttcctaagttcaaaagagagatcaaggcaatgtgtggctgctgaagccatggcagggatgctccactctgatatcactgggaatttggagtctgagaaaaactggttgatggttcaactgcagaagattatgttagtgccatctgtggaatcagctcctgaatgggcagcttgcattcgatatgctgttacaggaaaagaaagatctggaactcgtgctcctgttctcagacaaaaagtattagagtgcttatgtagtcctgttcctcaatccatggcaactagcgtacttgccaagagatatgcctttttatctgttgctctaatagaaatatctgcaccgaaaatgtctccagcagagaagcaataccatgttaaaattcttgatgaactacttgacaacatgaaccattcatctgcacaggtaagagaagcaattggtgttgccatgtgtgttacatgctctaatattagactttctgaatcatttggcactggttgctcaccggaagagctttgtggggatgtacgcatgattgaacaaacaggaaatgaatattggtctaaatgcttgacagatggagctaatgaattagctgtaagtatacaaaacagtattcaatctaagcaaccggagttgacatcagattcggctgctgaaaatagcatggatcatggagagcaggctgacgctaaaaggatggaaacgatttttcatttcatgatcgcatctttgaagtctgggagatcttctgtgctactggacattattattgagctcttgtacgctgttctctcactacaggaaacctcaaataaggacttatcgttgctcgctaaatcagcttttgagttgctgaaatggaggattctacatcggccttttcttgaaactgctatttcatctattctttcttcagttaatgatcctaactggcgtaccagatctgcactgctatcgtatctcaggacctttacatacaggcacacattcatcctttctggctcagagaaatcacaaatctggcaaacaatagagaagttacttgtggacaaccaagttgaggttagggaacatgctgctggtgtacttgcaagcttaatgaagggtgtagatgaagatctatccaaggatttccgtgatcggtcatatgcacaagcccagcgtattattgttgcacggagaagaaattcaaaatcaggccactctgttgctagcattcatggtgcagtccttgctctgacagcttcggtcctttctgtcccatacgacatgcctagctggcttcctgctcatgtcacgctacttgctcggtttatcagtgagccttcccccataaaatcaaccgtcacaaaagctgttgcggagtttaagcgtacccatgccgacacgtgggggatccagaaggatgcgttcacggaagacgaactggaggttcttcgtgatacatcatcatcctcgtcatactttgcttagatcaaaattccgattacagggtatgctctaataccgtgcgatgtatatgaatttgtgacagttgagctgccagtgttgctcatatagtataatcttgtatcatatttgcttttctccattattaaggctttggcttcgtacaagtgggatggtgctatgcgcgcgcgtttgtatgtacactataaagataggttggtttaggaaaattacgtaagaagtgttttatgctgcttgtagacaaaagcaaacttgcatagtacatggagatgttcacaatcatcatatcacagatacagaacgaatgcagatgtatctccatctgtcctcatgactgatttgatgagtgatctcatagatctctcactacacaactatgaaactgttcgctcgtaagttctctcttcccccttggttataagatggaaatgtcttagctttagtactcctgccggtcagatttaagtg

SEQ ID NO: 18088 - DNA, 445 bp, Setaria italica
  Peptide Sequence Number=SeqID_84062
tggaccacttcttcctcggtggtggaggaattgcagcttcaagatattcatcaactgtgcgcttcatcaatctagaggacaactcggccttatcagatggccaaggcttgacttcaaagtctccgcagcatcagaagtagaactgttgggggcgtcgagtacttcctcatcatcatcgctcttagcgctctctaccgtatgcacgcgtggagtagcttcgcaaatatcttccgatccgggaagaggcgcagagcagtgcaaattaacatcttcttgcacataaagacaagttggtacacccaaacaatataaaataagtactcggaggtacggccacaagtacttttaggctttggtaggttggcagcgcaaaattctcgcacaatggtggggatctcgcccacattcttgaacatccgcctcaacctcgccattgattttcctt

SEQ ID NO: 18089 - DNA, 604 bp, Setaria italica
  Peptide Sequence Number=SeqID_84063
ggttctattgtgcgtgatccttgagattgaagatgaggatgagggatcaattttttatgcaattccacaaacttggctgttcaagttgatgacaagaagacagtcgggctaaatgcttttgcacgaatagcaccttcatgcccaataatagctgacttagttactgtccacaatctgtttgatgtacttacaagttcatctggaggccgattgcactttcttgtatatgacaagtatctcaagagtttagacagggaactgaggtctgtgaaaggtatcatgcaatcgccacttgcttcgagtcttcatcttgatgctggagagtgtatattagctattgatggagacaagcctattcatcctgttttgcaacatatcgggatatcagcatggccaggaagattggtcctcacaacacatgctctttattttcagagtatcagagtgggttatggtgataatattgttaaatacgacttggcaacagattcaaatcaagtgattaagcgtgatttgactggaccactgggtgttcgcctctttgataaagctgtgatgtacaaatcaagcactttgacagatccaattttatttcgatttccct

SEQ ID NO: 18090 - DNA, 911 bp, Setaria italica
  Peptide Sequence Number=SeqID_84064
ttagttaaggtttaggttaagttaaacttaagttcgggtattcctaattcgtctagtaggtagtcattttgcgacaccgccggcctcctccgacgcggcagcggcccccggcgcccggatgctatgctgctgagctgcaggtccctcgccacctgggtgcgccgcctcgtcgcttgcatgggagcagaggttgctttggttgctgtgctaagccaactcctataactgccgtcgacgagccttccaagcggttgaggatccaggggcgctctgtgaggaaggctagcttgtcggaggacttttggagcacgagcgctcatgaggtggagaacagcgggatccaatcgcagaggagcatgtcttcgatcagcacggtcgcgcagtccagcgatcagcatggtgcaggaagtagcagcaatccaaatgagtttgtaaatcaaggtctcatgctctggaaccagaccagacaacagtgggttggaaacaaaaaacgccactctcgatctcaacagcttcgagaaccaaaattaagttggaacgcaacatgtgagagtctgctagggagcaacaagccattctcccaaccaatacctcttggtgaaatggtagatttgcttgtggacgcttgggagcaagaaggcctgtacgattaggccagtgaagttcattgtttgactcagattaatctcttaattgtattcagaactttagatgcacaaaaagctctaggttcttgaacgcattacatttcctgagctcgatagtttatcatgaaacaaggcagcatccttatattaatcaattgtaatatattattcccgtcaagcgaatgagatcatttgatgatattagtaaaaaaaattcaattgaaaacatgttgggagaagaattaaaacttagaactacgtaga

SEQ ID NO: 18091 - DNA, 412 bp, Setaria italica
  Peptide Sequence Number=SeqID_84065
ctcgagagctcgacacgtggggcccgcgagccctacgagcaactccattgctcgctctttggctctttgcatttcttgctcgctttcgtgtccatggcgattggcgacatatgcatgcaatgcaactggtctcgcctcatcgtgtcggacgctgattggtccgcagctatccctgtacttcctgcacccataccccaaggattcggacaagatcatgctcgccaagcaaaccggactcaccaggagccaggtgtccaactggttcatcaacgcgagggtgcggctgtggaagccgatggtggaggagatgtacctggaggagaccaaggaccaggacggcggcaacgacgaggggaagtccggcggcgggaccaagagcggcgacacgagcaacggggtcgacggcgtcacg

SEQ ID NO: 18092 - DNA, 1002 bp, Setaria italica
  Peptide Sequence Number=SeqID_84066
tcttgcttgatcgattttactgctattgcgatggtttaagtaaaactgtgacggactcgatctttattaggtgtccaactggttcatcaacgcgagggtgcggctgtggaagccgatggtggaggagatgtacctggaggagaccaaggaccaggacggcggcaacgacgaggggaagtccggcggcgggaccaagagcggcgacacgagcaacggggtcgacggcgtcacgccgagggcggacggcggcagcggcgccgccatgtcgaaggccgcggggcgcgtgggggcggagggcgcgtcgtccgccaagggcgtcggcggcgtcgtccacggctccacgctgctcgagctcgccggggaccagcacacggcgcaccccggcttctacgaagacgagggtgacgacgctgacgacgtcgagcgcaggctcaagaaggcgaggggagacgagccgggggcaccgttccacagccaccacgtgcacgacatggcggcgctgcacgcgcaggccgcggcggcggcgaggcagcagcacgaggaggtgagccaccgtgagctgctcatgaagttcatggagagcggcggcggcggcgccggcgccagggaccaacaccaccaggacggcggcgggtactccctcttcgccccggggccgtacgggcagttcggctcggagccgttcgcgttcgccgggaacggcggggtgtcgctgactctcggcctcccgcacggcgctggcggcggcgccgagcagacggcgtcgttcctcatgggcagcagcgccggcggcgacggcggcagccacggcggcgccggcggctacgacatgaacatgcagagcaccaagtccttcgcggcgcagctcatgagggacttcgtcgcctagctggtagcgtagcagcggtccatgccattaattaatcactccatccatcgattaatacgaatttaagggacttagtaataagaaaataaaaaggttacaaggacctaaaacat

SEQ ID NO: 18093 - DNA, 594 bp, Setaria italica
  Peptide Sequence Number=SeqID_84067
tcaatgtcgtagccgcacggcggcagccacggcggcgccggcggctacgacatgaacatgcagagcaccaagtccttcgcggcgcagctcatgagggacttcgtcgcctagctggtagcgtagcagcggtccatgccattaattaatcactccatccatcgattaatcgatttagggcttgtatagaaataaaaggttcaggcctaaacatgcttacatgtttaagcatgcagttaagcttggactataggttttgggcatgaaaagatgggatatattatggggcgatgtatataggtataggatggtagccaactagttgatacccaaattaaacattgtacaagattttatatgtagatgatcataggaattggggggggtatacagtacaatatgtgaaaggggtatattggaattggaacttggaagtgtatgtggtagaagttggccaattagtatgtagtataattcagtattggttttggctactgcaataatgtatatgtaaacctagcacattgaaaactcactggaagcaccatgtgctggatgacattgtggatagttctgcccctgtaggatattatttct

SEQ ID NO: 18094 - DNA, 385 bp, Setaria italica
  Peptide Sequence Number=SeqID_84068
taccccaccgacaacgagttatctccgcccaccaaagacggttgagtactcgtccacactatcattgccgacgtgctctccgttaggcaattccccaacaacattctcggcaagttgctattccggataaggatgatgcagtttctattgctatagtgactcggagtggttgatatgaatggtcctgctatcagtagtatgaaaaagtttggtcggtgtaatttttaaatttctttatttgcacattgttgtaagctagtgtctgccacttatctgtaatctgtgtggtggtttggtgactagtagaaaagagaatttggccagtagacatggactcatgcagtctgcctgtctactcctttagcttttctcgctttacgactta

SEQ ID NO: 18095 - DNA, 446 bp, Setaria italica
  Peptide Sequence Number=SeqID_84069
gtgactgcgagacagcagcggtggcggtggcggctgcgctgtgactccaagatccggcgcagcgctgcgaggggccgacgcgatgctcatctccaagatccagtgaggaggggcagagatcccctctagagctgcgacggggcagtgcggtgctcatctccaagaaatcccacgacaacgagttatctccgccacaaagcggttgatactcgtccacactatcattgccgacgtgctctccgttaggcaattcccaacaacattctcggcaaggtaatgatactgtaatctcaacaatactggacttgtgttgtttctgccatagctcggaggcccgttaagaatggtcagagctggatatttacctggaggatcctagagtccttgtgagttcagacgagcacttcaatgttcttgcatggtggaagaagaattctaatgcttat

SEQ ID NO: 18096 - DNA, 655 bp, Setaria italica
  Peptide Sequence Number=SeqID_84070
gaggtcggggacgaaggtctggataacgaaggacggcgagtggttccgcgtcgggtagcagacgtccagcgccgccccgccgggtgaccggatggagtaggggtggaagtactccggctggtccccgttcttgagcacgaagttctggaagaaggagttggtggggagcggcgcggcgaggagcggcggcgcgaagaagcgggatgggtcggggagcaccgtggaggtggcgcgcgggaacacgtggccccccggggcgtggggcggcgggcggtggctgccgtggtgcggcatcgcggaggtggggaaggggaggagctccggcggctgcggcgggatcgaggagacggggggcggagggggaggagcgggaggggtgggcctgggccgggagaaggcgaaggcgggcttggaggtgatgaggcgggagagagtgtggcccagcttcttcgtccacttccgcatcgcgcttggttccttatatactgctgccgggtcgtggcctggattgggctgggcttgatctggttttctttgttcctggtgtttttgttatatttttctttggtttttggctggttttctccggttttctagtatttttggattttttgtgctagttttgtccaagctttgacttggccaaagcggtggt

SEQ ID NO: 18097 - DNA, 287 bp, Setaria italica
  Peptide Sequence Number=SeqID_84071
ttccgtattcccctaccaaaccaagaggaaggaaggaagcgcatcgtattcgcgtccgcgattcccagcgcaccaccgtgcccaattctcaactccccgacacgccaccgcccgtcgcaggcatccgatccccaccccatccaggtccagggcacctccctctttcccgccgccccccctcccggccggatcccgctcgcgatgaagatcacggcgctgctggtgctcaaatcccccggcgattcctccgcctcctcctcttccgcctccggaggtggggagcagcg

SEQ ID NO: 18098 - DNA, 489 bp, Setaria italica
  misc_feature (449)..(489): n is a, c, g, or t
  Peptide Sequence Number=SeqID_84072
aaagctcgccgacatgatgaaagacaagaccaccgctcagatccgcgagatattcaacatcgagaatgacttcgcaaaggagcaggaggaggagattcgccaggagcacgcctgggccttcaaaatctagaagccttcggatccacttcgcgctgcgctcacatctcactggatctgccggtgccagccttagcggttccgttctactacctcgatccttccttacttgagttaatcgtagtggttgcttgacttgcttcttagtactagttcttagttgtcggatggggtcaggtcaagtattcggtcgtagcaaattcagctcatcctttcgaagaaaaacagaatcgaatgtgtggtggaagttttgaactgcttgcatgaactgatgaatgaatatcacatccagaattgcccgtaattttccggccaaaaaaaaaaaaaaaaannnnnnnnnnnnnnnnnnnnnnnnnnnnnnnnnnnnnnnnn

SEQ ID NO: 18099 - DNA, 317 bp, Setaria italica
  Peptide Sequence Number=SeqID_84073
cgggcgccgtcgtcgggagaagatgacttgtacaacgcgtcggcgtgttctcggagcacgggcattcaatactgtacacgtcggctccttttgcctatgtggcgctatatagacgggtggcgtccaactgatgtacgtgccctgatgggacgccttaattttggccgtggatgattggtcgcggccggcgcctggatggaaaatctagcgccggcgggtgggggccgtcgtcggcagcgatcttgggggactagctggggccaaaaacgccgaagtataccatgccggcggagaggcacatgaagttgcccgcatgc

SEQ ID NO: 18100 - DNA, 393 bp, Setaria italica
  Peptide Sequence Number=SeqID_84074
ttcttctcggtgttcctcgccgtctccgtcgtcggatgggtcgtcttcacatttgctgcgaggttgttagcttggttcttgagccgtgttctctcagcttctgttgggtttcgagttgctgggttcaattgcttgcgcgacgtaacgataaagtttcataagggtacaattgaatctgtttcaattggtgaaataaaactaagtttccgcaagtcactggtcaaactaagtttcagttttatctccaaggacccaaagttgcagttgcttataaatgatctcgaaattgtaactagatcatcacaaaacaaaaagataagaaagtcagcaaggcctcgctctacaggaaaagggaaatggctggtcacgtcaagcatggcaagacttttacag

SEQ ID NO: 18101 - DNA, 284 bp, Setaria italica
  Peptide Sequence Number=SeqID_84075
ccagtcccacagaccaccagagtccaccaagccccgctccggcgctccccaaactcatctccctcgcaatggccgcgccgcctctccagcccgtgccaacccccgcggcctcgaacggggacgcgttccgcttggggttcatcggcgcgggcaacctggccgagagcatcgcccgcggcgtcgcggcgtcgggcgtcctcccggcctccgccatccgcaccgcgccccaccgccgccccgagcgcggcgcggccttcgcctccataggcgcgtgcctgctcgac

SEQ ID NO: 18102 - DNA, 546 bp, Setaria italica
  Peptide Sequence Number=SeqID_84076
tggctgagtttcttcttagtgcaatgccgtgggggcgatctttcccccaccggtcgagtttttttttccaggtcatccttcctgctgttagttttaaaacaattgttgatgctgctgtctttttagcgatcaaggtggtcaattgtattcaaagtggctgttagttttaaaacaattgttgatgctgctgctttttagcgatcaaggtctccaggtgggtaaatttgtccactgcctccaaggtcagtggtagattattgtggccgtgctttcaggtcaatggaactaggtctctgtcactgatgctgatgtagattttgtccgtacacgtgacgcttaattcgcaccgctaattttgcaggcgattgactttcctggagggaaggtttcatttatggctgaaatgaacttccttccggagtcacacggtaaaacgatcaaatgttatcgtgttcttgatgacgacggaaaagctatatctggtagtagattccaagaggtcagtaaggaggtggccgtgaaaatgtacagtgagatggtcaccct

SEQ ID NO: 18103 - DNA, 222 bp, Setaria italica
  Peptide Sequence Number=SeqID_84077
ttgtttctttattagtcttgaagggagaccgatttagttgaggccctgacttacagagttggccatcactcgacatctgatgattcaaccaagtacaggccagttgatgagatcgagcattggcgaacagcaagggatccaatttccaggtacagaaaatgggttcaggggaacgactggtggtctgatgctgaagaatctgaactaaggagcagagtgagg

SEQ ID NO: 18104 - DNA, 508 bp, Setaria italica
  Peptide Sequence Number=SeqID_84078
ctctctctctctcatcttcttcttccattgttcgcttgcttgctcatgtcgtctagctctatccaattccaacacggccacctataaaatacgtccgctcgagagctgagcttacagcatttgagggaattccagcttagcggagagagcacggggagacccggcagtgtctgacatggcggcgatgtggctggcgcgccgcgcagcgaggaggctcccgccgcttctttcgcgccagggcggcgaacccacccgcccatggttcttgggctcaacagcgccgccgccggttcttggttcgccaccgctaccggcggtggagagaatctttcgccggggcttctgctccgtccggcgcttcgccggggagagcagcgccgccgcggccgccgacgcggacgaggaggagccagagaacgggttcgccggcggcgatcaggcgattgactttcctggagggaaggtttcatttatggctgaaatgaacttccttccggagtcacacggg

SEQ ID NO: 18105 - DNA, 463 bp, Setaria italica
  Peptide Sequence Number=SeqID_84079
ttggggtgctgattgcccatccattgttgcggcagaagaagatcaccggtgcttccataacagctgaacaattcagaagtgatggagtggttatccgtggccaggcttatgggatccgtggtatcagagtagatggcaatgatgctcttgccgtttacagtgcagtccatgctgcccgagaaatggctatagctgaagggagaccgattttagttgaggccctgacttacagagttggccatcactcgacatctgatgattcaaccaagtacaggccagttgatgagatcgagcattggcgaacagcaagggatccaatttccaggtacagaaaatgggttcaggggaacgactggtggtctgatgctgaagaatctgaactaaggagcagagtgaggaaagagcttctcaagccattcaggttgcagaaagaatgcaaaaaaaccaccaagttgctgagctc

SEQ ID NO: 18106 - DNA, 613 bp, Setaria italica
  Peptide Sequence Number=SeqID_84080
cttagtagtataattgatctgagtattgactgttcaactttcaggccgtcgcactagtagttggccatcactcgacatctgatgattcaaccaagtacaggccagttgatgagatcgagcattggcgaacagcaagggatccaatttccaggtacagaaaatgggttcaggggaacgactggtggtctgatgctgaagaatctgaactaaggagcagagtgaggaaagaggtatattgctgctacgcaaagatttatctttccagagcactgtgatacataatacatggcatttttaaccacctgttaacttctgtgcagcttcttcaagccattcaggttgcagaaagaatgcaaaaaccaccagttgctgagctcttcactgatgtttatgatcaggttccttccaacctgcgtgaacaagagcaattactgcgggatacaatcatgaagcaccctgcagattacccaactgatgtacctgtttagtttcttggccttagatgagcaatatcgttgtgtaagtattgatgattcagatccatatagcattataaataatatagtaattcagccaataaaaaataaaaaaaactaaaaaaagagaactagcc

SEQ ID NO: 18107 - DNA, 445 bp, Setaria italica
  Peptide Sequence Number=SeqID_84081
cataatgatagtgtatgtatgctcatttggtgcaatgccagcaattagccatcttgtcaagcacagaaacggctctttcaacctgatgctttctaattagcccatggataagagcattgtaagtcattacagtaggagcacagccacttcgccgcatcagatcaagggtatccagagcccttttcatatctccagaaactgcaaatccttctataataggcctgaatgttctatttgatggttgcattcgttccttctgcattttttcaaatatgcgaatagctcgatccatatttcccatcttacaaaatgcctctatcagcaaattgtatatggcacgatcaggctgcaaacctgattttagcatgtcctcgaatatgctaaaagcatttgcaaagtcatgcaaatggataaatccattgatcagcatagagtaagttttgtt

SEQ ID NO: 18108 - DNA, 402 bp, Setaria italica
  Peptide Sequence Number=SeqID_84082
cgaacagcgccgcggcttcctcgaaccccacggacaccgcggcgccgccggcgcccatcaccccgagcaccacgtccatgtcgatggcgctggcggcggcgggcttagtagtcggcgacggcgcggcgattgcggcaggggcgggggcagcctcgtggcggcgggacgaggaggcggaggacgacttcttgacggcggtgaggaagacgatgacggcgtggacggagagtgtcagcacggcctgcgccagggacagggagatgttgtgggaggaggacgtgctgggcgcggacgcggaggccatctccattgcagcagcgtctctgacgagagcctcgcttgacctgatctctgtctccttggtgctttggatcctttgcccctgtgcgacttggttgggtt

SEQ ID NO: 18109 - DNA, 362 bp, Setaria italica
  Peptide Sequence Number=SeqID_84083
gtccggaggcttgccgccatggcaagcgaggaagatgcaaatatctaagcaacccctccacccccccctcccttttgactcatcaagaagcgggcaggcgggctggctggtccgtagccgccgggctcgtgtgctcttcgcacaagcaaggtactaggcttcggggcgccgttgcgacggcgccgcgcgttggagatgatcggacggggcggtggtcgcggcatgcagaggaaggacgcgggggaggagtggccgaacctcgtggacgtggttctgtcctggagcctcaaggatgtcatgaacgagggtctcttcaaggacaaggtgaagaagataccgtccacattcagtcacctcaagag

SEQ ID NO: 18110 - DNA, 282 bp, Setaria italica
  Peptide Sequence Number=SeqID_84084
cgatagtacccgacgccgcaaattgctcctgttccccgttgaccatcacaaacccaaatctccatcgcgtgattcgttggccgccagacgccgccggcgacgatcccgtcccacactcgcagcttcaaatcggctcgcatcgctatccctggccatccgacgacccgccgctgctctattccttatccccacaaattgtgcctgtttcctaatccacaccgccggaaaactcccgaaatccccatccccatccccatcgattcctttcgccgccgccctcgg

SEQ ID NO: 18111 - DNA, 296 bp, Setaria italica
  Peptide Sequence Number=SeqID_84085
ttcttgaatccacaggcaccaccgtcgtcgtatggcccggcgccggtgggcgcgccgtaccaggtggccctcgcggcctcccagttggggtcggcggtgaagtcggaggcgttgaagctcaccggcctagcgcacgagccatacgtgaccaggagcaagaagatcagtgcagcaagtgcggctaccttggtggagaatgccatcttactaagctaggcaaccagcgctactaaggacaagcttgcaagcttgggagggtagtttgttctaccactgggcagacaggagaagttgtg

SEQ ID NO: 18112 - DNA, 756 bp, Setaria italica
  Peptide Sequence Number=SeqID_84086
cgtgccgctgaggtcaaagtggtaacttggcgactgggtagtagttcatgtcagtgattgccaccgtctccggattgccggagcatgcagggtggttgaggcatcttatctggtagcacgagccgcagcccttgccatccttgaacaggggctggttgccgcatgacgtcatggccgagaaaggaggcaggttcacgttcttgaacccgcaagctccaccattgtcgtaggggccagcgccggttggcgcaccataccaagttgccctggcagccacccagtaggggtctgcggtgatgtgggaggcattgaagttgacgatcctagtgcatgagccatacaagacaaggaggaggaagatcagtgcaccaagtgcaatcaccttggacgaggcgatcatggatgccatcttactagctagatcgttagctgctagtactaggcaggcatgaagctctctgtttcgatggtcagcgcgagaagcaccttgccaggatatcctttggtaggggggtcacatggctctggagcaaacgcagagcacctgatgtctttttggtggagggttacatggctcttgctgcttgcctaccggcttggtgctgggtgtcggctgcttccctgtcgctcctctgctcctgctacgccaggctgtcggctgagggcgccgccggagagccagcccacccgccgccgctgccgcccgccggatctcctccgcgcggccgcgcctcccttgccggacgccggctcgct

SEQ ID NO: 18113 - DNA, 1135 bp, Setaria italica
  Peptide Sequence Number=SeqID_84087
ttttaagaaaaacctttttatagtcttgatcacactgataaatacattgacactgggcgagaaagcacatccaaactagcctcctcatctcctactctgccaatcttgctgaaacacaacacctacggcattgccgggcttctggttcctcacttaattactactacctagtaaaaacgcaccaaccatatacaattaagccaatgacagcgagttacagagcgcagtggctgaactagtattggatgatggagcggtagtaggtgttaggcgcccagttggccgggatgacccggttggccaccagcttcctgccggactcgttggtgatgcgcagcgagaagggcgcctgcagccggtggttcgagtccatcctccagatggatccccaggactcgcgcatcggcgtccagtacccggagttggcctccatgaggtccacctgcaccacgtcgccgtcgccgtgttcgaactacatcgagcacggctcaaaccctaactacttggcggtgctcgttgtggaaggtcaccatctgcccggggtagatgcagggcaccctcttgaactggatgtcgatgatgccggcgtggcggagctcatcattgcggccggctttgccaaggcaccaaacgccggtgccgctgaggtcaaagtggtacttggcgactgggtagtagttcatgtcagtgattgccaccgtctccgggttgccggagcacgcagcgtggttggtgcatcgtatctggtagcaggagccgcagcccttgccgtccttgaacagtggctcgttgccgcaggacgtcatcgccgagaacggtggcaggttcacgttcttgaacccgcaggcgccaccgtcgtcgtcaggaccggcgccggtgggtgccccataccaggtggccctggcggcctcccagttggggtcggcggtgaagtccgactcgttaaagttcaccggccgagtgcacgagccatacgtgacaaggagggagaagagcagtgcagcaaatgctgcagccttggaagaggaggccatcttagctcagtgcagcaaacacaaattctactccaagcttaagatctactgaaggtatagctactgctagtaccgagcagacactaagattcggagttttt

SEQ ID NO: 18114 - DNA, 668 bp, Setaria italica
  misc_feature (1)..(11): n is a, c, g, or t
  Peptide Sequence Number=SeqID_84088
nnnnnnnnnnnttttttttttttaacgcaaattcacaggaatattatagttttcatcatcaaatttttgaagacacacaacacctcctacagcatagccgcataggacacccgacatatcacttgtcacctgcaaattaactacggcacatcagtcccatgcaaacgagacaacaccaaacaaatcaagccaataacgccgagaattttcgtgtccagtccagcagcagagctaataaccagtccagcagcagagccaatatccagaccatcatcagagctaaaagcctggtactggatgttggagcggtagtaggtgttgggcgcccagttggccgggatgacctggtaagccaccagcttctggccagactcgttggtgatgcgcagcgagaagggggccgtgagcggtcgtctggtgtccaacctccagatggatccccacgactcccgcatcggcgtccaccacccggagttggcctccatgaggtccacctggacgacatcaccgtcaccatcttcgaactcaacgagcaccgccaagtagttagggtttgagccgtgctcgatgtggaaggtcaccatctgcccggggtagatgcagggcaccctcttgaactggatgtcgatgatgccggcgtggcggagctcatcattgcggccggcttg

SEQ ID NO: 18115 - DNA, 811 bp, Setaria italica
  Peptide Sequence Number=SeqID_84089
tttttttttttttacttaatggtgcacaaaacagtgtttataatttaaaaccttgatcacaccattacattcatagacagtgggccgggaaagcacatgcaaacttgcctcctctatttcccacacgtcaatctcttacagacacaaacaactcctactgatgccagcatagccggactcctgatacctcacctactaactaattaaggcacctcaatccaatggaacaacgaaatagtaccaaatgaatcgaaaatctatcagtgaccgcattattgttggcagaaccagatcatgcatgagctagtactggatgatggagcggtaataggtgttgggcacccagttggccgggatgacctggttggccaccagcatcctgccggactcgttggtgatgcgcactgagaagggcgcctgcagccggtggttggagtccagcctccagatggatccccaggactcgcgcatcggagtccacgacccggagttggcctccatgaggtccacctgcaccacatcgccgtcgccgtcttcgaactcgacgagcaccgcgaggtagacggggttggagccctcctcgacgtggaacgtcaccttctggcccgggtagttgcagggcaccctacatgaacatgccatgtggtatgtttaatttgggttaaggatttgtcgccaggcatgcaaaaaacgccaaattgtaaagtggaagtacgctactaatatttgtgcgaatctacttaaaccggtcgttgtcgttaaatgttgattgagcaaaagtacaaaggctccactaacaaaagtagctctt

SEQ ID NO: 18116 - DNA, 1265 bp, Setaria italica
  Peptide Sequence Number=SeqID_84090
ttttttttagttttacttatgtagcacacaaaatactgttaataatttataatcttgatcacactggtacaagcgtatcgacaatgatgggcgggaaagcacatgcaaactttgcctcctccatttcccagtcgtcaaatctccgaagacacgtacacaacaccacctaaagcatacaaggacacccggcatattcaccggctaattaatcagtagtaactaataaggcacctcaatcccatggaaacgatgcagtaccaagctaatcgagccaatgatgccgaattatcgtgtccactgccgtgtccagcagcagagaccattggttgctagtactggacgatggagcggtagtaggtgttgggcacccagtttgccgggatgacctggtttgccaccagcgtcttgccggactcgttggtgatgcgcagcgagaagggcgcctgcagccggtggttggagtccagcctccagatggatccccaggactcgcgcatcggagtccacgacccggagttggcctccatgaggtccacctgcaccacatcgccgtcgccgtcttcgaactcgacgagcaccgccaagtagacggggttcgagccctcctcgacgtggaacgtcaccttctgcccggggtagttgcagggcaccctcttgaactggatgtcgatgatgccggcgtggcggagctcatcgttgcggcctggcttggccatggcgccgaacgccgtgccgctgaggtcgaagtggtacttggcgaccgggtagtagttcatgtcggtgattatcaccgtctccgggttgccggagcacgcagcgtggttgacgcatcgtatctggtagcaggagccgcagcccttgccgtccttgaacagtggctcgttgccgcaggacgtcatggccgagaacggcggcaggttcacgttcttgaacccgcaggcgccaccgtcgtcgtaggggccggcgccggtgggcgcgccgataccaggtggccctggcagcctcccagttggggtcggcggtgaagtcggaggcgttgaagctcaccggcctagtgcacgagccatacgagacaaggaggaggaagatcagtgcaccaagtgcaaccaccttggacgaggcgatcatcgtcgatgcctagctcgttagttgctagtactgggcagacaggaagctctgtagctcagtgcagcaaacacaaattctactccaagcttaagatctactgaaggtatagctactgctagtaccgagcagacactaag

SEQ ID NO: 18117 - DNA, 299 bp, Setaria italica
  Peptide Sequence Number=SeqID_84091
ggaaatttcgccttgggagctatctgcgttcaaatccagttggtgctgtgtgcggcagctgctgcaagccaactatttcctaaggcttgtggtcttgtggacctagcttggcaagtggctaactgaggcgacctcccatggaaaagagctgctcctagtacctttcaatgcgcaactgcagttgatgttgcaggttctgtcagcaagtcaaaagcttacctttcaaaggccacggaggggaaggtgcaagaggaaccatggccctctggaatggccttgggcaggtggctactgttgcg

SEQ ID NO: 18118 - DNA, 415 bp, Setaria italica
  Peptide Sequence Number=SeqID_84092
tcctccagcagagcagcgtcgaatggtgctcgtcaatctggctcgacacgcttaaagagattgatcccactttcaggcgcaccatggtagtcatctccaagttcgacaatcgactcaaggaattcacggagcgttgggaggtcgataccttcttgagtgcaagcggctaccttggggataacatccacccattcttcgtggctcttccaaaggaccgtggaacaatttccaatgaagaattccggaggcagatctgtcaggttgatattgatgtgctacgtcacttgcgagataatgtgaaaggtggctttaatgaagagaaatatggatcacacattgggttcagctgccttaggaagtatctcgaatctgaacttcagaagaggtacaaagaagctgctccagccaccctggc

SEQ ID NO: 18119 - DNA, 264 bp, Setaria italica
  Peptide Sequence Number=SeqID_84093
acaacagaataagctttgcaagcgctacttctctgcaatgggtgatggatgagattagatgacataagatcatttttcaagggccttctggatgccttctgcgaattcaaacaaacaccaaccatagataaattatgcagaacatgtatgtgtgtgtgtgtgtgtggagggacaaagagagagggagggaaagatacctcaattgacatcggagtggtcgaagttgcgtatctatccctccctctctcttttgttcccttccta

SEQ ID NO: 18120 - DNA, 915 bp, Setaria italica
  misc_feature (3)..(3): n is a, c, g, or t
  misc_feature (11)..(11): n is a, c, g, or t
  Peptide Sequence Number=SeqID_84094
ttntttatttntttagtttttgttttgtttagttttagttttggtttatttgttagttatttagtattgtactattaagtattcttatttttctaagggtccttctggatgtccttctcaattgacatcggagtggtcgaagttgcgtatctatcaatgaccttcccatttttgtcgacgagaaacttagtaaaattccatttgattcttgacccaaacaaaccaggcttgctcgctttcagaaacttgtagaccggtgcagcatctgggccatttacacgcaccttctgaaaaactgggtattccgctttaaatctggtgcaagcaaagtcttttatctgatcagcagtccctggctcttgccgcaaaaactgattgcaggggaatgctaatatctcaaagtctagcaattttggaagcaacattagtttatgttagatccagataacaaagacagaacagtttaatggaatggcacacgcaaaataattttgatgcaaggttggataagacgatcggtttgatagccacccacaatgaagttaattcaatgcaaatgcgtaacagggtatagtacttgatgcataagtaacaacatatcaacatcattccgacttccgggtgtcatttgaactccttgcagttttgataatttgatttaactccgctgaacacaggccataatttgatgttaggtggctgacaactaagtgtcatgcttttcaatttatggagttgttcaacaatttttggaaaataattcttatgggagcaaatatcttcattggaaaacagagttcccattgccttcagaacctttcgttcaccttcaaaaggtctctgaaagttaggaccactatccaagtggtccctgaaattggtttaaattgaaattttctcacaaaaattggaaaa

SEQ ID NO: 18121 - DNA, 966 bp, Setaria italica
  Peptide Sequence Number=SeqID_84095
ttagtttagttaaaggtttagttaaaatttacttaagggtttaaattttttttgacaagcataagcacaaaccttaaaactataatgcttcaccagtgttacatagtttgcatccgtgaaaaatcgcataagagcaggatggggaagatggtggctagttaatacaatccctactttacacaagaaggaaacaagggcacgatgagcgtgaaggtgaaaatcagggtaatattacacgaatgtactacagacaaacaaagatgcctaaatgttgctacaacagaataagctttgcaagcgctacttctctgcaagtgggtgatggatgagattagatgacataagatctatttttcaagggccttctggatgtccttctcaattgacatcggagtggtcgaagttgcgtatctatcaatgaccttcccatttttgtcgacgagaaacttagtaaaattccatttgattcttgacccaaacaaaccaggcttgctcgctttcagaaacttgtagaccggtgcagcatctgggccatttacacgcaccttctgaaaaactgggtattccgctttaaatctggtgcaagcaaagtcttttatctgatcagcagtccctggctcttgccgcaaaaactgattgcaggggaatgctaatatctcaaagtctttgtccctgtacttctgataaagctccgtcagttgcgtgtaattgacctccgtgaacccacatttggaggcgacgttgacgacgaggaggaccttccccttgtaggtctccaggctcacttccttgccgttgcaatccttgacggtgaattcgtgtatggaggtctccggcacggactcggccgcccccatcccgccacggctcctcctccccttcgctccctcttcccttccctaccgggcggagctctctcgaatcccccgtctcctgatttgattcttctcgtgttctttatttttt

SEQ ID NO: 18122 - DNA, 617 bp, Setaria italica
  misc_feature (1)..(15): n is a, c, g, or t
  Peptide Sequence Number=SeqID_84096
nnnnnnnnnnnnnnnttccccttcggttggttgtcctttggtctagttctttctagtttttttttttttttttttttttttttttttttttagattcagggcaacgagcccaggaacataacattactattatcatatcataactcagttcatcatcatacaggcaagagaggagcatgccgaccaagaaaggatcggcatctccaagattttacagaccgactactgctgatgctaccgaccaaatctagaactaggcactggttttactggtttcatctgacaaagctaggattgaccaaaatccggggaggagcgggggcacatctataggcggaatggcagggggtcgccggcgccggtctacttcttggccttcctcgccgcgcccttcctagccggagatgcagcggcggccttcttcgggcgcccggctttcttgggggtcgccgcggccttctccttcttgggcgtcgccggggcgggcttcttggcggccttggcaggggaggccttggcggaggtcttggcagccttgggcgggcggccgcggggcttgggcgccgcggcaggggcggcggccttggcctttggcctttgggcttgggggacgccgc

SEQ ID NO: 18123 - DNA, 378 bp, Setaria italica
  Peptide Sequence Number=SeqID_84097
gccgcttaataacttggaaacaggtcgagaaaataatgtgggagtgggaaagaaaacatattaagtattaataatatagaccagtaaaagtaaagtgaaatgagaacgcacctgaagaagttgttgacgaggtcgagggcgatgagcgtggcgctgcatcccatgccggtgaggttgtacaccttgacgtcctcgcggaggccgtagcggcgcaccacgcgcgccgccagagacggcgccggcgagaacatggacacgttcacgacgaggatgtcgacgtcggcggggcggatgccgactccccccggcgcggcggaccgggcgaagagctcgtcgaggacggcgtggaaggtctcgtccatctcctccataccccta

SEQ ID NO: 18124 - DNA, 978 bp, Setaria italica
  Peptide Sequence Number=SeqID_84098
ctccggcagggggagcacccggggcgccaggacgcggaggttgtggacgaaggcgtgcacggcggcgcgggggagctccttgccgaggtggaagccggggcggccggcgtcgtcctccatctggagcgcgcagttgtaggcctcctcggaggagcccgtgtgggtgcgcacgacgtggcggaggcggagcttggcgtgcgggcggaggcgggggtcgttggtgaggaagtaggcgcacccgccggagcggaagaggcagttgcccagcatgaaggagcgcttgttgccggcgtaccagttgggcgcgatcgattccgacgtcatcaccagcgccacctgccccgcgtgcgtcctgaagaagttgttgacgaggtcgagggcgatgagcgtggcgctgcatcccatgccggtgaggttgtacaccttgacgtcctcgcggaggccgtagcggcgcaccacgcgcgccgccagagacggcgccggcgagaacatggacacgttcacgacgaggatgtcgacgtcggcggggcggatgccgactccccccggcgcggcggaccgggcgaagagctcgtcgaggacggcgtggaaggtctcgtccatctcctccatcccctccttcaggcggtccggtcgggcctcgccgccctcgatgatgttgcgcgggccgtacgtctcctcgccgatgccggagttgacgatgaccttgagcaggaacttgtactcctccagccccagcagcttgttccgctggatgatctcgccgcacaggtccgtcggcagcttccggtcgtccgtcgccttgtagcacacgtagtccagcaggtagcagcgccgccgccgcgcccgtgccaccagcagccgcgccagcatcgccgccgagcacgccagaagcgtcagcgtcagcatcgccaccagctccatcgccggcaagctatccactaggcacgccctcctccggctcttgttcttgtcagg

SEQ ID NO: 18125 - DNA, 296 bp, Setaria italica
  Peptide Sequence Number=SeqID_84099
cttggtatggcactgttgttttcaccctcctttttgggagcgagctgttcgaggactacgttggccatcttgcaatggcaacaatggcttccactgagatgacaagcgacaacgacaaccctgaaaagcttcaggacaggctcaggaacgtgcaaagggaaagagaggaaaagctagctagatttctcaaggaattcctctcgcaatatgttcgtggcgacaaagaaggatttgctaatcgtgcagaagctgaggcaaaggaggctctccaccacttcatcgtgggctggatattc

SEQ ID NO: 18126 - DNA, 570 bp, Setaria italica
  Peptide Sequence Number=SeqID_84100
cgacaacgacaaccctgaaaagcttcaggacaggctcagggttagttgactatctgtactgatggtattgtagcacttcatattttggtgcagtgctcttggtttcactctattttattgtgatcaagaacgtgcaaagggaaagagaggaaaagctagctagatttctcaaggaattcctctcgcaatatgttcgtggcgacaaagaaggatttgctaatcgtgcagaagctgaggcaaagaggctctccaccacttcatctgggctggatattcttcgcaccattggatacgtctattctcgacaagcagcaaaggagcttggcaagaaggccatgtacctaggagtgccattcgtggccgagtgggtcaggaacaagggccacctatggaagtcacagatcacagcagcaaaaggagctctgcagctgttgcagttgcaagaggaggcctgccggcagagtagcaaggatggcattgccacggagcaggatgttgacttgcagatgaggatgaacaaggatctgatgatgagctcactgtggaagctgaatgttgtggacattgaaa

SEQ ID NO: 18127 - DNA, 1666 bp, Setaria italica
  Peptide Sequence Number=SeqID_84101
cgaaacctattgttaggaagccacccaaggcacctggtcgaccgctggctgtacactatcagcatgcctcatcaatgggtgcggttgaaactcggaaggggaagataatggttgcatctggaactgctagcttgctacagattgtttctcagcttgatgatcacttccttagagcttcagagagtgcgcatgatgtgtctaagaaactggaggccacccgaatgcattaccattccaaccatgccgacagccgaggacatattgatcactctacaaaaattatgcatgttatcacatggaaccgctccttcaagaacttacccgatcatgatgacctgaatgataattttgagattgatgatagatttgaaactcatgctgcggttctagatagaatgcttgcttgggagaaaaaactgtatgatgaagtgaaggctggggaacttatgaaaattgattatcaaaagaaggtgactctattgcagaagcaaaagaaacggggtgttaaacttgaaaccctggagaagacaaaagctgccgttagccacttacacacaaggtacatcgttgatatgcaatccatggattcaacggtttcagaaataaatcggcttcgggatacacagctattcccaaagttaaaggaccttgttgaagggatggccaaaatgtggagtgctatgcaccgtcatcatagaagtcagttcatgatcatttcaggaatcagaggttttgagattcctcctgttacaagcgagagaactgatttgcattacaaccagacttgcgagctacgggacattgttagggagtggcacatgcagtttgagaaactgatgaacaatcaaaaagcatacatcagagcactcaatgcatggctcaagcttaatctcatccctattgagagcaacataaaggagaaggtctcttcccctccaaggctggtagatccacctatcaagaatctgctgcatgcctggcatgatgaacttgaaaggcttccaattgagcttgcaaaaactgccatcaaaacctttgctgaagtcataagcaatatcgtacaccttcaggaggaggaagtaaacctaaggaggagatgtgatgaaactcgcagggatctgactcgaaagagggcgcagtttgaagactggcatcaaaagtacatggaaagacgggcagccttaggtgagaatgggaaccctgaagcagctgaagttcaaaatatagatcctgttgaggacaggaaacgtgtcattgaggaattagaaattaggctgagggaggaggaagggcaccaccttaggcaagcaagacaggtgagggagaaatcacttgcaaacctccggacacacctgccagagcttttcaggaatatggctgatttttcttacttttgccatgacatgtacaacaatctgagaaaagctgctgccccggccaaagatgaagtataaggctgatgtcgtgtgtttgtaattgtactcaaccagcggtaaaaaaaaaaaaactttggttgcaggtggttgatggtaccttaggaatcctgaggttgtccggaatttattggaatgatttgtaatctgtgtagcgctagttgtactaatatgtttgttagttggaatgcttattaatgagtccctttgtttattgcctccaaaaaaaaaaa

SEQ ID NO: 18128 - DNA, 621 bp, Setaria italica
  Peptide Sequence Number=SeqID_84102
tttttattcacgctacagtaaagttttatcagggacagtcacaacaggaagtttcagctttgggcacagcaggcaggtgcctttggatagctacacatactcatgtaccactgctatttgttctttttataccaagtaaaaaagctaatcggtccaccaatgcaactacgcagagcagagcaatcacactggctacaagccagctaagattacttggaagtatgtacaaattgaccacaaagattttggcaaactacgctgcaaatgagcagagtttacaccccatcttgcttcggcttctggctcagctccgagtactggcctcccatcagctgcaaaatctcagtccacaggcaggaggggtccgtcgtcaaggcatccgttatcaggcctgagctgcaggaagtgacaacccagtatcctgcgtcaatctcactcagcagctggtcatgatcccacgcagagtaccccacatagaacttcaggtcttcaggcttcaccgtgccattattcatcagagcactagccttctccaggtcagtccggaaacagaagcagatgcctggtaccacctcttcgaaccccttgattggttttccctcagtcgacctcatcaggaat

SEQ ID NO: 18129 - DNA, 309 bp, Setaria italica
  Peptide Sequence Number=SeqID_84103
ttcaaatggtatgctgctactacttctctccaaatttttggaagtatgtgtactatctccaagggcaggataattttcttgtttggtcaacccatctgaagttgatgcagccaagagttcactcttcatcacattgaatactctcttgctaatcttgaaggcatggcgaggcttgcatcccatgagatgcagcgtgctctgcagcacggggcgcgtgtacccggaacccccggcggcccccgccgtcggcgacggcaatgtagagcagcttgggcggcggcgccggcggtggcgcctcctccgccatgt

SEQ ID NO: 18130 - DNA, 429 bp, Setaria italica
  Peptide Sequence Number=SeqID_84104
acccgcagggacagctcctttgaagtttggtggaagaaaagccttgaggaaaattcagaaacagcactgttgtggacaccttcttcaggaagaagttccagtgcaggcataagtccaggaagtcagggagttcttagataagtttgttagtttgttagctgctggattagattagccggctagatatttggaagttagttaggcaaagtcctatatgttcaggatctctcagttagttcagattaggcagtagtttatctctaatctcagagcctctcaaggagagggcgagttagctgtaacctactctgccattgctttgtagattcaataaacaggccttatcatctctctggtatcagcttgttccttcctgcgacctagctttcctgcgccaccccccattccttctaccctttccgtccgtct

SEQ ID NO: 18131 - DNA, 984 bp, Setaria italica
  misc_feature (977)..(977): n is a, c, g, or t
  Peptide Sequence Number=SeqID_84105
acgcccccccctgccccgctccctccctccggtctctacgccgcgacgggtgacggaaagcgacgcggcgcaagcgagaggggacgagggccagccaagggtagaccgctccgccgcctccgccgatctccgcgtcgccgccgcctcaggcgcgagattgtgtcaggtttcaagatgtcgaccagcacatttgcttcttcctgtgcgctcttgggcaatgttagaacacaggcctcccagacagcagtgaagagcccttcatctctgagcttcttcagccagggcatgaaggttccaagtctcaaggcctccaagaaacttgacgtctctgcgatggctgtctacaaggtgaagcttgtctcaccagaaggggtagagcatgagtttgaggctccagacgacacctacatcctcgacgcagctgagaccgctggagtggagttgccatactcgtgccgtgctggggcttgctccacctgcgctggcaaaattgaggctggctcagtcgaccagtcggatggatcctttcttgacgacgggcagcaggctgagggctatgtgctgacatgcgtctcctaccccaagtctgactgcgtcatccacacccataaggagggtgacctgtactagggctatgtcttttcagtctgccaaggggtcaatgctcttaagtgtgttgtcaagcaagctccatccttcctaccagttgtgtgaactgtctggcatcaaacttgcatggtggttgtcttgtctgttgcattagcgtgagttcagggttggcgcttaaggttgggaacccgtgggaatactagctagcaataaaaactgatgcgatgccataatagtataatatcatggccttttttgtatgttcgggtgcatgttttttcagttgttgattctggatctcactgtagcattcaaatttcggaagtgcctcagtgtcatgtggttgctgttttgaaccaaaaaaaaanaaaaaaa

SEQ ID NO: 18132 - DNA, 288 bp, Setaria italica
  Peptide Sequence Number=SeqID_84106
cttctacggcggcaagatggtggtgttcgacgacttccccgccgagaaggccgaggagctcatgcacctcgccggctccggcaacgcggcggccgctggccagaatgcgctgggacagcccagcctcacaggtaggaacgcgtacacccagagttcagtgttcacacacatacctgcacatgacaaaaggaaaaaaaaaccttagcgttcatacagcgagctgacagcatttgttgcgtgcgtttgttcagacatgcccatcgccaggaaggcgtcgctcaagaggtt

SEQ ID NO: 18133 - DNA, 834 bp, Setaria italica
  Peptide Sequence Number=SeqID_84107
cgcatccgcatctcctctactctctagcttccgtgaagtttccggaaagcaagtaagcaaccaacttccgtccgagggaggaagaggcggccggccgacgacctcgggtcacctgtcagagttccatgtgagctggttcgtctcgtgctgcacttcttcttcctcgatcaaagccggtggtgatttcagaggcatggccgccgagcatcagcagcagcccgtcgtggtcgccggcggtagcaggttcgcggtcacgtgcggcctgctgaggcagtacatgaaagagcaaggcgggaacggcgccaggcgcctcgcgccagccgtggccatgggcctcgtgccgggagccgacgcggcggcggcggtagcggaggagccggaggagaggaagcccgtgctggagctcttcccgcagcaggctggcacgctcaaagacgagcagcagaggaagatgaaggagcctgcggagagggcgcctctgaccatcttctacggcggcaagatggtggtgttcgacgacttccccgccgagaaggccgaggagctcatgcacctcgccggctccggcaacgcggcggccgctggccagaatgcgctgggacagcccagcctcacagacatgcccatcgccaggaaggcgtcgctcaagaggttcctcgagaagaggaagaacaggctcaccgccggagatccgtatccggtggcggcaactgagtcgatgtcgagcaaggctgcagtgaaagaagagggggcgccgtggctcggcgtgaactccgcgctcagcctgagctgaagaatctgatcgaggacgcatctagagagaccacacaaggg

SEQ ID NO: 18134 - DNA, 782 bp, Setaria italica
  Peptide Sequence Number=SeqID_84108
gcgccccggcgccgcctgctcctggtctacgccgaccgcctgccgcggctcgggtacgccgcgctggccgcctacgacctcggctcgtggcgccgcctcttcctcacccgcctcgacgtgccaggcgagtccacgtttcccgacgacgtcgccgccgacgaggacggcaacggctacgtgaccgacgccaggggtagcaagatctggaaggtgagcccggacggcgcgctgctgggcgtcatcaggaacgccacgttcacgcagcggccgggggcgcggcacaacctcatcggcctgaacggcatcgtgcaccacccgaacggctacctcctcgtcatccacacctccggcggcgacctcttcaaggtcgacccgaagacggagacggtgcgcgtcgtgaaggtgcaggggtcgctgaggagaggggacgggctggagctgctctccgcgacgaggctggtggtcgccggcatgccgagccggctggtggagagctccgacgactgggagaccgcgagcgtcaccgggcagtacgtcgggccgatccaccggggtgggggcgtcggcgacggtgaaggacggggacgtttacatcaaccacatcttcgggttcgggctcggaaagaagaagacgcacgttcttgcgaaggcggtgttcacgccgttggtcgcggcgagctgacggccggccggcgcctcgcacttgtgagatcggctctcgctgtcgctgctttgcttaagcagttaagcggcggttcatagtataacagattatctttaag

SEQ ID NO: 18135 - DNA, 307 bp, Setaria italica
  Peptide Sequence Number=SeqID_84109
tcaagagtcacactagtactgccaacttctctattaaatgcaacctcttttgctgcctccgtattgcgacacacaaatgttgaaccaaatacataagccacagcattctttacttcctcgccatatccaaccaattctagagctaatgtaacattgtcaggaccaaccagtctacgagccgcctgctgaactctatcaggtatcatgtatgtttggattttgttcaaaggtatgatggttactcgttttcggagatcccctattttttcaattaatttcttgccagtgtcttctgtatcaacaacca

SEQ ID NO: 18136 - DNA, 2087 bp, Setaria italica
  Peptide Sequence Number=SeqID_84110
aaacggaacaaaagcatgaaaagataacccacgacaacagatggccgatactttacatgctacgccaatcatgacgacgtaggtgttcaatctccaaaacgaaattgttcaaccactaattacacactggggcagatcaaagtacatacgaggtcatcaacgtaacatggggttacagttatagtgcctaatttgatgccacggcctgacaagcgaggagcttgagacattttgcggccacagcaccaagcacgagcaccccataagttagggtgcatcaaaccatttggcaatctagaagcaattgtgggggttcagcttgcataaatcattctcctacagaagcagcgtggtgtataaactggtcatttttgtttagaaggcactgttcgcgtcacagtggacacaccatcaacaaattttgtccggaatattacgttggcattgttgaacataccctctttaagcgagacaactatgaactgtgagtgaggaaaatgagccttgatcattctaccaatgttttgtgtgtggctaaggtcaagggcagcatcaacctcatccaatatgtaaagtggtgcaggtttgaaaagaagcagcgccagaataagactaagagcgagaagggatcgttgccctccactaagttcagacagagactgcttccaaactgtcccaaatgctacacgaacttcaagaccatccaagaaagtaccaccttctggaggatcaagttttgccattgtaccaggtaaaagagtactgaatatagacccaaaatccttgtttactttgagccatgtgactttcaaggtttccttcttcttctcatccaactcttctataactttcttgatttttgccttgtcattctcaatgatgtttttctttgacatcaaatcgttgtactcatcctctgccttctcaaacattgccataactttcttattgacccttttctccagactggattgttgagcttgaagattttcaagttcctcccgggctttatgtggttcacaagattcaaaatcataatctgtaccacttttcccaaacaactgcttctcagttgcaatccaactatacttctccactagcttatcaactactgaagagcaatccttttgttctatctccatcctcttaacctcattttccattttcttcctttcaacatttgaatcgcttaatttctgttgaagtttctgctgttccttggccatgcggtttatctgtgagtcgcattccttcagtttcgaacgcccaacattgagctcaccttcagcttgatcatactcttgctttatggcagtaaccttgtccctttgtttttccaaggtttcagacagagaagtaatttgagcctttgaagttgataactgctcttctagcgtagcaagctcattagcaaccgcatctttctccatgatcagcctctccctctcactttcataagccttgagttgctttgacatagactgcatctctgatttcagtgatttgatcattttttccagtgctttgagtctgccttcgcgttcagtgccgtaagtcctgatcgtttgttctaactcagaaaccattgacacacatttttcatactgcacttgcttttctgtcaactcttgttttgattcctgaagctcttgttctattttctttacgagttcacctaacttgtggtgttcattttgctcaactcttttctgaaataacgagagatcatatgacttgagttcaaactgagatttcaacttagtgtacctttcctgcaatggtaaaagggctccaatctgttgttcaatgacagagagctttttctgatgatcggatagatcagtctcagctttagccaatttgtcgagtttccgtagcaaatcccctctacctcctttactgcctccagtcaaaaggccactaggctgataagtgtcaccttcaagagtcacactagtactgccaacttctctattaaatgcaacctcttttgctgcctccgtattgcgacacacaaatgttgaaccaaatacattagctctagaattggttggatatggcgaggaacttcctcgccatatccaacc

SEQ ID NO: 18137 - DNA, 393 bp, Setaria italica
  misc_feature (382)..(382): n is a, c, g, or t
  Peptide Sequence Number=SeqID_84111
tggcctcggagcagctgccatcctaattgatcgattgcttcatcgatccatcgagttgcatcatcatcatattcatagtattactatctatctatctatcatggggattactatgatttacatctagcactactagccattaattaatcttaatttatcccctctatcatatctgtatcatcgacggacgacatgatgcatgctaataatctgcttgaccgcatgcatgtcgttgctattgaattgctctagtaatttgtgtttgcgtgagtgatgaagagtcgtcgttattagcagtgtgatgattcctgaatcctgatgatatataatttgtctgactgtctccgtgtttgatctcaacaaaaaaaaaaaataaaaaaanaaaaaaaaaaa

SEQ ID NO: 18138 - DNA, 746 bp, Setaria italica
  Peptide Sequence Number=SeqID_84112
gatgcttgacacttacgacttcaacaatgatgtctggctctgccactcatttggtggcaatgctacaacatcactgcctttcaacctctaatcaatgtcttcaaagaaatccagacatttcttgatgcaaacccgtcagaagtaatcacgatttttctagaagactacaccgctacagggtccttgccgaaagtattcaatgcttcgggccttacgaagtattggttcccggtggctaaaatgccaaagagcggtggcaactggcctttgctcaaggacatgatcagccagaaccagcgcctgctggtcttcacatcaaagaaatcaaaggaagcaagcgaggggatcgcattcgagtggaactatgtggtggaaaaccaatatggaaatgatggtatggtagcaggtaaatgccccaaccgcgcagagtcaccggccatggattccaaaagccagtcgcttgttctgatgaacttcttcacgactgacccgagccagaccggtgtttgtgggaataactcagcgccgcttgttagcatgctgaaaacgtgccatgctgcctcaggcaatcggtggcccaactacatcgctgtcgatttttacatgaggagcgatggcggaggagctcccctagcgacggatgtggcaaatggccatatggtatgcggatgcgacaacatcgcttattgcaaggccaattcgacgttcgggacctgcgtgataccaccaccgccgccgccatcacc

SEQ ID NO: 18139 - DNA, 444 bp, Setaria italica
  Peptide Sequence Number=SeqID_84113
ttagggggtaaggtaaggtaaggttggtcggtaggtccgttgtaggtacggttgtattgggggtagacggcgacgggcgaggagatgaggaggaaggcggcggcgatcgcgcaagcgatggcggccgcgtgggaagcgccgggcgggtcggcggcggagagcttggaagggttcctgagatgcgtcgagacgtccgtgcgctgagatgccccgctttgagatcggagcgggagtaaccggccgttttaacgcgcaagacgtgtgtaagtgattgttgcgacgctggatgcgtcatgcgtagtcgtggaacttctcgccatgcacgcgaggtctcaaggcacacaatgaagcctgcgagaaattcagaagggcgtcagcaggttaccaaccaaaaacagatgtgttagtctctgatttctcgactgcaaataggattactttcag

SEQ ID NO: 18140 - DNA, 670 bp, Setaria italica
  Peptide Sequence Number=SeqID_84114
ggttgctgctgctgccgcggctcgggagatgacggagatggtggtggccgcgcgggcgccggcgccggcggcggggaggtggggcgcggcgccgccgcaggagctgctggagaggctcaaggactacggccaggagggagccttcgccttctgggacgagctcgggcccgaggagcgcgaccacctcatccgggacatcgagagcctagatcttcctaggatcgatcggattgtccggtgttccctcagatcacaaggtgctcctgtgccgaccgttgagcctgtgccagagtcaagtgtctcgacggtggatgacagaactcctgaggacaaggaaaggtggtggagaaggggcttgagggccatttcagaggggaagttggccgttgtcctgttggctggtggccaggggactcggcttggcagttctgatcctaaagggtgtttcagtaagtcgctctgcccaagccctttgatcttacttctgctttgtgcaactaatgctatgcgattggatatacaaatacatagtattttttatgctgaatttctagtttacagatttctttgttttcgttagatccactacaaaagaaatataaaactgtcccatgtcctccaaatttacctgttgtctatgtgaggatagtaactttgcatgcactgtttg

SEQ ID NO: 18141 - DNA, 477 bp, Setaria italica
  Peptide Sequence Number=SeqID_84115
aacaccaccagcgctgtgacgcagggcagggtgccgccctggaagcccagccggtcggcgatggccgagccggccttgcagatgacgaacgacagcgcgatcgccgcgccgccgttcagcaccgagaaccggccgtcgccctcgggctcgccgccgtccttccggccgtctgtggcggcattcttgggctctgctggtatcttcgatgccaatgagaagaggatcatgaagtagagcgccgagatgaggttgtctgcagcgacgccggcggcgacaacggatggcgtgatgccgagagcttccgagacggcgacgaagttcaccgctccacctatgtagctgcccatgagcgcggctgcgatcttccagctatcatgaccgagcgatcgcatcggaaccaaaagataagccaccgtcgtgccgataatagttgcaacagatccgatgaggaatgccttgaggaggtcgccggtggtg

SEQ ID NO: 18142 - DNA, 391 bp, Setaria italica
  Peptide Sequence Number=SeqID_84116
ttcgtttccggtccgcgtgcttcacccccgccgccatgtcccgcctcgcagcgcacctccgcctctccccgtccatggctaccatcacgctcctcgtgctcggcaacggcacgcctgacatgttcgcctccgccgccgcgcccgggggcctcggcgggatgcccagggtggggctcgcggcggtcctctccgccggcgccttcatccccatgggcgccttcgcgctcatctctgcgccgtgggaaccggtctcctccctacaaccgcgtagggtggggcccgcttggcgcgtcggctgaaggggattaggggacggtagggaccaggaggagatgctagggcgggctcaacatgagggggaaccatggtgaagaggagcaagaggaagagg

SEQ ID NO: 18143 - DNA, 337 bp, Setaria italica
  Peptide Sequence Number=SeqID_84117
taattcatcaatctgctctcggcgcggttcttcaaacttgaatttccttaccaaacacgtctctcccgctcttccttgtttgaatcccttatgttaaataatgcctgggattgtagatgatcttgagaagaaaccatagtaacagattgatgaattaaagattgatttgtttaaacatttccgagaagatgtaagcttgcgactgtggaactcagactttaagaggcaaatagatggtatcgaattgctacaaaaggcacttccttcaagtgggaaagaagtaattgagcttcttgacatactattaaggtggtttgtcttacgcttttgtgaatct

SEQ ID NO: 18144 - DNA, 3173 bp, Setaria italica
  Peptide Sequence Number=SeqID_84118
gccatcaaaagctggtttgaagagcagtaaacatggtccaaatgatcgtggttctaatgtgggcaaacctgtgtctcaaagaggacttccagcaagggcatctgttactatggtttcttctcaagatcatctacaatcccaggcattatttaacataagggattcaaacaaggaagagcgggagagacgtgttttggtaaggaaattcaagtttgaagaaccgcgccgagagcagattgatgaattaaagattgatttgtttaaacatttccgagaagatgtaagcttgcgactgtggaactcagactttaagaggcaaatagatggtatcgaattgctacaaaaggcacttccttcaagtgggaaagaagtaattgagcttcttgacatactattaaggtggtttgtcttacgcttttgtgaatctaacacaacatgtttgctgaaggtccttgactttcttccagagctgtttgatcttctaaaagaccaatcttacatgttaacagaagctgaagctgcaatttttcttccttgccttatggagaagtctggtcataacattgaaaaagttagggaaaaaatgggggagctgataaagcaaatggtcaacatttattctcttcccaaactacttccctatgttttggagggactgcgatccaagaataaccggactaggatagaatgtgttgatatcattggatacttcatggaccatcatgggactgaggttggtgggttgatgaaaaacttgccatctgttgcagcactgacagcagagcgtgatggtgagatcaggaaagctgctcttaatacacttgcaactgcctacaaaaacctcggggatgatgtatggcgctatgttggaaaactctcagatgcccaaaggagcatgcttgatgataggttcaaatggaaggctagggaaatggaaaaaaggagagaaggaaggcctggtgatgctcgagcagctttgagacgttcagttagagagaatgggtctgacgtagcagaacaaagtggagaagtagtttcccgttcagtagcagggtcaatgatctcaagggacaactttggatatgctgatgctcatatgaataggcatatggttcctaggcagatgccagctgcaactggtcctgctgactggcgtgaagctcttgagattgttgcactgggtttgcctgagcagtctgttgaaggcatgaaagtcatatgccatgagctaacccaggcggctgaccctgaaagctcagtgcttgaagatctcattaaggaagctgacagattagtttcatgcttggccgttatggttccaaagaccttcaattttagcctgtctggtgcatcttcaagatcttgcaaatatgttttaaatacactcatgcagacgtttcaaatcaaacgtcttgctcatgctgtgaaggagggtaccctggacaaccttattacggagttacttctttggcttttggatgaaagagttcctcttatggatgatggcagtcaattactcaaagcactaaatgttttaatgcttaagatcctggataatgctgagcgaacatcctcttttgttgtgctaattactttattgaggcctttggacccttcaagatggccatcacctacaccaacagagtctcttgctgtaaagaatcagaagttttcagacttagttgtcaaatgtttaattaagttgacaaaggttcttcagagtacaatctatgaagttgaccttgatcgaattcttcagagcattcatatctatttacaagaactaggaatggaagaaatacgtaaaagggctggtgctgatgataagccattaagaatggtgaaaactgtcttgcatgaacttgtcaagcttcgagggacggcaattaaaggtcacctttcaatggttcctatagatgctgaacctcagccaataattctagcatacattgatcttaatcttcagacccttgcagcagctagaatgttgacaccatcgggacctatgggtcaaactcactggggtgatgctgcatcgaacagtccaaacccatctactcactcagctgatgcgcaattgaagcaagagcttgcagctgtcttcaagaaaattggtgataagcagacatgtacaattggtctgtatgaactctatcgaataacccagctgtatccaaaggttgacatattctctcagcttcagaatgcaagtgaagcatttagaacctatatcagagatgggctagctcaggtggagaaaaatgcggcagctggaagaacaccctctagtcttccattatccacgcctcctccaatagcagcaataccttctccaaaatttgcaccttctcctgttcatacaaaatcgattagtggcaaaacagagtctaacgaagatgatgccagcgctgaggcacaacaggccttcagaggagacgattctagattacattctatggaccaacaaaccgatagataccagacttcagcagggacattggatgctcttcgggaaaggatgaaaagcattcaagccgcagctgtaggtcatttcgatggatcccaggctcggccactggcaagtatgaacggaagtaatatgctccatgctgggacacaattggatggtgaaccccaacaacaaagtaatattccgcccatggatgaacgagctctatctgggttgcaagcacgaatggagaggctaaagagtggatctatggaaccactatagatacgataacagcactcggagaaataccaaccattgtaattcattgtaaatttgaggcatagtgatgctgttgtttgtagataggtatgtcggatgaactacacggcgcgggggcgacatttcgtaacccccgtgctgggtcaatccattcttgcagagcctttgggtgcagtttaggtgagagctagctagatgttttccttgtagaagctagtccatgaagggctatgctatttagtattaacacattttgccgtactgtggtgatttttcctgtggtgtacagcaatagaattgtgcattttgaattaactgcaaaatgtacttgtgaaatggacggttttatgcatgcataatagtttaggtttaaaaaaaaaaaataaactcaaactatagaatagactagaactagaccaacgtacaactaaagttaacctaa

SEQ ID NO: 18145 - DNA, 728 bp, Setaria italica
  Peptide Sequence Number=SeqID_84119
tcaatctttaattcatcaatctgctctcggcgcggttcttcaaacttgaatttccttaccaaaacacgtctctcccgctcttccttgtttgaatcccttatgttaaataatgcctgggattgtagatgatcttgagaagaaaccatagtaacagatgcccttgctggaagtcctctttgagacacaggtttgcccacattagaaccacgatcatttggaccatgtttactgctcttcaaaccagcttttgatggcaagctcatgcttgttgtcaccatcttgacagattcagaaaatccttcatgtacagtagtcagtttcaacctctctgctacaatggccaaagtaggtgatggcaaatcttttaggttccttccaaccacttcttggccacagattttaagaatttcattcataaaggattcagcagctttacggacttcagaagatttatccatcaaagaagatgccgaaggcttcaacaaaggcaaagcctcagatggatcacccatttttgaaacatgcttagacaaccaatcaaaaaggtcttttcgcccttctgaacctgttttctgatcacccaaagtcactataatatatggaaccatcttgtcgagttgggcagcagcaacccatgaatctagagcagtcaatgtgcattctcgcatgtgcttcttgttgtcaccaaggcatttcagcacatccgccaaaatacccttgcttgattt

SEQ ID NO: 18146 - DNA, 2257 bp, Setaria italica
  Peptide Sequence Number=SeqID_84120
attgctcctggcgattttcatgaaatctgccggacactgaagaagctcatcacagatgttaatttggctgtctcggtggaagctactcaggcaatagggaatttagctaaaggtttaagagcccatttttctggaaatgcacggatgcttcttccagttttgcttgaaaagttgaaagaaaaaagccgacgatgacggaagcactatctcaaacacttcaagcgatgcacacgtctggctgttttacacttattgacgtgattgaagatgttcgggtggctgtaaaaaataaggtccctcttgttcgttccttaacactgacctgggttgcattttgcattgaaacaagcaataaagcaaatgtactaaagttgcacaaggaatatgttcctatctgcatggagtgcttgaatgatggtacaccagaagtacgagacgcttcattttctgttttgactgccattgccaagatggttggtatgaaacccttggaacgatcgctggagaaattagacgatgtgaggaaaaagaaactgtcagatatgattggttctgccagtgagactgttttgagttcagggacagcgcctatcccaacttcaggagctgccacatctgctcgcggggctgcagatagcttgtccatgaagagatctgctgcaagcatgcttagtggaaagaagcccgtgcaggcagcggttgctgctaagaaatctggaccatcaaaatccactgcatcaaaaaagacagatggtggatcacagtcaaagacatctgctgctcctgagattgaagatgtggagccggcagagatgagtttggaggaaatagaagagaggttaggatccgttgtgaaagctgagacaatttcccaattgaagagcactgtctggaaagagcggcttgaagctattggcatgctcaagcaggaggtggaaagtcttacagaacttgataagtctgctgaacttctgattcgtttgttgtgcgctgtgcctggatggagtgaaaagaatgttcaggtacaacaacaagttatagaggtcatcgcccatatttcctcgactgtaaacaaatttccaaagcgctgtgtggttctatgccttcttggcataagtgaaagggttgctgatataaaaacacgggcccatgcaatgaaatgtctcactgccttttgtgaggctgtaggtccaggatttgtgtttgagaggctatacaaaataacaaaggagcacaagaatcccaaggttcttagtgagggtattctttggatggtctctgctgtagaagattttgggatctctaatttgaagctaaaggacatgattgatttttgcaaagacatcggtcttcaatcaagtgctgctgcaacaagaaatgctactataaaactaattgggatgctacataagtttgtgggaccagacatcaagggctttttaagtgatgttaaacctgcacttctaagtgccctggatgctgaatatgaaaaaaattccttttgagggtgccgctgctcctccgaagagaacagtaagagttttggacactgcatcttctacatctgctggcccgtctgatgggctgccacgggaagacattagtgctaagataacgcctactttactaaaaaatttgggcagtcctgactggaaggtacgactagagtccattgattcagtcaacaaaattgtggaggaggcccataaacgcatccagcctacaggaacagttgacctgttcactgcacttagaggccgtctttatgacagcaacaaaaatttagtaatggcaaccttgtccactattggtggtcttgcatctgctatgggcccttctgttgaaaaatcaagcaagggtattttggcggatgtgctgaaatgccttggtgacaacaagaagcacatgcgagaatgcacattgactgctctagattcatgggttgctgctgcccaactcgacaagatggttccatatattatagtgactttgggtgatcagaaaacaggttcagaagggcgaaaagacctttttgattggttgtctaagcatgtttcaaaaatgggtgatccatctgaggctttgcctttgttgaagccttcggcatcttctttgatggataaatcttctgaagtccgtaaagctgctgaatcctttatgaatgaaattcttaaaatctgtggccaagaagtggttggaaggaacctaaaagatttgccatcacctactttggccattgtagcagagaggttgaaac

SEQ ID NO: 18147 - DNA, 242 bp, Setaria italica
  Peptide Sequence Number=SeqID_84121
gcgatgatagatgcatcattaagatcctcaagcccgtgaagaagaagaaggtgaggaaagtttgcaatgctctctatggtggctgttgcatttctacccaccggaatcataaaattggaaacgcagtggctgccatgcatgaggttggagtttatgaatggccaccagtctcagcttgtttttgtgttagattcgagcattaccttgttgactagtcgcttctactatgtagccagttaggg

SEQ ID NO: 18148 - DNA, 485 bp, Setaria italica
  Peptide Sequence Number=SeqID_84122
agtaggaatagaagactacgacaactcgacggaaacgctggaggccgaagacctcgctgtagggctggaacggggtggacttgacgtcggaggactcgaagcgggtgccgatgatgccgccggcctcgttcttggccaggttctggtccagcgagtccagctcgaactgcaggtactccacgggcttcccgagcccgaacgggtcgaacccgtagtcgcccaccagtgacccgtcgaggtagtcgggcgccaccgcgccggggaaccagagcggccggtcggagaccgacgacgtcttggccgccttcttcggggcggcggtcttcttgccgccgccgaacccgaaccgggccacgatgcgcccgttctgcggcgctgggtccgccaggcgggtgcccaggaatgtgctcgccgcggcggccaccgacgaagccatggctgctgctcctcctcctcctcctgggtgtgctgagagcgtcaggtgg

SEQ ID NO: 18149 - DNA, 1026 bp, Setaria italica
  misc_feature (987)..(1026): n is a, c, g, or t
  Peptide Sequence Number=SeqID_84123
cctctcccctcccctcccatcccactcccgaaaacctcacaaaaccctcgctccccaccatccgccgccgcccgcgccgccgcctgcaccacccgcgacaagatgagtcggcaccctgaagtgaagtgggctcagaggattgacaaggtttacatcaccgtacagttacctgatgcaaaggatgctaaggtcaatttggagccagatggtgtcttcacattctctggcagtgctggtacaaacctgtatgaattgaaactagatctgaatgacaaagtaaacgtggaggctagcaagataagtgtgggtgtcaggtccatattctgtattgtggaaaaagctgaggccaaatggtggaagaagcttgttcgagatgatcaaagggcacctcactttgtcaaagttgactgggacaaatgggtggatgaagatgatgacggtggtgatgtcaacttggatgggatggacttctcgaattttggcggtatgggcggcatgggtgatatggctggtcttggcggtatgggtggcatgggtggtctgggcggtatgggtggcatgggtggtctgggcggtatgggtggtcttggtggcatgggtggtatgggaatggatgagtttgaggatgagagtgatgatgaagaggaagtgtcaaagccgcaagctgcagagaaggctggtgaggccgagaagacggaggctgctgaagccaagacagagacggctcagagcagttgaagaggcttcctgcatgatctaaaaaagatttgtatcgcatgttctatggattctgtctgaggaaaaccttttacgctgtggcactggatggcaggtcccgttgacttgtcatgaaaactagcgttggtcttttgattgggcttccgactttcgcgcccagcatattatggatttctgatattgtttccgtgatgctttcctttttgctaatgtgagattggttgtgttaaaaaaaaactactcacactnnnnnnnnnnnnnnnnnnnnnnnnnnnnnnnnnnnnnnnn

SEQ ID NO: 18150 - DNA, 1655 bp, Setaria italica
  misc_feature (1634)..(1655): n is a, c, g, or t
  Peptide Sequence Number=SeqID_84124
cgagccgcgaccctgaagctccacgccccaacgccgacgcgcgcgaccaccgcctccgtctccgagcgcccgcatggcgatgacgcgcgcagccgccgccgcgaacgggcggcaccgccggtgggggcctgcggcggcagcgacgacgagggccatggcgtcgtggttcgggcacgtggagcccgcggccaaggaccccatcctcggcgtcaccgaggccttcctcgccgacccttccccggacaaagtgaacgtcggcgtcggcgcgtaccgggacgacaacggccggcccgtggtgctggagtgcgtgcgcgaggcggagcgtcgcatcgccgggagcatgaacatggagtacctacctatgggaggaagtgtgaagatgatcgaggaatcactgaagctggcatatggggaggattcagagttcatcaaggacaagagaattgcagcagtgcaagctctttcagggactggggcatgtcgtctctttgcagatttccagaagcgtttcttgcctgatacacagatctatataccgacaccaacatgggccaaccatcacaatatttggagggatgcccatgtaccacaaagaacatttacctattaccatccagagtcaagaggacttgacttttcaggcctaatggatgatataaagaatgccccagatggttcattctttttgcttcatgcttgtgctcataatcccactggtgttgatccttcggaggaacagtggagagagatatctcaacagttcaaggtgaagaaacattttccattctttgacatggcatatcaaggatttgccagtggtgacccagaaagagatgcaaaggcaattcgcatctttcttgaagatggacaccaaattggatgtgcgcagtcatatgccaaaaacatgggactttacggacaaagagcaggatgccttagtattctgtgtgacgatgagatgcaagcagttgctgttaagagccaattgcaacaacttgccagacctatgtacagcaacccgccacttcatggtgcactaattgtttcaactatcctgtctgatccagaattgaaaactttatggcttaaagaggtcaagggtatggctgatcgcatcattggaatgcggaaatcactcaaggagaaccttgaaaggttgggttcgccattgtcatgggaacatgtcactaatcagattggaatgttctgctacagtggtatgacgcctgaacaagttgatcgattgacaagtgaattccatatctacatgactcgcaatgggaggataagtatggctggtgtaactacagggaatgtcgcctatttggccaatgctattcatgaggttaccaagccaaactgaggcctcttctaccatcttcatgataggaaaaggaattgagccattctgattgactttttcgtttttggttactgacggcgaaatggtccaatgaagaaataagtttcgccttggacatgtgggcgtccaaattttgatttatttggcgggagcgataatagaattactccaattggagaaacatatgttgtattgcagttgcatcaaatattgttgtttgcaaaatctgaataaagtaaatctgaaggaactttcaacaaccaaacaaaannnnnnnnnnnnnnnnnnnnnn

SEQ ID NO: 18151 - DNA, 269 bp, Setaria italica
  Peptide Sequence Number=SeqID_84125
tggtagacgatatgagagtccatggacatgtcagtgatgatggaagagctattgtccctgccagttcttatgctagggcacatatagatatggatgcacaagttcatcaccttgagcttggaactgacggtgacgatgatcctccaccaccatactcgaatagtagggatatgagaggcagtggacatgtctgtggcgatggaagagctattgtcactactagctcacatgcgagggcaccgacagatatggaggcacaaattcatcag

SEQ ID NO: 18152 - DNA, 355 bp, Setaria italica
  misc_feature (308)..(308): n is a, c, g, or t
  Peptide Sequence Number=SeqID_84126
tcagcaaccgaaagctctccccaaacccaccgcgaatcgcacccaaattcgaccggggaatcgcgccacccgggccccgccagccaccatgagcttctcgtcgatgagcaagcagcaggtgctggacgccggcgagggcgcgggggaggaggtcatggagctgatccctggcctgccggaggaagtggccgagaagtgcctcctccacctgcccttcctctaccaccgcctcttccgcaccgtctcctccacctggaaccgcttcctcaccgacgcccccgccaagccgctgctgctcgctcccccgnggctgcggcggcgcccgcggggtcggtgtccttctcgctcccattcc

SEQ ID NO: 18153 - DNA, 436 bp, Setaria italica
  Peptide Sequence Number=SeqID_84127
aagaaagagaagattctagctttcctacgattttttttcttgtatttttcgggaaggcattgatggattcctgcacatcatgcactcaccggctcacggggggatggatggccggatgaggcgaggaggacagctcaacagaggatggcctccacgctccccgtccgcacgcacaggcacaccgggcacgccatggcggcgtccgcgtcactggcggcgaagcactcgccgcagagcgagaggtgccgacaggggaggagcaccacggaggctggcctgaggcggcagccgaggcacgcgcggtccggcgatggcccggtgcggcgagggtccacgtacgcggaggacgacgactccgcggggcccgcgtcgccgagctcctcgaccgacgccctcgccacggccgcggcctgctggagctgggcgtgcagggtga

SEQ ID NO: 18154 - DNA, 693 bp, Setaria italica
  Peptide Sequence Number=SeqID_84128
aggattacagggtttaagcccttcttttggagaaggacctgtgtgaggaccagcctgagggcttccgcaaaaatgccagttacttggtataatgttccaatcacatcaaagtgaatctcgccatatgatgaaactacaacaccaacactgaccaataacatgttcaagaagaggtcccatcttaatttgtcagtaccgcataaaacagccattataaatgttgctacaggcatcaaggccttgagcatctggatgaaggccacagaaatatacaagtatgctgtgttgccaaaccacaggcttgacgcaaagaaggcgctaattggaatcacacatgtggcatatatatggaaagtcatcttgacaggtggaacaaccttaaaaactcggacaaggaagaatgtcacgattgcagaaaacgccatgtgaatcattgtaagggtgatagggaagggaaatttgaagtacttcggagaaaggacccatttgttaaacaggatgacgcccgacgagaggcagacgtagatcagcaggtagaggtaggtcagcacgagctgcctgctgatcatcttcgccgcgccgcccgccccctactcggcgctcgggggctgtggtagctggtcgggcggcgagtgaatggcggcgccggggaggcggatgcggaggcgtcggctggaaggaatcagatcggag

SEQ ID NO: 18155 - DNA, 1432 bp, Setaria italica
  Peptide Sequence Number=SeqID_84129
aatgcacgtccttctgtctgtgtcaagaaagggcggaagctccagcacagtgtaaagaagaattctgctgatgaaaggtcccatgatggagacagtggtgaaccattgctgagggataagagcccagttctcaataataacattgcactacccaggggtactccggtcactaacattgcaggtgcacagcttgatgatgaggatattggggctgcaattcagtttctagaattctgccgcacattcgctgagatttttcaaataaggaaaggacaatcagaaagaattcttcaagatgtagttggaggtcgtgaacttcggttggtatcctcagttgttgctgagtttcacatgaatttgttatctgtcattcaagaaggaaaggggaagaagcctctggcttatacaagagatggagatgcatgggtaattgatgttggcaaatatatcagtgaatgcgactttatatcaaaagaattgcctctcgactgtttaaatcagggagtatcaggatataaaaatttgagccttcttgtaagctgcgtgttctgaattttctgtgtgatgagaccctctccacagacaagttgaggaactggattgacatgcaaaatgatgtagctgctgaaccaatgaatgctgccagagaaaaagcccgcgccgcaaaagaaaaggaaaaagagctaaaggaaaggctaaagggcaacatggataaaacaatgctttcatccaatgaagcagcagcccttagcagtgaagaaaataaggaccttatttcccaaataaaggaggcacaggaagtcaagcgtacagccataaattatatggcggcaatggagaagcagggaagtctttggaccaagcctctgatggtagagaaagggttaggctattggaagctagatggctactgtaatagcacaacaatattacttcaagagtatggtgatcatgagttaatggcaaataaagacaagtggtttatgtttactgaagatgaagagaaagtaatagaagaacatatagcaaggtccagacatcagatgagaaagcgtatccgggtataatgtactgatttcagtctctggcctgttcaaacgtagactagaaaggtaggaatagggactaatagacctagaccttaagttagaaagcctgccgccttgatcataaatcgatggtttttttttttccatagaaaggttgtacaggtagacaggaaccaagaatttgaaatcagacttggaatcatacttttggaggatgagaacaaagggatgctttgatatgcagttcgacttagaagctttgcagagtgctgctttaagctaaaatgcagcatcgtaacttgaatgtggacaaacaaattacacctgtaattagttgtcttctaatatgtagcaacaactgatgaccgatatggatttagtac

SEQ ID NO: 18156 - DNA, 1154 bp, Setaria italica
  misc_feature (1125)..(1154): n is a, c, g, or t
  Peptide Sequence Number=SeqID_84130
ggattgatttgaattttagtttggacgctacgactttaaattcctttctaagtcagaacttccatagtagtctgattctacgggcaatagaacagaattgaatcaagcatgggcacccctttacttggatctcatttggtgtttcattcaagacatttagtaaaagcagttaacccaggaaggtgtgcggtgtgataatatatgaatcatgagtagtatcatctgcctatgatacattgtgttcttattttgttctaacattacttgcatttattggaatcatttagcctgatagttagcataagagtgctgactaactgggaaacactttctcagcttaaatttactaaatagactgtcttgacttttcaagcaaaacgtttttgggcagtacgtcattatttcccacactttttgtttatcttattctgtaatgtgtaaacaaattgagctagttgttaagtattatttttcatcttttgcttctcagatatggcggcaatggagaagcagggaagtctttggaccaagcctctgatggtagagaaagggttaggctattggaagctagatggctactgtaatagcacaacaatattacttcaagagtatggtgatcatgagttaatggcaaataaagacaagtggtttatgtttactgaagatgaagagaaagtaatagaagaacatatagcaaggtccagacatcagatgagaaagcgtatccgggtataatgtactgatttcagtctctggcctgttcaacgtgctgaaggtggatgggctatgcctgccttagttgaagcctgccgccttgatcataaatcgatggttttttttttcccatagaaaggttgtacaggtagacaggaaccaagaatttgaaatcagacttggaatcatacttttggaggatgagaacaaagggatgctttgatatgcagttcgacttagaagctttgcagagtgctgctttaagctaaaatgcagcatcgtaacttgaatgtggcaacaattacacctgtaattagttgtcttctaatatgtagcaacaactgatgaccgatatggatttgtctttattttcttaataggtaaactcatctgcaattcatgtttgaactnnnnnnnnnnnnnnnnnnnnnnnnnnnnnn

SEQ ID NO: 18157 - DNA, 1501 bp, Setaria italica
  Peptide Sequence Number=SeqID_84131
ttaaaaaattaaaaaacctaaaaaacaaaaaagttaaaaagttaaaaagaaaactaaagaaagctgagtttcacatgaatttgttatctgtcattcaagaaggaaaggggaagaagcctctggcttatacaagagatggagatgcatgggtaattgatgttggcaaatatatcagtgaatcggcatttatatcaaaagaattgcctctcgactgtttaaatcagggagtatcaggatataaaaatttgagcccttcttgtaagctgcgtgttctgaattttctgtgtgatgagaccctctccacagacaagttgaggaactggattgacatgcaaaatgatgtagctgctgaaccaatgaatgctgccagagaaaaagcccgcgccgcaaaagaaaaggaaaaagagctaaaggaaaggctaaagggcaacatggataaaacaatgctttcatccaatgaagcagcagcccttagcagtgaagaaaataaggaccttatttcccaaataaaggaggcacaggaagtcaagcgtacagccataaattgtcagaacaatatgactggatatatcgagatctttccacttcaagttttatcttagctttatgcgttttcttggttctccatttgtttgattagttgaacttttttactttatgggttttcatgccacgtttcctttagctttctgcatttttcaatcttgagctgaaaattcaagaaatgttgttggattatttatacttattccagtacctgttaacataatattttttttagttacagtgttgggcataaaaccagccatgccattttgccaatgcttaagtgtgttatgggcttcctgtagatttatgctgtgctgagtgagcacatttcactaggattaaatcaagcatcaagtaaccgaactatgggcctgacagcctgtgccatcaatagaggattccatgtaggtttgaggcagataaatactgctaaagtgggagctcagggccactaaatgcagatccagtggtcataatttgtcatgtgaaatggatggaaaatgcaacttgtttcaatagaactaccttttatattatcagggaaaaaatgccatgagaaacagcaaacctgagtgcatatcgagaaggattgatttgaatttcattttgtttgctacgactttaaattcctttctaagtcagaacttccatagtagtctgattctacgggcaagtagctcttttcctttcttttgcggcgcgggctttttctctggcagcattcattggttcagcagctacatcattttgcatgtcaatccagttcctcaacttgctagacaaagttaagaaatcattaatagaataataacaaacaatatactcccaccattctgtcatttataatgttatagatttgtgctaccatattaaattaagttttatttttccccctattaccgtattgtctaacttaattttacttaagttttaaggtttactttaagtttaa

SEQ ID NO: 18158 - DNA, 1226 bp, Setaria italica
  Peptide Sequence Number=SeqID_84132
aaaaattggcgaaggcgggggcggggataatagagcggcgtcacgcgagagggaagattcaaaatttcgggggaaatttggtggcgccgccggcgcgcgggcgccatgattttcccctcccgtttgtgctgccaaattttccgcattaaacagcttccttgactcgagagccacccagaaacgagaaatccccgcacaagcctttcacaccagagcggttcggcactccgtttcatttcgaatcttagagccgccgcaacctagattccccctttcccactcccagctcgtcgtcggccacttgggatggccgcatcaccggagaggaacggctacctcggcaaggagagcgtcgaggtgctggaaccgcagccgctggaggtgatagtgccggaggttaaggccaagaagcgcaacccggcgcccggagtccgggttgttggtcgccggatctacgatcccgagaacggcaagacctgccaccagtgccgccagaagacaacggacttcgcggcggcgtgcaagcaggttaagaagaagggcccgtgcccaattaagtactgccgcaagtgcctcctcaacaggtacggcgagaatgccgaagaggtggcagagaaggaggactggatctgccccaagtgcaggggcatctgtaactgcagcttctgcagaaagaagaagggcgagatgccaacagggataatggcccacatcgccaaggcttcgggatgtacttctgtccatgatctccttgaaaaggggtcagacgtggtggctgctgcgcaagcgatactcaaggtgaatggtagtgacaagcatcagggcacaaagaggtcccgagattcagatgctgctgatgaggtggctgctgaacgggatgaaagtgctggcattgatctcaatacatttccaggagatgaaggggatgaaaatataggcgttgatctcaatgcacgtccttctgtctgtgtcaagaaagggcggaagctccagcacagtgtaaagaagaattctgctgatgaaaggtcccatgatggagacagtggtgaaccattgctgagggataagagcccagttctcaataataacattgcactacccaggggccccaatatcctcatcatcaagctgtgcacctgcaatgttagtgaccggagtacccctgggtagtgcaatggttattattgagaacttaggggcacttactttaattaccctcagaagta

SEQ ID NO: 18159 - DNA, 430 bp, Setaria italica
  Peptide Sequence Number=SeqID_84133
gcggagggtggaggggcttcgaggcctctgcgcctcgcgaggttgcggctgcggcgcgggcgcccagctgctgcggccgtggccggcgacgcggagttgcccctggaggaggcggaggccgcgatgagggtggcggccgacgacgacagcgtcaccgccacggtggtgtccgtgctgctgacggtcgcgttcgtcggcctctccatcctcaccctcggtgtgatctacctggcggtgcaggacttcttacagaagagggaaaaggagaagtttgagaaggaggaggccgagaagcagaaagaggaggccaggcagaagagggccaagtccaggaagaagaggagaaattattgattcctgcctctcgtttgtctgccaccccaatgttatgctcttcggatgcagatgagtcttcagtgtgtgcttttct

SEQ ID NO: 18160 - DNA, 446 bp, Setaria italica
  Peptide Sequence Number=SeqID_84134
cgaaaaaggataaaactttttagacaaaagtgaagattagcaaaactgcaaccatctatatatgaaccttggctgcaagattcgccggcctagattgtcccgacggtggtccggcagtccctaggctcgccgccccctccgccgccgccgcaaagctggtggaagggttccagaagggcgtgttgttggtgaactgcagagcctccctgatgctgctaggagcctggttcaccgtctgctgctgatgatactgctggaacaaccccagcgacgacggcttcgccaccgctgccgacggctccgtgagggttctcagcagcgacgaggaccggaacccgccggccggtgaggtcggcgacgagagcagctccagtccaaggttggacaggaactggtggttcggatcatgcgttgggtcttgtagcatcaggccgttgttattcgat

SEQ ID NO: 18161 - DNA, 1328 bp, Setaria italica
  Peptide Sequence Number=SeqID_84135
tgtcatacacaacacacacacacccatttcaccacagcagtcacgaaaccaaaaacacctcatccggcatgctattgaaaggaaacatttggtaggttggcagaggtgagctcgtaccggttgctctgctacagaaaccaatcaattgaataagttacacaccgggaatacatacagacggctccctcccaacactaaccctgtcgctatcccccctttcagctcccagaagttgctgtcaccttgaaacagtcgatgttgcacagcctcaccgacttcatcatgcccccaaaccggtcgatgcttttcctcggccgatcggactggtcgacgctagcccgcggcttatcggggtggtccacgctcttcctgctcttgtccctcctatccgtgctgcccctcggcttctcccgccgatccgtgctatgtctgtgatctacgctcggcctcgtcttgtcccggcagtccgtgctcttccttgatacctccgccgtgcactcaggctccgccggggcgcggtccgacgggcccgagctctccgtggactcgtcgatcggaggtgggggcggcgatttctctatggcccccacgaacttcttcaggtgcctgatgtattccgggtacagttctaggttgcagtggtttccgcctttgatccacagcggctcgtacttcactttggcaagttcccacagtgccctcccgtgggaacagtcaacaacctcatcggctgtaccatgtatcactagcacaggacatctcactaatggaattttgtcgatattcttgtatatgtcaaaccagtatgtatgctttacaggatacatcactcttaagccagacaaaattggactatgtagaacaactgctctcaagcgagttaatcgggatgctaaatccaaagtaggaccactgcccactgattgaccataaaggatgatattatcctcagaagctccataggtttctatgaggcatctgtatacagcttctatatcagcataagtgttttgctcactcggcttcccagaggattgcccataaccagaatagtcatagcccatgaggttgacgttgaggtgagagctgagctcgacgaagagctcgtacatctggccgaggtcggcggcgttgccgtgggagtagagcagcgtgagcttggcgcccgcctggcgcacgtgcatcgcgaccacctccgtgccgcgcttcgtccgcagccgccgcgcctccacgttgcccctccgcggcacgcccgtgagctccaccaccctgctgccgtcgccgccgccctttctacctttcttcctttccccttccccccttcgggt

SEQ ID NO: 18162 - DNA, 957 bp, Setaria italica
  Peptide Sequence Number=SeqID_84136
gccctctcatcttcaagtaaggcccaaccaaatacggttgccttgccgtgcccattcattccaattaacagtgcaaacaacatgttatattcaatagtgctataagatgtatcaaaagaaatgaaatctccatataatgcataatcaagtctagcttgcgcatctgtccaaaagatacttcttacagtgttatctccatcagtctttatagcataatagaacccaggttgttccttctgcaaccttctaacatgttccagtgtgctttctatatccgtattttctatcttcattaacctatcagactgttccaaattgttgacagccattttctggacaggtatattcttgaatttcctcctcagtctccagaaaacttccataatctttgctggtttaattttgctttcttgcaatattctagagaagtttttctcttcctcagacatatacttgtggctgagaaaaaatctggtcaacgaaggtgaacttgaaagtggatggttatgttcattttgaactgccattatctcccatcttccttcgacaagtttcacagtaaccctcatgggacaaccagttctctcaatggtatttcttttccttttcctttgtcgcatttcattctcttttgccttcttgcttttattgcattgcaatgttattttcctgtgcttgtaattccttcctttgtataccacaaagccagtaacttgcccatagacattaacaaaacgctgagcatcatctagcgtagcaaataccatgccaacctctggaggcctagcctgttccacttcgtctggacttgggaaaaagtagtcttcatcacaatcaacttcaacttcagctgtatcttcctggcattcattgaggtcatcatctggttcgtcatttaggatagggttcccattctcttgttcaagttcctggataaatgcttcatcagctattcta

SEQ ID NO: 18163 - DNA, 1179 bp, Setaria italica
  Peptide Sequence Number=SeqID_84137
gccatccggccctgcgcttcgtcttctcccgcgggccgccgcagggcaagccaagcgatgcagaccgctgcggccgcccggaggggcgccgcggcgtgggccgcgtcggcgttccactcttccgccgcagcgctctccaaatccacgcctcgtatccggttcgctgtccgtgagaagcgcagggatgcaaagagtgcccttaaaaacattctgctcaatggcagcccgtgtcaggaaagcattaacaagcaaatgagaaagcagaaaggtagtggcagaccaaaggtccagcattcttgtccagggaaaaatccatatggcaaaaataagcgtgggcagaactggaaaagctttgatgatgatgaatgcacagatacaccatatggtacctttggtggtaagagatccttcacatggtactggcccggggagaatgacgagcttggtagttctcctagcggttttcaatggagggatgaatctcagtctgccaaatcaaggaaaaagttcttgaatgaaagtgatctcgatgaggaagaggtgtcagggtcaggccatgatgatttgcgaagctataggatctctctggggttgccaattttaggccccttaaaactggcgcatattaaggctgcttttcgtgcttctgctctcaagtggcacccggacaagcatcaaggaccttcacaggctgaagcagaggaaaagttcagacgctgtgtggaagcatacaacgtattgacttgtgccttcaagtcaagtggctaactatgggcgcatgcaagtgcaaggaaactttttgatgattttttgggaacttcaaattgatacgtggagctgctgtagtttaaggacacagagaaactagaagaaagtgaagtttagagttttggcttcatgttgataacgaaatataaagaataatctgtatcaaaaacatagacttgggtcagcccagccaaatcaattgaggtgacgcaaattccagggttcatttgtatgtttgcttccactgtcactgtaagagtaaatgttgttccacagcgagtttgttgtaaaattttactcagtaatgctgaatagatccaaaactgttgcagtgtaaccaaatgctttgttgacatctaagaggacagctactccaaaggataacaacatccaagtttagaggtggctaaa

SEQ ID NO: 18164 - DNA, 240 bp, Setaria italica
  Peptide Sequence Number=SeqID_84138
catccacataggatcagacatcatcttggcaagtatttggtctgctaaagggggtactgggcgcttatttgttttaggagaggttgttcacatattcaggccacttgtgtatgtacttctgatcagaaagtttggaatcagatcatggaccccatggttagtgtcgctagctgtggaactgacaagtcttggcatccattcacacgcgactgatctaaatcatagaggagggaaagtcca

SEQ ID NO: 18165 - DNA, 1750 bp, Setaria italica
  misc_feature (1678)..(1678): n is a, c, g, or t
  misc_feature (1694)..(1750): n is a, c, g, or t
  Peptide Sequence Number=SeqID_84139
ctcctccccatcccgacgggtagcaaagcagcgcttgacgccgccccacctctcctccgcggccggcccgccgcgattcaaccggccgccttcgatcccgatcgcagcctccacctcgcgctctgctagctgccgatcttcctccctccttacggagcttctgcgcgaggtaggcggtggcggctgaatcggcgccgtcgtcgctcccgccatggaggcgtacaagctctgggtgcgcaggaatcgggacctcgtccgctccctcgagtccctcgccaacggactcacatggatactacctgagcgctttgccaactcagagatcgcgccagaagcagtatatgcactattgggtattgtgagttctgtcaaccagcacataattgatgcgcccactgaaaatcactcatttgcctctaaggagcaatctattccatggggtcttgttgtctctatactaaaggatgtagaagcggttgttgaggttgctgcccagcactttgttggcgatgatcgcaagtggagcttccttgctgttacagaagcagtgaaggcaggcgtcaggttagccgcttttcgggagagtggatacaagatgctcttacaaggaggggagatggcaaatgaagaagagatgaccgttcttgaagataattatggagtaaatggtaatggagttccagttatctatccgatgaatgggcattcccaaaatggtcacaaagctgcgaccaacggtctggatggaaagaatggagttgtatctaagagtcttgagagaagagcagtagctgctttgaacaagtttggtgagaatgccaagatgatgtctgatcctatgtggatgaggaggcttcaacctactcctgagccaactgtgatggtggttgagaagccaactttggcaagtatttggtctgctaaagggggtactgggcgcttatttgttttaggagaggttgttcacatattcaggccacttgtgtatgtacttctgatcagaaagtttggaatcagatcatggaccccatggttagtgtcgctagctgtggaactgacaagtcttggcatccattcacacgcgactgatctaaatcatagaggagggaaagtccatcagctctcctcggctgagagggatgagctgaaaaggcggaagatgatgtgggccctttatgtgatgagagatccttttttcaccagttataccaagcgtcatctccagaaggccgaacaggtgctgaatccggtgccattgattggtttccttacaggtaaacttatggagctactggaaggggttcagacaagatatacatacacgtcaggttcgtagagatggccggataggtgcctgagcttgtggttactaatttttggaagaccttcgtgcttcgtgtgagttggttgatggattatgttggcgagaacttgttcccagacctgtagtgccattttcttggcagatatggcattgttgtcttatgacataggctgttaagctgcggccactttcatctattgtgacagatgagaagtatataacagtaaagccgatgtaatgctaagaaccggcagtgtatttatagtgcatacttattggaacagaatgtcaataatgcatttgttctttaacctgtaaaagtttacttttaaaaactaaaaaaaagagaagtancaacgagacacaggannnnnnnnnnnnnnnnnnnnnnnnnnnnnnnnnnnnnnnnnnnnnnnnnnnnnnnnn

SEQ ID NO: 18166 - DNA, 304 bp, Setaria italica
  Peptide Sequence Number=SeqID_84140
ctgatatgtcatggaggctcaggtgttgttatctttttgaggaggtcttgacacccggggggcattttgtttcatgtacattcttgggcaagggtatcgaggattgttccaggacactgatcttctgagatttgtaccaaattgggcctgtggtggggaggtaatggcaatcctggattcattagaagtggatgtacctgcatcttcaagtagccagcgtgttgacagttcaatgaaacaaggaaactctagacttgagatcagtggaattgtttgggacatggaaaggttaagaaatctctcc

SEQ ID NO: 18167 - DNA, 450 bp, Setaria italica
  Peptide Sequence Number=SeqID_84141
tccgtgtccgattcaaggcgcgaggatggctttgtggagagagcaaaagatgtcaatggcatcaaaatttcaccagtgtgcaccagggaaattttgccagagcatgaggtttctttcacattcagcctctatgacagaggctatctcatttcaaaatcagcatctatggatcccagccagacctcaattcaggatggcaaaacactgcatccctatgatagagcatcagaaaaattattctctgctattgaagctgggaggctgcctggcgatattcttgatgagataccaagcaagtactataatggatctgttgtttgtgagatacgtgactaccggaagcatgtatccaatcaagttcctgcatcatcttctgagctaggactacccatcataaataaagtacgactgcggatgacctttgagaatgttgtaaaagacattacgctt

SEQ ID NO: 18168 - DNA, 447 bp, Setaria italica
  Peptide Sequence Number=SeqID_84142
gtttctacacacgtaggtccacctcactgctcggtaaagctacctttgccatcagactacgcacaagatttcagaagtcaccaacactgtatatacaatctactactaccggtacaatttaatcaagactatgtttgatgattcccctacaccaccactacaccaaacaaaaatggaggaagagtgcacaccaagaactcagccactactacctgctgactacatacggagggagacacacacatgccctcacgcaccgtgcacgtgcacccgcgtacaacgcctgctcccaagacaccgaccagccgtcgatcgatcggcttcgatcggtttcatgcagcgagctgatgctgggcgctgcatccggcggcggcgtcgtcgtcgtcggagaggcagcagtgctgcagcctgagcggcgggcgggggagcctccgcgcacagcagctc

SEQ ID NO: 18169 - DNA, 2398 bp, Setaria italica
  Peptide Sequence Number=SeqID_84143
ctggaccggggtggggccatgaacaaccgcgtgtggcctatggctatgaccaacaaaattgccatcagcaagtcacgcagctgggcatgcattttacattataaataagagaggttcagctaccaactcttctaaagcccaccatcttaggggtaccagaaacttgcattgcatcaggtgtggatatatagaggcaaaagtttgaagcagggtcagtgcttctcgtaagcatcaggctcagtcccaaaggccatctgcaggctggctatcaggcactatggtgtcatcatccaaaagctcagattgcttcttcctcgccttcctatagctactggaacctcgaagaatggagccgatgtgcaaaccgtctctgagactcttctgagataaggacgtagtgccatcatcatcaggaacgtcactttcatcgtaggctgcagatgaaatacctgagtcaccagatgtagctgaattatcagccgatgcttccatgaaagccttatcgttcttggtgtccaattcatcatcagagccttcgctgttggcatcgttgaatattgcaccaatgcctaccttcctattctcttttttggatttctcactggcttgttcataccttttacttgaaactttccgtactgcaactctataccggttagcattttgaggcgtgccctctgtgctgtcacttgacactagaggactcgtcgaaaagtccttcacaaggttgcgtgcaggcttaggatttggagccacccttcccttgatagaatcatcatgcttactcttagcatggggctttaatttagaagtggacttcctcacatctttgcttatatgtacatgatcctcagcgagcaacgtgttctgatcatcaacaccgttctggtggagcttcttttcaagagtggcatcttctggtttgtgttgtactatactatcattctgagtaactttactgcccctatcttttccattatctcggcccatgcttcctttttgtacgacagaaagagtttcttgggtaccaatatcaatgccttgattatcagaattaggattttccttttcagcaacaggcatttccgtattcacttttctttttctcttcttctcctttccgttcttcacattctcatcttcgttgttcatgttttctgctgcaacaaatggtacaataactttgctggtatcaagatgaccagttaagctagttttgtctgttggaagaagagattctaaaacatcatttgattcaatgctatcagtgccttgctttcttttacttttctttttgtttttcacttcccttaaagtttcatctccattatcttgtttgtgttcagcagaaactgaaggagcattcatcttgttggagccaaaatgatcgaggaaattgattgcatcagtagcaggatgaactgcgctatcataattttgttcagcagcatcagcagaatttttaggtctaatcagactcttttcaggcctgaggttccccaaatctgcaccggaatcatgttcccgtgcaggatcccaactttgaagttcagagttcgaaggttttttccttgccttttgagcattagggctggcagattcgatagccatgacatcatttgcttgtgtagcattcactcccttcaaatctaatgtatcaacctggctgacttgctcgtccaaagttttaacattatctgcaggtacctgctttaaggaaaccttctttcgccgacgcttagtggctttgggtttgtcatcagcttgtgcaacgacatctccatttaaaacatccttaggatcacttgttttgtcagaaaacctcaaagaatcagacccatttaattctccattagcatcttctttgggtacacttcttgaatgatgagatgagtcaatcattgttgatagcacttccaactttccccccttagacttcttaagtctaggtgagctggcaggagcatcagtaggatattttggaggtaataatgcactaacaccaactttatctgccgtggattcaggaagatccagttcattcttattgctgcctaggtgagtttgtcctgctaatatatcttcatccaaatccttacttgagctgtctttagaccttagatctgccaatacctcatcaatcacattctttgccactaggttttcaccaagctccttatggtcaacaactgttgctccttccataccgcctggtgttgtttgcttcacatctagaggggcaacatctgcgaaatgcatcgagctttcatttgtaacaaattcagataattttgtcagatcttgactaggatcaacaccctttgatgattctgcgtggcggcgtcttcttttctttttctttccatcaccatttggattttctattatatttgactcc

SEQ ID NO: 18170 - DNA, 265 bp, Setaria italica
  Peptide Sequence Number=SeqID_84144
cgcgggcaagcgaatcaggcgagcgcgttaggaggaggaatcttggcaacaggggagggaggcgccgcttcgcccatggaggcggtcgcaatgtcgccgtcatccgtctcctcccacatctatgacgccgcctccatcaccgacgacatgtccttgcaggaaggcctcctcttctcagacaccctcaaggacctgaggaatctgcggtcacaactatactcagcagcagaatattttgaagtattttaccgaaacaactcgcaac

SEQ ID NO: 18171 - DNA, 219 bp, Setaria italica
  Peptide Sequence Number=SeqID_84145
cgacgggacgtgccattgacgatggcgaggccctccttggggttgagcttgaagaagccgccttcgatgccggcgaccttgaacgcctcggcggcgtccaccttcctgccgtcgacggtgacggcctgcgcgttggggcggcctcggtgatggtgccccggagcggcaggcacgggctgacgccggaatcttcggcaatggctccgacggccacacgct

SEQ ID NO: 18172 - DNA, 478 bp, Setaria italica
  Peptide Sequence Number=SeqID_84146
cgtacggtgcggtctcctcctcctcttggtgctggtgctcagcttagcagattggcaggggcttgccgtcccactccttcgaggcactcgagcgatggggtcgatgagcttgccctgactgatgccgatgaagaccttgttgcactcctcgccggggacttgagcttctcgccggtcaggaacacgcagccgagctcctcgcggacgaagtcgctgaagcgcgcgctggagagctcgccgaccgggttcatggtcagcaccttcttggccacctgggtcacggtgttcttcacggaggtcttgatgttctcctcgaggtggcgcaggtcgatggcctggcagagcgcgaccatgtaggtggaggacatgagcttgaggatgtcgatggcctcagcggtcttcctggccgagacgaggccgagggagttcacgtcctggttgtgctgctccgcgctctggacgtggttggtgattgggg

SEQ ID NO: 18173 - DNA, 400 bp, Setaria italica
  Peptide Sequence Number=SeqID_84147
atggcggcggcctcgatggagcccgggtggtgcttgagcttgtgggtgaggtggtcggtgtactcgggcttgccgttcatgacctcgcagaacacggcggacaggacctcagagaggacggcgaggacgttggcgtcgtacagcacggtggccgcgagcgcggagccgacggcctgcgcgttggggcggcccgtgatgaggccggcgatgtatgagagagggacgaggtcgcccgacgcggtgatggtgccccggagcggcaggcacgggctgacgccggagttgagcagcttggtgatggcctcgaggatctcgaagcggatgccggacgtagccctggaggagggtgttgatgcgcaccagcatcgccgcgcgggtgacctccgacggcagcgtgtgg

SEQ ID NO: 18174 - DNA, 243 bp, Setaria italica
  Peptide Sequence Number=SeqID_84148
tcgtcgaacatgagcttgccgatcgccgcgatggcgagcctggtgttgtccatggacacgccgatgggcgtgccctggaagttgccgccgtggagcgccttgccgcgggagacgtcgatgagcgggttgtcgttgacggaattgatctcgcgctcgatcgacttggtggcggcgcggatgacctcgatctgggggcccagccactgcggcgacgtgcggagcgcgtacctgtcctgcttgggc

SEQ ID NO: 18175 - DNA, 231 bp, Setaria italica
  Peptide Sequence Number=SeqID_84149
cagtgactcattgtccaagaacgaccgactactactagacttagtagttacgtactctgaatcgatctcgcgaggatgtcgtgctgcggaggcaactgcgggtgcgggtccggctgcaagtgcggcagcggctgcggagggtaagccccacgacgccacgctcctcagatctctgatagtctgatgcgtgtctatcatgtgtcaatacccatatgaatgcatggatttcgg

SEQ ID NO: 18176 - DNA, 122 bp, Setaria italica
  Peptide Sequence Number=SeqID_84150
cggccatctcggtgatcctctcgagaatgtagcgggcaacccatatctcgtcgccggcagagatcccaacggacggcccaacttggaactcccactggccgggcatgacttcgccgttgatg

SEQ ID NO: 18177 - DNA, 254 bp, Setaria italica
  Peptide Sequence Number=SeqID_84151
ccgctattttcgatccgcagctccactgtgacctgagagtcccgctctccacacgcgcaggcgcagccatggcgatgagctcgatccgatcggccctcgcgagggcgcttgtcgcctcgaagctgtgtggcccccaccggttcgccgccaccgccgccgccggtgatatgcagcccgaaagggtggcggcgaagatggtccattacgcccttggtggcgttgttcaccggagctcgccagtttcccgctcgccc

SEQ ID NO: 18178 - DNA, 229 bp, Setaria italica
  Peptide Sequence Number=SeqID_84152
ggcttgagggtagaggatgacttcgctgtcctctccgggagcctgcccggtgctggagccgtcgtagttccattttgggagctggctcgcactggtgatggggcctttcaccgtctgctccagcaacacaacggtgagaaacatatcatagtaatgattccgaaaggcatgacgtgaacaaaactacgcacccttgctttgctcctgaggtctatgccggagcctccaa

SEQ ID NO: 18179 - DNA, 203 bp, Setaria italica
  Peptide Sequence Number=SeqID_84153
agagcgggaccaggtcccccgacgcggtgatggtgccccggagcggcaggcacggggtgacgttggcgttgagcagcgacgcgatcgtctcgaggatctcgaaacggatgccggagtagccctgcagcagggtgttgatgcggacgagcatcgcggcgcgcgtggccgacgccggcagcacatggccgtcgtcgccggtgccg

SEQ ID NO: 18180 - DNA, 516 bp, Setaria italica
  Peptide Sequence Number=SeqID_84154
gcaaagacttcgctggagcaacaccaaacagaagtgcttgccttttcatacggtgaatatttgcattgtgttgggattttccaatggcaacacaagtgtatgagagtgttcttgaggcagctcgcatggaagatatgtctggaaaccttttagcagctggaaacatggttcctgaggaggtttctcttggggccacttgctcatatggccagcttttatctcactctgggtaaaaattagagtagtctttacggttgtgctttggttaaatttttagattcaccccgaaattcgatatataaactttcagatcatctctactgttgttcttttgactaactgtttcttaatatctacccttttatggaggcttgccttttcctcttaatccaggaagtttggtgaggcagaggattatctcacaagggcactacaaaaggctcaagaacaatttggttcaaaccacccaaaggtcggcatcgtgttgacctgtgtagctagaatgtacaaactctt

SEQ ID NO: 18181 - DNA, 201 bp, Setaria italica
  Peptide Sequence Number=SeqID_84155
ccaacaagttgctccttctgcagccttcagagttgcagcgtgggaagcactaatgggactacacatggaggcaggccaggagatctccaattcagtgtcccctaatgattcagttgatctgtcgatcaaaagaatagaacaagaccaagtaggtactagaatcaaggatcatcttaaaattcgggttaatgctatcaaagg

SEQ ID NO: 18182 - DNA, 231 bp, Setaria italica
  Peptide Sequence Number=SeqID_84156
ccttgggctgcagctccaaagaacccaatgctcgatgccggcgatcttgaacgcctcggcggcgtccacttcctgccgtcgggggccaccgcgacggagttctggacggcccgtgatgaggccggcgatgtaggagagcgggacgagatcgcccgacgcggtgatggtgccccggagcggcaggcatggggtgacgttggcgttaagcagcttggcgattggttcttcgta

SEQ ID NO: 18183 - DNA, 180 bp, Setaria italica
  Peptide Sequence Number=SeqID_84157
aggaggagagaacacctcctgtgggcagttcagcagagcggcaggggctcgccgttccactccttgaggcactcgagcccctgccgctctgctgaactgccgctctgctgaactgcccacaggaggagagaacacctccatacacaagaaaaacaatggtcttgaaatgctatacttttg

SEQ ID NO: 18184 - DNA, 257 bp, Setaria italica
  Peptide Sequence Number=SeqID_84158
acgggctcaccgcttctacccttccagagtctccgccgcttagcgcctccagccctccacacgcgcaggcgcagccatggggatgagctcgatccgatcggccctcgcgagggcgcttgttgccccgaagctgcgtggcccccaccggttcgccgccaccgctgccgccggtgatacgcagcccgaaagggtggcggcggagatgaggaggcgatgcggatactggagcagggggcctctaacctgcagggcggcgg

SEQ ID NO: 18185 - DNA, 275 bp, Setaria italica
  Peptide Sequence Number=SeqID_84159
aattcctgtctgatgaactccgattctctgaaacgatgtgcatgctgttgttgtgctccttcaacaagggaaatttctgatgatgctgatctgccgcttgcatgatctgcaggtgcaagatgtacccggacatggctgagcagggcaccaccaccacccagaccgtcatcacgggcgttgcgccttccaacaaggggtatgttcatccatcccttttcccatctactgatctacatcatgctcatagatcattccggtgttgtgttgatcgtgaa

SEQ ID NO: 18186 - DNA, 321 bp, Setaria italica
  Peptide Sequence Number=SeqID_84160
gattcaacttaaaatactattgtacggctcatttaattcaaaaaaaatacgaaaccttaaccaacaaaattcaacctcaagtcattacatgatcgagtagttgaggtacaaaactgaactttgtagggatgcagctactattaagctgggcacagcaatcagattaagaactttgaacatgtagcatagtagcttggaaatctctcttgtacaacagaacgaaaatgaagggcaactacctcatgctttcagattccacacatttgcttcaatgcttctagtatattacacgcgagtatccatttcagtttcaaccgctgt

SEQ ID NO: 18187 - DNA, 582 bp, Setaria italica
  Peptide Sequence Number=SeqID_84161
gattaggcgaggcgggcgttgtccatcggacaaccccgtatgggggtgccccttggaaaaaaaaaagttaaaaaaaagaaaaaaccgaaaaccgtaaaggaaagaacgaccttagaccgacggtggacgtcgatgaccgggttgtcgttgacggagttgacctcgcgctcgatggacttggtggcggcgcggatgacctcgatctgcgggcccagccactgcggcgacgtgcggagcgcgtaccggtcctgcttgggcttcagcagcgggtcgagctcgttcaccttcttggcgtgcttcatgaaggcgctgccctcgaggatgtgctccatgatggcggcggcctcggatggagcccgggtggtgcttgagcttgtgggtgaggtggtcggtgtactcgggcttgccgttcatgacctcgcagaacacggcggacaggacctcagagaggacggcgaggacgttggcgtcgtacagcacggtggccgcgagcgcggagccgacggaggtgccgttgacgatggcgaggcgggcgttgtccatggacacgccgatgggggtgccctggaagttgcctccgtg

SEQ ID NO: 18188 - DNA, 407 bp, Setaria italica
  Peptide Sequence Number=SeqID_84162
acatggatagtattacgtatatcgattattacacacccacacaacatactgtattacatttcagtgatccggtagccgatagaacaggcgatcaagtacgtgatcagccacttagtttttttatacacacgtagcacttgctcgcgccgcgccactttgaagccaagctttattttcagttgcgcatccagagcatgctgtcctggggcaggaagtggcacacgggcacgctccccggctccacgccgagcttctcgtacgccgactgcgagatacccgggaacgcgtccgggtgccgaggatggaggcggcgaggtcggccatggagtctggggaggtgacgcagcgcagggcctccacgccggggacgggcgcggcctcgcatgcggcgagggtggaacgcacgg

SEQ ID NO: 18189 - DNA, 467 bp, Setaria italica
  Peptide Sequence Number=SeqID_84163
tgcccatatgggtagactgctgggcctaccgtcctggggccgccgtaaaccggaacatactgttgtccaacatacggaccatatgcattctgctgatataagtattcaggtccatatgttgatggcccataggaaggatatacaaaggcctgtgagcagttgatggaggctgctgatgttgatgggaatggatccattgactatgttgagttcatcactgccacaatgcatagacacaagctcgaacgagatgagcatttgttcaaggcattccagtactttgataaagataacagtggcttcatcacaagagatgagctagagtcagctttgatcgagcatgagatgggcgacacgagtacgataaaggagatcatatcagaagttgacacggacaatgatggaagaattaactatgaggaattttgcgctatgatgagaggagggatgcagcagccgatgaggct

SEQ ID NO: 18190 - DNA, 308 bp, Setaria italica
  Peptide Sequence Number=SeqID_84164
cccacggcggcgacatctacggcgtcaccaccggcttcggcggcacctcgcaccgccgaagccggtggtgacgccgtagatgtcgccgccgtggggcaatgcagtcgaggatccactcgctgctggccttgacgcgggggcgggcatcttcgtcgagctcgacggccacgccggacgcgtccttggcggcggccacggccgccacctggccgacgcggaggctggagccctcgatcttgacgaggggctcgcggaactgcgccaccatgcgcttcacctcgtcgaggtggctccccgccatctccgcg

SEQ ID NO: 18191 - DNA, 483 bp, Setaria italica
  Peptide Sequence Number=SeqID_84165
tggttgcctgccaccgcatgccctatccgtacgccgtgttcgcgtgccacgcaaccaccgccgccgtgtacgcggtgagcctcgccggcgccgacgggacgacggccaagggggaggccctcgcggcgtgccacgcggacgcgttcccgggtatctcgcagtcggcgtacgagaagctcggcgtggagccggggagcgtgcccgtgtgccactttgaagccaagctttattttcagttgcgcatccagagcatgctgtcctggggcaggaagtggcacacgggcacacgggcggtcatcgacggagttgacctcgcgctcgatggacttggtggcggcgcggatgacctcgatctgcgggcccagccactgcggcgacgtgcggagcgcgtaccggtcctgcttgggcttcagcagcgggtcgagctcgttcaccttcttggcgtgcttcatgaaggcgctgccctcgaggatgtgctccatg

SEQ ID NO: 18192 - DNA, 421 bp, Setaria italica
  Peptide Sequence Number=SeqID_84166
aaacactgttaatttcaacgtataacaaaccaaaggcacaaaggaatcaagttggtcaggagcagaatgggagagcaggattcttatgatcttatcccaagcggaggcttcgaaacggacctcgagaatgtagcgggcaacccatatctcgtcgccggcagagatcccaacggacggcccaacttggaactcccactgtcagaaacggaatagtccgggttcagaatcagcacgcatccatcacatagctttgatacacgatgtcccatgctgggggttggtccgtccaacggctgcaacttgcaggggttgttgtacctggccgggcatgacttcgccgttgatgccgctgatgttgatgccggcgtagaggcaggccttgtagtgggcgtcaacgacgtcgcgcccaaaaggccttatg

SEQ ID NO: 18193 - DNA, 243 bp, Setaria italica
  Peptide Sequence Number=SeqID_84167
ggaggatggagctagcgccatcctcctccttaacgtcaaacagtagcgctagctgccaccgtatgcagaagtcgacgcaccgcttcttgttcactggatcatgatgatgctggcacttgaggctcgcacatagctcggctaccgtggaggctggagctagcgccaccgacaccatcaccgctggtgaggtcggcgtctgcgccaaccggcgtatatgcaagatcaagtgccagcaccatcacg

SEQ ID NO: 18194 - DNA, 497 bp, Setaria italica
  Peptide Sequence Number=SeqID_84168
catatgttactaatcctttgacatggaatactgtgtagcttgttctggatctaataataaacaagtaatgaatcatgaagctagcaaccatagtactattgtactagctagttgaagatgaacaggacgatatcaaaccggcgcactgattcctccttgtacattaaagctacagtaggcagctcattccactggcagcagtggggcaagtgacccaagattgccttgttaccatacacggttgccttcttaacatacacatacacaaaacagacaaacaacaaagaacaaaagcagaaaatattgcttagttctcagttattaggtaacgataaaacagaaacttaaaatctatttgcacaagactaccacacatacaagaggatcaccagtgtatgcttaagggccacttatacagacaaaacaatcacatgtgagcattctctaaaggtatatcttctgcacaagtgtctctcaaagcatcctataaaaaggca

SEQ ID NO: 18195 - DNA, 732 bp, Setaria italica
  Peptide Sequence Number=SeqID_84169
cgagcatggggtcgacgagcttgccctggctgatcccgacgaacaccttgttgcactcctcgccgggggacttgagcttctcgccggtcaggaacacgcacccgagctcctcgcggatcaaggacagccggtcgttcccgctgtaccgcttcgtccgcgaggagctcgggtgcgtgttcctgaccggcgagaagctcaagtccccggcgaggagtgcaacaaggtgttcgtcgggatcagccagggcaagctcgtcgaccccatgctcgagtgcctcaaggagtgggacggcaagccgctgcccatcaactaaggagaagaggaggagaaaaatacaactacactgcttgtatgtccagatcgtgccgtcgttcttcgatcgttcgttgaattgggtacgtagcatatggttcaccccaaatacaactgctgccgagcagctacacaaagaacaacgccacacaggcacactatatgggtcgaccaataatacaaccaaaggtcacccaatgcaacgaacgatcgaagaacgacggcacgatctggacatacaagcagtgtagttgtatttttctcctcctcttctccttagttgatgggcagcggcttgccgtcccactccttgaggcactcgagcatggggtcgacgagcttgccctggctgatcccgacgaacaccttgttgcactcctgaccggcgagaagctcaagtcccccggcgaggagttgcaa

SEQ ID NO: 18196 - DNA, 622 bp, Setaria italica
  Peptide Sequence Number=SeqID_84170
aacattatgccatctaaggccattgcattgcttgcttcctccacagatctcatctcaacaaaagcaaatttcttgtcatggtttatgtagacattaagaacagcatcacctggaccagcagtgtttcctccaatagctgccataactccattgaagaatatggcaacagtctgctcattagcagttggaggaagtccaccaacatacacacgccgagcatgtcgagtagcctgttgtgtcatggcttgaggttgaataagggggttcatcggtcccattaataagtttggaaacatccctggtataggagtgactacaggcagctgacattaaagctacagtagccagctcattccattggcagcagattggacaaagcagcccaagattgccttcaggaacagcaccagcagtaactataggcatcgtctgttgcagcggtccttgatcaaatccactcacacgcttgctctttgaacgagagcgtgaacgagatctagatctgcggtcacggtcacgactcttggacggagagcgggagcgggatcgatgcctacggtggccatctctgtcacgatctcttctcctttcagaatcaaggctcctgtgacggtcacgatca

SEQ ID NO: 18197 - DNA, 1364 bp, Setaria italica
  Peptide Sequence Number=SeqID_84171
tgaagaaggaaagatgtacagggacattgttggaagtgcttattatgttgctcctgaagtccttaggcgtagctacggaaaagagatagatgtttggagtgccggtgttatgttgtacattcttctcagtggcgtgcctccattttgggctgaaaccgaaaaggggatatttgatgctattctgcatgaggagattgacttttgaaagtcaaccttggccatcaatttctgagagtgctaaagacctggttaggaagatgttgacacgagatccaaagaaaagacttacttcgggtcaagttcttcgtaagcttctagcactgcgttaatttctaattcagcaacttttcagaaataataataataataatttgtacgttaatgcttgatacagaacatccttggctcagagaaggtggagacgcatctgataagcctattgacagtgctgttctttctagaatgaagcaattcagagcaatgaataagctgaaaaagatggctctgaaggttattatcttcatgttgatgcttgcttagctattttttcccttcatttgtgcttattaccaaatgtatgtgcaggttattgcttcaaaccttaatgaggaagagatcaagggcttgaagcaaatgttcatgaacatggacacagacaacagtggtacaatcacatactaagaactcaaagcaggattagccaaacttggatcaaagctgtcagaagctgaagtaaagcagttgatggaggctgtatgttctaatctggaattaagttactgtacactttcggaatcttgttcttggcttccttgcatgcttaccttttggcattttccaggctgatgttgatgggaatggatccattgactatgttgagttcatcactgccacaatgcatagacacaagctcgaacgagatgagcatttgttcaaggcattccagtactttgataaagataacagtggcttcatcacaagagatgagctagagtcagcttatcaaagtactggaatgccttgaacaaatgctcatctcgttcgagcttgtgtctatgcattgtggcagtgatgaactcaacatagtcaatggatccattcccatcaacatcagcagcctccatcaactgctttacttcagcttctgacagctttgatccaagtttggctaatcctgctttgagttcttcgtatgtgattgtaccactgttgtctgtgtccatgttcatgaacatttgcttcaagcccttgatctcttcctcattaaggtttgaagcaataaccttcagagccatctttttcagcttattcattgctctgaattgcttcattctagaaagaacagcactgtcaataggcttatt

SEQ ID NO: 18198 - DNA, 491 bp, Setaria italica
  Peptide Sequence Number=SeqID_84172
tagttacaagtagaactacaattagaccaaagaaacgccgctctctgcttgtgttcgtctctgaatcgatctcgcgaggatgtcgtgctgcggaggcaactgcgggtgcgggtccggctgcaagtgcggcagcggctgcggagggtgcaagatgtacccggacatggctgagcagggcaccaccaccacccagaccgtcatcacgggcgttgcgccttccaacaaggggcacgccgacggcgggttcgagggcggcgcggcgtccgccggagccgagaacggcgggtgcaagtgcggccccaactgcacctgcaacccctgcacctgcggcaagtgatgagctcatggcgcggccccctggcccggaggaggcgatcggaaggcaccctagtatagcagtgttgtgtcctaagtgtgtgtgtggcatgcttaataacagtgttgcgcgtgctgctagtaatcgtagtactgatggagaagaataacggtac

SEQ ID NO: 18199 - DNA, 538 bp, Setaria italica
  Peptide Sequence Number=SeqID_84173
caaccacgtgcagagcgcggagcagcacaaccaggacgtgaactccctcggcctcgtctcggccaggaagaccgccgaggccatcgacatcctcaagctcatgtcctccacctacatggttggtgatggggttgccgaggtactggagctcggagcagtaggaggccatggcgatctcggtgcccttgaagccgtagtcaaggctggggttgcggctgccggccaggttggaggtgaggccgttgttgtagaactcgttcacgagctcggagaactgcgcgaacatgagcttcccgatgttggcgatggcgaggcgggcgttgtccatggacacgccgatgggggtgccctggaagttgcctccgtgaagcgccttgccacggtggacgtcgatgaccggattgtcgttgaccgagttgacctcgcgctcgatggacttggtggcggcgcggatgacctcgatctgcgggccgagccactgcggcgacgtgcggagcgcgtacctgtcctgcttgggcttgagcagcgggtccagctc

SEQ ID NO: 18200 - DNA, 686 bp, Setaria italica
  Peptide Sequence Number=SeqID_84174
tgggactacacatggaggcaggccaggagatctccaattcagtgtcccctaatgattcagttgatctgtcgatcaaagatgacagccagtggtctgatcaggatcatcttaaagtttcgggttaatgctatcaaaggacttattgcacttctgaatggagaaacagaatcagcccagctgttcactgatgggtgcaaagacttcgctggaggcaaacaccaaacagaaagtgctgccttttcatacggtgaatatttgcattgtgttggggattttccaatggcaacacaagtgtatgagagtgttcttgaggcagctcgcatggaagatatgtctggaaaccttttagcagctggaaacatggttcctgaggaggtttctcttggggccacttgctcatatggccagcttttatctcactctgggaagtttggtgaggcagaggattatctcacaagggcactacaaaaggctcaagaacaatttggttcaaaccacccaaaggtcggcatcgtgttgacctgtgtagctagaatgtacaaactcttagcaatgtctgaaggttctagttcaattatggccgggcatgacttcgccgttgatgccgctgatgttgatgccggcgtagaggcaggccttgtagtgggcgtcaacgacgtcgcgcccaaaggccttatcggcaccgg

SEQ ID NO: 18201 - DNA, 544 bp, Setaria italica
  Peptide Sequence Number=SeqID_84175
ggcgggagaggatctcctggatcctggcggaggcgaacgggatggtgttggcgagggcgcgtgggagggcggcgccggcggcggcgagggtgaagtggagcgtcatcttggagcccgggtacaggtccttgtcgaggaagaacgccgtgcccaccgagtcgtcctggtactgagctgaagctgccacggcggcgacctgttagttcccacatgcaggcagaagcaaagcaatccttgttaatcttgacataatggacaagtaacagatatcattaagtctgctaccgaacagatgtattattcttgagaaatgagaatcaaattaaacgcatatacaacttgaacaagtgaatttatcgtgataatctgttgtaccctttctagctaggttttatacacgatcgaattaggttttgggccggggttaatgattcactggttgcgcataagctaagctcaccaggaggaggaggagagctgagagggacctagccattgcaatgcaagctggaaattggtaattggtaacctaagtctagtttgt

SEQ ID NO: 18202 - DNA, 239 bp, Setaria italica
  Peptide Sequence Number=SeqID_84176
cgcttgcccagcttctcgatcgccttcttgatcacctcgtagcccccgggctccctcatcgacttggtgctgtagttggtgtgagcgccggcgccgttccagtcacccttgattggcttcgggtcgagggacagcacgactccggccatctcggtgatcctctcgagaatgtagcgggcaacccatatctcgtcgccggcagagatcccaacggacggcccaacttgatcacctcgtag

SEQ ID NO: 18203 - DNA, 795 bp, Setaria italica
  misc_feature (655)..(655): n is a, c, g, or t
  Peptide Sequence Number=SeqID_84177
ctgaaaataaagcttggcttcaaagtggcgcggcgcgagcaagtgctacgtgtgtataaaaaactaagtggctgatcacgtacttgatcgcctgttctatcggctaccggatcactgaaatgtattacgtatatcgattattacacacccacacaacatactgtattacatttcagtgatccggtagccgatagaacaggcgatcaagtacgtgatcagccacttagttttttatacacacgtagcacttgctcgcgccgcgccactttgaagccaagctttattttcagttgcgcatccagagcatgctgtcctggggcaggaagtggcacacgggcacgctcccccggctccacgccgagcttctcgtacgccgactgcgagatacccgggaacgcgtccgcgtggcacgcgaacacggcgtacggatagggcatgcggtggcaggcaaccatgtcgccgccggccaccggcaggggcctgacggacaccgtgttcgcgtgccacgcaaccaccgccgccgtgtacgcggtgagcctcgccggcgccgacgggacgacggccaaggggggaggccctcgcggcgtgccacgccgacgcgttcccgggtatctcgcagtcggcgtacgagaagctcggcgtggagccgggggancgtgcccgtgtgccacttcctgccccaggacagcatgctctggatgcgcaactgaaaataagcttggcttcaaagtggcgcggcgcgagcaagtgctacgtgtgtaataaaaaactagtggctgatcacgtacttgatcg

SEQ ID NO: 18204 - DNA, 851 bp, Setaria italica
  Peptide Sequence Number=SeqID_84178
catcaccgctggtgatggtgtcggtggcgctagctccatcctcctccttaacgtcaaacagtagcgctagctgccaccgtatgcagaagtcgacgcaccgcttcttgttcactggatcatgatgatgctggcacttgagctcgcacatagctcggctaccgtttgacgctgcggaggagggagccaccgctggcgacgacagcctccacggtagccgagctatgtgcgagctcaagtgccagcatcatcatgatccagtgaacaagaagcggtgcgtcgacttctgcatacggtggcagctagcgctactgtttgacgttaaggaggaggaataggaagactaagacgccaccgacaccatcaccgctggtgaggtcggcgtctgcgccaaccggcgtatatgcaagatcaagtgccagcaccatcacgaccaggtgaacagcaaccggtgcaccgacttctgcatagggtaccaagtggcactagatgccattatggagaatggagccaccgccaccgtcactgctggtgaggacacgttacgcggtagcaggcgtacgtgcgagctcaagtgtcagcaccaccataacccggtgaacaagaagaggtgcgtcgacttctgcattcggtaccagctggcactgcatgatatcaatgatggaaccaccgccgccgctgccggcggagccatccgccaggtggtgtgacgccggcgcgtgcatggacggcatgaataagggcctaagtacgtgtcgctggatatttacagactgctcgtgtgcgtttgtcttttacgttgatgtgtgtgtgatgtgtgagaggccctgaccgaatatgtaagcttcggtcag

SEQ ID NO: 18205 - DNA, 759 bp, Setaria italica
  Peptide Sequence Number=SeqID_84179
gtccgtccacatctgcatattccaaaaacaccttcccaactccagcaacaggagccccgctggggtcaggccgtgggattacaactttcaccaagttacctgtccaagtgttagtgagtacatccatagacagagggtaataataatataataatatacatgattaatcaaactcaaaagaaagtgtgtcttctgtaggttaaggcccgattgccaatattgcatagggtcggactataaaacactctgcaatggcattatgtgggactacaaaaaagacacacaaaaagacaaacacacaaaaggaaaccagttcagtaactgagggaaggcaatcaaaacaattatagaacagaatataagaggtcaaaacaaggaggggacagaaatccagggtttcatgcagcataccatatttgcgtccttcttccctcatgtcctccacaatgtcctcatattcctcatcatctcttagttcatctgctgtgactacctgtgtcagacatacgacttttgttggaagggcacctccaacttggtacacgagtttctgcatttgcacctgttgttgtgcctgcaacaggatactttcctgctctggtctaggctgagcagctccttggttcgcccgcctaacagtaagggtcttgtctcccatcttgataccgttaagagcagcacaggcaatgtcggtaacagtaagattcctggtacacacagaaagcattagtccctttcgtagtttacctagttttccct

SEQ ID NO: 18206 - DNA, 675 bp, Setaria italica
  Peptide Sequence Number=SeqID_84180
tagtacgttagaacggaagttagaacctacgacgactacgaataggacttggtggcggcgcggatgacctcgatctgcgggcccagccactgcggcgacgtgcggagcgcgtaccggtcctgcttgggcttcagcagcgggtcgagctcgttcaccttcttggcgtgcttcatgaaggcgctgccctcgaggatgtgctccatgatggcggcggcctcgatggagcccgggtggtgcttgagcttgtgggtgaggtggtcggtgtactcgggcttgccgttcatcacctcacagaagacggcggacaggacctcggagaggacggcgaggaggttggcgtcgtacagcacggtggccgcgagcgcggagccgacggaggtgccgttgacgatggcgaggccctccttggggttgagcctgaagaacccgcctcgattccggcgaccttgaacgcctcggcggcgtccaccttcctgccgtcgacggtgacggcctgcgcgttggggcggcccgtgatgaggccggcgatgtaggagagcggcacgaggtcgcccgacgccgtgatggtgccacggagcggcaggcacgggctcacgccggagttgagcagcttggtgatggcctcgaggatctcgaagcggatgccggagtacgcccgtgcctgccgctccgtgg

SEQ ID NO: 18207 - DNA, 684 bp, Setaria italica
  Peptide Sequence Number=SeqID_84181
aaaatccaactgacaccaacggttttgatgcgtgtccaggcgttgacgatcatctgtcagtctcagttccccttccccaggatggtggtctcggcgatcatgccggtgacgacgtaggggtccatgttggaggcccggcctgcggtcctcgaagtagcccttgccttccttctccgtgtcgcgccccacccggatggacgcgccgcggttcgccacgccctgcagcacgcacgcagcggtagggtgagcaacgagcagaaatcgcagggaagccatggcggcattcgatcatcatcctacccatttgaaggtgttgatgtcggcggtctcgtggtggcccgtgaggcggcgctcgttgccctcgccgtaggccgcgatgtgctccttgtgccgcttgcccagcttctcgatcgccttcttgatcacctcgtagcccccgggctccctcatcgacttggtgctgtagttggtgtgagcgccggcgccgttccagtcaccctgcatttgcaaacaacaagcaccagtttgaaccatcagcttcttgtaatttcctgacaggatgtctgaatctgaaacagtgaaaagaacgtttttgtgaaccttgattggcttcgggtcgagggacagcacgactccggccatctcggtgatcctctgcaaccaaccagtcaacaaaaaacactg

SEQ ID NO: 18208 - DNA, 578 bp, Setaria italica
  Peptide Sequence Number=SeqID_84182
agtgactcattgccaagaacgccgctctctgcttgtgttcgtctctgaatcgatctcgcgaggatgtcgtgctgcggaggcaactgcgggtgcgggtccggctgcaagtgcggcagcggctgcggagggtaagccccacgacgccacgctcctcagatctctgatagtctgatgcgtgtctatcatgtgtcaatacccatatgaatgcatggattcggttgttcttttgttcttgctggacctttgtggatggatctttgagtataggatatgtagagctgggagatcaagctccccttttttattttagaaaaaaaagaagaggttttctcatgttttgctgcgcatgtgaattcctgtctgatgaactccgattctctgaaacgatgtgcatgctgttgttgtgctccttcaacaagggaaatttctgatgatgctgatctgccgcttgcatgatctgcaggtgcaagatgtacccggacatggctgagcagggcaccaccaccacccagaccgtcatcacgggcgttgcgccttccaacaaggggcacgccgacggcgggttcgagggcggcgcg

SEQ ID NO: 18209 - DNA, 854 bp, Setaria italica
  Peptide Sequence Number=SeqID_84183
ctgaccactctgcaactcgctaatctttgtctgtactgtatccactcttcactccatcatctccttggggacagggcatggctcctctgttcagcagatggacaggggctcgccgttccactccttgaggcactcgagcacggcgtcgatgtgcttgcccagattcatggccacgaacaccttgtccacctcctcgccgggggacctcgtcttctctccggtcaggtactgggtgccgagctcctcgcgcacgaacctgtacagcgggtacgaccggcactcggcgatcctgttcgggatcgcggcggtgccgttctccacggcggcacgagcggcctccacctcccgcggcagagccgcgcggatctcctcctcgaacgtggcgaccttggcgaacaccgaggtctccgggtcgcgctcggcctcgccgttggccagcgcgtgctcgacgagcaccgaccgcatcttctgcatcagcgggtagttagcgctgcaggagtcgtcggcgtacgcgaacaccgcctcgcggtcgatcgccgtgagcaggtccttctcgcagaagcgcgcgttgtggagggcgccggtggcgccggtgcttagggtcttcttggccaccgtcatcacgcagctcttcacggcgcccttcaggttctcctccaggtggcgcaggtcgatggcctggcacagcgcgataaggaacgtcgacgacatgagcttcaggatgtccacggcctcggccgtcttcctggacgagatgaggcccagggaattgacgtcctggttgtgctgctccgcgctctggacgtggttggtcacggggttgcccaggaactggagctcggagcagtaggagg

SEQ ID NO: 18210 - DNA, 598 bp, Setaria italica
  Peptide Sequence Number=SeqID_84184
acaccggcgatctcggtgatcctctcaagaatgtagcgggcaacccacacctagtcaccagcagaaatgccgacggacgggccgacttggaactcccactgtcctggcatgacctctccgttgatgccactgatgttgatgccggcatacaggcaagccttgtagtgggagtcaactatgtcgcgcccgaaagacttgtctgcgccgataccgcagtagtaaggaccctgagggccagggaagccaccaacaggccacccaaggggccagttggtgtccttctgaaggagggtgtactcctgctcaataccataccagggctcctcagcagagacctcagggttgctgaagatcttggcggcgttgtgcctcttgttggtgggaatcggctcgccagctggggtgtagcaatcgcacatgacaaggatgttgttgcccttcctgaatgggtccttgaagatagcctgcgggctgcaggatgtcacatgcccaagagataaggataactccatgtctgctagcaaaacagaaacgaggacacgcaagcacggcagccatgacacttactacaggatgacctcactgtcctcgccggggg

SEQ ID NO: 18211 - DNA, 931 bp, Setaria italica
  Peptide Sequence Number=SeqID_84185
gactcattgccaagaacgccgctctctgcttgtgttcgtctctgaatcgatctcgcgaggatgtcgtgctgcggaggcaactgcgggtgcgggtccggctgcaagtgcggcagcggctgcggagggtgcaagatgtacccggacatggctgagcagggcaccaccaccacccagaccgtcatcacgggcgttgcgccttccaacaaggggtatgttcatccatcccttttcccatctactgatctacatcatgctcatagatcattccggtgttgtgttgatctgaatgatccaccatccacacctttgctaataatagcagtcagtttctgtggtgcagaattactagctgtactatttttactgtcttttgccttgtgttgtgggggtagatcgatcgatcgtgtagagagcagtaccaacttctgttagcatgcgtagctgtggtgtctgtctgcatagtggtagtacaaatttcagtcgccatcagcaacgagcagggagcagtaagctacgacgaaagcagtttttggcaatcatgaaacaaacagactgctggcccaaaaacagaaacaaaaaaagaactttaatttgtcctgaactgagaagtctgggacgtcatacagctcgtatgtagctgctggtagcgaacatgccaaaaatgctctgtatgcatgtatgagccaggccactgactctgtcatatcttggctttctctgcgcaggcacgccgacggcgggttcgagggcggcgcggcgtccgccggagccgagaacggcgggtgcaagtgcggccccaactgcacctgcaacccctgcacctgcggcaagtgatgagctcatggcgcggcccctggccggaggaggcgatcggaaggacaccctagtatagcagtgttgtgtcctaagtgtgtgtgtggcacgcgcaaca

SEQ ID NO: 18212 - DNA, 768 bp, Setaria italica
  Peptide Sequence Number=SeqID_84186
cttcatcaaaactaagataaaaaacaaaaaatttgagttctaacttcctcaaactaagataaaaacaaccagtgtggcgtgactccaactctagcataattctaacttcatctgtccatactgctcagcagcgaacctgtcctcgggtagaacacctggctcaagccaaacttcatccgtcatactgctcggcagcgaacttgtcctcggggtagaacacggccaccacctggttcccgccaaacttcctcccgtgcatgcccgtcttcgccttggtcgatccgtccacatctgcatattccaaaaacaccttcccaactccagcaacaggagccccgctggggtcaggccgtgggattacaactttcaccaagttaccatatttgcgtccttcttccctcatgtcctccacaatgtcctcatattcctcatcatctcttagttcatctgctgtgactacctgtgtcagacatacgacttttgttggaagggcacctccaacttggtacacgagtttctgcatttgcacctgttgttgtgcctgcaacaggatactttcctgctctggtctaggctgagcagctccttggttcgcccgcctaacagtaagggtcttgtctcccatcttgataccgttaagagcagcacaggcaatgtcggtaacagtaagatcctggtacacacagaaagcatagcccttcgagttaccagtttccctatccttcacaagatcaaatccccgcagaggaccaaaggactcgagcaact

SEQ ID NO: 18213 - DNA, 604 bp, Setaria italica
  Peptide Sequence Number=SeqID_84187
atttcttctccctgtcaaccttttccttggagaaattcggcctggctattttactcgctgcgagatctttagctcccgggccccgtgtggattagtcgctgtcacgatcgacgcgggggcgccaattgcggtggccaccacctccaatccactccccgcggtcgccgcgccgagctgtccttgctctgtcctccctcctaaccttctccgctgctcctccaagatttgatctttagacctatctcctgagcccagttcttcctgcggtggaggggtggttgcttccgcgggtctcttgaggttggaatcctgttcctctcagtaggtaggttcagttcttgatagttctaatctgctcagcagccaggttgcaagcttggaactcgaaggaataatttgactagagaaatgggtcagtgttgcagcagagctacggccccggattctggacggggagttaccaatgggtatggctattctaaccaggcaaagccagcacatacacctcccagttacaatgctcctccgccaccgactgaggtacggtacacgccgccggcgatgaaccctccagtagtcccacctgtagttgtccccaccgaaa

SEQ ID NO: 18214 - DNA, 650 bp, Setaria italica
  misc_feature (589)..(589): n is a, c, g, or t
  Peptide Sequence Number=SeqID_84188
cgtctcgttcaaagagcaagacgtgtgagtggatttgatcaaggaccgctgcaacagacgatgcctatagttactgctggtgctgttcctggtcagctgcctgtagtcactcctataccagggatgtttccaaacttattaatgggaccgatgaacccccttattcaacctcaagccatgacacaacaggctactcgacatgctcggcgtgtttatgtagacattaagaacagcatcacctggaccagcagtgtttcctccaatagcagccatgacttgattaaagtaaactgccactgtctgttcattagcagatggagggagaccaccgacataaacacgccgagcatgacgagtagcctgttgagtcattgcttgtggctggatgacaagggggttgaactgcccagtaacaccaaaaggtagcatgttgggaaacatgccaccaatgtttggaagagaagagcccggtaactggcttggggttggaataactggaaatgttgaactcattgcttgtgggggtggcgcatcaaatccactaactcgtttgctccttgaacgtgaccgatctgtgccccttgaacgngaccgtgagcgagaacggttcctgcggtgcccatctctatcacgatctcttctcctttcag

SEQ ID NO: 18215 - DNA, 1194 bp, Setaria italica
  Peptide Sequence Number=SeqID_84189
tccaacgaacaacccttttagcataacaacgaacatgtaaaacgggaaaaaaaaatactcgtcagcaagagcggctatgttcttctccctatctgttctctgctcagcagatgggcaggggctcgccgttccactccttgaggcactcgagcagcgggtcgatgtgctttccctggttgatggcaacgagcaccttgttcagttcctcgccgggagaacgcgtcttctcgccggtcaggtacaccgctccgagctcctcgcgaacgaaccggtagagcgggtacgagcggcactcggtgatcctgatgggtatcgccgccgtgccgttctcgacggccgcccgtgctgcctccaccgccttgggcagcgccgcgcgcagctcctcctcgaactgggcgaccttggcgagcacggatgtctcggcgttgaactcggccgtgccgttggcgagggcgcgctccacgagcacattgcgcagcttcttcatgagcgggtagttggcgctgcacgggtcgtcggcgtaggcgaacactgcctcgcgctcgatctcctggagcaggtccttctcgcagaagcgggcgacgtggaggccaccggtggagttggtgctcagggtcttcttcgccaccgtcatcacgcagctcttgacggcgctcttgacgttctcctcgatgtggcgcaggtcgacggcctggcacagcgcgatcaagaacgtcgaggacatgatcttcaggatctcgatggcctcggcggtcttcctagaggagatgagtccgagggagttcacgtcctggttgtgctgctccgcgctctggacgtggttggtcaccgggttgcccaggaactgcagctcggagcagtacgatgccatggcgatctcggcgcccttgaacccgtagtccaagctcgggttgcggccgccggacaagttggatggcaggccgttgttgtagtagtcgttgacgagctctgagaactgagcaaacatgagcttgccgatggcggcgatggcgaggcgggtgttgtccatggacacgccgatgggcgtgccctggaagttgccaccgtgaagcgccttgctgcgggcgacgtcgatgagcgggttgtcgttgacggagttaatctctcgctcaatggacttggtcgcggcacggatgacctcaatttgggggccaagccactgcggcgacgtgg

SEQ ID NO: 18216 - DNA, 2248 bp, Setaria italica
  Peptide Sequence Number=SeqID_84190
aacccggtgatcgacgtccaccgtggcaaggcgctccacggtggcaacttccagggcaccccccatcggtgtgtccatggacaacgcccgcctcgccatcgccaacatcggcaagctcatgttcgcgtctagtttcttccgtagtcttcgtgaacgagttctacaacaacggcctcacctccaacctggccggcagccgcaaccccagcctggactatgggttcaagggcaccgagatcgccatggcctcctactgctccgagctccagtacctcggcaaccccatcaccaaccacgtccagagcgcggagcagcacaaccaggacgtgaactcgctcggcctcgtctcggccaggaagaccgctgaggccatcgacatcctcaagctcatgtcctccacctacatcgtcgcgctctgccaggccatcgacctgcgccacctcgaggagaacatcaagacctcggtcaagaacacggtgacccaggtggcgaaaaaggtgctgaccatgaacccggccggcgagctctccagcgcgcggttcagcgagaaggacctcctcaccgccatcgaccgcgagggtgtgttcacctacgccgaggacgccgccagcgccagcctccacctcctggggcagcaccgcgcgcagctcctcctcgaacttggtgatcttggagaacatggagggctcgtcgccgctgctgaaggcgtggtccaccagcacggcacgcaggcttcgtgcatcagcgggaggctggcgctggccgcgtcctcggcgtaggtgaacacgccctcgcggtcgatggcggtgatgaggtccttctcgctgaagcgcgcgctggagaggtcgccggtggggttcatggtcagcaccttcttggccacctgggtcacggtgttcttcacggaggtcttgatgttctcctcgaggtggcgcaggtcgatggcctggcagagcgcgaccatgtaggtggaggacatgagcttgaggatgtcgatggcctcggcggtcttcctggccgagacgaggccgagggagttcacgtcctggttgtgctgctccgcgctctgcacgtggttggtgatggggttgccgaggtactggagctcggagcagtaggaggccatggcgatctcggtgcccttgaagccgtagtcaaggctggggttgcggctgccggccaggttggaggtgaggccgttgttgtagaactcgttcacgagctcggagaactgcgcgaacatgagcttcccgatgttggcgatggcgaggcgggcgttgtccatggacacgccgatgggggtgccctggaagttgcctccgtgaagcgccttgccgcggtggacatcgatgacaggattgtcgttgaccgagttgacctcgcgctcgatggacttggtggcagcgcggatgacctcgatctgcgggccgagccactgcggcgacgtgcggagcgcgtactggtcttgtttaggcttcaggagcgggtccatggcgttgacctccttggcgtgcttcatcaacgagctaccatcaaggatgtgctccatgatcgccgcggcctcgatggagcccgggtggtgcttgagcttgtgggtcaggtggtcggcgtactcgggcttgccgttcatgacctcgcagaagacggcggacagcaccacggccaggacggcgaggacgttggcgtcgaagcagaccatggccgcgagcgccgagccaacggacgtgccgttcaccatggcgaggccctccttggggttgagcttgaagaagccaccctcgatgccggcgaccttgaacgcctcggcggcgtccaccttcctgccgtcgacggtgacggcctgcgcgttggggcgcccggtgatgaggacggcaatgtaggacaagggtacaaggtcccccgacgcggtgatgctgccacggaggggcaggcacgggctgacgccggtgttaatgagcttggcgatggcctcgaggatctcgaagcggatgccggagtagccctgcatcagggcattgatgcggacaagcatcgctgcacgtgatacctgggacggtagcgtatggccgtcggagccggtgccgaaaattccagcgttgagatacctgagcagctcgacctggagcgcgtgcccgtccttggtgcggcggtgcgagttgcccccgaagccggtggtgacgccgtagatgtcgccgccgttctcgatgcagctgaggacccactcgctgctggccttgacccggaggcg

SEQ ID NO: 18217 - DNA, 1357 bp, Setaria italica
  Peptide Sequence Number=SeqID_84191
caccgggttgcccaggaactgcagctcagagcagtaggaggccatggcgatctcagcgcccttgaaaccgtagtccaggctggggttgcgccctccaacctgtctggtgggcgcaaccccagcctggttggagggcaggccgttgttgtagaagtcgttcaccagctcggagaactgcgcgaacatgagcttgccgatggcggcaagggcgagacgggtgttgtccatggacacaccaatgggagtgccctggaagttgccgccgtggagcgccttgccacgggagacatcgatgagcgggttgtcgttgacggagttgatctcgcgctcaatggacttggtggcgaagcggatgacttcgatctgtgggccgagccactgcggcgaggtgcggagcgcgtatctgtcctgcttcggcttcatcagtgggtcgagctcgccgagcttcttagcaagcttcatgtaggagctgccctccaaaatgtgctccatgatggcagcggcctcgatctgtcccgggtggtgcttcagcttgtgggtcaggtggtcggtgtattccggcttgccgttcatgacctcacagaacaccgcggagaggacctcggcaagaacagcaagaacgttcgcctcaaagagcacggtcgatgcaagaccagagcctacggccgtgccgttgaccatggcgaggccttccttgggctgcaactcgaagaagccgccctggataccggcaatcttgaacgcctccgcagcgttcaccttggtgccatctggggcgactgccacagagttctcgcgcccggtgacgaggccggcaatgtaggatagagggacgaggtcgccggacgcggtgaccgtgccccggagcggcaggcacggcgtgacgttggcgttgagcagcttgacaattgcctcgaggatctcgaagcggatgccggagtacccctggagcagggtgttgatgcgcacgagcatggccgcacgcgttgcctcggccggcaggacgtggccgtcgggtgccggtgccaaaggcgccggcgttgaggaaccggatgagctcccgctggagcgcgccgccctccttggtccggcggtgggaggtggcgccgaagccggtggtgacgccgtagctgtcggtgccgttcatcatgctgttcatgacccagtcgctgctggccttgacgcggccgcgggcggactcgtcgagctcgacccgggcctcgccggcgccgttggccacggcggcgacctgggcgaccgtcaggctggagccctcgatcctcacgagaggcctccggtactcctccaccatccgcttcacggcctccaggtgctgccggacaggtccctccgcccg

SEQ ID NO: 18218 - DNA, 633 bp, Setaria italica
  Peptide Sequence Number=SeqID_84192
tttaggaacaacctgcaatttagaacggagggagtacatggatagtattacgtatatcgattattacacacccacacaacatactgtattacatttcagtgatccggtagccgatagaacaggcgatcaagtacgtgatcagccacttagtttttatacacacgtagcacttgctcgcgccgcgccactttgaagccaagctttattttcagttgcgcatccagagcatgctgtcctggggcaggaagtggcacacgggcacgctccccggctccacgccgagcttctcgtacgccgactgcgagatacccgggaacgcgtccgcgtggcacgccgcgagggcctcccccttggccgtcgtcccgtcggcgccggcgaggctcaccgcgtacacggcggcggtggttgcgtggcacgcgaacacggcgtacggatagggcatgcggtggcaggcaaccatgtcgccgccggccaccggcaggggcctgacggacaccatcgtgtactcctgcctcgtcgtcgcgccttccgtgctggtgagcttggtcgccgcctccatcctcggcacccggaacatccgcgcggcggcgaggtcggccatggagtctggggaggtgacgcagcgcagggcct

SEQ ID NO: 18219 - DNA, 1153 bp, Setaria italica
  Peptide Sequence Number=SeqID_84193
gttcgcgtacgcggacgacccgtgcagcccaactaccactgatgcagaagctccgcgcggtgctgatcgagcacgcgctggccaacggtgacgccgagcgtgtcgtggagacctccatctttgccaaggtggccgagttcgagcagcaggtccgcgccgcgctgcccaaggaggtggaggccgcgcgcgcggccgtggagagcggcagacccatggtccccaacaggatcaaggagtgccgctcctacccgctgtaccggtcgtccgcgtacgcgaacaccgcctcccggtcgatcgccgtctgcaggtccttctcgcagaagcgcgcgatgtggaggccgcccatggcgttcatgctcagggtcttcttggccacctgagtcacgcagttcttcaccgcggccttcatgttctcctcgaggtggcgcaggtcgatggcctggcacagggcgatcaggaacgtggaggtcatgagcttcaggatctcgatggcctcggcggtcttcctggaagagatgaggcccagcgagttcacgtcctggttgtgctgctccgcgctctggacgtggttggtcaccgggttgcccaggaactgcagctcagagcagtaggaggccatggcgatctcagcgcccttgaaaccgtagtccaggctggggttgcgcccaccagacaggttggagggcaggccgttgttgtagaagtcgttcaccagctcggagaactgcgcgaacatgagcttgccgatggcggcaagggcgagacgggtgttgtccatggacacaccaatgggagtgccctggaagttgccgccgtggagcgccttgccacgggagacatcgatgagcgggttgtcgttgacggagttgatctcgcgctcaatggacttggtggcgaagcggatgacttcgatctgtgggcccgagccactgcggcgaggtgcggagcgcgtatctgtcctgcttcggcttcatcagtgggtcgagctcgccgagcttcttagcaagcttcatgtaggagctgccttccaaaatgtgctccatgatagcggcagcctcaatctgtcccgggtggtgcttcagcttgtgggtcaggtggtcggtgaactctggctcgccatcatggccgaggtcatctccgctgtgttctgcga

SEQ ID NO: 18220 - DNA, 1456 bp, Setaria italica
  Peptide Sequence Number=SeqID_84194
tttttttccctaggataggattgtcattatttggttgcagttgacataggtgatgtataattttacagcttcaggataataatgtacaaaacccaccgacgatgcaatgacactgaaagacctagacctatgccctaatgcgacatgaaagcatgcactgaaggaaccgaaaaaggacaaagaagaagaatggatatacacaaccagatgttcgaaagaatggacctgttctacgatttggacctacatgacctatattatacacaggttggaggccggaccccaattccggcatccacttggtccatgcacagaccaccagctatcagaatttctggcagatggggaatgtacagacactgacagaagctgaacaagagtggcttcatcttcaggcttcagcactttcctaccccatccagcggggcaggtaaaagacattcacattatacgaattctggtaaccatggataatgacaacctttagagtgcaaaagaaaacagtttttgcaagaaaaagaagcatgccgcccaatttagcggttctgctgttcttagtcctgctgcagactataggatacctcaaatttgtcactttctggcatccttgtcagcccgatgcttgttcagaaatgttgttctgtgggaatggtggtgcacgagcagggaccaaaatctgttgctgagggcgtggacctcctggaggaaattgttgctgaacaggtggcatgcgcacaacatttgcagcattaacattctgattcgatagtgggagaccatgacttggtgcataaccaggcgaataagcatgatcacttggtacaggttggccaaactgcccatatgggtagactgctgggcctaccgtcctggggccgccgtaaaccggaacatactgttgtccaacatacggaccatatgcattctgctgatataagtattcaggtccatatgttgatggcccataggaaggatatacaaaggcctgtgagtagttgtaagggggctgctgataggttgggctttgcacatacatgccccctggaaccgccacacctccattgtatgggatgaccggccttacaggcgctacgaaaggcacagctggaccaggcctccccaagatggcgagattgcaattagcgcgccgcccgtctatcaccgggtatgggtccatgcaggccatccttgccgactccgggtccctaaaggttacgaatccgtagcccttggagcggcccgtggcgcggtcggtgatgacgacggcctccatgatgtccccgtagacctcgaagtgcgcgcgcagcccctcgctgcgcgtctcccacgcgaggcccccccacgaagaccttggtgaaggtggtgtccccgtacggcccgctgaggtagtgcagcgccgacgtgcccccgccgccgccgccctccccctccccctccacctcctcctccccctgct

SEQ ID NO: 18221 - DNA, 1563 bp, Setaria italica
  misc_feature (1526)..(1526): n is a, c, g, or t
  Peptide Sequence Number=SeqID_84195
cccttccagagtctccgccgcttagcgcctccagccctccacacgcgcaggcgcagccatggggatgagctcgatccgatcggccctcgcgagggcgcttgttgccccgaagctgcgtggcccccaccggttcgccgccaccgctgccgccggtgatacgcagcccgaaagggtggcggcggagatggtacgttacgcccttggtggcgccgttcaccggagctcgccagaggaggcgatgcggatactggagcaggggggcctctaacctgcagggcggcggcgagggaagcgctgaggccgtggggctgctcatgctcgccatgtccacgctactctaccagagtggaagacgccaagatgcaatggaaaagctcaaagcaacccaacaagttgctccttctgcagccttcagagttgcagcgtgggaagcactaatgggactacacatggaggcaggccaggagatctccaattcagtgtcccctaatgattcagttgatctgtcgatcaaagatgacagccagtggtctgatcaggatcatcttaaatttcgggttaatgctatcaaaggacttattgcacttctgaatggagaaacagaatcagcagcccagctgttcactgatgggtgcaaagacttcgctggaggcaaacaccaaacagaaagtgctgccttttcatacggtgaatatttgcattgtgttggggattttccaatggcaacacaagtgtatgagagtgttcttgaggcagctcgcatggaagatatgtctggaaaccttttagcagctggaaacatggttcctgaggaggtttctcttggggccacttgctcatatggccagcttttatctcactctgggaagtttggtgaggcagaggattatctcacaagggcactacaaaaggctcaagaacaatttggttcaaaccacccaaaggtcggcatcgtgttgacctgtgtagctagaatgtacaaactcttagcaatgtctgaaggttctagttcaattatggttcaggaggggctgtacaggaaggccttagaagtattgaaagcccctgctattaattctgaggaaaccagcaaacatatggattggagagatatcatctcccttgctagaggcgagtatgcagagctgttgctaattcagtccaatcggaaggcggaaggtgaacgtatgaaggagtgggcggaagatgcttggaggaaccgtaggttaacgctagctcaggcactagagttttcatcagaaccttcaaagccgactgtcgttgttgacacccgaatcggccgggtgctgtagctccccatcaacaatctagtgaaatataccctgaaataatcagtgaaacccacttctaaggctctgatggttctgatgaaaactctagtgcctgagctagcgttaacctacggttcctccaagcatcttccgcccactccttcatacgttcaccttccgccttccgattggactgaattgcaacagctctgcatactcgcctctagcaagggngatgatatctctccaatccatatgtttgctggtttcc

SEQ ID NO: 18222 - DNA, 1003 bp, Setaria italica
  Peptide Sequence Number=SeqID_84196
ttttttttaaggaaacaaacctagacaaattttaagaaacggaagggaagtacatggatagtattacgtatatcgattattacacacccacacaacatactgtattacatttcagtgatccggtagccgatagaacaggcgatcaagtacgtgatcagccacttagtttttttatacacacgtagcacttgctcgcgccgcgccactttgaagccaagctttattttcagttgcgcatccagagcatgctgtcctggggcaggaagtggcacacgggcacgctccccggctccacgccgagcttctcgtacgccgactgcgagatacccgggaacgcgtccgcgtggcacgccgcgagggcctccccttggccgtcgtcccgtcggcgccggcgaggctcaccgcgtacacggcggcggtggttgcgtggcacgcgaacacggcgtacggataggccatgcggtggcaggcaaccatgtcgccgccggccaccggcaggggcctgacggacaccatcgtgtactcctgcctcgtcgtcgcgccttccgtgctggtgagcttggtcgccgccgcgcggatgttccgggtgccgaggatggaggcggcgaggtcggccatggagtctggggaggtgacgcagcgcagggcctccacgccggggacgggcgcggcctcgcatgcggcgagggtggaacgcacggccgcggcggcgggggagccggccgggacggggaggcgggagaggatctccctggatcctggcggaggcgaacgggatggtgttggcgagggcgcgtgggagggcggcgccggcggcggcgagggtgaagtggagcgtcatcttggagcccgggtacaggtccttgtcgaggaagaacgccgtgcccaccgagtcgtcctggtactgagctgaagctgccacggcggcgaccaggaggaggaggagagctgagagggacctagccattgcaatgcaagctggaaatggaatggaaccaagcag

SEQ ID NO: 18223 - DNA, 1237 bp, Setaria italica
  Peptide Sequence Number=SeqID_84197
tttttttttttatttagcaaccgatcaacggcagaaacatgagccgttacagtatatactatataggagcaaaacattctattaggttattcagaagaaggaattgagtacagtaccattggtttaccccaaaatacaacgtacaggaccttagaaaacgctgtccgccatggcatgcacatcgccgctggtggcagagcagctacacaaaaagaacaatgccacacacgcacactattatgctgcttggtttgccggaccagtccgtccgggtcggcgtggctccggacgacgtcgtccgatgctttttttgacggacgagttggtttacgtgtagttttattctttccatgtactttttctctcttcctcttcacctcctccggccatgcacggctgcatggatgatggcggcggcgcctggcgtccttagttgatgggcaggggcttgccgtcccactccttgaggcactcgagcatggggtcgatgagcttgccctggctgatgccgatgaagaccttgttgcactcctcgcccggggacttgagcttctcgccggtcaggaacacgcagccgagctcctcgcggacgaagcggtacagcgggaacgaccgggctgtccttgatccggttctccacggcggcggtgccctcggcgacggcgacgcgggcggcctccacctcctggggcagcaccgcgcgcagctcctcctcgaacttggtgatcttggagaacacggagggctcgtcgccgctgctgaaggcgtggtctaccagcacggcgcggagcttctgcatcagcgggaggctggcgctggcggcgtcctcggcgtaggtgaacacaccctcgcggtcgatggcggtgaggaggtccttctcgctgaaccgcgcgctggagagctcgccggccgggttcatggtcaagacaacctttttacgaccacctgggtcaccgtgttcttgaccgaggtcttgatgttctcctcgaggtggcgcaggtcgatggcctggcagagcgcgacgatgtaggtggaggacatgagcttgaggatgtcgatggcctcggcggtcttcctggccgagacgaggccgagcgagttcacgtcctggttgtgctgctccgcgctctggacgtggttggtgatgggggtgccctggaagttgccgccgtggagcgccttgccgcggtggacgtcgatgaccgggttgtcgttgacggagttgacctcgcgctcg

SEQ ID NO: 18224 - DNA, 1465 bp, Setaria italica
  Peptide Sequence Number=SeqID_84198
cacctcctctcctcatcctgcactcgactctcctcgtcgtagtagtgttcgatcgtgtgtgtgcaagtacagcaatggggtttgggcggaaggttggagagggtggggttagcaggtggctcctcctgctcgccggggtgctgctggcggtggctgtcacggtgacggccggtgacgctgtggaggagggagccaccgctggcgactacagcctccacggtagccaagctatgtgcgagctcaagtgccagcatcatcatgatccagtgaacaagaagcggtgcgtcgacttctgcatacggtggcagctagcgctaccgtttgacgctgcggaggagggagccaccgctggcgacgacagcctccacggtagccgagctatgtgcgagctcaagtgccagcatcatcatgatccagtgaacaagaagcggtgcgttgacttctgcatacggtggcagctagcgctaccattttgatgctgcggaggagggagccaccgcgggcgaggacagcctccacggtagccgagctatgtgcgagctcaagtgccagcatcatcatgatccagtgaacaagaagcggtgcgtcgacttctgcatacggtggcagctagcgctaccgtttgacgcggtggaggagggagccaccgcgggcaaagacagcctccacggtagccgagctatgtgcgagctcaagtgccagcatcatcatgatccagtgaacaagaagcggtgcgtcgacttctgcatacggtggcagctagcgctactgtttgacgttaaggaggaggatggagctagcgccaccgacaccatcaccgctggtgaggtcggcgtctgcgccaaccggcgtatatgcaagatcaagtgccagcacccatcacgaccaggtgaacagcaaccggtgcaccgacttctgcatagggtaccaagtggcactagatgccattatggagaatggagccaccgccaccgtcactgctggtgacggacacgttacgcggtagcaggcgtacgtgcgagctcaagtgtcagcaccaccataacccggtgaacaagaagaggtgcgtcgacttctgcattcggtaccagctggcactgcatgatatcaatgatggaaccaccgccgccgctgccggcggagccatccgccaggtggtgtgacgccggcgcgtgcatggacggcatgaataagggcctaagtacgtgtcgctggatatttacagactgctcgtgtgcgtttgtcttttacgttgatgtgtgtgtgatgtgtgagaggccctgaccgaagcttacatattcggtttcactagtacttgttgtctctggttctactgcgtttttacgagcctttgcaagtgagttgccagttgtgatgaataaaatggcaggctttttcgttcagagtggatttgtaaaaggcactggccagttaggtttattttgaacaagatcgtcatcttcta

SEQ ID NO: 18225 - DNA, 2350 bp, Setaria italica
  Peptide Sequence Number=SeqID_84199
tttttgcaacgcaaacaccaatcggattctttcatcttagttcgtcttagcagcatgcaaccaactattatggttctgcaataaactttagactacaatatgggcatatggccgaatgcaatagccaaaaatagaacttcatcaaactaagataaaaacaaaaattgagttctaacttcctcaaactaagataaaaacaaccagtgtggcgtgactccaactctagcataattctaacttcatctgtccatactgctcagcagcgaacctgtcctcgggtagaacacctggctcaagccaaacttcatccgtcatactgctcggcagcgaacttgtcctcggggtagaacacggccaccacctggttcccgccaaacttcctcccgtgcatgcccgtcttcgccttggtcgatccgtccacatctgcatattccaaaaacaccttcccaactccagcaacaggagccccgctggggtcaggccgtgggattacaactttcaccaagttacctgtccaagtgttagtgagtacatccatagacagagggtaataataatataataatatacatgattaatcaaactcaaaagaaagtgtgtcttctgtaggttaaggcccgattgccaatattgcatagggtcggactataaaacactctgcaatggcattatgtgggacatatttgcgtccttcttccctcatgtcctccacaatgtcctcatattcctcatcatctcttagttcatctgctgtgactacctgtgtcagacatacgacttttgttggaagggcacctccaacttggtacacgagtttctgcatttgcacctgttgttgtgcctgcaacaggatactttcctgctctggtctaggctgagcagctccttggttcgcccgcctaacagtaagggtcttgtctcccatcttgataccgttaagagcagcacaggcaatgtcggtaacagtaagatcctggtacacacagaaagcatagcccttcgagttaccagtttccctatccttcacaagatcaaatccccgcagaggaccaaaggactcgagcaactcccgcacttgggcctcagtgaagtaataggggagaccacccacaaaaatgcgatcaggaccttctaatcctccagcagagccaggcgttaagccaacagcagcaagattaagattggggtttggctggcttgggccaagcgcagctgctaaggaaggattatagtccgtcggccttctgaccttcactggtgctccctcgaacattatgccatctaaggccattgcattgcttgcttcctccacagatctcatctcaacaaaagcaaatttcttgtcatggtttatgtagacattaagaacagcatcacctggaccagcagtgtttcctccaatagctgccataactccattgaagaatatggcaacagtctgctcattagcagttggaggaagtccaccaacatacacacgccgagcatgtcgagtagcctgttgtgtcatggcttgaggttgaataagggggttcatcggtcccattaataagtttggaaacatccctggtataggagtgactacaggcagctgaccaggaacagcaccagcagtaactataggcatcgtctgttgcagcggtccttgatcaaatccactcacacgcttgctctttgaacgagagcgtgaacgagatctagatctgcggtcacggtcacgactcttggacggagagcgggagcgggatcgatgcctacggtggccatctctgtcacgatctcttctcctttcagaatcaaggctcctgtgacggtcacgatcatcacggtggcggtcacgatcatgagaacgatcgcggtgttcccttttctcgctgcgctcgcggcgatccctgtggtggcgatcacgatctcggtccctgtcacctctttcacggtccttatccctgtcgcggtccctctccctatctcggccacggtccctgtcgcgctccctgtccttgcccttatcacggtctctgtccctttctcgggattttgaggaaccactgtcatgtgactgtgtctcgtgctggggctgggaattgcggccgtcggcgtggtcggagaacccggtgggcttggctccggcgggcggcgagccccccgcggccgggggagcggcgccgtactcggcctgggcgtaggcaccagccgcgtccgccccggagacggggccgccgttgccctcgtagcgctcgtcgtactcggccatcccgcggcgacgcggcgtctgcggcggcgggatcgggatggggaatttttctaattctagctagggtttggtaggttggttgggccgggaggcgga

SEQ ID NO: 18226 - DNA, 2207 bp, Setaria italica
  Peptide Sequence Number=SeqID_84200
gaaattcggcctggctattttactcgctgcgagatctttagctcccggccccgtgtggattagtcgctgtcacgatcgacgcgggggcgccaattgcggtggccaccacctccaatccactccccgcggtcgccgcgccgagctgtccttgctctgtcctccctcctaaccttctccgctgctcctccaagatttgatctttagacctatctcctgagcccagttcttcctgcggtggaggggtggttgcttccgcgggtctcttgaggttcagttcttgatagttctaatctgctcagcagccaggttgcaagcttggaactcgaaggaataatttgactagagaaatgggtcagtgttgcagcagagctacggccccggattctggacggggagttaccaatgggtatggctattctaaccaggcaaagccagcacatacacctcccagttacaatgctcctccgccaccgactgaggtacggtacacgccgccggcgatgaaccctccagtagtcccacctgtagttgtcccaccgaagcccacaggggacacaattcttggcaagcagtacgaggatgtgcgcacagtctactcccttgggaaggagcttggccggggccagttcggggtgacatacctctgcacagagattgccacaggcaggcagtacgcctgcaagtccatctctaagcgcaagctcaccagcaaggcagatagggaggacatccgcagggagatccagatcatgcagcatttgtccggacagccaaacattgtcgagttcaggggagcgtatgaggataagagcaatgtgcatgtggtgatggagctctgtgcaggtggcgagctattcgaccggatcattgctaaggggcactacacagaacgggcagctgctacaatctgcagagcagttgtgaatgttgtgaacatttgccacttcatgggagtgatgcaccgtgatctgaagccagagaatttcttgctcgcaactaaggaggagaatgcaatgctcaaggccactgattttgggctttcggtctttattgaagaaggaaagatgtacagggacattgttggaagtgcttattatgttgctcctgaagtccttaggcgtagctacggaaaagagatagatgtttggagtgccggtgttatgttgtacattcttctcagtggcgtgcctccattttgggctgaaaccgaaaaggggatatttgatgctattctgcatgaggagattgactttgaaagtcaaccttggccatcaatttctgagagtgctaaagacctggttaggaagatgttgacacgagatccaaagaaaagacttacttcgggtcaagttcttcaacatccttggctcagagaaggtggagacgcatctgataagcctattgacagtgctgttctttctagaatgaagcaattcagagcaattgtaattaagctgaaaaagatggctctgaaggttattgcttcaaaccttaatgaggaagagatcaagggcttgaagcaaatgttcatgaacatggacacagacaacagtggtaacaatcacatacgaagaactcaaagcaggattagccaaacttggatcaaagctgtcagaagctgaagtaaagcagttgatggaggctgctgatgttgatgggaatggatccattgactatgttgagttcatcactgccacaatgcatagacacaagctcgaacgagatgagcatttgttcaaggcattccagtactttgataaagataacagtggcttcatcacaagagatgagctaagaagtacaagactttagaatacgaagacaatagaagaatagggacgaacaacgaagtaacgaataaaaggagatcatatcagaagttgacacggacaatgatggaagaattaactatgaggaattttgcgctatgatgagaggagggatgcagcagccgatgaggctcaagtagcatgttcccattgtagaaacggtgtaccattagtaactgttttttgctctttttccttcatggttggtacttggtagctggatgaaggcttacaatggacgttgcttttgcattgttgagagatgattgtgtatatcttttttgctcgtgtttttttgccttgtagtatcttaatgtccctttcttctgtttattgaagttcatctaataaaaagtgcattttgcaatacttaaaaaa

SEQ ID NO: 18227 - DNA, 1053 bp, Setaria italica
  Peptide Sequence Number=SeqID_84201
ttttttttgttgctttgggacttaggccgagtttattggagagtttttttgaattggctcctattcaccccctctggtcgcccttttctgcccttcactatgcatttaggaacaacctgcaatttagaacggagggagtacatggatagtattacgtatatcgattattacacacccacacaacatactgtattacatttcagtgatccggtagccgatagaacaggcgatcaagtacgtgatcagccacttagttttttatacacacgtagcacttgctcgcgccgcgccactttgaagccaagctttattttcagttgcgcatccagagcatgctgtccctggggcaggaagtggcacacgggcacgctcccccggctccacgccgagcttctcgtacgccgactgcgagatacccgggaacgcgtccgcgtggcacgccgcgagggcctccccccttggccgtcgtcccgtcggccgccggcgaggctcaccgcgtacacggcggcggtggttgcgtggcacgcgaacacggcgtacggatagggcatgcggtggcaggcaaccatgtcgccgccggccaccggcagggggcctgacggacaccatcgtgtactcctgcctcgtcgtcgcgccttccgtgctggtgagcttggtcgccgccgcgcggatgttccgggtgccgaggatggaggcggcgaggtcggccatggagtctggggaggtgacgcagcgcagggcctccacgccggggacgggcgcggcctcgccgcctccatcctcggcacccggaacatccgcgcggcggcgaccaagctcaccagcacggaaggcgcgacgacgaggcaggagtacacgatggtgtccgtcaggcccctgccggtggccggcggcgacatggttgcctgccaccgcatgccctatccgtacgccgtgttcgcgtgccacgcaaccaccgccgccgtgtacgcggtgagcctcgccggcgccgacgggacgacggccaagggggaggccctcgcgccgcgccactttgaagccaagctttatttc

SEQ ID NO: 18228 - DNA, 1509 bp, Setaria italica
  Peptide Sequence Number=SeqID_84202
ggacgagcactcgtgacgcaagtactcaaaagggtaccaccgctgcggtacggccattattggaggagagaaagattacacaagtgaccacccatgggaagtggaaagcatcaaagccaacaattgtttttgttttgttctcgcacaacccttcacagatcatctaacactaatgcggtagtagtagtagcagctatagccatacggaatggaacggaacggaatcgtttggcaaatgctgtgcccagctcaatgcaatcgccggaggcagcagccatggccgccgccgaaccagcagatacttcagggcttccagatgatggtggtctcggcgatcatggaggtcaccacgtagggggtccatgttggacgccggccggcggtcctcgaagtagcccttgccgttctgctccgtctcccggcccacgcgcactgacgcgccacggttggcgactccccagctgaaggtgttgatgtcggccgtctcgtgcttgccggtcagccggcgctcgttgccctcaccgtaggcggcgatgtgctccttgtgccgcagcttcagcttctcgatcgcggccttgatcacctcgtacccgccatcgttcctcatggacttggtgctgtagttcgtgtgggcaccagcaccgttccagtcaccagggatgggcttggggtcgaatgtcaccaccacaccggcgatctcggtgatcctctcaagaatgtagcgggcaacccacacctggtcaccagcagaaatgccgacggacgggccgacttggaactcccactgtcctggcatgacctctccgttgatgccactgatgttgatgccggcatacaggcaagccttgtagtgggagtcaactatgtcgcgcccgaaagacttgtctgcgccgataccgcagtagtaaggaccctgagggccagggaagccaccaacaggccacccaagggggccagttggtgtccttctgaaggagggtgtactcctgctcaataccataccagggctcctcagcagagacctcagggttgctgaagatcttggcggcgttgtgcctcttgttggtgggaatcggctcgccggctggggtgtagcaatcgcacatgacaaggatgttgttgcccttcctgaatgggtccttgaagatagcctgcgggtacaggatgacctcactgtcctcgccggggggcctggccggtgctggagccgtcgtagttccacttgggcagcttgctgggatcagtcaccgggccggagagggtcctagccttgctcctgagatccatgccagatccaccgatccatatgtactcggcgatgatcttctcggtggtgtcggagaggttgaggttgacgaggtcggtgaggcaggccatggccggcggctgcggtgggaacgagcagaggctgggaaggaggaggaggaggaagactggaagagggaggaggtggtgcgggattgaggccggtgcagagtgtggcgagctgcatggtggccggtgggcggt

SEQ ID NO: 18229 - DNA, 2627 bp, Setaria italica
  Peptide Sequence Number=SeqID_84203
agtgattcggtatataatttttgcgaaacgagtatgaagttacagaccatgtgatgttacacaagttcagagttcgattctcacgtaacggaagaaaacaacattccaacagagacaggggagcacatgtactcaaatacagccgtagtacattttacttccaaaatagagtacagatcagaaagctgagtgccaggccatggccaatggcattgcagcgatcgagggtaagaacaatgggacaaaatacacgattacacggatcacagtgacaaagctaaaaaaggacgaacagagaaacaatataatctgcgaagtcgcaaacaataagaaaccttcggagtactgaaattccccccttctttattcctcgcgtacggtgcggtctcctcctcctcttggtgctggtgctcagcttagcagattggcaggggcttgccgtcccactccttgaggcactcgagcatggggtcgatgagcttgccctgactgatgccgatgaagaccttgttgcactcctcgccgggggacttgagcttctcgccggtcaggaacacgcagccgagctcctcgcggacgaagcggtacaccgggaacgaccggctgtccttgatccggttcgccactggggcagtgccctcggcgacggcgacgcgggcggcctccacctcccgggggcagcaccgcgcgcagctcctcctcgaacttggtgatcttggagaacacggagggctcgcgctcggcgtcgccgctgctgagggcatggtccaccagcacggcgcgcagcttctgcatcagcgggaggctggcgctggccgcgtcctcggcgtaggtgaacacgccctcacggtcgatggcggtgatgatgtccttctcgctgaagcgcgcgctggagagctcgccgaccgggttcatggtcagcaccttcttggccacctgggtcacggtgttcttcacggaggtcttgatgttctcctcgaggtggcgcaggtcgatggcctggcagagcgcgaccatgtaggtggaggacatgagcttgaggatgtcgatggcctcagcggtcttcctggccgagacgaggccgagggagttcacgtcctggttgtgctgctccgcgctctggacgtggttggtgatggggttgccgaggtactggagctcggagcagtaggaggccatggcgatctcggtgcccttgaacccatagtccaggctggggttgcggctgccggccaggttggaggtgaggccgttgttgtagaactcgttcacgagctcggagaactgcgcgaacatgagcttgccgatgttggcgatggcgaggcgggcgttgtccatggacacaccgatggggggtggccctggaagttgccaccgtggagcgccttgccacggtggacgtcgatcaccgggttgtcgttgacggagttgacctcgcgctcgatggacttggtggcggcgcggatgacctcgatctgtgggccgagccactgcggcgacgtgcgtagcgcgtacctgtcctgcttgggcttgagcagccgggtccagctcattgaccttcttggcgtgcttcatgaatgagctgccctctaggatgtgctccatgatggcggcggcctcgatggagccagggtggtgcttgagcttgtgggtgaggtggtcggtgtactcgggcttgccgttcatcacctcgcagaagacggcggacaggacctcggacaggacggcgaggacgttggcgtcgaagcacaccatggcgccgagcgccgagccgacggacgtgccattgacgatggcgaggccctccttggggttgagcttgaagaagccgccttcgatgccggcgaccttgaacgcctcggcggcgtccaccttcctgccgtcgacggtgacggcctgcgcgttggggcggccggtgatgaggccggcaatgtaggagagggggacggaggtcgccggacgcggtgatggtgcccccggagcggcaggcacgggctgacgccggtgttgatgagcttggtgatggcctcgaggatctcgaagcggatgccggagtagccctggagcagggtgttgatgcggacgagcatggccgcacgtgacacctcggacgggagcgtgtggccgtcggagccattgccgaagattccggcgttgagatgcctgagcagctcgacctggagcgcgggcccgtccttggtgcggcggtgcgaggtgccgccgaagccggtggtgacgccgtagatgtcgccgccgtgggcaatgcagtcgaggatccactcgctgctggccttgacggcggggggcgggcatcttcgtcgagctcgacggccacggccggacgcgtccttggcggcggccacggccgccacctggccgacgcggaggctggagccctcgatcttgacgaggggctcgcggaactgcgccaccatgcgcttcacctcgtcgaggtggctccccgccatctccgcggccgccttgccccaattgagcgggtcgctctcgaggatggccgtgttgctcgccatttctgctgagaagcgaggaggaggagctgcggtgtggtggtagtaggtggtaagaagaagagctcgggaggtttgttgcggtaggtacttgtcgta

SEQ ID NO: 18230 - DNA, 1483 bp, Setaria italica
  Peptide Sequence Number=SeqID_84204
ttttttttttgtaacaaaaccacactatgcttttgtttttcataagaaaaaaaatacacgtagtagtgttacattacccgatgaacgggaaggacatccgacatacctacggcaaaggcaaatccgctacagccattattcagactttttcattcagagtacacagtgtcacaggggagcgaaagtggtttaggacgcacaaccccaaaacggacgggccatcaaaggcctcgtcgacggggaatcggaatcggaatcggaaatcggaaaatccaactgacaccaacggttttgatgcgtgtccaggcgttgacgatcatctgtcagtctcagttccccttccccaggatggtggtctcggcgatcatgccggtgacgacgtaggggtccatgttggaggccggcctgcggtcctcgaagtagcccttgccttccttctccgtgtcgcgccccacccggatggacgcgccgcggttcgccacgccccatttgaaggtgttgatgtcggcggtctcgtggtggcccgtgaggcggcgctcgttgccctcgccgtaggccgcgatgtgctccttgtgccgcttgcccagcttctcgatcgccttcttgatcacctcgtagcccccgggctccctcatcgacttggtgctgtagttggtgtgagcgccggcgccgttccagtcacccttgattggcttcgggtcgagggacagcacgactccggccatctcggtgatcctctcgagaatgtagcgggcaacccatatctcgtcgccggcagagatcccaacggacggcccaacttggaactcccactggccgggcatgacttcgccgttgatgccgctgatgttgatgccggcgtagaggcaggccttgtagtgggcgtcaacgacgtcgcgcccaaaggccttatcggcaccggcagcgcagtagtatggtccctggggaccagggtatccaccaacaggccagccaatgggccagttcacatccttctgaaggagagtgtactcctgctcaataccgtaccatggcacctcagctgcaacatccgggtggctgaagaccttggcagcatggtacctcttgttcgtggggattggctcgccttgtggcgtgtagcagtcgcacatcacaaggatgttgtcacccctcctgaatgggtccttgaaaatggcttgagggtagaggatgacttcgctgtcctctccgggagcctgcccggtgctggagccgtcgtagttccattttgggagctggctcgcactggtgatggggcctttcaccgtccttgctttgctcctgaggtctatgccggagccctccaacccagatgtactcggcgatgatcttgtctgtgcagtcgctgaggttgaggttaacgagatcggtgaggctcgccatcgctcacaagaagaaggcaagaacgcgagagagcttagcaggcaagaagaagaagaagaagtgatgagatgtgaatcgc

SEQ ID NO: 18231 - DNA, 1875 bp, Setaria italica
  Peptide Sequence Number=SeqID_84205
gccgctgctgaaggcgtggtctaccagcacggcgcggagcttctgcatcagcgggaggctggcgctggcggcgtcctcggcgtaggtgaacacaccctcgcggtcgatggcggtgaggaggtccttctcgctgaaccgcgcgctggagagctcgccggccgggttcatggtcagcacctttttcgccacctgggtcaccgtgttcttgaccgaggtcttgatgttctcctcgaggtggcgcaggtcgatggcctggcaagaagcgacgaacgaatgtaggtggaggacatgagcttgaggatgtcgatggcctcggcggtcttcctggccgagacgaggccgagcgagttcacgtcctggttgtgctgctccgcgctctggacgtggttggtgatggggttgccgaggtactggagctcggagcagtaggatggccatggcgatctcggtgcccttgaacccgtagtccaggctcgggttgcggctgccggcgaggttggaggtgaggccgttgttgtagaactcgttgacgagctcggagaactgcgcgaacatgagcttgccgatgttggcgatggcgaggcgggcgttgtccatggacacccccgatggggggtgccctggaagttgccgccgtggagcgccttgccgcggtggacgtcgatgaccgggttgtcgttgacggagttgacctcgcgctcgatggacttggtggcggcgcggatgacctcgatctgcgggcccagccactgcggcgacgtgcggagcgcgtaccggtcctgcttgggcttcagcagcgggtcgagctcgttcaccttcttggcgtgcttcatgaaggcgctgccctcgaggatgtgctccatgatggcggcggcctcgatggagcccgggtggtgcttgagcttgtgggtgaggtggtcggtgtaactcgggcttgccgttcatcacctcacagaagacggcggacaggacctcggagaggacggcgaggaggttggcgtcgtacagcacggtggccgcgagcgcggagccgacggaggtgccgttgacgatggcgaggccctccttgggggttgagcctgaagaacccgccctcgattccggcgaccttgaacgcctcggcggcgtccaccttcctgccgtcgacggtgacggcctgcgcgttggggcggcccgtgatgaggccggcgatgtaggagagcggcacgaggtcgcccgacgccgtgatggtgccacggagcggcaggcacgggctcacgccggagttgagcagcttggtgatggcctcgaggatctcgaagcggatgccggagtagccctggaggagggtgttgatgcgcaccagcatcgccgcgcgggtcacctccgacggcagcgtgtggccgtcggagccggcgccgaagataccggcgttgagatgcctgagcagctcgacctggagggcgggtccatccttggtgcggcggtgggaggtgccgccgaacccggtggtgacgccgtagatgtcgccgccgtgggcgatgcagtcgaggatccactcgctgctggccttgacggcgggggcgtgcctcctcgtcgagctcgacggcgacgccggacgcgtccttggccgcggccacggccgccacctggcccacacggagcgtggagccctcgatcttcaccacgggctgccgggcctgcgccaccatccgcttcacctcgtccaggtggctcccggccagctccgccgccgccgcgccccagttgagcgggtcgttctccacgatcaggccgttgcccgccattgcttgcactgacggtggttaactagggggccgcggcggctacacaaggaggaggtggtggtggagaagaagagccggaggataggcg

SEQ ID NO: 18232 - DNA, 2580 bp, Setaria italica
  Peptide Sequence Number=SeqID_84206
cgactcagtcgcacctagtttttaggagcaaaacattctattaggttattcagaagaaggaattgagtacagtaccattggtttaccccaaaatacaacgtacaggaccttagaaaacgctgtccgccatggcatgcacatcgccgctggtggcagagcagctacacaaaaagaacaatgccacacacgcacactattatgctgcttggtttgccggaccagtccgtccgggtcggcgtggctccggacgacgtcgtccgatgcttttttttgtacggacgagttggtttacgtgtagttttattctttccatgtactttttctctcttcctcttcacctcctccggccatgcacggctgcatggatgatggcggcggcgcctggcgtccttagttgatgggcaggggcttgccgtcccactccttgaggcactcgagcatggggtcgatgagcttgccctggctgatgccgatgaagaccttgttgcactcctcgcccggggacttgagcttctcgccggtcaggaacacgcagccgagctcctcgcggacgaagcggtacagcgggaacgaccggctgtccttgatccggttctccacggcggcggtgccctcggcgacggcgacgcgggcggcctccacctcctggggcaggcaccgcgcgcagctcctcctcgaacttggtgatcttggagaacatggagggctcgtcgccgctgctgaaggcgtggtccaccagcacggcacgcagcttctgcatcagcgggaggctggcgctggcccgcgtcctcgggcgtaggtgaacacgccctcgcggtcgatggcggtgatgaggtccttctcgctgaagcgcgcgctggagaggtcgccggtggggttcatggtcagcaccttcttggccacctgggtcacggtgttcttcacggaggtcttgatgttctcctcgaggtggcgcaggtcgatggcctggcagagcgcgaccatgtaggtggaggacatgagcttgaggatgtcgatggcctcggcggtcttcctggccgagacgaggccgagggagttcacgtcctggttgtgctgctccgcgctctgcacgtggttggtgatggggttgccgaggtactggagctcggagcagtaggaggccatggcgatctcggtgcccttgaagccgtagtcaaggctggggttgcggctgccggccaggttggaggtgaggccgttgttgtagaactcgttcacgagctcggagaactgcgcgaacatgagcttcccgatgttggcgatggcgaggcgggcgttgtccatggacacgccgatgggggtgccctggaagttgcctccgtgaagcgccttgccacggtggacgtcgatgaccggattgtcgttgaccgagttgacctcgcgctcgatggacttggtggcggcgcggatgacctcgatctgcgggccgagccactgcggcgacgtgcggagcgcgtacctgtcctgcttgggcttgagcagcgggtccagctcgttgaccttcttggcgtgcttcatgaactcgctgccctccaggatgtgctccatgatggcggcggcctcgatggagcccgggtggtgcttgagcttgtgggtgaggtggtcggtgtactcgggcttgccgttcatgacctcgcagaacacggcggacaggacctcagagaggacggcgaggacgttggcgtcgtacagcacggtggccgcgagcgcggagccgacggaggtgccgttgacgatggcgaggccctccttgggggttgagcttgaagaagcccccctcgatgcccgcgatcttgaacgcctcggcggcgtccaccttcctcccgtcggcggtgacggcctgcgcgttggggcggcccgtgatgaggccggcgatgtatgagagagggacgaggtcgcccgacggcggtgatggtgccccggagcggcaggcacgggctgacgccggagttgagcagcttggtgatggcctcgaggatctcgaagcggatgccggagtagccctggaggagggtgttggatgcgcaccagcatcgccgcgcgggtgacctccgacggcagcgtgtggccgtcgctgccggtgccgaagatcccggcgttgagatgcctgagcagctcgacctggagggccggcccgtccttggtgcggcggtgggaggtgccgccgaaccccgtggtgacgccgtagatgtcgccaccgtgggcgatgcagtcgaggatccactcgctgctggccttgacggcgggggcggggcctcctcgtcgagctcgacggcgacgccggacgcgtccctggcggaggcgacggcggccacctggcccacgcggagggtggagccctcgatcttgaccacgggctgccgggcctgcgccaccatccgcttcacctcgtccaggtggctcccggccagctccgccgccgccgcgccccagttgagcgggtcgttctccacgatcaggccgttgcccgccattgctagctagtggtggtgcggtggaggaggagggaggggggtggtgctggtgcctggtggagaagaagagccggaggaggtggcg

SEQ ID NO: 18233 - DNA, 1649 bp, Setaria italica
  Peptide Sequence Number=SeqID_84207
gaaaaagtaacatggaaagaataaaactacacgtaaaccaactcgtccgtcaaaaaaaagcatcggacgacgtcgtccggagccacgccgacccggacggactggtccggcaaaccaagcagcataatagtgtgcgtgtgtggcattgtttctttttgtgtagctgctctgccaccagcggcgatgtgcatgccagctggtaccgaatgcagaagtcgacgcacctcttcttgttcaccgggttattgtggtgctgacactttagctcgcacataagcctgctaccgcgtaacgtgtcctcaccagcggtgacggtgggctccattctccataatggcatctagtgccacttggtaacctatgcagaagtctgtgcaccggttgttgttcaccgtgacgtgatggtgttggcacttgagctcgcacatagctcggctaccgtggaggctgtatttgcccgcgctggctccctcctccacagcgccaaacgtgtagtcgccagcggtggctccctcctccgcagcgtcaccggccgtcaccgtgacagccaccgccagcagcaccccggcgagcaggaggagccacctgctaaccccaccctctccaaccttaagcccaaaccccattgctgtacttgcacacacacgatcgaacactactacgacgaggagagtcagagtgcaggatgaggagaggaggtggtggggttagcaggtggctcctcctgctcgccggggtgctgctggcggtggctgtcacggtgacggccggtgacgctgcggaggagggagccaccgctggcgactacacgtttggcgctgtggaggagggagccagcgcgggcaaagacagcctccacggtagccgagctatgtgcgagctcaagtgccaacatcatcaagatccagtgaacaagcagcggtgcatcgacttctgcatacggtggcagctagcactactgtttgacgttaaggaggaggatggagccaccaccactgacgccatcaccgctggtgaggacggcatctgcggccagcccggcgcatatgcaagctcaagtgccagcaccatcacgtcacggtgaacaacaaccggtgcacagacttctgcataggttaccaagtggcactagatgccattatggagaatggagccaccgtcaccgctggtgaggacacgttacgcggtagcaggcttatgtgcgagctaaagtgtcagcaccacaataacccggtgaacaagaagaggtgcgtcgacttctgcattcggtaccagctggcactgcatgatatcaatgatggagctaccgccgccgctgccggcggagccatccgccaggtggtgtgacgccggcgcgtgcatggacggcatgaataagggcctaagtacgtgtcgctggatatttacggaccgctcgtgtgcgtttgtcttttacgttgatgtgtgtgtgatgtgtgagaggccctgaccgaagcttacatattcggtttcactagtacttgttgtctctggttctactgcgtttgtaatagcctttgcaagtgacttgtcagttgtgatgaataaagcaacaggcttctttttcgttcagagtggatttagtaaaaagcactggccagttaggtttattttgaaaacaaaaaaaaaaa

SEQ ID NO: 18234 - DNA, 2645 bp, Setaria italica
  Peptide Sequence Number=SeqID_84208
caggccaaaacgatgagcattatccaactcaatgtgagagacatgccaagcgtgcttcattgtagaacaaaataatttactttacccccaacttacaagttaagaacagtaaaagtttcagaagctgcagatgcccaggcaatgcacatcgcaggccatggcgtctcagcaccgggaacacaacaacattcacatgaacttttagctacaagggaacggtaaaatatagagagtatcatcagctagactgatcgtaaaacttcacaatggtcttgaaatgctatacttttgtttttcttgtgtatggaggtgttctctcctcctgtgggcagttcagcagagcggcgaggggctcgccgttccactccttgaggcactcgagcagcgggtcgatgtgcttgcgctcgttgatggccaccagcaccttgttcagctcctcgccgggcgaccgcgtcttctcgccggtgaggtactcggcgccgagctcctcgcggacgaaccggtacagcgggtaggagcggcactccttgatcctgttgggggacccatgggtctgccgctctccacggccgcgcgcgcggcctccacctccttgggcagcgcggcgcggacctgctgctcgaactcggccaccttggcaaagatggaggtctccacgacacgctcggcgtcaccgttggccagcgcgtgctcgatcagcaccgcgcggagcttctgcatcagtgggtagttggggctgcacgggtcgtccgcgtacgcgaacaccgcctcccggtcgatcgccgtctgcaggtccttctcgcagaagcgcgcgatgtggaggccgcccatggcgttcatgctcagggtcttcttggccacctgagtcacgcagttcttcaccgcggccttcatgttctcctcgaggtggcgcaggtcgatggcctggcacagggcgatcaggaacgtggaggtcatgagcttcaggatctcgatggcctcggcggtcttcctggaagagatgaggcccagcgagttcacgtcctggttgtgctgctccgcgctctggacgtggttggtcaccgggttgcccaggaactgcagctcagagcagtaggaggccatggcgatctcagcgcccttgaaaccgtagtccaggctggggttgcgcccaccagacaggttggagggcaggccgttgttgtagaagtcgttcaccagctcggagaactgcgcgaacatgagcttgccgatggcggcaagggcgagacgggtgttgtccatggacacaccaatgggagtgccctggaagttgccgccgtggagcgccttgccacgggagacatcgatgagcgggttgtcgttgacggagttgatctcgcgctcaatggacttggtggcgaagcggatgacttcgatctgtgggccgagccactgcggcgaggtgcggagcgcgtatctgtcctgcttcggcttcatcagtgggtcgagctcgccgagcttcttagcaagcttcatgtaggagctgccttccaaaatgtgctccatgatagcggcagcctcaatctgtcccgggtggtgcttcagcttgtgggtcaggtggtcggtgaactctggcttgccggtcatgacctcgcagaacacagcggagatgacctcggccatgatggcgagcacgttggcctcaaagaggacggtcgacgcaagaccagagcccacggccgtaccgttgaccatggcgagcccttccttgggctgcagctcaaagaacccatgctcgatgccggcgatcttgaacgcctcggcggcgtccactttcctgccgtcgggggccaccgcgacggagttctggcggcccgtgatgaggccggcgatgtaggagagcgggacgagatcgcccgacgcggtgatggtgccccggagcggcaggcatggggtgacgttggcgttaagcagcttggcgatggtctcgaggatctcgaagcggatgccggagtagccctggaggagggtgttgatgcgcacgagcatcgccgcgcgggtggcctcggccggcagcacgtggccgtcggcgccggtgccgaaggcgccggcgttgaggaatctgatgagctccctctggagcgcgccgccctccttggtgcggcggtgtgaggtggcgccgaagccggtggtgacgccgtagctgtcggtgccgttcatcatgctgttcatgacccagtcgctgctggccttgacgcgctcggcgggcggactcgtcgagctcgacgcgggcctcaccggcgcccgcggccacggcggccacctgcgcgatgctcaggctcgcgccctggatcttcaccagcggctcccggaactccgccaccatccgcttcacctcgtccaggtggctcccggacaggtcctccgcggccttgccccagttcagggggtcggcgcgcggcgccgccgcctgagccgacatgcacaggccgtcgccgtgaagggagcggacgaggccggtctcgcactccattgcagcggcacagaaggtgaactcgaacaaaagcagtagagactagtagttgggggaacacaacaagaggagtaatgctactagcgtattattagtatagctaattgcgtgactgtgttgtagaagaagagcttgtggaaacccaggctct

SEQ ID NO: 18235 - DNA, 315 bp, Setaria italica
  Peptide Sequence Number=SeqID_84209
ctttatctcttctttctcccacatgccaaactcgatcccttgcatcgcttgctcccatcccaccggctaccactactccgccgcatcccaggaccgacctctacccacccgcccggcgtcgtcgatcgaagcgggggccggctagtggacagcaggcgaggagggcgacggggatcccacaggcgaggagggcgatggctcggacggcgaatccgcccgcgcgggggaggaagctccaggcggcgcatggattgcactcccgccggcaccggggaggaatcgagggggcggcgctgctggaatcgatagcggagc

SEQ ID NO: 18236 - DNA, 333 bp, Setaria italica
  Peptide Sequence Number=SeqID_84210
cgcacgcccgacctccccccactcaccggcggcgtttcacttgcggcggcgcggcggacggcggttcctctcctccccgccctcgacgggctgctctactggcagcgggctcaagtggggacgagacccgtccatcctccccttcaatttcgtcggcttatccttattcctttcatcctttgatcctttcctgtcctggttgaccttctatggaggcatcaaaagaacaggcttccaaggactatgctgatttcaaggagaaggttaggaggaccatatatttggaccagctttctccacaagttaccaccccagtcatcaaagcagctcttg

SEQ ID NO: 18237 - DNA, 1287 bp, Setaria italica
  Peptide Sequence Number=SeqID_84211
agcggccctcatctgcttcctcagcccaccaccctctctgcgtagtctttccacagtcagcccgtcccgcacgcccgacctccccccactcaccggcggcgtttcacttgcggcggcgcggcggacggcggttcctctcctccccgccctcgacgggctgctctactggcagcgggctcaagtggggacgagacccgtccatcctccccttcaatttcgtcggcttatccttattcctttcatcctttgatcctttcctgtcctggacgctcttgttctgttgcggcccttagaatgataactgggatgcttctttgtacctaatggccaagagataaacagatttgatatgttgaccttctatggaggcatcaaaagaacaggcttccaaggactatgctgatttcaaggagaaggttaggaggaccatatatttggaccagctttctccacaagttaccaccccagtcatcaaagcagctcttgcccagtgtgcaaatgttgtcaatgtggagttcatcgtcaactacacaatcccttatgatgtaccttctgctgcattggtagaactggatgatgatatgcaggccaaggctgctgtcgagttgatgactgatttcccattcataattggtgggatgccaaggcctgtaaaagctacccatgcaaaggctgagatgttcagggatcgacctccctgccctggcctcaagaaagagttccgctgggtaaaacaaggagatgacgagtgtgagacaatgaagaaactgaaaaaccttgcaaagaagcaagagtcagagaacatggctctcataaagaatctattggacgaggagaaggaactagcaaagcagcagcaggaagctcttgatgcgaactgcaagaagtacgaaatgctggacctggtgatgcagaatggagccatcaagaacctggctcaccgctacggagtgaacctggatgactgacgggacaaattcatggagcagccgtgcagtcatcagtttgtcctgggggggcgctggtagatggtgcgatgaattcgacgagtcgggatccagtagctggatcctggggcgtaacaattggccctgcttagttagcgtacgagcagttgctgcattagaaatccgataactgcagccttagccttttgtttcttagcctgtaataacatggtgctgaaactgaaagcatctgctgttgtgtgatgcttctcgtgcatacattattgctgcatgaaactctagtaacttttaaaaaaaaaaaaaaaaaactaaaaaggac

SEQ ID NO: 18238 - DNA, 615 bp, Setaria italica
  Peptide Sequence Number=SeqID_84212
tggcccacgacgccggcgacggcggcgacggcggcggcgagctcccgccgccggcgaagaagaagtcgcccgccgaggaggcggccgagaagaggagggagaaactcacccctgggagcttgatgaaggggctcatacggtctgggagcggcgatgctacccctgcggacggcgatcaggttataattcattgcactactcggacaatggatggtattgttgtcaattctacaagaagggagcatggaggtaaagggatccctctcaggtttgtcttagggaagagcaagatgatcctaggctttgctgaaggcttcccaacaatgctgaagggtgaaattgctatgttcaaaatgcagcctaaaattcactatgccgaggatgattgtccagttgcagctccagatggctttccaaaagatgatgaacttcaatttgagattgaaatgttggatttttttaaagccaaggttgtggctgaggatttaggggttgtaaagaagattattgatgaaggcaagggatgggaaacacctagggagccatatgaaataacagcacggataactgcaagaacagcagatggaaaagaattattcccagtaaagaagaagc

SEQ ID NO: 18239 - DNA, 783 bp, Setaria italica
  Peptide Sequence Number=SeqID_84213
catgcaattgtcgttatgatcgcatttatggattgtgaatttcaggatcattcaacttaatggcgtgtctcaaagagatacccattctcaaaggcaacaactacacagaatggaggaagaagattgagttctccttcgtttgtggagaagttgactgggtactgaccacaccgcagccacaagctccacagaagccagtgagggctgatggtgatgatgatgctgcatggcagcaaaaggagagggactatgctccactggagttggcatacacccttgagaataaacagtggaccactgccaacaagaaatgtatggctttggtaaagaatacgattgagcctgccattttgggctcgatcgcagagtgtgactccgtttcagagtacctcgacaagataaggaatcagttcactggttcctcaaagatatatgctacccagctgttcaagcagctggccacagagaggtacaatggcggagggactggcataagagatcacatcatgaggatgtataacttggcagcgcagctgaagcctatggatcttgagctcaagcctgggcacattatgcatttggtttttgcttctctgcctaaagagtttgacacttttgttgtcaattacaacatgcagccagaacagtgggacatggagaaaatgattgccatgtgcgtgcaggaagaggacagacttagatcctcacatggtggctcattgtctacttattgttgtaaggttatttaacttagttaaaaaagttattttagtttacttttaa

SEQ ID NO: 18240 - DNA, 343 bp, Setaria italica
  Peptide Sequence Number=SeqID_84214
cattcgcagaatcagaatgcatcagagcatcttattgacactgtgaggagaatcagagctactgctcgttcgcaactggcaagcgagctcgattctctcacgaggacgacgaagaagcgatgcttgcttgttttcttgatcggctcccatgtcactgaagatccacgaacatccggtaggcgtccctccgcggcgcgtagtatccctcgacggtggcgtcgacctggaacccggccttccggtacagcgcgacggcggccgtcctcgccggatctacgtggaggatcacccgctggaccctcctcccccggccaccgctccacggccgccttcagcagggcca

SEQ ID NO: 18241 - DNA, 1174 bp, Setaria italica
  Peptide Sequence Number=SeqID_84215
tgtacttctagttgttgtagttagtttttttttttttgtctaggtaggtcaagaacaatattccgtctatgagaggttggtcacacttgttttgacatggaagagaaggataaaacaaaaattacaaacagaaaaaagaccaaaatagaaaaacgaccatataggtggtaattaaagacttggtgcaaagcaatcttttttgtccacgatcctctctactcttccaagccaaacaaaatgggagtcaagcagcaacaagaacatatattatttgtgcgccatctaaaagtgaagagaaaaatctgactgccaacgcctcaccatctctgtcctgctgaagacctgtctgaacttctgttgccaccaaaagagcctctatctctgctcccctgaaacccccatctttcttcagttggttttggatattgatccatgccaccacgggaacctggcctttccatggactcttttattagggattcatctgcaaaattagttggtggggatgctgtaaccctccctgctccagaaccaggtctttgcgaaaatctgatcttgtcatccattgcaattgtaagaagctcaagctgtttttccatttgagttatcttctcagcaaactttttgcatcatcatcactcatcttggcttcattttcattgagttccaacttaagtaggttgatctcttctttcaacaccttctcatcatttgtctccggtctatcaatacgacgatgctccagctctaggtcaatcttcctccagtccttccctttctcctgcagaatcacctcccttggctttgcatccccaaaaggattcacctttggccgcgccctcagcacgccttcactacccgcagctgatacctgtgacccggggctcccaggtcgtgaggagtgagcactctccggcctgctcgactgtgagctggtaggacgactagtcttcttctgatcgatctcagtctccatcttcttccagtccagccctttgtcggccagcacgtcctcccgcggcctggcggccccaaatgggctcggccggctgcgccccgcctcagcaggtggcgtaggggtggccgaggcgtcgcgcttgggcggatcgagcactaggcggggccggtcccgctcgccattggtcggcgcggcacgggaccagcggtcggagga

SEQ ID NO: 18242 - DNA, 303 bp, Setaria italica
  Peptide Sequence Number=SeqID_84216
ccaagaaacctaaggcagactcgcctcccaaatcaggttcgacacaatgacagacccggcaaagtgaaaggccagaatccttatcggtgctgcagcttgatacacgggggacccctggtttgtggtggtcatcagcagtaggcgagttgatggcatcagtttgatcagtggcgttgggttgctgatgctgttccttgaggaacatctcggatcagaagaccatgtccttgtgaaatatcgggagctgaggcaggaaatcagcacctggttggatgattgggacgcgggaacctgcacgggcca

SEQ ID NO: 18243 - DNA, 1292 bp, Setaria italica
  Peptide Sequence Number=SeqID_84217
agaaatacaaaactacaataatagaaaataggacttttagaaggacaacgactatgtagcagagttttagtttttgttgccaagaatgagattgatatgattttatagaaggaacagaggcactaatgcccaatttccctttttccccccattgatcggctcgctgggagggggatgacattgactgagaaagtaggcagaccaagcaagccttctcagtgaacacaagacaatatcaactatagcatgttgctgaggcagttaaattaagcaccaattttcagcatcgtaacatattgcagactaggtacgtataatctgaatatcttatccaaagacaaatttatcaacaaagttatggtcagctatacaaaaaaattccgtgtgctctacgcttagacaaagcattgcaatattttgcatgcacttagttctctctgcaccagtacaccgtgctacgccgccttgatgaccctgaaggagtccatgactctcctgaggtcctcctcttcctgcatgaacacctgctccggcgtctgcaaccgcagctcgtacagccgcttgttctcgacgccgaggaccgacaggtagcgcctgtcccactccaggctttgcaccctgtcctgcggcatcaccgccagctcgttgttactcgcataggattttatgttcacctcaacttcgtagtagagcttgccatcgtcagcgaccttggacaacgccgacaggacgttcgattcgcgccgaacgcccagcctggtcgacatgaactccgtcaggtactgcttcagaaccttctccgcagccttctccggagggcctagatcctcgacgctggtgtattttgacgacgaaggggatgatatctcgactgacatgttctcatcgaggacgaaggggtctctgaagaatatgtcagcgccagctcccttgacttggatccagctcttggggtacaggaaggtgtagccgtcgaatgtgtcgatgtactccctgaatgcgccaccggttgtctcagctagtgtgatctgttttggccctaagattaggaccgttgaagtggatagcattgttgacagcacattcctcctgggaacagcagggaggacgccgccgccgcggcgtctgcaggacacctcggcgcgtggggaaacagcggaggcacgcgtgcggggcgggctcctccgtccgccggagaaggcagtcgctgcggcggcggcggcggctgccatgggagctgagcagtgagctgagctcggctctgctcaagcggatagagatagccctttttt

SEQ ID NO: 18244 - DNA, 650 bp, Setaria italica
  Peptide Sequence Number=SeqID_84218
ctgcccaccagacatccagtgcggtgctttcctcttttgcagtggattaaaactgggtgattcctaacatctgagaaccataaaagagaacgagttactgatgggtcaaaatagttccatatgatcatttaacattattggtcgacagcaaagacaaattggaaaagatggagcctaattcagtaccaagcaagaccctaagagcccccacgatggcatccacaggtatggacacgtatgggtcctgcagatgcaaacatttaaatgtgctgaacttgctgatattggaattcaaaagatcagcagacaacaatagttgcttcaaatgaaattaacaggaattaacaatacataggtcccaagtcacagattcgtaaggtgtaacaacaagaatcaaatagaagtcagacactgtgtacgcacaagaactgcatgtctgttttcagtaatgcagtatctgaaagtgtacaataccagaagaaacaaactgatccttgacaaggaaactgtatccatctgtacctgcaacaacttattcataactgtggataaagggagacagaattttgtagtagtcctgcacttggataccataataggtaatttaccatccacatttgcttccaaaataggcaaacaccagattaatg

SEQ ID NO: 18245 - DNA, 478 bp, Setaria italica
  Peptide Sequence Number=SeqID_84219
ttactactctccagcagttcatgctccagcaaaactcaagggcctgggaggtcgttcccagtcccccagatgctatctgacatcgtactgtaggcgcttgcttttctgaagacagtcgtggtagcggtagatgagtctcagcatgcaatccctcatgcaggtgacatcgaaggattcaatgaacctcaggtctgacaagcgggatttgccagcagcatagcgatggtactcttcaaagacagatgataggcaccaattctgcagcttcctgaagctgcccaccagacatccagtgcggtgctttcctcttttgcagtggattaaaactgggtgattcctaacatcaagcaagaccctaagagcccccacgatggcatccacaggtatggacacgtatcgggtccttggtgccttcaatcccgaactggaagaggcggatccccctcggcccttgaggaacgcggcgttgggctccggg

SEQ ID NO: 18246 - DNA, 1355 bp, Setaria italica
  Peptide Sequence Number=SeqID_84220
ccttgttgaacgccgcggcggtggcccgcgccagggagagcgccgtctcgccgcggggcgtctcgaggtcgcagcgggcgccataggagatgaggagctcgcacacgcccgcgtgaccttccctggccgcgagcatcagcggggtgtacccgtcgccgtcggggacgttgacgtcgcagcccgtgctcgccaccaggtgccgcaccgccgcggcgtcgccgcgccgggacgcgcagtgcagcgcgtagaagccccccggcatgcccttctccagcgcgaactcgagcatgacctgctcgaagaggtccctcttgctctgctgcgccagcccgatggccgtctcgccgcgcttgttgctcagcttcacgttggcgccggcgaacacgagggcgcggaaggcctcgacgttgcccaccttggcggcggttagtatgggcgagcacccgtccaggtcctgctcgtccacgtccacgtccggctgagcgagcagcacttccatggcggccgcgtcaccgcaccgcgcggcgaacatcagcggtgagaacacgttccggtcgctcgagcgcggtatggtcccggatcgaatcgcgccgaggacggcacgctcgaagccgctcttccatccaccggaggaagcgacagaagccgcggactcgccggacgagttcaacagcgcgacgtcagcgccggcagccaggagaactctcaggcagtcctcgcgtttgtggcgcgaagcgaggatggcggcggtgtcgccggcctccgccctcacattcacgtcgcagcccttgtcgacaaacgtctgcaggatctccggctggccgagccgcgtggccaggtggaccggcctagacctgctgctcctggacgtcttcacgggagcttcggagtccgcgccagacgccagcaaggtctgggcggcgccgccgctaccgcagaggatggcgtggtggaggagcgtccggccgaggtgcgtggcgctcgacgtgtacccgttctggaggagcatgcgcaggatggagcccgtggactcgtagtactccacggcgcaccagacggcgtcgtagggctcggcgagccccgcgcccacgcgcagctcctcgctggtggacgtgtccccaggaccacgcgcccagcctcaccttcgtgtccctcttgacgccggcctgaagtagatgacggaccactgcgacttgccggctcacgattgcggcgaagagtgccgtgcagtctacgttggcgtgcagggatggcttcagcgagcgcaggagcaccctagcggtcgcatttggatcagctccgcacttgatgagcgtgtcgaccacgtcgacgaagccgcgcgctgcggcagacac

SEQ ID NO: 18247 - DNA, 336 bp, Setaria italica
  Peptide Sequence Number=SeqID_84221
gaattctaggatttgaagaattccattgtgctttgtgtcaaacaagtcaaagacgcggtcggcgaagaggctctccttcttgctagtcttgacttgtttgacacaaagcacaatggaattctaggatttgaagaatttgcccgtgctctctcagtatttcatcctaatgccccccttgatgagaaaattgatttttcattccgactatatgatctcaagcaacaagggtacattgagagacaagaggttaagcagatggttgttgcaacacttgctgagtcaggaatgaatctttctgatgaaattgtagagagcataattgacaagcatttgagg

SEQ ID NO: 18248 - DNA, 691 bp, Setaria italica
  Peptide Sequence Number=SeqID_84222
gaaccttcctgtgttcaactacaaatactgttcatacttttctattttctaattgagcgtatgcgagcattgtggtaaaccaagagccttgatggcaagcatatattgaataatatgtgatggcacaatggtcaagatctactgtctttcctatttgtttgagtccacaagatggtgcaggagtaggcaaatcaaattgaatgtgcacattctaccatatttaatattatagttattgttgtggttgaatgttacatcctcggtggaaatgcattagcattcattatttattgtgtacggttacatgcttcaatatatcaatttgatagtggatattccctattgctttcttgctgctctgtaccctgctgttgtgatggcttcaatgggtttggcatagcataacacataatcagattgccatcttgttgcttgctgattttaacttccactgctcaattttcttttcttttcttattataagacatttgaggaggctgacacaaagcatgatggaaggattgacaaagaagagtggcgcaatcttgttgttaggcatccttctttgctgaagaacatgacactccagtaccttaaggacatcaccactacatttccaagctttgtctttcattctcaagttgatgacaactgagattgttggagtttccaaaattgaactattctagaa

SEQ ID NO: 18249 - DNA, 1353 bp, Setaria italica
  Peptide Sequence Number=SeqID_84223
gcggggtggaacacgcgcggcacgagcgcacaccgcatatccctcgcgcgcggcacgacaccgacgacgaagagaagagaggagccgagcccagccagagcccattccccctccccgtcgcgattgcattgccctccccctccgatccccgccgcgccctggccccaacccccgcgccgccgccggagaggatcgcgctcccccattcccacactctccctcgaggaccgaaccctccgcgcgggcccgcgagatggggcgcgttgagtagcgtgcggaggaggcggcgtgcgggtgggagccggcggcgagggtggggggcaatatcatggtgcagtgcctggacggggtgaggcagctgctcgcggtcctgctcaagtgctgcgacgtcgagctcaagcagccgcgggggctcgaggacccccaggtcctcgcgagggagaccgtcttcagcgtgagcgaggtcgaggcgctgtacgagctgttcaagaagattagcagcgccgtcatcgatgacggcctgattaacaaggaggagtttcagttggcattgttcaagactagcaagaaggagagcctcttcgccgaccgcgtctttgacttgtttgacacaaagcacaatggaattctaggatttgaagaatttgcccgtgctctctcagtatttcatcctaatgccccccttgatgagaaaattgatttttcattccgactatatgatctcaagcaacaagggtacattgagagacaagaggttaagcagatggttgttgcaacacttgctgagtcaggaatgaatctttctgatgaaattgtagagagcataattgacaagacatttgaggaggctgacacaaagcatgatggaaggattgacaaagaagagtggcgcaatcttgttgttaggcatccttctttgctgaagaacatgacactccagtaccttaaggacatcaccactacatttccaagctttgtctttcattctcaagttgatgacaactgagattgttggagtttccaaaatgaacatcagaagctatgctggagggattttgatatggtttgcaatgttgggttgttgtattgacagagattgtagtgctaaggatgttgcatgtgggattcgagaactcgaatctttcgtcaaccttgtttcgttcatttggatgtcttgatgcgcttggataagatgtagcatcgtccgaattttccttttggtcttttggctggcccgcaatcggatccggttctctggagcttctgtacaggatagaaacagtgctttaaggatttaagttgttctcagttctagtttgcaatgcagtacctggggcagaaagttttgggtag

SEQ ID NO: 18250 - DNA, 564 bp, Setaria italica
  misc_feature (1)..(86): n is a, c, g, or t
  Peptide Sequence Number=SeqID_84224
nnnnnnnnnnnnnnnnnnnnnnnnnnnnnnnnnnnnnnnnnnnnnnnnnnnnnnnnnnnnnnnnnnnnnnnnnnnnnnnnnnnnnngttaaaataaacccctcttgctccatctatttctccgagtctttgcgaaaaattcagcacaagtgctatgtatgtagtatgtacaatcattcagaccagcttatgacacacacttacaccttgactgacgctgctggattcttcgcgctctttcgccggacagacgggcagggggacgcatgcctgataccttggcacaacactttcagtgacagacaaatagctagcatcacttactaacccggtgttcttgactgcttataattattagccatgacttgcagctttccattccatgtcctgatgtccatgtccatgtcacgtcggcgtcggggcctccctattgcgcggccgcgatcatggacgacgaccggtggctgggccacggcggcggcggcgtccacgccggccgcttgcgctggtgatggtgcttggggccgtgcgaggccacctccagctccgaggtcaggatctcgaa

SEQ ID NO: 18251 - DNA, 1173 bp, Setaria italica
  Peptide Sequence Number=SeqID_84225
tttttttttttttggtctgacaagacgagtaggagcaaagagcacttgcttcctctccatcttcgtctgtttatgaagatttgaaataaaaatgccgcgatatatattttatattgcttgctacatcattttttattgactccatgttcataaatagagatactccagtactttgcggtctttgtatagttgacctgcgttccgcatgctcctctgaaccaggttactgaaccgagcgagcatactcgttagcaggctgtgcaaactccggtagtctgcagggagttgggcgcaagcctggcatctgcttcagttattacatagacatggtctaaaatgtacataagtgaggaaaataaagcctagagttcatcatctaagaccagatctttttccagattttcctcatcctgagaatctggtatcgtgtcaccaatgagctcctgagaatccggtgtcctgtcaccaatgagctcctgaggatccagtatcctgttgccgatgagctcctgtagctcaatctcactgggaaacctctgctgagacagttttgagaaaaccaattgtccattgcaataaacttcaaaggcaccagaactctgtagaaatgactgagcaaaattgccaaacagccagattgatgccatggttccaaatctattagcacgcagtgagtagtaccatggaggcggaaccattccgaatctagggaagatttgatcaccagccattagtgttgccatggctccaacttgaagaagaggaacagctttgctgagtgcacgtttggggaatggtggaggataattttccaacacaacatgaatcccaggaaatgaggtttccagcatccgcttcatggtcattgcagtccccctgtacgagcaggaggcgcaaaatttcaagtcgacggtggtaccggagccaggtacatccacctgcggctccgcctgtgcagaagcgtcggcggcggaggggtcgccgggctggaaggcgtcgggggtcgagcccgactggtggtcgggtttgggggccgccggcggcagcggcgcgaagagggtaacgacgtcggagcagaagaggaggatggggaggcccaggagcacgagctggacgcggtccatcgcggctgcgctcctcctctgctcctcctcttcctctagggggaagaag

SEQ ID NO: 18252 - DNA, 393 bp, Setaria italica
  Peptide Sequence Number=SeqID_84226
ttttttttttttttttaaaccgtaaaaatttgggccatttgaaagttatcatttcaaacttacatgactatttaacggagagatattacaaaggagtcctgcaatgtttgtcctaaatattttttcccggactagatcctacacaatgtcagactagctcctctgcacagctacacgtatccgatccgtacgcgtctacgcgttgatgaacggggcgccggtgaggtactcggtgaaggcgagcgcgacgaggcccagcatggcgaagcggccgttccagagctcggcgtcggcgctcatgaagccgccgctcctggcttcggcgctgtcccccttgaggagaggtaccagcgacgccacggagaggacggcggccgtggccgcgaaccaggc

SEQ ID NO: 18253 - DNA, 559 bp, Setaria italica
  misc_feature (546)..(546): n is a, c, g, or t
  misc_feature (554)..(554): n is a, c, g, or t
  Peptide Sequence Number=SeqID_84227
ataattcagtcggtcaattttttccttgccatctccaattttgaatacccatagttcatatcctgcgccgccactgtacacaggcgggcgcactgtacacagctgtatgtagatgagatgtattgaaaaaaaaaggactcctatcatgctcagtactgcattcctacagttgttaaggtacagattcaatgtacacagcacgtacggggtccgaccctacgcacgtacgtacgcgtctacgcgttgatgaagggcgcgccggtgaggtactcggtgaaggcgagcgcgacgagcccgagcatggcgaagcggccgttccagagctcggcgtcggcgctcatgacgccgccgctcctagcttcggcgctgtccccctttaggagaggtaccagtgacgccacggagagcaccgcggcggtggcggcgaaccaggcgagcccggacccgctcccggcctgcgagtaggtaggtcccccgtccgtctctcgacggcgagcgcggacacgaagcccaccatggcgaggcggccgttgatgcgctcgggcncagggccnctgaa

SEQ ID NO: 18254 - DNA, 293 bp, Setaria italica
  Peptide Sequence Number=SeqID_84228
ctggtatttgagagtgtacacatcagccttcttgttctcaaacgaatatgtcaccaccgggacatcaagccccccttgtgcagcgaagaatggggcagttggatcatcaatgttcaccactttacgatggcgctcagggtccaccattctggagaacagagaggccatgctgcccatatactcctcataggtcatgccattcctccccatcagtgtgcttaacattagtcagcacagcaatatcataaaatactaatctcactgtccactccagatggaggcatctcatcagg

SEQ ID NO: 18255 - DNA, 511 bp, Setaria italica
  Peptide Sequence Number=SeqID_84229
cctcctcgccgcctcgctcctcctcccggcgcgcgccgacgacccctacaggttctacacctggaacatcaccttcggcgacatctacccgctcggcgtcaagcaggaggggatattgatcaacggccagttccccgggccgcagatcgacgccgtcaccaacgacaacatcatcgtcaatgtcttcaacaacctgcccgtccccttcctcctctcatggcaaggaattcagcagaggaggagctcatggcaagacggcgtctctggtaccaactgcccgatccctccgggtggcaatttcacttacaacatgcaattcaaggaccaaattgggagctactactacttcccttcccttttattccacaaggcagctggtgggtatggtggcatcagggttcttagcagaccgaggatcccagttccatttgacccccctgctggtgatttcaccatattggccggtgactggttcaaactcaatcacactgacttgaaaggcattttagac

SEQ ID NO: 18256 - DNA, 457 bp, Setaria italica
  Peptide Sequence Number=SeqID_84230
tctgccaacaaaacaacaattacacataaccgttcaaacgtaagccatcgcctccatgagcaagcatcattagctcatgctggttgagagttggcaccacataaacataaacatttactggcaaagatctggcagagcatcacaagttcaaaccatatttatgcagttcttgaaatggcacacttaccatctatttagtcacgagaaggtatggtgcttctaaataaataacaatgtgttcattacgtctgacattgtagatgtgctcaaagtttagatcgagtcttcaatgatgtgttcccattgctagcatacacttgcactacggggcactaggaaggggcaaaggcaaaaaatgcaaaattaagcgatgtgtcaattggggtttcttgtgcaaaggaaaatcctttgaacacttaatgatggccttgtggaaacactaaattgtactcattga

SEQ ID NO: 18257 - DNA, 223 bp, Setaria italica
  Peptide Sequence Number=SeqID_84231
tacttgccgtccaggtatcggtgtggttgttcccgaaacatgatttggactcctctgagaggaaggggaagtcccacttctctcccttgacgtcaaatgttttgcaatgccactcgacataaacattacaatcacaaggaatattacaaccccaatcactagtgcatagacatatactgaagtcctgaatttccggcagcttccagcagcaaaagctgtcatg

SEQ ID NO: 18258 - DNA, 771 bp, Setaria italica
  Peptide Sequence Number=SeqID_84232
ctcctagctagcttgtgccgccacccaaccagcgacgaccactcgccgctgctggactcggcccatgctggcgcgcccgaacgccggcgtggtccggccgccggcgtcgtcggcgaaggagccgctcttctcgttcggcgtcatcgccgacgtgcagtacgccgacatccccgacggccggtccttcctcggcgtgccgcgctactaccgccacagcatctgcgtcctccgccgcgccgtccggagctggaacgcccacgagggcgtcaggttctgcgtcaacttcggcgacatcgtcgacggcttctgccccagggagcggtccctggaggccgtccgcgccgtggtgcgcgagttcgacggcttccgcggcgggccggcgtaccacatgctcggcaaccactgcctgtacaacctcccccggagcgacctcgtgccggagctgcgtatcccctcgccgccgggccgctccgccgcctactacgacttctcgccgtggccggggtaccgcttcgtggtgctggacgcctacgacttgagcgccctcgggcggccgcggacgcacccgttgtccgcggcggcgcggcggttcctggatgcccggaacccgaaccgcgacaagaacagcccgagcgggctcgaggggacggaccggcggttcgtgatgttcaacggcggcgtgggcggcgcgcagctgcggtggctggacggcgtcctccgcggcgcggcgcggcggcgggagagggtcgtggtgtgcagccacctgccggt

SEQ ID NO: 18259 - DNA, 387 bp, Setaria italica
  Peptide Sequence Number=SeqID_84233
tacgctgcagactgctgatcgatcgcctcacgtgctgctggcgccaatcctcacgtccgggttacgcaccgtcttgagccacatcccggcgagcacccgcgacgacaggctccacacgacgtcggcacgctgcaccttcgccctcgcccgcgccgtcggcgtcgtcgccctcttgccggcgcggcccggcccgtgcgcgaccatccactgcatcgccgtcagcttctgcctctccgcgccccagctcgcgctcccgccggcgcccgacggggacgcacctcatctgcacgccgccgacgtgcaggctccgcaccttgaacctcccggcgccgtggccggccgcgcccagcagcctcgccgactgcacgacggcgaccatcggcgcgc

SEQ ID NO: 18260 - DNA, 272 bp, Setaria italica
  Peptide Sequence Number=SeqID_84234
ttccgcgcggtccctcagcggcgaactgggaaaggcgggcgggcgtctcgcggcgaggacattgggtttggggtttgtgctgctgttaatatagctaagtggtcaggatctggacctaataatggtggaaaacactcatggtagtggacgccgtgcgttcggggacttgacaaatatcctttgcaagcgaccagccctatcagatccagagaacagtacaggtgggataaagattagacggatcgaaaaggacactatgactaagaaagtag

SEQ ID NO: 18261 - DNA, 248 bp, Setaria italica
  Peptide Sequence Number=SeqID_84235
ttaaaagtacaagtaagcattggcatggtatccagaaaaattgactacaataagcaggcagcagacaaagctataaaaactttctcgtattgaacagattagtgttatgagtaataatatatgcggtttacgcaatagagtaccatattaatgtatggttttacacaacagagtgccataataatatatatggtttactctaatacatacaaggattatgcaacagagtatcatatacatttgaaatg

SEQ ID NO: 18262 - DNA, 411 bp, Setaria italica
  Peptide Sequence Number=SeqID_84236
cattgttgcaggatcaaatgtgtacaagtggactaggccatggatcaagcacggtgaacaagcaatggactggtggaagcggcaagcattgttgaggtgacggtccacaaaattaggttcttcaatgcagtcacgccagaacttgcatacactgcgaagcttgactacaaccctaccaggaagaaaagcaaggacaagtcccttgggcatcctgaggaacgtatacttgagcttctgttgtttcattttgcttatcaagatcatcgctgttgcagtccatgtctaggatgcaatctacaactatgtccaaggtaaaagtttagtcagtatgcaacaaaaacataaaaacagcaagacagggaaattcactgatacaaaactgtagtggaataaaagtataccctttagtac

SEQ ID NO: 18263 - DNA, 1077 bp, Setaria italica
  Peptide Sequence Number=SeqID_84237
tgccagatgatccatcacaatgatttgacaatgaaagaagctttccttccccctcaatagttccaaatcatgttttcttacagcatctgggatggcaatttttgtgaacgtctcatccgtcagattgagcataaggatatctcgagaaaagctggaggatgcctcgttaagaagtagccagtacatgctaccattaacaatgactgccttcgttgcctttagaagctctgcagattcacgtatggtcctccatgacagcacaccgatagtgcatatttcaaatgccaagaactgcacacagtgacggacagagaccaccttgtactgttttgtggagtgcacaaatccaacaaaatattcagagcaaagagaccgtgacttgagtacggaatctggcagtctcaaatgcttccttgttgtgggattcaagacctcagcattgccttttatatcatacgcgcacactaagccattgcaggggcctgacatctgaaacctatttgagaacacaagttccacgcttctgaaattcattgttgcaggatcaaatgtgtacaagtggactaggccatgatcaagcacggtgaaacaagcaatggactggtggaagcggcaagcattgttgaggtgacggtccacaaaattaggttcttcaatgcagtcacgccagaacttgcatacactgcgaagcttgactacaaccctaccaggaagaaaagcaaggacaatcccttgggcatcctgaggaacgtatacttgagcttctgttgcttgattttgcttatcaagatcatcgctgttgcagtccatgtctaggatgcaatctacaacttgcctaagaggctgaaggcttccttggattcagcgatatggtcgtcggtgagctaccaccgtcgccgcctgcgcgcggacgccggcaggagccctcgatccccagtcgccgcgtgctcaagaggagccagagataccccgccgccgcctgctcaacgggagcagtcgatcccccttcgctccctgcggggcagggagtgccgccgccgccttctccgtcggtggtgccgcacggcacgagcgaag

SEQ ID NO: 18264 - DNA, 850 bp, Setaria italica
  Peptide Sequence Number=SeqID_84238
ttagtaaacccaccaatctctctcaaacctagaccatggacttgatcagcctgtatgtgcggccaacgaagatagcttggcatcctgggagtttccttatcttgcctctcagatgcaagaagcgaaaaggagttggagccaagaagtgttggaacatcagcagcatttggagaaactcctccaatcaagttgtgtgggtgacatgaattaaccatcagttgctttaatagctttaccaagtggtctttaccaatgtgggggtatctctcagctaactttgcataatccaaagggagtgatattccatcatcattttcttccccactatggaaaccaccacgcgaataccaaccatggtaccttctaggtagaagttggtgctccaggagttcgttgcacagttctccaaaggtccgtttaaacggaccatgagacaaaaaatgcataatgagaaagtaaacttctctcatatcaatatcaacaccatccatggatgcaacatcagctgacatcactgaattcaaaggattaaccttctccagttcctgacttggaaaatccagaggagccaaactaatggaggctgcattatggggaagttggtgctttctaaaagacatgtctactggaccacctcgatctcctagtcggcgagccctctggcgacgcggctgcggcagcgcagaggcatgcgagatacggagggcgcctccagcggcggagggaggtcggaggcggcggtccggtcgccccaccggcacatgcgagccctaacagtagtggggaaggaggctagagagagacgggggagaagagaaggaaagaaagaaagaaacgggggaaagaacaa

SEQ ID NO: 18265 - DNA, 777 bp, Setaria italica
  Peptide Sequence Number=SeqID_84239
gcctggtgcgctatcctactaacaagtgatgattatagcttacttagaggagaagcgtactgaattgaatgccataattacaccatgttaagattgaaattcagtagcgtggtgtggaacagagtcagcacgacctctgcactctgaaagctagtgctggttattttttacaaagcaaacttaggatcccaccttacatcccctggtcctatagatctttgaaatcttaatatagaaacacaatctgggagggaatgagcgagcaattgagcattatgtataccttcttcatgtcaagctgaaggcatcttgctgcagaaccataagcaagatcgtccacactcaccaaattcgaacctgcaaagtccaagacagttccatcctcccgggcaatccccacatgccctatgtagggaaccagccaagaaactacaggaagaggagtccagacaatgcaacaagggaaccttgctctctttgggtctacttctcccagtggccacaactcctgcatctcatcatttgaactgaatacttcattgtccggagtggcttcaagctccattgaaagcaattcttttagctacacagatgctccttgtgctataaaacataacccgctactgctaacttccatgtcatggtctcaaaacctagaacaagattaagcaccactcaagttgtgcacattaacttgtatgatcatcatacattctactctagggcagaataaaacagatacagaatgatgagcacataatatctgggcacattggg

SEQ ID NO: 18266 - DNA, 1106 bp, Setaria italica
  Peptide Sequence Number=SeqID_84240
tctaattgctaccttttttagttttttatttattctactcttgttcgaaagatgaggattgctctagactgtataaatttataaatatatttaagttcctgccgaacccctatcaaaacaggctaaaaaaattcagtctcccccgggctcgctctcactcgagcccgatgctcagccagccaagccgtgaccgtgactccgcgatcaatgtcggtcagccgacgaggcccttcaagcagtagacgccgagcacgaaccagccgagcaggagcagcgagaaggcggccatgcccaggaggaacgaccagccggccatgaagacgccgacgcaggagacggcagcgaacgggaggaacgaccggacggcggccgtccggtccagccagcggccgcgcagccagacgagcgccgccaggttcagcacgttccaccccacggatcccccgtaggcgagccggttcaggcagtctgccacgaaggagtggctgttgcaggtgaagaggttgtagcacttgtgctcgaaccgccgcgcctccgaccgcagcgcgtcgtcccacgacaccgccgtcccggcctccgagtgctcgtgggacctcgcgcacacgtgcgccgcgaggttggcagggaagcagcacttcttcatgtcaagctgaaggcatcttgctgcagaaccataagcaagatcgtccacactcaccaaattcgaacctgcaaagtccaagacagttccatcctcccgggcaatccccacatgccctatgtagggaaccagccaagaaactacaggaagaggagtccagacaatgcaacaagggaaccttgctctctttgggtctacttctcccagtggccacaactcctgcatctcatcatttgaactgaatacttcattgtccggagtggcttcaagctccattgaaagcaattcttttagctacacagatgctccttgtgctataaaacataacccgctactgctaacttccatgtcatggtctcaaaactagaagcagccggatccttctcagcagccgcattgggtgggtgccgggggtggattggattgggacgccaccgccgctgtcggagtgcaggtcaagtgtttg

SEQ ID NO: 18267 - DNA, 782 bp, Setaria italica
  Peptide Sequence Number=SeqID_84241
agtggtatggaacataggcaaaaggatagagaagaatcaatagtacgtgcagaactccttgaagaaacagaaaagtctaaaactccaagatcatgttcttctggcaagcctccttcagtaaatgttgaggatgacgaacctcctgatgtacccttctgtgtgtatggatgcctatgttcattagcaacagctttcttgccacattgtagacgtctgacttcagttcttccgttgctgctttcagcaatgtctgcctctgccaaaaagggccttttttgcctttcatcgtgatattttctaacaggagcttttgaagagctcacagatgaggccttggagcctgatgaatggaatggaccctgtaaataccttggcttctccttattttcagtgaatcgggctttcacaggattgagatttgtactcttccctggcctattgttgtattggcttggcctatcctcattgctttgatttctcaaggaaatgccagagcctcttctaagaaacccaattggggcagcggacctactggaagattcgtccataccaaaatgcagcacaatgcagaggtgtattattctccagaagacttttgctagaattctcgcggaagcggaagcggcggcggcgtctcccctttctcctttcgttccctcgcgggaggaaatggaagccggacaagacggcgataggattgaacatgatgattagtttccaacaccagcaattgctcgtaagtcaaatcatcatcatgttcaatcctatccaatgctagcaac

SEQ ID NO: 18268 - DNA, 596 bp, Setaria italica
  Peptide Sequence Number=SeqID_84242
tgaacacatctcctttcagcaggaatgtttttgtgccaaacatttcaatcaaggagaaccatttcttaagaacagggagaactcccattattttctagtttctgaccatactactatcgaggatgtgctatgaagaggaaagatgcagtaacaaaatgtacaggagagggaggatctatcatattcacaaattggagtgaacttcgtcagcatctacagtgtctactaacaaatccgcactatttacgagtttgagaaaagattcacgcgtctcccttgtccacctctgatggtattgctgaagctttgcatattggacaccagttcttctgccttagccattcgtgaatgcagcacacatggtactgatgttcacattgcatcctaccaatctcttctccttcaacgtattcctcctgacatatgctacatttgacatcatctacttcaatgttgttcccatctctatctgaatttcttgcttcgtacacactttggttgatacacttggcaaattgctcctcagtaagggcagtactcactgagccaatatgctcttccaaagctagtagttcctcatacgacatattgtcgat

SEQ ID NO: 18269 - DNA, 1249 bp, Setaria italica
  Peptide Sequence Number=SeqID_84243
cacaagaagtataccgtcaagtactcaagttacaatatcaatttttcatcagaatttagaaccatgattgaacacctcttctccttcaacgtattcctcctgacatatgctacatttgacatcatctacttcaatgttgttcccatctctatctgaatttcttgcttcgtacacactttggttgatacacttggcaaattgctcctcagtaagggcagtactcactgagccaatatgctcttccaaagctagtagttcctcatacgacatattgtcgatatccaatctcatatcttggtgctgatcatgcaagccaaggccactcagaagaagattagtttccaacaccagcaattgctcgtaagtcaaatcatcatcatgttcaatcctatccaatgctagcaacacctctgcaattccttccatgtttatgtgtctgtagccatctctctccccaaaaagaccgtggaacatttgttgaggcctttcttcaggatgagaaggagacctcctccttgctgtccgactacttgagccttgacgattagatgaataaactgcatgaggcaattctccataaaagggtcttgctagtctctgtggggaaatgtcatccgtgggaaaatgacctctttctggacgacgaaccctcgtaacagtctcacgaagagcaaatacaccgtcctctctttcacccggcatcctctccctggcacgcagagtagaaggtcgtctagtccttactgaatctgtggaatcctgaacacttgtgctattggtccttgctgattgttcagcagctctaggtctaggcaaactagcacgtggctgacctaaattagattgttcatttattccccttgatcttgaagaacttcctgcatctgaagttctcttcttagtaacttcaaccctcctattgtgaacagaatcagaagaagaacaacctgaaggcaaaacatcagatattgaagtgcaaccaaggctttttagaccacgtctctgcagtgcagtactggtggtaccaggggcacttgataacttggcaccagtggtgaaactttgaggtacagtacgccgattaacaaaagtggaagcaccttgaggtctacctgaactcaattcttctctatccttttgcctatgttccataccactcaatgcagtatttccagaatcaatagtacgtgcagaactccttgaagaaacagaaaagtctaaaactccaagatcatgttcttctggcaag

SEQ ID NO: 18270 - DNA, 475 bp, Setaria italica
  Peptide Sequence Number=SeqID_84244
cgagggcgagggtgcgaggtgagagcgcatcgcatattcgccgcattggccgattggcgtgggcgagggattgcaggcaggggtcgcctccggtataaaaatcctcccgctccgcacccacatctgcccccatcacagtgcgccaccctcaccaccaccgtcaccaacaaagccaatcggaccggacgctgtaccggcgacgaggagcagcgctcgccggcgatggattcggactacggcgtgccgcgcgagctctcggaggtgcagaagaagcgcgccctctaccagcccgaggtccccccatgcctgcagggcactactgtgagggtggagtacggtgatgctgcaattgctgctgatcctgcaggcgctcatgtgatcagtcaggcgttccctcacacctatgggcaaccccttgcacatttctcaggaagacggctgttgtccctgatgctaaggtcatatctgagcaccc

SEQ ID NO: 18271 - DNA, 287 bp, Setaria italica
  Peptide Sequence Number=SeqID_84245
caccgccggtatcccatcccaattccacagatttgaggtttccacactcgtcattcccagtacttataccacccgaaaatccaagcgaaatcccacctcccagacctcgaagcctggagctcacaggcgacggacgcgaagattcgatttctgcgattctttggagccctcttgtgccgccgggttcttgaaatcttaggccgcgatttttgtttcctccctttccggttggacggctgccgtggctggcgcacccttttgttggttcttgccgtgttcttgcgctg

SEQ ID NO: 18272 - DNA, 238 bp, Setaria italica
  Peptide Sequence Number=SeqID_84246
ttgagattcatcaaagaaatctctagctgctctatctctgatgtcgcagaatcaagaaacttcaaagtgacctggtacagcagcaaaaccaaatttcacatttccagcgagaaaatgaagagttgcagagtacaaattctagtttacacaagcaacttgaagagataagaactaatctgcaagatgagatcattgtgctacaaggagtgaaggaagaggccatttaatagcttacagg

SEQ ID NO: 18273 - DNA, 619 bp, Setaria italica
  Peptide Sequence Number=SeqID_84247
tacttgaatgagatagagaaggcacagtctagtattaaagatctagaaaaggaaactggaatcaacaagaaatgttatgaatagtaatatggccgagctacaggaggagaaggattcggccatgtcagaggtagagcagctagaggcttctttgatgaatcttaagactgagctagcacaacaacttgagaggatttcagatatgcagaagactactgaagaactggagctggcaaattctaacatgcataatgaaattgtagaagtaaaaggacaaaaaaatgaagctgctgcttctgttattaatcttgaaagcaatttagaacaacaagttgaacaaatttctgttctgcagcttactaatgaagacctacaaaatagtaactccaacctgaagatgcaactggaagaggcgaaggttagtcaccatgctgaaattttagcattacaagatgaaaggaacaaaataatttcagatctgcagcagtctgaggcttctatcaagaatcttagaattgaattggagcaaggaaaagagcaaatctcaaaaaatgaatctagctaatgaagatctgaagaacaacattgctatattggacaagcaattggaggaggtcag

SEQ ID NO: 18274 - DNA, 885 bp, Setaria italica
  Peptide Sequence Number=SeqID_84248
ttagtaaggtaaaatttaattctgcaaataaggagaacacaaagctacaaaaggatgtccaagaccttgaagttcaactccagctagccaagcagaagcttaaagttaccgaggcagaaagcaaatgcaaagaagacagctacgcaatggcagtggagacatcacaggcagagatccatcatcttgaacaactggtaaaacaattttctgggagagtcaacttgctggaagaaactctcatgcaagtaaaaggacatgccgaatcaggggtctctgaattggctgacaaattggacgagctagaaccactcttctgtcagagttttgcactcttcgttgatcgttcatctgcatgtggtgaagagcttaatgtcctgaggaagaagctacatgatcatcttgatgaacagaaggagcttgtcaaggagaatgatgagatggctgtcaggttgagagagaaagaaaaattggtgtcagaaatggtgaagaacacagctgatgcagaagcgaagttggtccagctcgagaagacggtggcagagaaagaagaagagctagcagctagagtgcaggagaagagagaagccattaagcagctgagcgacgcgattgtttaccacaagaactatagcgatgatctggtgcgctacatccgcagtcacaatcgccctcgcctcccattctgtctgtaaatctggatatcagtaaacgatgtaaaggcttcattctagctgcgaatttttgcagaaaggataacactgcaattttttcttatgtatcataaatagggctgaaatactttctggaagtagccatactgagtggcttgtgcattctcttagcagagaggactgctgtagtaattattttttttatcctattcca

SEQ ID NO: 18275 - DNA, 3954 bp, Setaria italica
  Peptide Sequence Number=SeqID_84249
agaattacaactacaaaagacccttggagttctgttagaccagcgagttgaacaaatttctgttctgcagcttgctaatgaagacctacaaaaaagtaactccaagttgaagatgcaactggaagaggcgaagtttagtcaccaagctgaaatattagcactacaagatgaaaagaacaaaataatttcagatctgcagcagtctgaggcttctatcaagaatcttgtaagtaatatttccgagctacagaaagataataattgtgccacgtcagagatagagcagctggaggcttctttgatgaatcttaagactgagctagcacaacaacttgagaggatttcagatatgcagaagactaatgaaggtctggagcttgcaaattctaacctgcatcatgaaattgtagaattacaaggacaaaaaaatgaatttgctgcttctgttattaatcttgagagcaagttagaacaacaagtccaagagatttcaaatcttcaggaagccaacaaagacctcaaagcagccaagactgatctgtataatgaggttacagtactgcaagaggagaaaaatacagcactcactcagttacagcaatcagaggctaacatcaagaaacttcaaagtgacctggtacagcagcaaaaccaaatttcacttttccagcgagaaaatgaagagctgcagagtacaaattctagtttacacaagcaacttgaagagataaggactaatctgcaagatgagatcattgtgctacaaggagagaaggaagaggccattaacagcttacatcagtcaaatgattcagtcaagaccttaggagctcagttagagcagccagttgaacaaatttctgttctgcagcttgctaatgaagacctacaaaatagtaactcacagttgaagatgcaactagaagaggcgaagtttagtcaccaagctgaaatattagcactacaagatgaaaagaacaaaataatttcagatctgcagcagtctgaggcttctatcaagattcttgtaagtaatattgccgagctacagaaggataatgattctgccatgtcagagatagagcagctagaggcttctttgatgaatcttaagactgagctagcacaacaacttgagaggatttcagatatgcagaagactaatgaaggcctggagctggcaaattctaacctgcataatgaaattgtagaattacaaggacaaaaaaatgaagctgctgattctgttattaatcttgagagcaagttagaacaacaagtccaagagatttcaaatcttcaggaagccatcaaagacctcaaagcagctaagactgatctgtataatgaggttacggcactgcaagaggagaaaaatgcagcactcgctcagttacagcaatcagaggctaacatcaaggaacttcaaagtgacatggtacagcagcaaaaccaaattttatttttccagcgagaaaatgaagagctgcagagtacaaattctaggttacacaagcaacttgaagagataaggactaatctgcaagatgagattattgtgctacaaggagagaaggaagaggccattaacagcttacatcagtcaaatgattcagtcaagaccttaagagttcagttagagcagcaagttgaacaaatttctgttctgcagcttgctaatgaagacctacaaaatattaactcacggttgaagatgcaactagaagaggcgaagtgtagtcaccaagctgaaatattagcactacaagatgaaaagaataaaataatttcagatctgaagcagtctgaggcttctatcaagaatcttagaattgaattgaagcaaggaaaagagcaaatctcagaaatgaatctatctaatgaagatctgacgaacaacattgctatattgaacaagcaattggaggaggtcaggagcagtttgcatgctgaaattgcacaactacaagcagagaagggcatagttctatcagagttacaggtgtctcaggcttctgtcagaaacttggagagtgtgctagaaaagcagagtgagaagatttcaactctggatcaagctaatgatcagttacagaagaacatatgtaccttgactgagcaatcagaacaaaccaaggctgagctgcagaaggaggttgaggcaacacaagaagagaaggatacagcactaacacaactaaagcagtcacagacttcagtacaaaatcttgagaatgaggtgacacgactgaaagaggatctttcagttcagctagaaagcaattccaccttggacaagcagttggaagaagtcaggagcagtacgcatgctgaaattgcagaactacgtgcagagaaggacgcaacgctattggagttacagacgtctcaggcttctgtcagaaatcttgagattgcccttcaaacccaaaacgagaacatttcaactctacagcaagctaatgatgagtcacagaagatcatttgtactttgaccgagcaatcagaacaagccaaggctgagctgcagcaggaggttaaggctacacaagaagagaaggatgcagtgctaacaaagctgaagcaatcagaggattcagtacaaaatcttgcgaatgaggtgacacagctgaaagatgaactttcagttcagctggaaaataattctaccttggaaaagcagttggaagaggcaatactaaaagtatctaacctacatgagaatctcgagaaggctcaggctgaagcagcttgtcaaattgatgacatgagtacaaaaacaaaagatctggagaagacaatcgatctattgtcttatcaaaagaccaagttggaggaggatctaaaaattatgattgaagcatgcacagtaaacatgtcatttatgacggaatttgaagatagagttacacaaaaaatttcagatcatgaggctggacttgtggttctccgccagagcctgaaaggggttgctagcagctgtcagaggcttcagtatgcatatgatgaggtgtcctcgagggtctcccagctcgagatacttaagaggcttcagattgagcagataggtcaactagaggagaaacacacagaaactttggagaaacatcgacttctggaagaggaaaatttgtctgcaaataaggtgaacacaaagctacaaaagcatgtccaagaccttgaagttcaactccagctagccaagcagaagcttaaagttaccgaggcagaaagcaaatgcaaagaagatagctacgcaatggcagtggagacatcacaggcagagatccatcgccttgaacaactagtaaagcagttttctggaagagtcagcttgctggaagaaactctcatgcaagtaaaaggacatgccgtatcaggggtcaaggtcctgaggaagaagctacatgatcagcttgatgaacagaaggaacttgtcaaggagaatgatgagatgtctgttaggttgagagagaaagaaaagttggtgtcagaaatggtgaagaactcagttgaagcagaagcaaagattgtccagctcgagaagatggtggcagagaaagaagaagagctagcagctagagtgcacaaaaagaagccaagattgtccactcttttttttcgtttcagaaaaaagagtgcaggagaagagagaagccatcaagcagctgagtgacgcgattgcttaacataagaactatagcgatgatctggtgcgctacatccgcagtcacaatcgccctcgcctcccattctgtctgtaaatctgaatgtcagtaaacgatgtaaaggcttgtatgtatcataaatagggctgaaatactttctggaagtaagccatactgagtggcttgtgcaagctattagcagagagaactgctacagtaattattttttattcattccaccttgtcttgttactggagcgatcaaattactatgagactaagtcaa

SEQ ID NO: 18276 - DNA, 470 bp, Setaria italica
  Peptide Sequence Number=SeqID_84250
aaccgagtggatcaaccgcttcacaggaatttgtcaaacatactaaccacttacccctatgggaagggttctagccattccctagctagatggtactaggactgtaggtaggagtagtgtgataggagatggtagactggacacgcccatggaggatttgaggtgtgccgggcctggtcatttatcgaccctactttctgaaattcgacacttgttggccaagagattcacagtcccaggtccttcagcttgccgaggatacccaagctgggaaaacaggatggtaccatactagttagagagtcatggttgtgggttgcatctcagttggctgatccccgacttgcccgagtggatctaggtgtacacactctgcagagataaaactatacgtataaatgcgtccttagtcatgaacaatacccttaattagtaaagttagtacttttagtttactttaccttaattta

SEQ ID NO: 18277 - DNA, 399 bp, Setaria italica
  Peptide Sequence Number=SeqID_84251
catggaacgacctgccatcgggtcgacaattagacaagaggagttttatggaaggagcacaatttttaagcaaaccgtagatcgtatgacaagtggcacttgttctgatgagaccctgtccgtccttcctatagttggtcccggtggtattggtaagacaactttcacccagcacctttacaataacgaaaagattgaaaaacacttcgctgttagggtctgggtatgtgtgtcgactaactttgatgtgcttaagctcaccaaagagatacgtagctgcatacctgcgggtgaaaatgaagttgaaacagacaatttagatcagcttcagaaatccattgcaaagagactgaaatcaaaaaggttcttaattgtcttagatgatatatggcaatgcag

SEQ ID NO: 18278 - DNA, 859 bp, Setaria italica
  Peptide Sequence Number=SeqID_84252
aagaaagagttcagctaggagataacctacaaggctacaactctttcttgttgtagtacaacaagaagagttgtagccttgtaggttatctcctagctgaactgaacattttttagttaacactgttatctgagaaaaaagaagtatgaacataagatccatggagaaacacgttcagtctgcggattttatttaccgttaggtaactagtactaaggtccacaagtctggacctgctggtgccgttcttcgacagcccttcacttgagctcgaaaacattgaaaatctcacagggtttgagggttgaaacaaggttcgtcaaagcgacatggaaactaaggtgcttctgtaagcttaagaaaaatgtttgatttttcctagtacttttaaagagggctgtctccgttgataacacgccctgctattttcaggacatatttgaggcttccatggaggcccttgattgcgatccgagggaacacaacctatgatcttaacgaagattacaaggtggttcggcactctgagagctgggacgtctctgcgctcgaggccatcggtcagatatttgtgtctgctccggagcagcggaaagacagctgaggttgaagtggaatgtgcagtgtgcaacaccacacatgatcagaaatactcctatgtagcgtcagagacagccatgttcaaagctgtctgccagacctccatttcagaaagcagcaagcaatgttgaaactgaaaccatcgttttctggcgtcagagagcaaagatagtgtatcaagggattgataagaacaaatggacgccatttgacttctaattgtacccatttaatggaacttttaattgtggtgattcaa

SEQ ID NO: 18279 - DNA, 676 bp, Setaria italica
  Peptide Sequence Number=SeqID_84253
ccgggcccatcttgaacccgtgcccggagaacccggccccgaccaccacgtcctccccgaagtccccgccgaggaagtcgatcacgaagtccgcgtccggcgtcatggagcagatgcacgactgccggatcaccggcccgccggcggcgtccacgtgtcccggcatggcctcctcgatccacctggccacccgcttggtgacttccttgtcgccagcgtcccagttacggttgtccgggtcgcacggcggcccgccgtcgcagctgatcttgataagccccgggagctccagcgacggcgtgccgtacacgggcgggtcgccggagctggagaacgtcgggaacccggccttcgccgtgagctcgcgctcgcggccgggcttgacgcgccagtacaggatcagcgtgtgcagcggctggatggggagctccacgccggcgacggacctgagcagcttgctcgcccaggcgcccaccgtgacgacgcacttggcgccgcggaacacctcgccgccgatcgtcctcaccacgacgccgccctcggcccccttctcgatgccgacgacctcggcgttgtctctgaccgcggcgcccttcttgacggcgagcgcctggaacatggccaccgccttggtcgcgttgagcacgccgccgccgtgctcgctcaccgcggtgac

SEQ ID NO: 18280 - DNA, 1189 bp, Setaria italica
  misc_feature (1)..(64): n is a, c, g, or t
  Peptide Sequence Number=SeqID_84254
nnnnnnnnnnnnnnnnnnnnnnnnnnnnnnnnnnnnnnnnnnnnnnnnnnnnnnnnnnnnnnnnttttttttttttttaggtttagtacagtgaccattctgggcttcgtttaacactcgtcactttgcaagcacatccatgccaatacaagtttggttccagaggcgcagactggtttagcggccaatagtgcaatgaatacaaacatccaaccattatgttgtacaatgagtcaacgatggtgggtgatgaattctgcccctgcagcccaaccatatccaaaacgacccgtccggttccgttcactgtctatgctggacaacaccattctccttcaagtagtccacaaactcgtcgattaggtagggccaagcaccttcttcatcatagttggttagttggggatcaactgtcttcacaaattccaataactgcgcccatgtatccctggagatagctttattgtgccttacctgtagaaactggcaccagtggtcgatgagaggccagttcctgtcagcaaacagcagccgccacatgccaatagcagtctccaatgcgagagatttctgacccttttcccttgcccaggcaaatgcaaaattgtatatttcacgaaacttctgatcatctttaagctcagctcgtagtgaaggtaacttatcacgaagcttctctattgaatccactccaattgactgcagtccaccaacgaactcctggcgagtgaattcacacattgtagaagctttcatatgccacgaaatgacaagcataacaatatcttgaggatccacctgcaaatcgttgcacaactgtgatatgccttccaccattatcatatcagcatccgggtctttatatctgttgtacagctcttccagatgtcgagtatttgcaacagcaacttgtggttggctgtagaaaacatcaaaagctccttccaagtgccagtcactagttttaagagcctgaagcgcgaccttctcacttgcgccagttatgaccatgaactgctgcaccttgtcgcggcttcctctccccagcttatgcatcttgtatcggatcgggcgtataaggccggatggcgagggggcgcgcggtctagggtttcgactctcgagaagcttcagcgctcttgtgccctctcctctgcgtttggccttctgttctgccttttggtttttc

SEQ ID NO: 18281 - DNA, 1788 bp, Setaria italica
  Peptide Sequence Number=SeqID_84255
aactttgctaaatggtgtgaattcttcaagtataatagagagcgggaagcacatagttgactctgcacttgaaccacggcttccagaatggtcaccagaagaatcccttgctgaaagagttattggtgcaatgtggttgtatcttatgacataccgacttgcagatgaagaaaagattgatgaaacacctgtttggtatgtcatggatgagttgggctcagccatgcgccacagtgataatgcaaacttcagaatagctccgttcttgttcatgccagaagggaaactagccactgctataagttacacagttctgtggcccactcatgatgttcatactggagaagagtgtacccgggatttcttgtttggtattggcgaggagaagcaacgttcagctaggcttacagcttggtttcacacaccagagaactactttattcaggaattcaggaagtaccaggaacaacttcaaacaaatagcatttgttcttcaacaaaaactaaagaggcaccatcaaccaaaagtgttcgtccaagtgatggccgtgcacttcgagtatatactgacatacctcacgtagaggagtttttaacacggccagagtttgttctcacaactgatccaaaggaggcggacatcatctgggtaagcatgcaagtggattcagaagtaaagaatgcactagggcttacagacaaacaatacacgaatcaatttccttttgaagcttgcctggtcatgaagcaccatcttgcggagaccatccacaaggcatggggctcacctgaatggcttcaacctacatataacctagagacccatttgtctccactgattggtgattattgtacgaggaaacgagatggcgtggacaacttatggatcatgaagccttggaacatggcaagaacaattgataccacagttactggtgatttatctgctatcatcagacttatggagacaggtcccaagatatgccaaaagtatattgaatgccctgcacttttccaaggaaggaagtttgatcttcgttacattgttttggtccgcagtatacgccctttggagatatttctttccgatgttttctgggttaggttagcaaacaatcagtacactctggagaagactagcttttttgagtatgagacccatttcactgtgatgaattacattggaaggatgaaccatatgaacacgccagaattcatcaaggagttcgagaaggagcaccaagttaaatggctggagatccacgaaagcatacggtctacgatacggtgcgtcttcgagtcggccaccgctgttcatcctgagatgcagaaccctttctccagggccatctatggggtagacgttatgcttgataacagattcaagccaaagattttagaggtgacgtactgtccagattgcgggagggcgtgcaaatatgacacacaagctctcgtgggaaaccagaataccatcaagggcagtgattttttcaacagggtgtttggctgcctctttctcgacgagcaaacaaatgtgtcgccgttgtaatcatcacccggaaggccggaaggctgttgtaacttgtaatatcaaggttatcacaacatgacacgtataagctgtcaggcctgttgccaatgcgaaaggaatgatggattgtctctttctttgcctgtttctagtcgtagtttgttgaagctttccgagacagagtattctctgaaagtctgaaccatgctcgttactgaatgtgttgctgtggtggtttggatgaataaaaaaaa

SEQ ID NO: 18282 - DNA, 303 bp, Setaria italica
  Peptide Sequence Number=SeqID_84256
tttacgtttaagtttactttaactttaccttaaacttaaaccctttgttaagttaagttctttcgttccggttagtagtcgttggtcctagtcgttggttggttggtagttgtattgccatagtgcgtcgtggtcgtcgtcgtgcgtgcatgcatgcgtggtcggtttggttggttggttggtttccagttcatctgtgcagttagccttgcaccgtacgtcgtctagcgatagctttgtgttcactgcttctagttacctgcttgccttgcatttgggagagagtttggggatatgttggtt

SEQ ID NO: 18283 - DNA, 310 bp, Setaria italica
  Peptide Sequence Number=SeqID_84257
ctgattagacaaagcatgggaaagttttctatgatgtgaagctcagtgatcggagtctcatttggaattccgacttgatagagaccattgagctggaaaatctgttgataaatgcatgcataactatgcattcagcggaggctcgaaaggaaagcagaggagctcatgctcgtgaagatttcacgacaagagacgatgagaagtggatgaagcacacactggggtactgggagaatgagaaggtccgattggcttacaggccggtgcacatgaacacattggacgaggaagtcgagtccaatgtgttcat

SEQ ID NO: 18284 - DNA, 279 bp, Setaria italica
  Peptide Sequence Number=SeqID_84258
gcgcaaattcactccttgacatagttgttttcggttagagcttgtgcgaacagggttgctgatatttctaagccaggtcagaagcagaaacctcttgaaaaagatgctggagaaaagaccatagcctggttggacaaactgaggaatgccaatgggtcattgcctacttccaagatccgtctcaacatgcagcgtgttatgcaaaacaatgctgctgtattccgtacacaagaaactcttgaagaaggttgtaagctgattagcaaagcatgggtaaag

SEQ ID NO: 18285 - DNA, 1218 bp, Setaria italica
  misc_feature (882)..(882): n is a, c, g, or t
  Peptide Sequence Number=SeqID_84259
cagcacagcgacatctctagtccatcttctcgtagaggagcgagcgaggagaagagcagaggcgagcagcgagatggcgaggtctgcgaagatgatggcggcggcggccctgctggtcctggcggtggcggcggcgacgacggccgaggcgaggaacatcaagacggcggagaagaaggacgacgcggtggtcgcagccgcagaccttcccgcccttcgaccgcctcggcggcggcctccccggggccggaggcagcagcatcccggggttctccatgcccggcagcggcgggctcaccccgggcttcagcctccccggctccggcagcatcggcagcatgcccctcttcggcggcggcggctcccccttcagcggcttcggaggcattcccggctccccccgccgccggcggctccgtccccgacgcactccaacaaaccctgaagaagctcgccggagagcgtggccagcgtggtggtggagtgatgccatagtgcgtcgtggtcgtcgtcgtgcgtgcatgcatgcgtggtcggtttggttggttggttggtttccagttcatctgtgcagttagccttggcaccgtacgtcgtctagcgatagctttgtgttctactgcttctagttacctgcttgccttgcattggagagagttgggatatgttggttgtgtttggtttgttgtttggttattaggtcatcgatggtgttgtgttcttggtgttgtaatggtggtgatgttctcttggggcatgaataatgctacatgtgatgtgtttgtgttgtgggatttgttgtaatgtaagctaattaagcttttgttgtcattatgatactctatgttatgaatggttcacgcttaacaaaaaaaaaaaaanaaaaaagaaagaaaagctaaggtctgggagaagtcatgggagaacttcaaggagctgcaggaattcaagcccgttgaggagagcagcgcttgaggatctctctagacttccacgtccaattgctgcctgaagcgtgaaacagactttcagaataaggagctggttcggatatagctgtgtcattgcgagctccctttgtgtgatatcataaaattaccgtgccctttgtgtaatatcataaacaacggtgccctttgtgtaatattatgaataatggtgctgtgtattcaccacgcctcatgatggaattcttatataaagcaagtcttcaaaact

SEQ ID NO: 18286 - DNA, 2370 bp, Setaria italica
  misc_feature (2358)..(2358): n is a, c, g, or t
  Peptide Sequence Number=SeqID_84260
ctcccgagaataaacgtaacgaccttcccctgccaacctccccccgcccgccgtcgtgttaacccaccgccgctctcctcttcctctcccaccaccaccctccccctctccagaacccccccgcctcgcgcggcgccgctgccgcgagatctgctccgctcgcgatgtggcgcagctgcgtctcgcggggcctctccagggccaaggcctccgcctccaggctcctctccacggcatcgtcgtcctacacggtggtggaccacacgtacgacgcggtggtggtgggtgccggcggcgcgggcctccgggcggcgatcggcctctccgaacacggcttcaacacggcgtgcatcaccaagctcttccccacgcgctcgcacactgtcgccgcacaaggaggcataaatgctgcgctcggaaacatgactgaagatgattggaggtggcatatgtatgatactgttaagggaagcgattggcttggtgaccaggattctattcaatatatgtgcagagaagcaccaaaagctgttatagagcttgagaactatgggttaccattttcaagaaccgaagagggaaagatataccaacgtgcctttggaggacagagcttagattttggaaaaggtggacaggcctaccgttgtgcctgtgctgctgacagaacagggcatgctatgctacacacactatatggtcaagcaatgaagcacaatactcagttttttgtggaatattttgcattagaccttatcatggacaatgaaggcaactgtcagggagtcattgccttaaacatggaggatggcacccttcaccgtttccgtgcttctaatacaattctagccacaggaggttatggcagggcctatttctcagcaacctcagcacacacttgtactggagatggcaatgctatggtcgcacgtgctggtttacctcttcaagatcttgagtttgtgcagttccatcctacgggcatttatggtgccggatgcctgattactgaaggttcccgtggtgaaggtggtatccttagaaacagtgaaggtgaacggttcatggaacgatatgctcctacggcaaaagatcttgcttctcgtgatgttgtttcaagatcgatgacaatggaaattagagaaggccgtggtgttgggccattgaaggaccacatttatttgcatctgaaccatctgccgcctgaagttctgaaggaaaggcttcctggtatttctgaaactgctgctatttttgctggtgttgatgtcaccaaggagccaattccagttttgcctactgtgcactacaatatgggtggtatcccaacaaactaccatggggaggtagtggatatcaagggtgataatccagattctgttatttctggtctattggctgctggtgaagcagcgtgtgcatctgtccatggtgcaaaccggctaggcgcaaattcactccttgacatagttgttttcggtagagcttgtgcgaacagggttgctgatatttctaagccaggtcagaagcagaaacctcttgaaaaagatgctggagaaaagaccatagcctggttggacaaactgaggaatgccaatgggtcattgcctacttccaagatccgtctcaacatgcagcgtgttatgcaaaacaatgctgctgtattccgtacacaagaaactcttgaagaaggttgtaagctgattagcaaagcatgggaaagttttcatgatgtgaagctcagtgatcggagtctcatttggaattccgacttgatagagaccattgagctggaaaatctgttgataaatgcatgcataactatgcattcagcggaggctcgaaaggaaagcagaggagctcatgctcgtgaagatttcacgacaagagacgatgagaagtggatgaagcacacactggggtactgggagaatgagaaggtccgattggcttacaggccggtgcacatgaacacattggacgaggaagtcgagtcattcccacccaaagcgcgtgtttattgattgatcacttcaggcctgacacctcaggaattctctgtaaggtgttaataaagcaggagatgggcattcctggctgagaacgtgaccaatatttttgccgttttcgttttaaggctgtatggtgtaatttgataggaataaagaagaaaacacatgctaatgcctgattgacgtttgtgtaaatgaaattttgatgggtcggtaaatggtgatgctctacctgaaccaatgcgtgtgtcagggtgattaacgttggtggtgtgcaaaatatgctctgttcagttggtcctttggaagcaatgtatgaatgtgtttaaccaaaaaaaaaaaaaanaaaaaaaaaaaa

SEQ ID NO: 18287 - DNA, 691 bp, Setaria italica
  Peptide Sequence Number=SeqID_84261
cggtctttgacatgcaggacatccacacaggtcgattttttatctcagcaacagcagtagtgaagcatagtaacactcggttccaactcacgacggtatacggcccaacacggcactcagcaaagcctgcattcctacgccaactgcgaacaatgactccggatgacaccactccatggctaatcatgggtgactttaacttaatctacagtgctagagacaagaacaacagcaacctcaatcgcagtctgatgaggagattcagatcagcactgaactactgcggccttaaggaaattcacctacaaaacagaagatttacatggagcaacgcaagacatcagccgacgctgacgcgaatcgatagagtgttctgtaacgcttcttgggacgtcaaattcgacgaccacgtccttcacgctctatcctcatcgcactcggaccactgcccattactgcttgcgcaccactcgggacctcgaaaacctacacccctccgctttgaaaatttttggacgcgactaccaggtttctatgaaaccgtagataaagaatggtccaagccgactacgcacacagaacctttccatcgcctgggctacaaactgcacaacaccgcccgagcactaagatcttggagcagagcacacgtctccgatgcccgtttaaagctgcatatggctcaagaagt

SEQ ID NO: 18288 - DNA, 739 bp, Setaria italica
  Peptide Sequence Number=SeqID_84262
gcttgaacaatcacccaggatttgataatggtggtattctgtggttccatgacttgactgagtttccacatggcactttaggtcctatctttcctatcttagttgctggtctccattatttaaatgttcagatttcttttcaggggtcccagatcaagcaccatccaggaattttcggcttgctggcaaagtactatagaatatacttggatatactgactatccctttgtttcttatcgcgtacgtggtccctcagggaagcctggtctactggactcaaatgggttattttctgtagctcagcaattgtccctgagaaatggtgctgtccgcaagctgttgggattgccagatattagagctcaggttggttacagagcagaaaagtctcctcttgagggccctaagatgatgcagcggtcactgcttgaagatgctgacttgcaaacgaaattggcaccttctgataatggaagtgccagtgagagcgcaactcctatggaaggaaatatatccgagtccagttcacctgaggagctacttgaacaagcattacagtatctgggaactggtcgccgagatcaagctattccactgatcaggacagcagtagagagaaaccctgatctctctacagcgttaattggaatgggacaaacactgttctcaaacagattgtttcctgaagcctcagaatgttttaaacacgctatagaaaagattcaagaagacgaccct

SEQ ID NO: 18289 - DNA, 298 bp, Setaria italica
  Peptide Sequence Number=SeqID_84263
ctccgccgcgcacccgtggctctgctcgtccctgctccagcgtagccatgccgcgcccttgccgttgttctctatccccgccacacagctcctccgcagctccgctctagccgcgccgtgctgcgccccgccgctcttctccgtcgccgtgccgcatctccgcccgtccgcctgcatctcggctgtgcgctccgccgccgctgcccggtcacccacgccgcctccatcgaagcaccacgcagtgaggggtatttttgccaaggacgaacggaggtggaggtggagccgacggggacgg

SEQ ID NO: 18290 - DNA, 928 bp, Setaria italica
  Peptide Sequence Number=SeqID_84264
cgaaagggtggtgatttgagatactgccagaaatgttcccattataagcctcctcgagcgcaccattgccgtgtctgcaaaagatgtgttctaagaatggatcaccactgtatatggattaataactgtgttgggcacgagaactacaaggtctttctaatcttcgttttgtatgctgtgattgcatgcttctattctatggttctgattatagggggtgccgtgcatttgcctaaagatgagcaaccaggcagcgattctcctagaacatctattattatttgcggggttcttctgtgtcctttagctttggcactgatggtcctattgggttggcatgtttacctcatcttacacaataaaactactattgagtaccatgaaggagttagagctatgtggttggctgaaaaggcgggaaatctttatcatcatccttataaccttggagtctatgagaaccttatttcggtgctaggtcctaatgtgttctgctggctttgcccaatatcaaggaacataggaagcggtgttcgtttccgcacatcatatgacattccgctatcataagcaccaatgtgatgcacaccagatgtccacacaagtagtaaaattgctattcttgacagttttgcactaagagaatgctacagcagaaaacagtgtttaggatacttcaagaaacaagatgagcttcagggtcctttaagcctggtgggatcaatcgccaattaggatttaggaatgctgacttagatttttcttacatttttgttggacatacttgatcaaagaagccatcattgcttgtgcagtagtaatctacagcggattgtactaataccaaaaaaaagaacagtctgtactcaaggctgatctattgtaaagctatgctgaaactgttgttttctgaagttccatgtgtttt

SEQ ID NO: 18291 - DNA, 505 bp, Setaria italica
  Peptide Sequence Number=SeqID_84265
tttttttggcaaaattaacagtgagaatgcttattcataacatgagaatgtaccagaaagacgcaatcgctttcactacccttcctacagtaccacggaaaattgaagttccagactgacttccaacttacatttcagtagaacggtggcaaattattttgtacttgaaaaattcactttgggagattaaaagtctaccatcatggcatggcaatgaccctcgtgaaacaaaaattttagccaaaccaagaaagaagaaacaatataacagtaacagcacagcagggattcacctctgtggatgaaggtagataaaatagtcgggtactttctgtgctctcagcctatgagcagcttgttctcctccaagaaactgtaggtgggcacctccaggttgaagggtgcaggacccttgcggatcctcccagagatgtcgtagtgggagccatggcatgggcagaaccagccgccaaagtctccggcattcggcagaaagacgcagccg

SEQ ID NO: 18292 - DNA, 267 bp, Setaria italica
  Peptide Sequence Number=SeqID_84266
cttcggcgtcaacacctacaccttcgtcaacgccgccggcaaggcgcactacgtcaagttccactggaagcccacctgcggcgtgcggtgcatcctcaccgacgaggaggcggcgctggtcggcgggcgcaaccacagccacgcgacccaggacctctacgactccatcgccacggggaccttcccggagtggaagctgttcgtgcaggtgatggacccggccacgtcttggtgtcgtccagcgggtcgaagtcgtactgctcctcc

SEQ ID NO: 18293 - DNA, 305 bp, Setaria italica
  Peptide Sequence Number=SeqID_84267
tactactccgacgacaagatgctgcagtgccgggtgttcgcgtacgccgacacgcagcgctacaggctggggccgaactacctgatgctccccgtgaacgcgccgaggtgcgcgcaccacaacaaccactacgacggcgccatgaacttcatgcaccgggacgaggaggtcgactactacccgtccaggcacgcgccgctgcgccaggcgccgccggtgccgatgccggcgaggccggtggtggggaggagggagaaggccaaccaatacaaggaaagacccaaacgaacttaacaaaagaacaa

SEQ ID NO: 18294 - DNA, 277 bp, Setaria italica
  Peptide Sequence Number=SeqID_84268
gcaagccacactgcaagttccgctcctactcgcaaccatggatcccaccaagttccgtccgtcgagcagccacgacaccacggtgacgacgacgaacgccggcgccccggtgtggaacgacaacgaggcgctgacggtgggcccgcgcggcccgatcctcctggaggactaccacctgatcgagaaggtggaaaaacccacttcgcgcgcgagcgcatcccggagacgacgtacgtaccaacgcccgcggcgcctccgccaagggcttcttcgagtg

SEQ ID NO: 18295 - DNA, 445 bp, Setaria italica
  Peptide Sequence Number=SeqID_84269
cagactcgagagggagtgagcaagccacactgcaagttccgctcctactcgcaaccatggatcccaccaaggtgagtgagctgctgtttgcatcttctgatgatttcgatctcatgttcctagctaattaattcctacagtcacatcgagttaataattaatgagcaattaatagaatcatatgttttagcagtactgaatctaagcaggagccatgcatggctgatgaatctcagtaactactatacgtattgcaattgcagttccgtccgtcgagcagccacgacaccacggtgacgacgacgaacgccggcgccccggtgtggaacgacaacgaggcgctgacggtgggcccgcgcggcccgatcctcctggaggactaccacctgatcgagaaggtggcccacttcgcgcgcgagcgcatcccggagcgcgtcgtccacgc

SEQ ID NO: 18296 - DNA, 1859 bp, Setaria italica
  Peptide Sequence Number=SeqID_84270
gcctcttcttcactccttggcattattcgctacataaccggcgctgtgtggcggacctcgcgtacgtagctcgcacgcaccccagccgccatggacccgtacaagtaccggccgtcgagcgcccacaacggcccgcactggagcaccaactccggcgcgcccgtatggagcaacgaccactccctcaccgtcggcccacgaggcccgatcctgctggaggactaccacctggtagagaagcttgccaacttcgaccgcgagcgcatccctgagcgcgtggtgcacgcccgcggcgccagcgccaagggcttcttcgaggtgacccacgacatcacccacctgacgtgcgccgacttcctgcgcgcccccggcgtgcagacccccgtgatcgtccgcttctccacggtgatccacgagcggggcagcccggagacgatccgcgaccctcgagggttcgccgtcaagttctacacccgtgagggcaactgggacctggtgggcaacaacttcccagtcttcttcatccgcgacggcatgaagttcccggacatggtgcacgcgctcaagccccaaccccaagtcccacatccaggagaattggtcgcgtgctcgacttcttctcccaccacccggagagcctccacatgttcaccttcctcttcgacgacatcggcatccccgccgactaccgccacatggacggctccggcgtcaacacctacaccctcgtcaaccgcgccggcaagtcgcactacgtcaagttccactggcgccccacctgcggcgtcaagtccctgctcgaggacgaggccgtcaccgtcgggggaaccaaccacagccacgccaccaaggacctctacgatgccatcgccgccggcaacttccccgagtggaagctctacatccagaccatcgacccggaccacgaggaccgcttcgacttcgacccgctggacgtgaccaagacctggcccgaggacgtgatcccgctgcagcccgtggggcgcatggtgctcaaccgaaacatcgacaacttcttcaccgagaacgagcagctcgccttctgcccgggcgtcatcgtgccggggatctactactccgacgacaagctgctgcagaccaggatcttctcctactccgacacgcagcgccaccgcctggggccaaactacctgttgctcccggccaacgcgcccaagtgcgcgcaccacaacaaccactacgacgggttcatgaacttcatgcaccgcgacgaggaggtggactacttcccgtccaggtacgacgcagccaagaacgcgccgaggtacccaatcccatccgtcccgctcaccggacgccgcgagaagactatgattaagaaggagaacaacttcaagcagcccggggagaggtaccgctcaatggacccggcaaggcaagagcggttcatcaagagatggatcgatgcgctctctgaccctcgcctcacccacgagatcaggagcatatggctctcctactggtctcaggccgacaggtccctgggccagaagcttgcgagccgtctcagtgccaagcccagcatgtaagatcagccaatggtacagcgaccaaacaaacactctgctacactcatggaataaatccaagccctcttatcggcaagatccaacctgatgctacaaatattctagcatgcatactgagtctctattttgtaagaggacatatggttccgtcacattcctgtatcatcaccgtgtaataatttgtacttgcagactcgtttccccctgatactacattgtatttgtaattgttgcaactgcaccctattaaattcagaataaatttcatacagcaaatttataaataag

SEQ ID NO: 18297 - DNA, 2345 bp, Setaria italica
  misc_feature (2293)..(2293): n is a, c, g, or t
  misc_feature (2299)..(2345): n is a, c, g, or t
  Peptide Sequence Number=SeqID_84271
cgaaaggtagcgcagcacttcgagtttattttttcgtcccgagaggagaggagcaccacccccggacagagagggggggagggagagggagccggagcggggaggaaggatccggaatctcgccggtgatgccggtaggggaggtggcggcgcggccaggagggggagtggctgggatggtgctgggcggcggcgcggccgcggcggcggtgggaggggatgacgccgtcgtcatgcagctcgccgccgcggagggggaggagaccgtcgtcaccgtcaactgccccgaccaggccggcctcggctgcgacctctgccgcaccatcctcgagttcggcctccgcatcacccgcggcgatgtatccactgacggccactggtgtttcgtggtcttctgggtcatgccccgctcatcgaccatcaaaatccggtgggcgagcctcaagaaccgcctcatgtccatgtgcccttcctcatattccatcccgttctaccccgacatcagccagccaggcccctccaagttctacctcctcaagctcttgtcacctgaccgcaaagggttgttacatgatgtgacgcatatactatcggagctggagcttttaatccacagagtgaaggtgtcaaccacgcctgatggaagagttgtggatctcttctttatcacagacggaatggaactgttgcacacaaaggaaaggcaagacgagacttgctcgacgctgattgctaccttgggtccttccataagctgtgaggttctatccgcagaagggttccagcaagggttctcttctcttccaccaaaaattgctgaggaactattcagggtggaactagctgacagcgagatctgctcaagttcgcttagtgcagagttgaaaagggttcagacggccacaattaacttcgacaatgccctgagccctgcccacacactggtccaaattatttgccctgatcagaaggggctcagttatgacatcttgagaacaatgaaggactgcaacattcagatattttatgggcgattcagatcagacaagaaagggtcaggtaataaaggttgtcgagaggttgatctttttgtcaaacaagtagatggcaagaaggttattgatcctgagaaacaggaggttctgaggtcacgcctgaggtctgagatgctccatcctcttagagtgatgatcgtcagccgtggacctgacacagaactccttgttgctaaccccgttgagctatccgggaagggacgaccgcgcgtattctatgatgctactcttgctctgaaagcacttggaatctgcattttctctgctgaaattgggagacagtcagcatcagagcgtcaatgggaggtctacagattcctcctggatgacagcaaagaattccctctggcaaacagtccaactaataggaaccgtgttgtcgatagggtaagaaaaacgctgatgggctgttacaactaaggctcgggttatgtctccaaagaatccaaagcttgcaggcgactgatacagtcagctccaatgtatcccataaattatgtacttgaaattatgcgcactccagaatccagaatgtagtgtgcattccaagtgatgcattcgctgaccaaattggtatctcgagctccattgtcactgcccacagttgactgctctgtcaaggtaaatggtgatgggaatgccgaagctcatctaggcctccagccctccactatgttgtgaatttcagagctggcagtatatttatattgaagcaatgcaagacttttggcaagtgatgtttgctggagttgcatcttctgatcaacattgagcatatggtcgctggcaacaaagaaagtagagattgcgcgccacaatctccctgcctctgttgtgttgtgcacatgctgagaaagaaagatatgagaagatcggaaaaggagcatgtttggtgggaggtgcaaatcacaggagcaatgattgagcttttgtttggttcaggggattactggatgctgacacagatacatgcatgagccggtctgttgtaaattattttagtggagatgttgctgtcctcctgcgtctgcttcaccacctttgccttgttttcctgcctccttcctgccttccttgtatgattgctgcttgtactttcagaatagaaagagaggagtaatgtaaagccctgcctcctcatgtaagcgcaatttgtacttgtttgtaaggatgcatatacatatatgatacattgtgcaaaagtgcaattgtttttgcaaaaaaaaaaaaaaaaaaanaaaaannnnnnnnnnnnnnnnnnnnnnnnnnnnnnnnnnnnnnnnnnnnnnn

SEQ ID NO: 18298 - DNA, 530 bp, Setaria italica
  Peptide Sequence Number=SeqID_84272
ttctactcctgtccctgcagatatagttgacagcaaagtttgccttgcgtctgcactcttctgcaggacaaatgtggtcccctgcacttgttcccccttgaaatacgtattttcccagcgtgagataagtatgttgtgtcaagccaaccctttgcttcatctccaagaagcctaaatggcactgggtatggaactttgaatggcagaaatttgaaggtgaatgctgctcggtcaaaacggaaaagaatgcgctttccatcctcaatagttgcttctgcctctactttcagatcaccaactgactctgaaaaccttacaacgttaaccacccttggatcatctgtccggaggtaaacttcctggaagatcctgaaagagtcaactccaacaaaagtcctctgaataggggatgctgtccccggtctcgtagtgaagatgagctgccagctaccttcaatcaaacttgaacttgtcggatcaggaacgcctcccagggcctcgagggcctgcacggcgctctccacttcctg

SEQ ID NO: 18299 - DNA, 321 bp, Setaria italica
  Peptide Sequence Number=SeqID_84273
gaggcttacacaattcggtcaaaggaatctggcctgtaggagcaaactttgcttgggttgtaatattgaacttccaactatctccccgtcagttagcaagaacctgggttcctcctatggctggaggtaaacttcctggaagatcctgaaagagtcaactccaacaaaagtcctctgaatagatgagctgccagcaaccttcaatcaaacttgaacttgtccccggtctcaatcaaattcggatcggaacgtctcccagggcctcgagggcctgcacggcgctctccacttccacagcaaggtgcggcctgcggcggaggt

SEQ ID NO: 18300 - DNA, 585 bp, Setaria italica
  Peptide Sequence Number=SeqID_84274
tctccgcaaacaaaaaaacagcagcacctgaagtcttggtcgacacagatgttagacatagctcaagggtcaaaaagataaaacgtggttacaaggatgttacctgtaggagcaaactttgcttgggttgtaatattgaacttccaactatctccccgtcagttagcaagaacctgggttcctcctgcaaaattgaagtaagtaatctgtcagatactgctttgcatgcgaaaaagaaatcggccccgattcagaagaagaaatctcccgatggtgtgacccaaattgttgagagtcaatgtgatgtgatctgttccaggaaactaaacggagcacttttgatagtcagttcattagaaaattcatgtgttgctagatgctcttccagaattttcttaaatggcactaacatttagagctctctgtttagaattttcttaaatggaacacatttactggaaacagaaaggcataattaaatggcttaaatcattgctgataaataatggatagctaaactatgctagtgccttacaaaagcatggcaagcaattagcagcaaactagaacaggtcaactgtccta

SEQ ID NO: 18301 - DNA, 1080 bp, Setaria italica
  Peptide Sequence Number=SeqID_84275
tttttttttgtcaaacttaaaataaattcattcgaattatacagtgtacaatatcagatctccaattatacacccactactcaatggcagaaaaaatatgtttcaagaaaagaaaaaggaaaggatgcctgggggaatttacaccgacgcgacgcacgcatggatgggttcctactgggtactgactgctcgtctgctccaatataataatgataaataaattatcgcagtacgtatattaaagcgaaaaaaaacctttactgaaaatttcttgcgctccggcccctaacgtttcccctgtccgtacctagaaagtccacttccagatcttgacgcggactctgaccttgcacgagtgcgccgcggtgctcaccgtcgtcgcgcccgtcgtcgtcgcgtcggcgtcggacggggccggcgccggcgcgagggcgacggtgctgttcttgctgcccttggccttcttcggcgccggcgggggcgggggcggcggggtcaccttgatgccctcgcagtgcacctggatgccgatcttcttcgtcttgatgctgcccacccgggcgccggcggtcgtgtcggcgtccaggaccaccgagaacccgcccgacttcttcacgtcgccggcggcggtggggtccacggtcgccgcggtggaggcgatggtggcggtgagcaccgtggtgttgccggcggcgtgcgtgaacccgggcaccgtgccgctgcccagcgggagggcgttggcggaggtggccgcggagagggtgaagtcgccgtagacgtagacgatcttcttgttggggttcctggcggtgacggtgagcgtgatggcgtcgctgagcacgggcgcggtggcggaggaggtgaggttgagcgcggtgaggcggacggaggagacggtgaaggaagggtgctgcgggcggtacaggaggtagaaggcgccgcccgccgcggcggcgacgagcgccaggaggatcaccaccagcagcgcccagcagaagcagcagcagaagctgcaccggcaggaccgcccgcgccggcgcttggccggggcctgcggccggtagatgggccgctggtaca

SEQ ID NO: 18302 - DNA, 345 bp, Setaria italica
  Peptide Sequence Number=SeqID_84276
aatttggctccatgttcacgatggaggggcgctccggtttccttcatgcccagatggttgctcaatcttcaggaggtgatggaggccggcgatgacatgctgcctgctggttggtaccccagtcttcgctagagctctgccatgcttgtccaggagcacgaagcaagggacgtatctgatatcgtaatgcagaagctctggcatccaccggtcgtcctcggcgtcggcgagcacgaacccagccgacccaccggcctgctcctccaaatcccgcacgaacccctgcagcgacgcgcagaggcggcaccgcggcgagtagaactcgagcaccgttgcggcctcccg

SEQ ID NO: 18303 - DNA, 575 bp, Setaria italica
  misc_feature (538)..(538): n is a, c, g, or t
  Peptide Sequence Number=SeqID_84277
gcgaggtgtttcttctctgagaaagataaaatatgagaatgttgcatgtaattaactctcttgacttgtcactatgttggaacagtgctctaaggcttgatgcactagaaaaccgactttgctcacacattctacagacaaggaagcgatagctaggtatagaaaggtcatcatccatctttagcatcatgcaaagaactgcatctaactttctccaattttttagacaaccatatgcttgaagcaaggaatttaacaaggtgccactgagcttcccatgagttgattctggcaagactgacatgaccagcttcatatttcctgtttgcactaattccttcaaaatgcaactgcaatatgagaattcaggaaattccatggtcagtgcagattctgccaagttcttggctcgatctgtatcaagccatggtaatgaaggcaacacagatcggtaagtaaatgcatctagttctttgcatctgttaaaccagatgtcatacattccaattgattcagcagtcctctgctctttaggacnccctcatcacacaatcagtagcgagtgatccacaacc

SEQ ID NO: 18304 - DNA, 371 bp, Setaria italica
  Peptide Sequence Number=SeqID_84278
agacgacgagggagatgaggatggtgttgtagttgcccaagaaggtgtcggcgatgatggcgccgaagatcggggtcaggtagctggtgccggtccatgtagtgactttggaggcgctggccagattgctgccgtggaggactttctccaggtatacgaccaggttcgtggagatgccaaagaaccctgtgctctccaagcactggaaccctagaacaaccgttggcgccttgctgcctgtgcgttttttgtccttgaggagcggcacatgcaggctatcgtcctcaaccttcggcccgtggctctcgggcaggagcggcgcgcgctcgcccctctccatggccgtccccagcctccatctcgggtcggga

SEQ ID NO: 18305 - DNA, 717 bp, Setaria italica
  misc_feature (702)..(717): n is a, c, g, or t
  Peptide Sequence Number=SeqID_84279
gaatagaaagtggagaccgtcacaaaaagagagagcagtcggcggaagaaggggaggtgcgttgtagaggagcatcccgtggaaaggcggcggaggcggcggccggtggaagatgtcgatcctgtgggagaagagcgctgggtggcggtggctggtgcggcggacgcgtgactcgaagcccttcttcttcaccttcgcggcgctgtgcggcgtcgtcccgggcgtgataggctacggcgtgatgcagctcaccagctcccgcaatgagcagctcgaggcccacctccgctccaccgcccgacccgagaccacgatgatggggcaagtgaacagggagagactggccgagtttctcggcgagctgcaaaggaaagaggacacgaacgacaggtacgtggccgctctgaaaggggagacgctgaccaggaaacgctacgagcgcattcagcctgtgcctgcccccgtgcaagcgagccaggaggccgcgtccgctaaggctgccagcgccgagaagcccaaggccaagtgattcgcagtgaactagtgttcctagcaagatatgcccctacccagatcactgaacatgaacataaacggactagtagtcagagcttgtatgcatcgtcatcgtggagtctttgttttcgctgctgctgttagctctcgtggattccttttgatctcacaaaaaaaaaaaaaaannnnnnnnnnnnnnnn

SEQ ID NO: 18306 - DNA, 290 bp, Setaria italica
  Peptide Sequence Number=SeqID_84280
tttaatagctgttttccatctctatgcagtatgtagcatgtatcgctcctatttatgtctgcaagttgtgttctgactcctgagttttgacaaaatgtgaagtggatatccctgctctatctaaaccaagggtttctctgttctttttctcacatatcacttttcattccaggtatattggggtgtacggagtgcttgttctgctcacgctagttcagtacttctacacagctggctcatctccagggtaattaccattgtgtagactttgtcctcatcctccactgggt

SEQ ID NO: 18307 - DNA, 321 bp, Setaria italica
  Peptide Sequence Number=SeqID_84281
attcagtataccggccgacatggcattcaggatgccctcaaccaccagtgccctcgggctgttggggttgtagaacgacgcgatgcctgctcccacagtgatcccagcaggtgttgtgatggcgaagaagaaggccataaggaatgctgagaaactcttgaactgagcctcacaaatgcagccacccaatgcaaagccctcaaagaactggtggaaggacagggcagcaaccagaggtctgatggtacatgggctctgcgaaacgcccaaggataggccaatgatcaccgagtgcgatacaattccaagctcgagaacctg

SEQ ID NO: 18308 - DNA, 383 bp, Setaria italica
  Peptide Sequence Number=SeqID_84282
cccaatttaaagggaatgacagatctagtccgtgcatgttgacactgacaagggaagtatcttgtagatattcacatacaattttaccatgcccgatgaagtaaacaagtatggcaaatggataacttcaatatacgactttatcagggaaaataaaagggtaggcagcgaagtgttagcactggaattttgagtaaaggagaagatcccttgccaccaggggcggacccaacataggacatagacgtgcacatccacacccgattaatttttgacaaaaaaatcgaaggtagcaggtaaaatacatggtcagatccgaattcaaatagccacacattagggttggagtgttcgatttcgcacagcaggaaggtgaggggagg

SEQ ID NO: 18309 - DNA, 247 bp, Setaria italica
  misc_feature (214)..(214): n is a, c, g, or t
  Peptide Sequence Number=SeqID_84283
gacgacgcgtgcagtgccgccggctggatctggacgcgtcgcccctgcccctgcggtctagcagccgtgcacagattttcagcgccggagaataacgcgagactgtcctgcccctcatcccatcatccccatctggccgcctccgcgtccgccgcgtctcgctgccgcggtgccgcgcaccactcctccctccctgatccaccaccatttttanaatctcgcttgatcggatcggatcggcttcccc

SEQ ID NO: 18310 - DNA, 729 bp, Setaria italica
  Peptide Sequence Number=SeqID_84284
cgccaccacgccgacgaacacgcggctgccagggtacgccgccgcccacttctcccaggcctcccgcgccgcccacgtgcaccggaggtcgccgtagagccggacgtggacgcggccgacgagccccgtcgccagcgccccctgcagccgctggtccgggtacgcgcaccgcggcgtcgccgtcagcgtgatcccgccgccgcggtagtacctgttgtagccgtacagccgccggaccagctcgtcgtagtgctcggtggcgccctggtcgatgaagaggtcgacgccgttcacctgcgcgtcgccgaagggccggggcacgctggcgcggccgccggccaggaaggcgtcccagaggtagtctgcgaggtcggtggcggcctgggaggacgggagggagtactcgccgccctgcccgccgatggagaggagcacgaggacgcctttggactggcagtgcttgatgtcgtcgccgacgccggcgaccgggtggccggagaggtcgagggtgtacttgccgtggccgaaggcgctgaggaaggcgatgaggacggtggtgtaggcgccccgtgtcgcaggcctcgcgcagcgtgccctcgtccttgttccggccccagtacacggccacgtcgccggggcccgtggcggcgagcgcggcggcgagatgggagacgaggagagctcccaggaagaggaggcagcagggccggtgctggaacgccattgtgg

SEQ ID NO: 18311 - DNA, 819 bp, Setaria italica
  Peptide Sequence Number=SeqID_84285
taacccacccaaccggctataagtctacaaccatattccttgacacgaattttactctagaaacagagggtgccagagtactttgacacgaggtacaaagttactgcacatcgcttcccagcaaccatacaccaggatttgagaaagaaagattcaggcactgtcactggggcgactgtaggaaaccatcacctgcaacaacgaagcgatcaggagagcggcttcgcacgggtggcagggtcttccttgtgttcgatccacatcatgaaaacgtaaccgaggcaccacagcagcacgtacgggagcggaacccagcacaggagcgcggcgaggctgagcatgctcccgacatactgcgggtctttgatgtagccgaagggaaactccgtcacccacgggatcttctttccaaaccggacgccgtagtaggtaccagactcaccaagcagctggtacaccttgaagttgaggtactggccgacggcgaggaggacggggcagtagagcggcgggggccacgagaaggaggcgacggaggcgagggccaggagctggagcgccttgagaacgtgggagacctgcgccatgcggcggcacgggtcggcgccgcggccgcacaggtccacccaccgctgcgggtgggtccacagcgcgtagtagaacgggaagggcagcagcacgcccacggcggccgccatggagaccatctcgcggggtgcgcagcaacggggggcggggggattcaggcgcgaggcttcagcaggcaaggtgctcgacggtttgccggcaggggtttcgctttcccgtgagattttcggg

SEQ ID NO: 18312 - DNA, 398 bp, Setaria italica
  Peptide Sequence Number=SeqID_84286
cacaattaatgaaaacctctgaaggtaacctaagaaaaaattgatttatcccaatttctgtaaagttccagcttcgctgtttttaatccagaaggccagtgccaaagataacgaaatgcaaactaaccagactagcatgaatcgcactgggatactcccagttcaagcgcgagaaccatacagtaaaacatttgacggtcaagcttaactgaagtaataaatgattttcccaacctaattgaacaacctgtatatgaattaaggatgtaatcattccccagtccgttcatgtgtgttggtaaacagattctcccactacatctaccagacaccgtgaaaccccgtacctcactattaaaacaaacattattgcgccataacgtgagagctaagcttta

SEQ ID NO: 18313 - DNA, 248 bp, Setaria italica
  Peptide Sequence Number=SeqID_84287
tactgggagggggatatgggtttaggacccccaaacccaatcaatcaaaaataatgttctcaatttccaatttgaagatcttgaaatgatggttctttggccaatctatcaaacaaaacatatggttattgagataatagatcggatcaataacctctctgcacatgcatgattagaagtatgcatttacccttcatttcaggatgtttagtgaaaagtgctgacttggccaaatctgcttcaggtga

SEQ ID NO: 18314 - DNA, 291 bp, Setaria italica
  Peptide Sequence Number=SeqID_84288
aggaaattaaagctgcaactgcaagcgaacattcgttagtacctttccattaagagtaagttttgcacaagtagggttttcaggatcaatcttcccacatgtcccgagagggaattcgctcagggtgaaggaggtcctttcgtccgccagtgcatctcgtgcagtaggatccaaagttgtcaggtagaagtatgggattccatggccctcaccaggtaacccatcactatacgaaactacattggtgtacattcaagaaggcaagaataaagttaaccaaccagaagagag

SEQ ID NO: 18315 - DNA, 1039 bp, Setaria italica
  Peptide Sequence Number=SeqID_84289
tttttttctagacaaaaagtttacatagagatttttctagcatctcccaagagttctaaagaactttcaagtaaatttcatcaacatattatgacccacgaacagactcttcctggtcaggtgaccaatgccaatttgatcagtcaaaccttggaaattgtaggatacagatcaagaatgcatagtgcacacagaaactagttcttctttttcccaataaattgctcacgaagatgtgatgggcaacaatatcaacaaccaaaacactaagtctattcagtgcacagagatgtctttacactatgaacagtatgaatttcatctttaagagcatgcacaaatgaggtattgatccgtgattccgtgaagcattatttgcttatgaggacatcactgagtgctgttacctccgaattcaaggtactgggagggggatatgggtttaggacccccaaaccaatcaatcaaaaatatgttctcaatttccaatttgaagatcttgaaatgatggttctttggccaatccttcatttcaggatgtttagtgaaaagtgctgacttggccaaatctgcttcaggtgactgaaggtcaaccaacttcaactttccattaagagtaagttttgcacaagtagggttttcaggatcaatcttcccacatgtcccgagagggaattcgctcagggtgaaggaggtcctttcgtccgccagcgcatctcgtgcagtaggatccaaagttgtcaggtagaagtatgggattccatggccctcaccaggtaacccatcactatacgaaactacattgccaaatggagccccgttcaaatcacttgatattgtgctgaggacaccccacgtgttctgtgcggcgagccacctcgcggtggcggtagcctcggagggggcaggcttgtcgtcgacgatcgggcgggcggctgaggccggcgccggcggccggaggacgaggaggaaggcggcggcgagggcgaggcgggcaggggagagcatcgcgatttcttcctttggctgtcagctaatc

SEQ ID NO: 18316 - DNA, 523 bp, Setaria italica
  Peptide Sequence Number=SeqID_84290
ctagttatgtgatgttctacaaataaatcaattgtgggttatcttcagtcaatttgcatattggggtagtgatttactcaaaatcttcatcttttagggaaaatcgggtcacttgacggtcaaaccagtctttaaactttcgaaatctgaagttctgaacaggactgcgaactccaaagcaagcaataacatggttccgtgcaattcgtacacattctcagcacttgccggcactagctaggaattccgaattcgcatcaacaaatttcccagctaagcagcggtagttcccagcttcccattcgatcaaacgaacacatgctgctacctctaagaagaacacctgttgctaaaggaactagctgcggcaccaaatcgcagcggtaaaataagagaagacgggtttgggcggaactggatgggacctgaggacaccccacgtgttctgtgcggcgagccacctcgcggtggcggtagcctcggagggggcaggctttgttcgttcgtacgatcgggcgggcgg

SEQ ID NO: 18317 - DNA, 1520 bp, Setaria italica
  Peptide Sequence Number=SeqID_84291
aatagcaagtgcactgagtttgctttatgctggtgaagttcctttatcacttgaggagtctcaaagatggtctggcattcttcttagatggctttttgataaaactgtatcagataaaacacatcttacagctgtgaaaatcctttcatgcatacttgaagactatggtccagcttctgtgccaatttctcagggatggttagctcttgtcctttcagagattcttggagacaacaaggcccaaaattcaaagggaatcacacagcctgaaccagagagggtgaagagtccggttgattaccataatgcttccaccgcaactcaggtcctgaatcaattaggtagcgctgttgttaaattagcaagcgctcaatcgggctatgaacctggatctgatgacaaagacaaagtaccacttgccgattttttatctcttgaaccatttgctacagctctaaagaatttgaacaaaagaatccacccaaatttgatgctgctgactcagcatcagctacgctcaagggattaaaagctctagctgagctttgttctgaggatggtgcatgccaaaagagaatagctgatttaggagttctttccttgttgaggcatatcctcctgggtgatgattatgagaaacttgctgcaattgaagcatatgatgcatcacgtattcgagaagtgcaaggcaagaatgtgtctgcttccaatgtttccactactgatggtaccactgatccctcaagtgtacgggttcctcctgccgcacatatccgaaggcatgctggacggctgctcaccattctctctcttctacccaattcaaagaaggaaattatttctgatgatgtatggtgcaagtggcttgaggattgtgctagtgggcgaattccctgcaatgatataaagctaaaaagttattgcaggttaacattactgaacatattctgctctgagagtccaaataccagaagagactccgatgaatatcctgattcagaaagcgagtataaaagaaactgtccccagtttggagattcactattcttgctaaatccggagttacctctcgaggttcatttggacaatagtggtttcaggatttcaagtgttccaagagataattgtaaggaagatggagatattgaagactctagtgaaactgggagctctgtagatggtgcagatgctgcattaaaaaatgcccctttgatggatgttgtgtttgtccatggccttcgtggtggccctttcaactcatggcgaatagctgatgataaatcatcaactactaaagctggtttggtggaaagcattgatgaggatgctgggaaagagggtacatgttggccaagagaatggcttgcagcagattttcctcaagcacgtttttttacagtcaaatacaagacaaatttgacccagtggactggagccagcttgccccttcaggaggtgagctctatgctgctgaggaagttggtggctgctggggttggtaataggcctgttgttttgtg

SEQ ID NO: 18318 - DNA, 626 bp, Setaria italica
  misc_feature (583)..(626): n is a, c, g, or t
  Peptide Sequence Number=SeqID_84292
gctctgtctccggctctgcgctagggttttggatcgtgggtggctgggaggcgagcggggagctgcgcgcgagggagagcggcgtgggatggcgctcacgaacttcatcctgacggtggtgggggtgggcgcggcggtgatgctgctgcggaaagacgtcaagcagtcggccaccatgttccgccgcaacgtgcgccacatccgcaactggctcgaggaggagtccgccgccgccgccaaatctacagagggatcttcagtaaaggagttggagtctcaagctgccaagaaagatgctgcacccaaggaggacaagcattagatgatattacactcttttacgtatcatgaaattcaaagtgtgagttccaggattttgatctagtccttgtaaaaaaatgttctgtaggatttttaaccttgagactatttttactcaataacggaggatacttgaggttcgggttctgaaataatattgcaaaaagagggatctttaatgtcaataagatgtctactcgatgatgatggatatcaggatatcctgtctagttacatatttgagtactttctgtagttgagnnnnnnnnnnnnnnnnnnnnnnnnnnnnnnnnnnnnnnnnnnnn

SEQ ID NO: 18319 - DNA, 703 bp, Setaria italica
  Peptide Sequence Number=SeqID_84293
gcgcatatttgtaccgcgaaaaccgtggcgcactgtaaagtaccagggtcacagcgaattctgaagcagtagcagctgatcacagcagccctatgagagtacgagaccatacagtgggcatcttccaagctcctcgcatttgaccgtataatggaatcggctgcacaaattctagaggatgatgaagctgctgctggcgatgtcattttgtaccatcgtcatcctctagatcactgaaggatacatcttcatcatctgcaatcggaatcgccgtgcttcctgggccccctgtctcctcttccaaccattcatcgccatcatcatcctcatcatgataagctttccgaatgtcaactcttgattgctcactgatgtcagctaaatgttgtttcggttggtcatctttaggaggagaattgtccaccaatgctatctcagacatttgcatgctctgttcttctgttgttgcatctcctgtagagagatcgcgtgtactttcttccaccgttgactgtgactccacagtagcgtctttcaatatgggcactagctgtacaggtacactgctgctgatgttatctgaagaaacagttccagcatcactgattgcattagctgatagaaattcctgattggttggttgagagatgccatagtctatgttgctaaaaggattgttggtcctattctactagtagtccta

SEQ ID NO: 18320 - DNA, 553 bp, Setaria italica
  Peptide Sequence Number=SeqID_84294
cgatgtcttctgcacacatactaagccttgactttgcacttccaatgttctgagcacggaaggccctcatagcttgctgcaccagaaaggctcctctctccattgaaacatcctcataaatgaccttgttcttgccacccaatacttccacatcccctgaggcatgtgatcttttgattcgggcatgtccatcaatgaagcgattgacaagggcctgaagttcagaatcaggttcaatgccctctatatcagcaccgcacaacgggcagtccttaaaacgcgatacacaagccttgcagaacttatgggagcagggcttgcatctgctgcattcgtggagcagcgcctggcagatcatgcagcttagcggacccaacttaaaagtgccggagtcgtagccgaacgggcacttcgccggcaccaatcggggatcggagctcttcccttcagcattgcccgtgctgccctgctcctcagcaccgtgattcttcccggtgacagggcatacgccgctgatgttcttgtcagatttcgcggggcacactaccgtcct

SEQ ID NO: 18321 - DNA, 405 bp, Setaria italica
  misc_feature (19)..(19): n is a, c, g, or t
  misc_feature (397)..(397): n is a, c, g, or t
  Peptide Sequence Number=SeqID_84295
atctttaccacctgctagngaaatggggactccttcaggagctgacgacttagattgcagaagtggatggctcgaggggaccaaacaaggtctatattccatttctagcctgtggggatctcagtggctacgattcggaccgttcatacccgctcccgagcacggaaggcggctcctaccgtagcttggatccagtccagcctcccatcgccccgccttacaaaaccgccctggagatgaagaaggcttccagccacggtgctagtgcagatactgtcagaccatctgcggactcttgaatgtagcttgttttcatgcacccaccgtgttaaatggtgtaggaattcagaaatcttctggctatgatgttgtcccacactgctagcgtagaaaaagntgaaagtg

SEQ ID NO: 18322 - DNA, 302 bp, Setaria italica
  Peptide Sequence Number=SeqID_84296
cttttttcttcttcctcttgtttttcttccttttgccttgcgttaaggggaaaaagtcgggttagtaagcctttgttttctttcttttttcttgtgtccatggagatgcaagccagagagggtgggggtgttcattcatggtgtgacaattttaagggcacctggagaaaggacgaatttgtacgatcagtcagttgattgatcccttctatgttattttgaaacatgaaaaaggtctaattctaccaagttccagcggacatatacatatattctagcatagactaaaaaaaaaaaaaaaa

SEQ ID NO: 18323 - DNA, 556 bp, Setaria italica
  Peptide Sequence Number=SeqID_84297
ttcgaggaaaaaacgatttaatggccatgggaacgaaccccacaagcacaactccgtccgcaggaggccagaaacccacaccaccccccagcttaatagctcctgcgctcttggtggcctgggtgcagccggccggcctctcttttgtgaaagtgacaagcaaaagagggcagtgcagatcttatctctcggcaatctctttgtgtgcagctagcgaagcttacactggacggggaggaggagggaggaaaagaagatctagcggaggagaaaaagattaggacctctctaccaaaaggtgagaaaattattagtatactagtactactacttcttacctacaccttgacaaggacatgagctactaccatattgagcttaggaagatcatgtatctcttctccaatttctgttctcttcatttaatttttgtgggactgtgtgggtaaagtgtgtagaagtagtagtagatagagttgaaagaggctgcgctagcctgctatagattgataggatgatgcgagggagagggagggaagaggaggggtggcgaagg

SEQ ID NO: 18324 - DNA, 1117 bp, Setaria italica
  misc_feature (1097)..(1097): n is a, c, g, or t
  Peptide Sequence Number=SeqID_84298
ggcccatctggccttcgtcgggcgccggtgacgaacatctgacaggttcttcgtggttgcagggagaagagggtttattattcgcactagcagccatgttggagaagatcgggttgccgccgaagccgtcaatgcgaggcgccagctgggtggtggatgcatcccactgccagggttgttctgtccagttctccttgttcactaggaagcaccattgccaaagatgtgggggcttgttctgcagcagctgcacccagcagaggatggttttacgtggacagggtgactcacctgttagaatctgtgatccttgcaaaaagcttgaggaagcagcacgctatgagttgagatatggacacaaaaacagagcaagagctataactaaagaagcttcaaaaccagaggatgaaattctaagtgaaattcttggaggcgatggagtgcagaccaagtattctcgcaaggaatctctggattctgaatttcctgggagaaccgcaagcagcgccagtgcctccagttccagttccagttccagaagaacttctactaatttcagtgtggatgcaaatggagatgataacctttctcctgaagcacacaattatgaactcaacaacactgcatctatttttaccccagaggagttgcgccaacaagctgttgaagagaagaaaaggtacaaaactctgaaatcagaaggtaaaccagaggaagcactgcgggctttcaagcatggtaaagaacttgagaggcaagctgcagcgctggaattagaattgagaaagagcaggagaatggctacaaaaaactcctaatgtagtagctgctgtgggtagtgccccgacagctgatagttctgaagaggctgaaacaaaaaggtcatcagctggtaaaagggttaagaaagaaaatgatcttgcttcggagctcagagaactaggctggtcagatgcagaccttcgtgatgaaacaaaagacagcccctatgagtgtggaaggagaactgtcgcagcttcttagagaggtggcccctaaatcatcggagggcaagaaatctggtggtatcgataaatctcaggttaatgctctgaagnggcaagccttactgctgaag

SEQ ID NO: 18325 - DNA, 942 bp, Setaria italica
  Peptide Sequence Number=SeqID_84299
gatgatactactccttcaacttcaatctttttctatcctcgcagccgtgattctgtagagactagagatgagcctgcagtgtcaattggttcatcttctctttctgagcatcgcaaaaggcatgggatcttttatctcccaacaggaaatactgaggacgagcaaagtgattatccccatgtcaatgatactctaccatcttgtagcaatgcaactgtttatggtgataattccaagaccattgagcctgtatttgctgggaaaaagtctaagtccacaaagtccagaccaaaagtagttaaattggatggtgaggacttcctcagttctatgatggctactgcaaatgctctgaaagaagaccccttgtctggtgctctacgtggtgtgctcttgggtagagatgctaaggcatcatcttcacagaaggctttagatgtaaactctgaagcaattccaaacttaatgggcactaacgaatctagctctcagcagatagagtatttaggaagccatcctacatcaagttctagaacaagtatgagacagaaccatgataaggagaaaggtacaaatcctcctgaaagtgacgccaaacaatcgagaaagcacaggagctctggtagaagtggacatcgtcaaggaaaacataagcatagagaaagatctagtactcagcctgatattgtacctcaagctccagtaatccaagatttccttctatagcggctgagagactctcatttggtacattttcagttaatgaatgcatgttgatttttttccttcacattctgtgcactttcatttttttcctcttctgacctgtggtgctgtttagtttttgttcagttttctggtgtggtatttttcattgttctatcatgtatatcttcttggtcatagcacttgatgttcttcgatagcttcattgaaatatag

SEQ ID NO: 18326 - DNA, 300 bp, Setaria italica
  Peptide Sequence Number=SeqID_84300
aaacagtcccagagcttcactcctcttccctgttccctcccactaaaccatggcggcgtccaagaacccgccgttctctgccatgccgaacgccggggagagtgttacacctgaggaggccccgcttctgccggagcacgccgggtcgccgggcgcgcaggctggcggctcgccggcgtcggtgctgggtgctgtgttcaacgtgtcgacgagcgtggtgggcgccgggatcatgtcgatcccggcggccatgcgcgtcctcggcgtggcgccggcggtggcactgatcgctggcgccgg

SEQ ID NO: 18327 - DNA, 488 bp, Setaria italica
  Peptide Sequence Number=SeqID_84301
agacgagcagcacgccgccaccactccgcgcaaagcagcacatcgaagcgagccatggacggcgggtcctcctcgccggcgagccccccaccgacggcgggtccctccgcggcggagatggaggagtaccagaactggaagaagaacgccgcggtgctctacgacctcgtcatctcccacccgctcgagtggccgtcgctcaccgtgcagtggctcccctccgagtcatcgacccgcagccaccggctcgtcgtgggcactcacacctccgacgaggcccccaataacctcatggtcttggacgcggtgctcccgctcccgcctcgcctcgcagcggccgtcgctgcctcaggcggcgccctcccggccccgtccgtgtccgtctcccgcgtggcgccgcatcggggcgaggtcaaccgcgcgcgctacatgccgcagcggccctttacggtggccaccaaaacgtgcatggacgaggtgcacgtgta

SEQ ID NO: 18328 - DNA, 724 bp, Setaria italica
  Peptide Sequence Number=SeqID_84302
acaatacttacatcttcattgtatttatcttcacgaattttagtttccttttgtctgccgtcaagatcctcactctctttgttgtcagggtcttccatctcttgtaagtcagtatgctgcacaggggtgtccttatccacattgattttcttgttcagattgcccttcagatccacaagctgcttatctgcatcttgtgattcatcagatgagttttcatcatcagtgctgctgtttgagtggtcaccagaatcttcatcatctgattcagaatctggtacctttttcttgattttactcttaaagaaatcagcatctgtcatatcattgtcttgtttactccctgtttgttgctcttccaaagcatcttcagaagacggatcatttgtcatttcctcatcagacgaatcttcagaagatgcatcattctcagaagccggaacatccttttgaggtctcttagaatctttagtagctaccacactatctgttgccgcagcatcaagagtaccagttgtatcatttgcccacatctttgctttagaacggggctgcataatttcaaggaactcttgtaacttgggatcattgcctacactgcctttagaacctctaacatcagcggatgttccttggaccttggaacttttcggcagtgcatctatagcccctgcagcagtgttgtctttactaccgtattcaggcttctttaaagatggcggct

SEQ ID NO: 18329 - DNA, 248 bp, Setaria italica
  Peptide Sequence Number=SeqID_84303
tgcctttctagttctaggccaatagcatagcatgaacactatacaagcatttccgtgagtacacaatgtttgtttccacatgcttgtattttctcacttttggctggaagcatgaaagttttgttccacgtttacagagctgttatatcattgagagtcatgtggttcatatggctttttatttgtatcattattgttaaaaaatggctggttgctgcgagtgttactaaaagctggcaatttactgt

SEQ ID NO: 18330 - DNA, 1430 bp, Setaria italica
  Peptide Sequence Number=SeqID_84304
attgttgctgttgttgcgagtggtgattggtgctgcattttgcgggttatttgcgttctcttggtatcgtcggcagaaacaaaagattgggagctcactggaggtttctgatagcaggcttagcactgaccattccagcagaaggaagcctgcagaaggagtgcctctcctttgattagcgttgagtactcaaacagttgggacccattgtcaggtgggggtgtcggatcatccggtgaagttggtgatagctttagattcaacctagaggaggtggaatgtgcgacacaatacttctctgatgtgaacttgctaggcaagagtggctttgctgcgacatacaaagggatccttcgggatggatcagttgttgctgttaaaagcctcaacaagacaagttgcaagcaagaggagtcagatttcttgcgtggtctgaagatgctcagtcttcttcgacacgataatcttgttagcctgagagggttctgctgctccaggggcagaggggaatgcttccttgtctacgacttcatggttaatgggtgcttgtcacagtatctggatgttaaggatggctccagtgctagtgttcttgattggcctacaagagtttccatcgttagaggcattgcgaaaggaattgagtaccttcacagcaagaagagtagcaagccaccagtagtccaccagaacatatcggccgagaagatccttctcgatcaccactttgccccacggttgtcagtcccaggactacacaagctcctcgcagatgatgtagtcttctcaaccctaaaggccagtgctgcaatggggtacctcgctcctgagtacgccaccacaggccgattcactgacaagagcgatgtttttgcattcgggatcgtggttctccaagtgatcacagggaagagggatgtctctcagctgaaggttggcgctgcagcggtcagcgatctcgatggcctggttgatggaaacctcaacggtgtcttctcgaggactgaggccgcgaggctcgccgcagttgctgcgtactgcactagcgaggtgccgaaccagcggccgaccatggaggctgtggttcagcagctcagccactgagtgatgagttgctgctgaggttctgaacccagctagtctgagtctgagatcagagatgtattttgggagcatcaagagatgttcagccatgtaaggccttttgggatggtagtagcaaactgatgtgatgacagggtaatatccagttgccactgacatggtatttgattagtgtagtctatcgtctactgatctcagcatttcatggcctgagtagcttgtagccttgtgctagattgctaatgtgtattaggatctgaatgccgtgaatgtagtagattcagagcatttctaatgtgactttggtcaaactttgcattggctaa

SEQ ID NO: 18331 - DNA, 979 bp, Setaria italica
  Peptide Sequence Number=SeqID_84305
gctggtgcacggcagtgtcaactggtcaagtggtggagtcgctagccacgcagcccaggcagacactgtagaaagagagccaagtcccgtgggcatgccgttgcctgtctgtctctgccccgtgggcccgcacggccaacctattctaggtgctgcgggcctgcaccacgtcacgtcagcgtctacaaatagaagccgttctggactcctattcgcctctgttgtttggtgtgacgctgaaaagagaccggaactaggaaaagcagcaactgctagtgctacccctgggtagtgtgcacagtaactgtcagccccggccctgtcaagatcttggaagctggcccttgtgagtgaagatcatcgatcaaccagcttgatgagccatcggcgtccttgtgacacgtccagatggaacgaaagcttggctttactttcggtaccgtcccgtgcatacgcctgctttttaagtttagtctcttctcctacatgtggttttctccctctttggaaaaacaaaatgctaatttttcacgaaggaaaacaagggagggagacaggcgctgcatggcctggcgtcggcgtcgatcgatctgcagcaccttggcgtcggcgtcgcatgttcttggcaaggcgccaagcgccggaatcggcagctcgcagcccatgttgccggaactagatgccgtttaagcatgttatattactacagattgcgtgttaagtgagcttaactttttttatttacatacagaaaataaaatactgaccgagagtaattaacaaacttttaggtaattgtaatgtaattaatccgtgttgttggccggttgaccctcctttttttcatcccatatgtatggacatgcttcttgtgtgtgcatggactagctgcggcctggtatgtgtcaccgcgcccaaaatccgggaacacggggttttatggtgcagaaagtttagccttcctaccagctaattacct

SEQ ID NO: 18332 - DNA, 313 bp, Setaria italica
  misc_feature (1)..(30): n is a, c, g, or t
  Peptide Sequence Number=SeqID_84306
nnnnnnnnnnnnnnnnnnnnnnnnnnnnnntttttttttttttttttttgtttttgacatcaacgaagtctctcatcttattggtatacaagattttgttgccgccgagggcaagcggttacgcaccagcaccacgggtagcggcaagctagaatagggtgtagccgtcgtcgtaggagacgtgccacccgcggtggcacggcggcgcgtcctcctcgcgctcctggcagcagctccagcgcttcttccagttggcgcggccggtgctggggcggctcccctcgtcgttccagcggtacacgatgaccccact

SEQ ID NO: 18333 - DNA, 592 bp, Setaria italica
  Peptide Sequence Number=SeqID_84307
aagaactaactaagtaactagttaggtagacctaggacaaaagacaagtaagtagctcccagtggagccggtattgtgcttgatgcgcttatgattagtgtgttgattgtccttcacatctgcatttacaccgtttgcctttgcaccttccctcgtttcaagggatctccttagcttcagaacctgagaagcaaggttgtctttctcagactccttcttggacagcaaagttttcaagttctcacactggagcttcaatgacccaatatctatttgcagctttccaatagtttcctccttctcattcttcaaactatttttaaattgtgcagttcctccaaatgcatcttcacttggtccttgagcaatgcaagctctttatttagcgaagtaatctcagtagttttgccttgcaattgcatgtccttttcactaattccagctaactccttatctttttgttcattcttttaaaagagttcatctctctcactggatagcttgtcgatctttgcaattaaagtaagttacgaatttacctactagaacaaagaaagaacaaatttaactaaaaacttttaagtaacctaaa

SEQ ID NO: 18334 - DNA, 461 bp, Setaria italica
  Peptide Sequence Number=SeqID_84308
atcaataacccatcttgcacaggactcatcgcatccgcagctgctctcgccttctcgctgtcctcgtcctcaaaccggctcagctggttctgcagcgtcgtccttctctgtggcgtcttcaccaccactggcgaagcgtcaccgttctcactgctcgcgtcgtctccacacccaccggcgccacccaccacccgctggatggtcacgtgcagcagcgcgccggggctgcccttgagcgggagcgtcaccgccgacggcttcaacgcgtcggcgtactccgccaggttcaccgtcgcctcccccagcagcgccgccttgctcgatccggtctcgtagacgagaaactggtagatcttgtccttgccggcggcgagtttggtggcctccaagatgggggccgcccaccggcacgcgccgtcggcgacctccgccggctccgaccgcgccgtcggccggccggc

SEQ ID NO: 18335 - DNA, 3119 bp, Setaria italica
  misc_feature (1)..(96): n is a, c, g, or t
  Peptide Sequence Number=SeqID_84309
nnnnnnnnnnnnnnnnnnnnnnnnnnnnnnnnnnnnnnnnnnnnnnnnnnnnnnnnnnnnnnnnnnnnnnnnnnnnnnnnnnnnnnnnnnnnnnnngtttttttatgcaggcaaacggagagacagggcctttctgagatcaaactgtcacaccactcttttcttctcattttcctttccttcacaaagtcaggagacatcatgaaaattatacagcacaacacactctagagagggtaacacagctattacaacttatattactgcacacacacacacaccaatggggaacgaagaaaacaaaagaatattattgtcacgagatctacatgctgtgtactgtgactctggaccggccacaccagagacaccctgctacccggggtgcctggctgcatggcctccgcgaagccctggactctatgtcttccagtcgcccgcctgtacaacgccctttgggtaccgtctaaatctttgtagctacaatgtgagtgagctcatctgagcggcggagccagctgtcaccgcagggagttcttcagcgaccgcaccgtcatcacgagctgctgacgctcgccctccacctccgcgaaccgtaggctgatctcggagtaccgctcatgcagctccttcagctcctcctccatcgctttgttcctctctttcagagaggtaagctcttttgatgactgctcagctgcattcctcatgtcttgccggttgcagttgcagtcaccttctgcgctctgtctgttggtgcctggcaaagcagtagtgctcccagtggagccggtattgtgcttgatgcgcttatgattagtgtgttgattgtccttcacatctgcatttacaccgtttgcctttgcaccttccctcgtttcaagggatctccttagcttcagaacctgagaagcaaggttgtctttctcagactccttcttggacagcaaagttttcaagttctcacactggagcttcaatgacccaatatctatttgcagctttccaatagtttcctccttctcattcttcaaacattttaaattgtgcagttcctccaaatgcatcttcacttggtccttgagcaatgcaagctctttatttagcgaagtaatctcagtagttttgccttgcaattgcatgtccttttcactaattccagctaactccttatctttttgttcattcttttcaaagagttcatctctctcactggatagcttgtcgatctttgcattaagtagttcgatttcctctgacagagcattcaactttgcctcatcacatcttttttggttctggaactcgtcactcttgcttttgagctccatcagtaacctgtcaatctcctttgacttgaaatccactagggttattaactgttgaaccttaacccggtgctgatcctgaattgatccaagatccccctgggccttttgtagtaactcttctaactggctcttctgcaactgcagctctgcaacttcttttcttgcttgcacaaggtgccgttcatttgcattgaaagccgaagatacctgcgaagacaacaccttgaattcctcctgtagccgttctgcagtagttgcattgttccatcttatcttccttagagactcctcagctttaatggcccgttgctcttgttccacctttgcactcattatttccgctatgtctgactcaaactttttagcctgtgtctggagttcattatccaagctctcaacattggcttcaagatcacttattatagccaaatgagctgaacactcatattgcatccttagctgttccctcagttgtgtttgctccagccttgaagatatgtcatggttctcttgcttcagaatctcataatcaagtgcaagttgctccatttgcatctccagatcctcacgatctttcttgtacaactcaatttcattgctcaactccacaatcttcttctcaagctcagaggtagaaatgtcatcacgcttctttgctagtgcatccagcataagctcatcttccttctcttgttcggaacttgtttcagataaggctattttgtgtccagaattgtgcacatttgacagagcatgctcatattctgcctcttgtggatcctcatgtgtatcctcttgcaaaatggagatctctctgttcttttgctccactagctcatcaagatctttcacagccagaagcagctcagagttggattcctgcatcttttgcagttgtacacgaagatctgcatttagattcttctcatgactcagctcttgcttcagttcttcaatctgtgaccacgggtcttccccgtccgagagccgtttacctgagccatttgaatcatggatcatcttctttgcccccctgagtccttcattttctcttctgagtgcatccctctcctccctcaggctactcatctccttggagagatcttgcccacgccgactctccttcacaatttgctttctgagtgtctgcaactccatatctgagacatctaatttcctggttaaagtggctatctcacttcttagcttctccacatcatcttcttcccctcttaaccttgcctcaccagaattgctcgttgacccatccgtgctagcatcaggagctgagcttcctgaccagtcaccagaactggtcaatgggttcctcagggtgccgttattggcaaatggagagagggcattgctattatcctgaagaaatgtgttttgcatgcttacactggttttgggggtatacctcccagaacttccatctgaacccgaaactgagacggcatcaaagctgctgccgttgtggagatggccaactgggtcaacagacataggtgtgtttcttcttgatcgaaacctcatccctggaggttttcttatcaataacccatcttgcacaggactcatcgcatccgcagctgctctcgccttctcgctgtcctcgtcctcaaaccggctcagctggttctgcagcgtcgtccttctctgtggcgtcttcaccaccactggcgaagcgtcaccgttctcactgctcccattcgttcttcctcaacaatcagcaaccacgctaatgctttaaggctaaaccaccattgcagcggcaatgactataaa

SEQ ID NO: 18336 - DNA, 478 bp, Setaria italica
  Peptide Sequence Number=SeqID_84310
ttaattgtcttcacttcactcatcatatttatgttatgctcacattcagaaacactaggtaagatgggaacacatggtgttacagcacacggtattagagatcctccatcattttctaaattgtgtataatctgtgtgtcctgaaattgacctgcaagctcactggatgcctggctatctgtaatcacaaaattgtttggcacttcatctatgtcaagatgcaaatccattccttgagaaaaactcttgctgcaagtgtttatccaaatccattccttgagaaaactcttcctgcaagtgtttaccttgatccatgtcagaagtggataactggtgatgcatatcaggtaaagcagaagcaacattgtcagcattagtgaaaccatcctggcacaatgattcatgcacgtttaaatgagatcccaaagccacatcagtttgctcctcctgagagcaagaacccttcacaaacgatgat

SEQ ID NO: 18337 - DNA, 719 bp, Setaria italica
  Peptide Sequence Number=SeqID_84311
cccctctctgtcttctagctccacagtccacacatcgtccaaaccactctttccctcccttgccttgctctgctccgctcgcgggcgatcctctccactcctccaatggcgccgccgcccaccacgccctccttcctccgcccgccaccgctaccccaccgccctcacctgcgcctgctctgccggcctccctccgcctccttccgcgtctccgaaatcctcggcggccgcggcctctgcaacggcgaggtcggcgtccgcaaggaactcgcctccacccctcctccttccaccaccgtctcctcgcccgagtcctccacagggtccacgccgacggaggccgccccaccagcggtggacctggacgccttcgagaaggagctcctgggcctcaccggcggcttccccggcggcgaggtcggcctcaaggacttcgtcgccaagaacccgccgcctcctcctccttccaagaaatccgggtcccaaacccaagccggcatctccgcgccgccgcggccgccggagctcccgctgttcctgcctggcatggtggtgctggtgaagaaccccaacaacgcctaccacatgtactgcgggatcgtgcagcgcgtcaccgacggcaaggtcgcggtgctcttcgagggcggcaactgggacaggctaattaaccttaaaaccttcgagacctacgaacgaagctacgagggcagggagaaggg

SEQ ID NO: 18338 - DNA, 1234 bp, Setaria italica
  Peptide Sequence Number=SeqID_84312
aacttaaaccttacttacctgtctcaaatgcaaaaatgaaacaacactacaacaaaccggccatagaagcatcagatctgagaaataatcaagtgatactggatcatccatggcacatactgtctacaactacgcagccacttcaacagtatggatcctatcaaagtatcaatcaccataccacaactactaaacaactttattcgactgccttagaatgaggataaattgtggtaacaatgcacttaaaagcactaccgatctcccagggaaataacagcgtgaaatagcacattgcaaagggagaattagatctgtgcccaggggcaaagccaaaacaaaagagcatcggggtcttaggcagaagaatacggggtcatactgaataattaccaactagatacagtgatttgctactgttttctctaaaatcgtcagggtcggcggaccccgatgaaagcctgagctctgccccctgtctgtgccattgtgctttattatggtatatccatatttgcattgatttggttatttagacacataccaccacccactgccgaaccaatttcagtgtcaaaacttgcttggttgatgcaactggaaacttacaggactggaaacttacagctgtggcataaagagaacaagttttacacagtgctggcatgagtctaaacattagaaaagcaatggcaaatatcaaaaccaaaattggcacaacaacagacctatgtttctccattcctaagggctggtagtatattactggaagcaaggactataccgactcttcaagtaataaaaaaaatcacacagcgtggcaatgccacaacctgtatcaaagcttaaatagttgcaaattcccaattcaagcaataagaaacaagagtttggtggctagaaaacatcttcagaaacattcctaagagttcagggttaacacgacagacagttgctcttatacaattctaatcaagtatatgatgccttcattgtcatagtcacaactcacaaagaggtgttcttatgtggtcatgcagagtatgacaaattggcaatggccctgcacttctaaaaagcaatgagatgtataaaacagaggcttcctttgtcaacaatgcataattggtccctgcaaagtcagatggcatacactggtgtgcagtccataatcagttctacagtacagagaataaaacagaaaactttcctgagactcttagtctctacatga

SEQ ID NO: 18339 - DNA, 440 bp, Setaria italica
  Peptide Sequence Number=SeqID_84313
ctgagtaatatcttgaatgcctttctgtccttgttgcagcagtatctgaatgaagttgaatgctgcaactctagctgcccagtctgaacttggactaaggccctcagagagtgcatcatttagagatgccagaccattagtatagccacgcatgtcattagatgggacatgatcatcatcaaatctgtgccttccacttgcagaagctcttgatgctacttgcttcctaagacgcccctggaagtgtggaacatgactgttgagtgaatttctgtaacggacatccctattgggcatatccacatagtgtttgtgcatctgcatttttggtgatcgcctggttggccatgtatcatgattctcctccatagtgctgccatcttgagacctccctgaagatcttaaagatggcagtgacaagcctgatatcagttcagatg

SEQ ID NO: 18340 - DNA, 455 bp, Setaria italica
  Peptide Sequence Number=SeqID_84314
ggacccagcgtaccacaacttcttcatcggattggcaatggtggtgaagtttcatgcctagacaggcaggaggcgttacgacagttggttagagcttccaccaataaagataactttatatggaaaaagtatttcaaccagattttaacaactgtccttgaagtgttggatgatgctgattcctctctgagggagatttctctgttgttagttgctgagatgctccacaatcaggttttctgctcactagtcatacatgtaactaaataatctaattggtaacaatttattagtaatgtcaacttaatttttctcagaaagattctatggaacaatccattgagattgttcttgaaaagctcctgcacgtcaccaaagatgatgttgcgaaggtttcaaatgaagcacatcaatgcttatatgtagtcttggcaaaatatgtacctttagatgcc

SEQ ID NO: 18341 - DNA, 2204 bp, Setaria italica
  Peptide Sequence Number=SeqID_84315
cttcattcagatactgctgcaacaaggacagaaaggcattcaagatattactcagcactttgaaaaggttatgaagctgtttttctgttacatggacgattctcatcacaaagttgcacatgcagctttctccacacttgcagatattattccagcattcaaaaaacattttgagagctatgttgaaagaattttaccacacatcttttcaaggcttatcgatccaaaggaattggttcgacatccatgttcctcaaccttggaaattgttggccaaacatattctattgacacattgttacctgcacttgtacgttcactggatgaacaaaggtccccaagggcaaaattggctgttcttgagtttgcaaacaaatcattcgacaattacacagtagattctgaaggttacagtaacagtggttttcttaagctctggcttacaaaactagcacctttaatacatgaaaagaatgctaagttgaaggaagcatctatttctggaatgatatcagtttattctaattttgattcagccgtagtcataaatttcatccttagtttgtcgattgatgaacagaatattgtgaggagagctttgaagcaatatactcctcgtattgaggtcgatttggtcaactaccttcagaacaagaaagaacgtccacatcccaaatcttacgatcaagttgattctagcgcttcttctgaagatggttatgctctgacatttaagaaaagcttcccatttggacgattttctgatagtttagttgacactgaatcaagaaaaaagatgaatactgtgcaggaatcagcattacttaacgttcccatcagtcgaactacctctgatgtctgcactgatcatgctaagcaatgtttggacgtgcctctgaagctgatgttctcatgcaaagtagggaactaaagaacaatacctgcacagttgtagaagctgtgcattcatgggcagattatcctgagaaatcagatgcaaccatggatgatgaaaattctacgggtactactcgcttggatttgggccatcttccatctgatggacatagttctgctctagcaatttctggggagcacactcaagaaggagatccatttgttgatcgtagttctgtaaatattatcccacacaccagtaacggacccagcgtaccacaacttcttcatcggattggcaatggtggtgaagtttcatgcctagacaggcaggaggcgttacgacagttggttagagcttccaccaataaagataactttatatggaaaaagtatttcaaccagattttaacaactgtccttgaagtgttggatgatgctgattcctctctgagggagatttctctgttgttagttgctgagatgctccacaatcagaaagattctatggaacaatccattgagattgttcttgaaaagctcctgcacgtcaccaaagatgatgttgcgaaggtttcaaatgaagcacatcaatgcttatatgtagtcttggcaaaatatgacccttttagatgccttgctattattgtgcctttgctggctagtgatgatgaaaagacacttgtcatgtgtatcaattgtttgacaaagcttgttgggcggctctcacgtgacgaattggttactcaactgccttcatttttacctgcagtgtttgatgctttcagtaatcagagtccagatgttcgcaaggctgttgtattctgtttagtggatatgtacatcatccttggaaaagaatttgtaccatacctggagggccttagcagcacgcagctgcgcctagtaacaatctatgcaaatcggatatcacaggcaaggtctggtgcaccagtggctgctacccaatgagtcatgttctgtgtaccatatgaatatttgctttgtgttagctgggttttgggtctcattcatctgtacatagagcagatgagatgccttcatgtatttagcttctggcctttcttgtgtgaattgtgatatggtggcccctgtatatggtgggattgtgttttttgtgtcaccatgcaccatccgcattgtacaaagaacacaaaaaaaaggtgtagcttcatggagcttgtttcccctcactttcctgtgggggttggtgtacagatcggttgctgataaacacaattgttgtgaatgcttagcagttctactctgcatgtaatcgttggttc

SEQ ID NO: 18342 - DNA, 425 bp, Setaria italica
  Peptide Sequence Number=SeqID_84316
ttttggtgatattgaagttatggaagatttttcgacatgatgatcagaacatgatatcaaattttaagtggtgtattggtattgcaagtgctaatttggcgattggtattctaagtgctaatcaggcgattggtattacaagtgctaatcaggtgattggtattacaagtactggttctattccaatggagaatgatgattcataatcatgtattgctatctcctctttcattagttgtcttggctcttctgttttttatggcatacatggctatcctccatatggctcattgaatatcctctgatacttataatagctcattgaataatcatatggctcaaggttgtgggaggcgagattacagagaccaagactttagagtcaggcctgagagaagacactcaccttcgtggaggtattccct

SEQ ID NO: 18343 - DNA, 657 bp, Setaria italica
  Peptide Sequence Number=SeqID_84317
tcttgctgctatgttacacatactagttctgcaattcagtaccttgtgaaattgcttgtttttatgtttctgacctgtggaccttgcagcgagagaaagcatagcaaaagtcctgatggtggaaaaaccaattcttccgaaagtttcagaacttctgataatgaagacagagaaaaggatgaaaaatactttacaagtgatgagaaaaatggttgtgaagcacagctgaagcaaatgcatctcgatatggaagcgttacgtgaagataaatctaagctggagacgatattggagaagaagactgatgaagagcgcaaactttgtaccagagtagaagatcttgaattgcaattgaacaaagagaaagaagattgccaaaggatgacctccaaaacaaagaagctcatcaaagcacatgggcgttatataaaagcaaaaggaggatttaaagaggcaagtttctgttaatcatatgtcaaatataccttaacttgtgttttgtctgaaagattactgcaatgctgtttactaatttgaggtctgcaggtctcaagctcgctttgagaggtttgcagatttgcttgcttcagatattttgaagccttctaccaaggaacaaggttcaactggtattactgccaatgaagatccattatt

SEQ ID NO: 18344 - DNA, 451 bp, Setaria italica
  Peptide Sequence Number=SeqID_84318
agacgaaagaaagaagggaagggtagaactctcccgcgaggaaggaaacattgtttcttcaaccaatatttttgcagacaggtacaagggcgatgatgaggaagttgatgttgattaacaagctggtgatgttggtggttcacaaagatttatccatatggagcaatttcaaccgttgacattgatgtccaacagcttcggaaacttctgcgcagtttgcttcgggcaataggcgcccagcatatcagtagctattcttgtgaaaagaccgaattgtgatgcttctaaacattagtacatggtggtagaatttgtgtaagcatgatggtagaatttgtgtttttatgttccctgagacctcaagaggctactatcctactcaaataccatgtcttcaatttaaaagaaaaaagatctgatgtaggcttacttaaaaaaaaaaaaaaaaaaa

SEQ ID NO: 18345 - DNA, 496 bp, Setaria italica
  Peptide Sequence Number=SeqID_84319
actacttacgacctcttcgcattcgtcttcggttcgtctcctcggccgccgtctcgccgtctcgcggggttgcaggttgctgtccgcgggggggaaccatgcgggaggggatgagggagagggatagaggtgggggcgcggatgcgctggacgctcctcccttccgcggcccggcgtacaagacgaagctgtgcgcgctgtggaggggcaggggcggctgctcccgccccaactgcggcttcgcccacggcgaggctgagctccggaggccgcctccccgtgcctcgttccagcctcgccctcggcctggtatacatacaccacgcgctcctccctccctaccagactaccactcccttactctcgatccgtgcttagttggtcgttttaaggctttgcagcgccttattgtctgcctagtgatttcgccatagccaaaatattgtggatttcctgcgaatctgtggtatctaggtttatatggatgtggatggct

SEQ ID NO: 18346 - DNA, 1242 bp, Setaria italica
  Peptide Sequence Number=SeqID_84320
caagagagattagtgtgctcttcttgaaagatgcgccttctgctcttcttgaaagatgcgccttctgcatgttcattgaatcgagttacgtattgggatgattggttgttgactggaaacatagcccattgtttgaatgctggttgcgctgcaatgaatgacaaatagaaatggaatttgaatcatatggtctcacgagcagagctgttggaagaattgtataattgtaaacaacttgcaagagcatctgtggaggatgcacaaatgggtggaaaatgttagtagctgattgtactcggagagttcgtagtttcttcttgtggccaagagactctgcacttcaattgcgtaatattatgatggtttggcacccgaatcttttttcacttcgtcttgtatcttcttgtcttatggtgcatgtatactattttttctaagtagtatttgaactgaatgctggctgtttcagaacgcaaaaatcttcagcaagcctgatttcattgcagaaaaacttggcattcttgctggttattattttggttactaccgttcaagatagctgtctctttggcagatttgttgagattgactgcttctagaggatgtcagtcctattttcttgctggcctgtttttcagttggcaatcagtcatttatgacccctcgaatgcttatactgtctcagaagaacttaatatggaagatatcacacactttatcttcagtgagattcatgttatggtcaatgtgctttaacaatgtttttagaagcttttacagctcattgaaacacgccctttgaatatgctgtgtcaagttatattgtgtggctctgttcttgcctgtccttcagtattatctcagaacaaggcagtcatatggacaatgtatgaacagtgaaattaaatttatttggtgatattgaagttatggaagatttttcgacatgatgatcagaacatgatatcaaattttaagtggtgtattggtattgcaagtgctaatttggcgattggtattctaagtgctaatcaggcgattggtattacaagtgctaatcagttgtcttggctcttctgttttttatggcatacatggctatcctccatatggctcattgaatatcctctgatacttataatagctcattgaataatcatatggctcaaggttgtgggaggcgagattacagagaccaagactttagagtcaggcctgagagaagacactcacctcttcgtt

SEQ ID NO: 18347 - DNA, 1502 bp, Setaria italica
  misc_feature (1482)..(1502): n is a, c, g, or t
  Peptide Sequence Number=SeqID_84321
tagtaaatagaattaatagaaatacaatcattctccattggaatagaaccagtacttgtaataccaatggagaatgatgattcataatcatgtattgctatctcctctttcattagttgtcttggctcttctgttttttatggcatacatggctatcctccatatggctcattgaatatcctctgatacttataatagctcattgaataatcatatggctcaaggttgtccagcctcgccctcggcctgggaggcgagattacagagaccaagactttagagtcaggcctgagagaagacactcacctcgtgggaggtattcccctgaaagagataacaggggtcgttcagttcgtgatgggaaaccaagttctcaagatagggaatctagccgttcaagatcacctatcaggaagagcgagagaaagcatagcaaaagtcctgatggtggaaaaaccaattcttccgaaagtttcagaacttctgataatgaagacagagaaaaggatgaaaaatactttacaagtgatgagaaaaatggttgtgaagcacagctgaagcaaatgcatctcgatatggaagcgttacgtgaagataaatctaagctggagacgatattggagaagaagactgatgaagagcgcaaactttgtaccagagtagaagatcttgaattgcaattgaacaaagagaaagaagattgccaaaggatgacctccaaaacaaagaagctcatcaaagcacatgggcgttatataaaagcaaaggaggatttaaagaggtctcaagctcgctttgagaggtttgcagatttgcttgcttcagatattttgaagccttctaccaaggaacaaggttcaactggtattactgccaatgaagatccatatgaaatgagcccaccaagtgatcaaagacaaaatcatgtttcagcatcgaggaaaagacctattgccctatcagcaagtgaagaagcaaaaactgggaagcgacagagagacaatgatgatgatatgatcccagcatcagagaactatagaccagaggatgctctagaacatgtccaagatagcaagggaactgatataccaaaaccatttacagcgaagaagaaattaggggagggtgactaccgcgaggaaggaaacattgtttcttcaaccaatatttttgcagacaggtacaagggcgatgatgaggaagttgatgttgattaacaagctggtgatgttggtggttcacaaagatttatccatatggagcaatttcaaccgttgacattgatgtccaacagcttcggaaacttctgcgcagtttgcttcgggcaataggcgcccagcatatcagtagctattcttgtgaaaagaccgaattgtgatgcttctaaacattagtacatgatggtagaatttgtgtttttatgttccctgagacctcaagaggctactatcctactcaaataccatgtcttacaaaaatttnnnnnnnnnnnnnnnnnnnnn

SEQ ID NO: 18348 - DNA, 2177 bp, Setaria italica
  misc_feature (202)..(202): n is a, c, g, or t
  Peptide Sequence Number=SeqID_84322
gcggattggagcggcgagggctcacttctccggcgagatctctccggccgcggcctgacgatgccggaggcaaatgaggattacttgccgtcagtttgtaggagggtgtggaattcgccagagatggatttcttcagtgaatacggcgatgccaacagatacaaaattcaggaaatcattggcaaaggaagctacggggttntttgtcagctattgaccaacatactggtgagaaggtagcaatcaagaaaatacagaatatctttgagcatctgtccgacgccgctaggatcctccgtgagatcaagctcctccggcttctaaggcaccctgatattgttgagatcaaacatgtaatgttacctccatcgaggagggacttcagagatatttatgttgtttttgaactgatggataccgatcttcaccaagttattaaggctaatgatgacttaacaaaggaacaccatcagttctttctctatcagatgctgcgtgcattgaaatatattcataccgctaatgtttatcatcgtgatttaaagccaaaaaatatattagcaaatgctaactgcaaactcaagatatgtgattttggactagcaagggttgcgtttaatgactctcctaccacagttttctggacggactatgttgctactagatggtacagggctccagagctgtgtgggtctttctttactaagtattcaccggctattgatatgtggagcatcggttgcatttttgctgagattttgactggaaagcctttgttccctggtaaaaatgtggttcaccaattggatttgatgactgatctcttgggtacaccatcagcagatactgtttcacagattcgaaatgagaaagcaaggaggtatcttagcagcatgaggaagaaacagccaatacccttttcagagaagttccccaatgcagatccttcggcgctcaagctcttgcaaaggcttctagcatttgatccaaaggatcgaccaactgctgaagaggcattggctgatccctactttaaaggcattgcaaaagtggagagggaaccatcatgccagccaatttcgaaaatggaatttgagtttgaacggagaaagtttaccaaagaggatgtcaaggaacttatattccaggagatactggagtaccatcctcaacttctgaaggattacaagaacggctctgaaaaaacaagctttctatatcccagtgctgttgacaatttccggaggcagtttgctagcttagaagaaagtggagggaggaatgccacaaccgacaggaagcatgtttctctcccaaggactacaaccgttcactccactccgattcccgcaaaggaaggtccggttgcaacctcccaggttcctcaaaggattccaacagctagaccaggaagggtggttggcccagtattaccattcgagaatgcaagtgtcgccgatcaacacattacgcgacgggtggcaaggaatccagttgctcctccagcaactaacaactcatcagtctactgctaccacctgaagtcggacagctcggacaggcaggattatcagcgagagcttgagaaagaccggatgcaatataggccagggcagcatgttatggaagccaaagtagcacctgagatggcccgggacatacggccgtcgcagtactacgtctcgaggggtgtacccagagctgatctaacagaaagggccgctctccaaaggagcatgatgcacagcgttgctcccttcaatggcatcacggcggtcgctggtgggtacagcaaggccggcgttcttcactatggagttacaagtttgtactagagcagtgcccttggggaggataataagatgggaaccggagtgcagctccagctgccccttccctccagctggaaatccagaagcacggacgggaggttcatacctgatcaacgatgtaggcgtccggaaaggattttcaggctcggaaaatggcgagcgccaccttcgttgctcttgtttggtgagcaaaatgggtcagtgatctcgcgccaatgttgtggtcttcctggtgccgtgaagagtgaagagcagggcggggttgaaaaatctcacagcccctttcgaggaaaaggggaggaattacccatcttaaaacggggtgggaaaaaatgtggatgtgta

SEQ ID NO: 18349 - DNA, 653 bp, Setaria italica
  Peptide Sequence Number=SeqID_84323
gattttgacttaatagcaatatgagatatatattgccattatgcggcaacctgtactactttgcctgaaaaatcaaatggtgaacaggaaagtcaacatctttaattaacaccgcagtgtacaaggaactcagaaaagctatcatatttgtcagatgaaggatataaattttgggagcacctaaactagtcgcttgaatactagtagagaaaaagaccttccatccaacgtttttagtcccgatcatttttggatccgggactaaatggcctttagtcccgtgtcaaacagccaccactgaaagctaccgatgacgggagttttagtcctggttggtaatatcaaccaaactaaagagaccctttagtcccggttgtaacggctagtgggatggtgaggcgtttagtcctgattggaattaccaaccgggactaaaggcctcgcctcaccaaccggggcctttagtcccccttttctctccaccttatcatctccgctcccttatctcgcgcaggcaatctttctcttctttcttatttctctcctcctctccctttcttccaggcgaagtgggcagcgcgcgggtgggcccattttttttgaacctttttagtctcgggtgaaatagccagtattaaagaggggaagccttt

SEQ ID NO: 18350 - DNA, 1012 bp, Setaria italica
  Peptide Sequence Number=SeqID_84324
tccaactcatttagctagaactctctaattctttttctttctccgatcgtgcacctcaaagttgtactgcgttcaaataagctagacgccgagagcatacagtacaatggggttcgtctaccggatcgcgagcccgtcggagtacctggcgatcacggggtacggcatcaacgacgtgaagctcgcgaagaaggcatggatcgcgccggggcagcgctgcacccgcttcgacatctcccccgtcaactacaccttcgaggtgcaggccatgagcgcggagaagctcccctttatcctcccggccgtcttcaccatcggcccccgctccgacgacgaggagtgcctcctccgctacgccaaactcatctccccccacgacaagctctcccaccacgtgaacgagctggtcaagggcgtcatcgagggcgagacccgcgtgctggcggcgtccatgaccatggaggagatcttccgcggcaccaagtccttcaagcaggccgtcttcgagaacgtgcagctggagctcaaccagttcggcctcatcatctacaacgccaacgtgaagcagctggtggacgtgcccggccacgagtacttctcgtacctgggccagaagacccagcaggaggccgtgaaccaggccaaggtggacgtcgccgaggcccggatgaagggcgaggtcggcgccaaggagcgggaggggacgacgcggcagaacgccgccaaggtggacgcggagaccaaggtgtacacggtgaagcggcagggggagggcgccaaggaggaggccagggtgaaggcggaggtgaaggtgttcgagaacgagcgcgaggcggaggtggcggcggccaactcggagctggcgatgaagaaggccgggtgggaacagcaggcgcgggtggcggaggtagaggcggccaaggcggtggcgatccgggacgccgagctgcaggcggaggtggagcgccggaacgcggcgaggcagacggagaagctcaaggcggagcacctc

SEQ ID NO: 18351 - DNA, 485 bp, Setaria italica
  Peptide Sequence Number=SeqID_84325
agtgaaagctgcctagtcggcttccagccgatctcctttaaaccagcatgagctgctcgagctcctccatcagcccgccctctgcacttaagacagacccttgttcttctggttaccggtttggaacatgcagttaactctgacctgttgctgtttttggtaaagtttgctggtctgccgggtgggtggatgtgccaactgcaggctgcttatcatcctgtcataagaagaaaaacaaaaggggcaacaaagcaatttgttgtctcattcttaggagctggtgagaacccggcatggcagatgctagttcgaggactgacacctcaactgttgtagacactgacgataaaaatcaaagggtaacccctacttttctccatccgaattattttagaagtgaacataatgttgccattatgcctaaactttggtctttcttatagcgtaataggatgtgaagaattggaccgtattcattatccaat

SEQ ID NO: 18352 - DNA, 569 bp, Setaria italica
  Peptide Sequence Number=SeqID_84326
tcgctgatccactacgacgtgaagccgagcaacatcttcctggacgagcggtgcaacccggcggtgggcgacttcgggctcgcgcggctgcttcctcggccggagcagcagcggcggtacgcgctgggcagcgggtacgtggcgccggagctggcgtgccagagcctgcgggtgaacgagaagtgcgacatctacgggctgggcgtggtgatcctggaggtggtgacggggcggcgggcggtggagtacggggacgacgacgtggtggtgctgcaggaccaggtgcgcgtgctgctggagcacgggaacgcgctggagtgcgtggaccccgggatgggcggcgcgttcccggaggaggaggtgctgccggtgctgaagctgggcatggtgtgcacgtcgcagatcccgtccaaccgcccgtccatggccgaggtggtccagatcctgcaggtcatcaaggcacccgtgggaggcagaatggaagccgccgccagattctgatccattcattctcagtttccttccttctgacaccgtcgtcgtctcgtctctctcgtctcgtcccgcca

SEQ ID NO: 18353 - DNA, 1630 bp, Setaria italica
  Peptide Sequence Number=SeqID_84327
tccgaacaagctaggaaagtggctagcgcaaaattgggagcaaccacccccttcttgcagccaattgtacattaaaaacctaactttggttctctcgacagtgaatgacaagaatgaggggaacgtaactagagcacttaggggataagctgtctcgtttaaaaggaaagatatcttggactcaaggacatgtatcttctgattaaaaacatgtggagctatcttgatcatgttcactacatcctttggcgaaagtccagtcctaaccaaaaagtcaaaccgatcttggagttcatcacccttaccacggaaagatttgagtgccttcttcatatcctcagagccttccacaaatcctatgcctttcaaaaattttaccttctcctccaatgattggtcagtactcctgtcacaagatggcaggcggctgagctttgtccctaatttgtatttcatcaattgccgtggatcctcctttataatcttccacaaacgcctctttcccacactgagatttgtaagaatgctgttggccgccttcactcgagcagaaccaaggattgacgcatttgctactacaaactgcttaatatcctcatcacatacatcaatatcagctaacaatagtataacactctgtatgttcctcgcgaaatcactggctgatacatctgggaagtccaggaaaagattaaatagatcctttttttcagaacctgctttcagcatgatggtaaccactctaaacagtacctttccagaaccatccaacaggaaatctgggttttggctgatcaatttaccaataccctccttatcaaatcccaattcagtgaaaaattgaggaatttcaaccatctttttccaatcatatgacttctgcacagataagaattgaccgatccagtctctcttaatgccacaatcatctagccactgcatgatcttgaattcagcatttaggtcacgtgccaatatgacagggcaagaggtcacaagttttatcacagttgttttactgaaccctagatcctcaagagcacttagcttagatggaagcacattgtcaccagatctaaaaactccacagcagccatgtatatcctccctatcttagtacgcgcaaacccataattacaaagaaagtggtagttctccagcaatgtctcatcatcggcaagaaacatgagatcccgaggtagaaaggaatcatacttgcctggcttgaggcccatgctctcgaagaacggctcgaactcgttgacagggtggtaccggaacagccgcaccaatgccttagtggccctctgatccctcacctcagtcttcttcacctttgacatgaacaccacctcctcacccccctccacagggtccttgatagcatccttcacctggtccagcagcttgctcacaaaggcaggcgagtgcttgcttatatgctcagcatcggcaaagggcagcccccgtgtgaaatggaggtactccatgaaagtctgctgtgcagtccagaaaacccggctcctctccattcgcttgagctccttatcgaccaccacctcctcctcatcctcatcctcatccaagggtttctcctccccacggcgtgcgggagcagctgagttaaggc

SEQ ID NO: 18354 - DNA, 1424 bp, Setaria italica
  Peptide Sequence Number=SeqID_84328
atgaaccatttatttttctgaaatgagttggacctgcaggcgttcaaatgtccagtgttccagtacattacaaggttttgtacaaatcctgtccagtacacaaggaacgtaagtacgtaacgcatgtataatcacatcaaaagtatattacttattttcgtaatggagagatactttaaaccacgttctataggctctgaaggtcgcatcagatgggaaactctcgctgttcaaagatagtacatctcacagcctcagctaatatacagggcaaacttcacttctaaagtctaaatgttcaggttgaccacctgaaccgggctatccttgtcgacaacaaatgatctagcaacctttcctgaaggcgtgtccacctccaccgtgtaggaaccatggtatcctctgaacttgaactctccctggtgactgacattgccgttcacacgggtcagccactcctgtttcagggcaaggtaccttctgccagcctcattgattgtaccatcggcatcgactaggtgagcgtgctcacgaaacataaacatctcccagaatccccagaggatgattccccccacagcaggatgcgcaaatgcttcccggaggaacacctctaggtcatcagctcttaggtgttcgttctctgctgtcacatccaactcagtaatccagatagggagacccagtatggcgagcttgtccaggttatcgcatatgacctctcccactggatggctgatatgaccttgcaccccgatcccaccaactggggcaccccgttcttggagatcgacgacctgttcaacgaatttctcaggggtagattttgtgtcacatccatcttcaacgttataatcattgacaaacaggacagcagaaggatccagcttatgtgcttctctgaacatgtaagctctaatgtcccttcccaatctatcttcatagaaagacccatgaagcatctcgttgtttacatcgtgatgtctaaaccgacctttgtaccttgacagtaggctctgcagacggttttggatggcagccatcaagtggtggccctgcaatgaccggacccaaggttggacggcatcttccacttcccagaataagcagtgaccacgaacctgtatcttatgtttctcgcaaaattcaagcaactcatcagaatctttataattaagtcgcccttgttctgcttctgtatggtaccatttcaactcattctcaaatacagcccaattgaagttcttcacaaaaaactcagcaagatcctcattctcaatgttgtgtctcgctatgcatgatccaaatggaaagctattctcggtctgttgtatcctcacaattgaacctaaaagattcactgcatttgatccttggaacttaagaacaacgtcgcgccttcttaccttggctcttgctcctct

SEQ ID NO: 18355 - DNA, 425 bp, Setaria italica
  Peptide Sequence Number=SeqID_84329
tttttaaaagtaaaagtaaaataaacaaaagtaagtaacaataacaataccaaataaattacaacttaaatttgtcgatttgaattgccacaagttcctgataaggtgataatggttttataacatctaaaaatatggtaaaggttgtgctcccttcaaaactggccctgaaactttgcagaatgtagtcaaatttagtatgccggcatttgcagtgtttcataccttttattttgaagatgctctctaatcatgttgacaagttctagatatcctaatgttctgagatagagacctttattttgatcctctgtaattgagctacttctcttaagaacttgcaatagcacatctgcaaggatcttgttaacgttaggacatcgggatacagacacaaaagccatgcaatcaaactgacttctaat

SEQ ID NO: 18356 - DNA, 277 bp, Setaria italica
  Peptide Sequence Number=SeqID_84330
ggcgcccccgcctggcggcgtacggcgcggatgccgcggcctggtgcgcgtacgcgggcgaggacgaaaggtagaggaaggaccagaagctcttcttccgcgggctctcggccgccagcgacgacgccgacgacgagtaggggaactgctcctcgggcctgggcgccacggacttgctccgcttcagcccgccgccccccgcggagagcgccgcggaggcggaggatgacgacgacgacgaggaggagggcgtcttcttccggtggaaagacatgaa

SEQ ID NO: 18357 - DNA, 370 bp, Setaria italica
  Peptide Sequence Number=SeqID_84331
cccttgtcgtgcgcggcggcggtcccgacggcgccgagccccccgcatccgccgaagccggtgatcttgagctcgcagcgggagttggtgctgagcacgacctcgtgcgcgatggggttgaggaactcgctgctgccgatggaccgcgggctgcagcttggcggctgccccgggtggcgcttgctcccgtggatgacgtcccgcaggttggcgatggagcgcgagcagcccgaccgcggggccgcgcgcttggtcacgatcgacgacaggttcccgccgccgccgccgaccgcggcggaccggccttggcccgcggcacgtggacatccgatggctcggagcggcagtgtagcgaccgcttcagcgcgaa

SEQ ID NO: 18358 - DNA, 240 bp, Setaria italica
  Peptide Sequence Number=SeqID_84332
cgagcgcgagatggaacgccgcgaccgccttcgcgcactcatggtgcggctcgaggccgatggccaggtcgaccgcctcctccgggcgcaggaggacgaccaggccgcgcgcgccggcgaggaggaagaggaggaggagcagatccagtaccccttcttcaccgagggcacacaggagctgctcaatgcgcgcgtcgacatcgcgcagtactcgctgccccgcgccaaggccaggatcga

SEQ ID NO: 18359 - DNA, 534 bp, Setaria italica
  Peptide Sequence Number=SeqID_84333
ttcccgtcgtcctactaagtccctacgtccctagtacctactattcccttcctaccttcatctcctccctcctcgcgcccaccgccgccccgctgctccgagacgccctcgcccgcgctcgcagcgccgcctactccccgcgcctccagctcaaggcgctcgagctctgcttcgccgtctccctcgaccgcctcccctcttcttcttcttcggcatcttcttcccaaaaggaaaaggaaaaggaaaatgaatactccgagccccctgtggccaactccctcatggccgccatcaagcgctcccaggccaaccagcgccgcaaccccgacaccttccacttctaccaccaccaggccacctcagcgacctcccccaacgccgtcaaggtcgacctctcccacctcgtcctcgccatcctcgacgaccccctcgtcagccgcgtcttcgccgacgccgggttccgcagcggagacatcaagctcgccatcctccgccccgcgccgcccatgccgctcctcggccggctccccacgc

SEQ ID NO: 18360 - DNA, 387 bp, Setaria italica
  Peptide Sequence Number=SeqID_84334
tgccgggctgtccacctaaaccggaggcggttatagatgccctaacaaaacttcgtaagaagatatcgcgagaaatagttgaggatcgaactctatctcaaaagagaaatcgatgttttactaccagtcacaagctttatgttcggcgcagtactcatactggaacttacgagcaagaattgctctatcaatcaccgtctactttagacatatcttctgaaacttttttcaaatccaaaagtccagtatcttcctacaaattagtgaattaggaagggctcttttgtgcagaaaaagaaagagcagggcaatctttcaaacttgcattcgaaatgtgaaatatttatacaaagggggagagatcaagacaatgcagcagggtttggt

SEQ ID NO: 18361 - DNA, 175 bp, Setaria italica
  Peptide Sequence Number=SeqID_84335
gtcatgtcaacttgaattgacattatcaatttatccagaacctctctcttttcctcagtgaaacaagaatctgttttgctcaaaccaaaggcaaaaagagagaggttctggataaattgataatgtcatgtcaacttgaattgactaattcagttctgcctattccacataaatg

SEQ ID NO: 18362 - DNA, 288 bp, Setaria italica
  Peptide Sequence Number=SeqID_84336
cgggttgggagggggtggaggagatggaggcgcagatggggccggcgcgcggggcggccacgacgacggaggacggcgcgcgcggggcggacgggagccgggcgccggcgaaggaggacttgaggagggttgacgcggtggtggccatggctgcgggagtttcttgccttcttgggttgtggagaactggagatggatggaagagcagtaatcttccctggaaggagcctgcaaaaaggattcagtttggacttgggcgagctatttggggatggttcagatggctta

SEQ ID NO: 18363 - DNA, 410 bp, Setaria italica
  Peptide Sequence Number=SeqID_84337
gttttattatttactctttcttttttttttttctttttcgattttttttatttttcttttaaagtggatcgatttagataatgtatatttagataatgcagcagggttggttatctaattggctagtcaaacatgaggtggttcatagatctttgggcttcgatcaccggggaatagagactttacaaataaaagcgggggattgggattccattgctgtcattttatatgtatatggttacaattatttacgttcccaatgtgcttatgacgtagcacctggtggatctttagctagcgtgtatcatcttacgagaatacacgctagctaaagatccaccaggtgctacgtcacaagctttatgttcggcgcagtactcacactggaacttacgaaacaaagaaattag

SEQ ID NO: 18364 - DNA, 301 bp, Setaria italica
  Peptide Sequence Number=SeqID_84338
ctactaattcgattagaacctaattaaaatgggataactaatgtatgcatcctaatgaagagtaatactaaaaaaaagaaactctatttcagaattatgaaacagaatatccagttttattatttactcttttctttttttttttttcttttcgtattttttttatttttcttttaaagtggatcgatttagataatgtatattgttacaattatttacgttcccaatgtgcttatgacgtagcacctggtggatctttagctagcgtgtatcatcttacgagaatacagtatggtataga

SEQ ID NO: 18365 - DNA, 321 bp, Setaria italica
  Peptide Sequence Number=SeqID_84339
cggaatacctattatattagaatgaattcctattatacaaaagggtccagatagactgagcaaaaaagggcttcatttcgattctccaatttggaaaatcacatattcatttccttcgtataaacagaaaaatacgatgactcaaagaagttccctaccacgaactttgtaccgcgcgcattacttagaacaactttgtaccgcgcgcattacttagaacaactaggaaagtaagataagcaagaatataaaaatattcggaatagcagaataagaaatgaaaaaatgaagaaaagggaacctaatctcacctccttctgt

SEQ ID NO: 18366 - DNA, 136 bp, Setaria italica
  Peptide Sequence Number=SeqID_84340
tcatagatcttagagaaagcgagacaaagtgaagcgaaagagttttctttgtataagaattaggtctctatcatatctaaatagatgataaatacctaattcttatacaaagatctatgaaccacctcatgtttga

SEQ ID NO: 18367 - DNA, 453 bp, Setaria italica
  Peptide Sequence Number=SeqID_84341
aaaataacttactactaattcgattagaacctaattaaaatagggataactaatgtatgcatcctaatgaagagtaatactaaaaaaaaagaactctatttcagaattatgaaacagaatatccagttttattatttactcttttctttttttttttttttctttcgattttttttatttttctttaaagtggatcgatttagataatgtatatttagataattatgggtttgattgagtttccgttactcgaccaaacaagttccaattccgttatttcaactacactaaacgatctttcgaattggtcaagactctccagtttatggccccttctatatggtaccagttgttgtttcattgaatttgcttcattaataggctcacgattcgactttgatcgttatggattggtaccaagatcaagtcctaggcaagcggacctaattttaa

SEQ ID NO: 18368 - DNA, 225 bp, Setaria italica
  Peptide Sequence Number=SeqID_84342
ccaaggatgcaaacattggaatgtcctactccactgacgacactgtcatgcccattatcctgatcatcttgtctattagaatctgaaatcagcttaaagagttgaagaggtcgttctacaagagaagatgatcaggataatgggcatgacagtgtcgtcagtggagtaggacattccaaggatgcaaacattggctttaatttcaccattgttggtggaggacca

SEQ ID NO: 18369 - DNA, 626 bp, Setaria italica
  Peptide Sequence Number=SeqID_84343
cggcgacggggccacggggcgaccatgcgcgtagactgccgcgtcgcgggctcgcggccactctctctccgaggtggcgttggtgccgacagagcttcaattggaggtggtggagagttgtgctggtaaagaggatgtggagatgctgaagatactggtggagactttgcatgagggacacttggatgcagattgtttggagcatttggaggtaattgtggggaatactgggcaggtggcggtgaagattgatggctatgtggaggtggtgcatactggtacggaggcggagagttatattggtatgtagttcctgttgatgatggtagaagtggtgaactgtggatgtatggaggtgggggatactggttagctagtggcggaggtacgtagttgtactggtattgtggtggtggagagtttttttttgaaacgtatggtggtggagagttgtagtagtatggaggtggtaaatacttgtgggatggtactggagaattgacgccttgtagaggtggtggtgattggtagctgtttggaagtgtggactgtaggcaatgtttggcgggagtactggaaggagtcaatgtggcaggattacacctgtggggttatgcatatggaga

SEQ ID NO: 18370 - DNA, 312 bp, Setaria italica
  Peptide Sequence Number=SeqID_84344
gcgggttggaggggggtggaggagatggaggcgcagatggggccggcgcgcggggcggccacgacgacggaggacggcgcgcgcggggcggacgggagccgggcgccggcgaaggaggacttgaggagggttgacgcggtggtggccatggctgcgggagtttcttgccttcttgggttgtggagaactggagatggatgggactccatcctctcatgagcaatcaactgcaactactgtagtagtagcagcaaagattcagtcagtcagctcaatgacaacactggacgatttactagctatagttactct

SEQ ID NO: 18371 - DNA, 1003 bp, Setaria italica
  Peptide Sequence Number=SeqID_84345
ggccgagacggccaaggtaggatcgggcgggaggcagcgctgcgatggaatcggatcggggctcacggtcggcggcgacggggccggtgccgcagtcgctggaagtgccagaatctgggggttcatcttcttacaagcaggaaagttccaagcttggtactccaggtccagatttctggtcgtggttaccaccagtgcgaggtagcagtatgccaagcgaaaacagtactggtttgaaaccatccaagaaagtggatactttttcccgtcagcctgatctgttgatggaaaaggaacaatcagcagactatttatcactcccttttgaagccaccttctttgagaagaaggaagatagatctcttcctcccttccaatcatttgctgagcctgagaatgtggattccaaggctgacctagctactgatgcaacggagacatttgaagaacagttctcaaaaaatgcagctgaggcagctagagctcttagtgaaagtgatgataaatcaactcatggagtacatcctgatggttcattgtggtggaaggaaacaggtgtagaacaaaggcctgacggtgtagtttgcaagtggaccgtaattagaggagtcagtgctgatggtgctgttgaatgggaagacaagtattgggaggcttcagatcggtttgatcataaagaattaggttctgagaagtcggggcgtgatgcttcaggcaatgtttggcgggagtactggaaggagtcaatgtggcaggattacacctgtggggttatgcatatggagaagactgcagataagtggggacagaacgggaaaggggagcagtggcaagagcaatggtttgagcgttatgattcaaccggtaaagctgaaaaatgggctgataaatggtgcagcttagatccaaatacaccgttggatgttggtcatgctcatgtttggcatgaaaggtggggcgagacatatgacggcagcggtggcagcacaaagtacactgacaa

SEQ ID NO: 18372 - DNA, 1278 bp, Setaria italica
  Peptide Sequence Number=SeqID_84346
catagtagcagaggctgggaagcaagcaacctcttcctcagggtcaggtcagcttcaatcctttgcttggatgtttggctcttctgctggtgctttgggaaacctccttggtggcattgctctcagttatttttctcccagaatcatgtttctgttttttgcaatccttctcacgctccagttcttcacaactgtgactatacctgagagctccctcaaactcccaaaagcaaataccaatctatcagcactcaccagcatccgtaagcaagtcaaagagctgtcatgtgccctgtgtatgcctgaaatgtttaggtcaatcatatggtttacattatcatacaccgtcataccttttctacttgggaccatgttcttctatcaaactgaagtgttaagactggactcatcagttatcggtttatcaaaggtgtttgggcaagtggctctcttggcttggagcatgtcatacaacaagtacttcaaaacaatgtctgcccgtaaggtcctgtcagttcttcagtttgccttagcgctcgtaatgttgtcagatgtgttgttcgttcagggaatatacaggaagatcggaataccagactccatatacacaattgtcttctccgggttgttcgagggtcttatgtttttcaaggtgctgcccttcagtgttcacattgcaaaactttgcccagctggctgtgagggatccgtaatggcctttgttatgtctgcacttgcccttgccactatcatcagtggctattttggagttgctcttgctgccttcatgggggtatctggagatgatttttcagcattgcctgcttgcctgttgattgaggctgcatgcacaatgctgccattgtgttgctcgtcattgatcaaagagagaagagaaaaggtgaagaaagaagaatagaatacatatatattatcgggagatggtgtcatggtgactgttggctttaccctaacctttttggtgccagttcaattctattaagtgatcataaccagcagaaagaaaataggagaagattagactcatcaggtgctaatacctctaaagcttccccggaacagatatgtacatacaagtgtgctgccattcttctacagatgaagtattacttcaatgtaactagttttcatacgttgtttaaggtaccttggtttgtgtgttacatgtgttctatgtggacagttcaatttgcattattttgcgtcattatcaatgcttgtaacctctctccccccaaaaatgtaaatctaagcgga

SEQ ID NO: 18373 - DNA, 534 bp, Setaria italica
  Peptide Sequence Number=SeqID_84347
cccatggggggggcttggttacaattccgattcataactagaaagcttctctggtccttcactactaggggctaaaagtccctatactttcctataatgactgcaacgattttctccattttgtcgaattcctattttgtttgaagtatattactatatatacattatttaaatatacattatctaaatcgatccactttaaagaaaataaaaaaaatcgaaagaaaaaaaaaaaaagaaaagagtaaataataaaactggatattctgtttcataattctgaaatagagttcttttttttagttattactcttcattaggatgcatacattagttatcccattttaattaggttctaatcgaattagtagtaagtattttcttttttatttaatagtctctgactatcattaaataaagggtagagcaattcttttttctagagattttagagaaagcgagacaaagtgaagcgaaagagttttctttgtataagaattaggtctctatcatctatttagatatgatagaaga

SEQ ID NO: 18374 - DNA, 833 bp, Setaria italica
  Peptide Sequence Number=SeqID_84348
taaacaagtactaataaggaaaaaaactaatactaaagtaaacataagatatccatcctaaaactgaaaaaaaagggaagtgggggagttccattggatgaatctccttaaggagagacatgttacaaaagaaaacaaaggctaaagtaagctgctttttgcctttggttttgagcaaaacagattcttgtttcactgaggaaaagagagaggttctggataaattgataatgtcatgtcaacttgaattgactaattcagttctgcctattccacattaataggagtacatttatgtttctgctttacgaatatgatattttttggacatttctaataatagcaagccttattcctattttggtattttggatttcaggactttttagcccctagtagtgaaggaccagagaagctttctagttatgaatcgggtatagaacccatggggggggcttggttacaattccgaatacgctattacatgtttgcgctagtttttgttgtttttgatgtggaaacggtctttctctatccttgggcaatgagtttcgacgtattgggtgtatccgtttttatcgaagctttcatttttgtgcttatcctagttgttggtttagtttatgcatggcgaaaaggagccttggaatggtcttaactgaatattcagacaaaaaaaagaggaaagattccattgagacaattatgggtttgattgagtttccgttactcgaccaaacaagttccaattccgttatttcaactacactaaacgatctttcgaattggtcaagactctccagtttatggccccttctatatggtaccagttg

SEQ ID NO: 18375 - DNA, 732 bp, Setaria italica
  Peptide Sequence Number=SeqID_84349
aatacagtatggtatagatccaccaggtgctacgtcataagcacattgggaacgtaaataattgtaaccatatacatataaaatgacagcaatggaatcccaatcccccgcttttatttgtaaagtctctattccccggtgatcgaagcccaaagatctatgaaccacctcatgtttgactagccaattagataaccaaccctgctacattatctaaatcgatccactttaaagaaaataaaaaaaatcgaaagaaaaaaaaagaaagagtaaataataaaactggatattctgtttcataattctgaaatagagttcttttttttagttattactcttcattaggatgcatacattagttatcccattttaattaggttctaatcgaattagtagtaagtattttcttttttatttaatagtctctgactatcattaaataaagggtagagcaattcttttttctagagattttagagaaagcgagacaaagtgaagcgaaagagttttctttgtataagaattaggtctctatcatatctaaatagatgataaataaaaaaaaaagggagtggggattccattggatgaatctccttaaggagagacatgttacaaaagaaacaaaggctaaagtaagctgctttttgcctttggtttgagcaaaaacagattcttgtttcactgaggaaaaagagagaggttctggataaattgataatgtcatgtcaa

SEQ ID NO: 18376 - DNA, 1109 bp, Setaria italica
  Peptide Sequence Number=SeqID_84350
cggcgcccgcccgccgccgcaatgccgacaaggccctgcagggcggcggtgcgcgccatggtacccagcgcgcggcggatgccgtcggtccagcggcgccggcctccgcgctcggtagcgggagggggcgaggacgagggtggcggtggcgatggagccctgcgcacgggacggcgaaaaggagccaccggttaatgaattggtggatggtaagctgacctgtggatattcaagctttattgggaggagatctactatggaggactgctatgacattaaattaactaaacttgatggacattcagttaacctgtttggcgtatttgatggtcatggaggaaatcttgctgctgaatatctgaaggataatcttttcaaaaaccttatgaagcaacctgagttcctgacagatacaaagcttgcaataagcagaggatttcttgaaactgatggagatatcttagaaacaatatccagttcatttagagatgatggttcaacagctttggctgctgttctgattggcaagcatctatatgtagcaaacgttggtgattcacgtgctgttgcttcaaaagccagcaaagctgtcccactgtcaaaagaccacaaaccaaacaggaaagatgaacgaaagcggattgaggatgctggaggtgttgttatatgggatgatacatggagggttggtggaattctggcaatgtcccgtgcatttggaaatcgtatgttgaaggaatatgtgatagccaaacctgacattcaggaagaagaggtcaacagtgatttggaatatctaattcttgctacagatgggctttgggatgttgtgcgaaatgaggatgccgttgcccttctgaaggcggaagatggacctcaggctgcagctgtgaagctgacagaaattgcttactcccggcacagtgcagacaacatcacatgcattgttgtgcaatttcaccatgacaagtagttggttgagacagtttttgtctgatggtagtaaaattttgtatggtgtttttatccgaaaaaatccataaaccgtagttgcttttacctgatacatgcggctgctacaagacatgagcaaccctgaaagagatttg

SEQ ID NO: 18377 - DNA, 2200 bp, Setaria italica
  Peptide Sequence Number=SeqID_84351
atgggatttgggattcgttattcatccagtcaaagttacaagaagcgtggtgaatttatcgcaacatggtgtcatttgtgtgtgtatgtggcggaacaccagatgcaggatcaaaaaatcaatcaaacaggggtgccccggcgtttgtgcggttgctgcgaacggatgatgatggatggtatatcaaagaatttgttgcagaccacaatcacaaaatgtcagagacatgtgctgaaataagttgctggaaatcacaccggcagattgatccccacacaaaagaactagtaaagaatttaagggcgaacaatgtcagtttgacggaggtgtcctgcatcctttccagtttttttggcaacaataacgcatccgcagttacaaaaagagcattgcgtagcctgactgttcagaataacagtgagaaagtagaaggtgatgtccatcaaaccattgaaaacgatgtccagattaacagagaggcagaagacgatgtccaaaagaccattgaagtattcaaccggttgcatgaagaggatgaaggatttgcaaatgtagttgatttagatgagggtggaaagatcaagacaatgatgtggaaccaacggaaagagcaggcgttggaagaatggtgttggaccagactcaaggaaatttgttcctggacgcattagccccttggaggaagcacttcggcgttatggcgacagaggggctggtccaattattgctccacgtgcagggcttgaatttgattcatgtgaggaggcgtttgattattacaatctgtactcatgggagatgggatttgggattcgttattcaaccagtcagagttacaagaagcgtggtgaaatttatcgcaacagggtgtcgtttgtgtgtgcatgcgggggcacaccagacgcaggatcaaaaaaatcaatcaaacaggggtgccccgcgtttatgcggttgctgcgaacggatgatgatgggtggtatatcaaagaatttgttgcagatcataaccacaaaatgtcaaagacatgtggggaacaaagttgctggaaatcacaccggcaaattgatccccacacaaaggaagtagtgaagaatttaagggcgaacaatgtcagtttgacggaggtgtcctgcatcctttccagtttttttggcaacaataacgcatctgcagttacaaaaagagcgctgcgtagcctgactgttcagattaacagagagaaagtagaaggcaatgtccataaaaccattgaagacaacgtccagattaacagagaggtggaagacgatggtccaaaaagccattgaagtattcaaccggttgcatgaagaggatgaaggatttgcaaatgtagttgatttagatgagggtggaaagatcaaggcaatgatgtggaccaatggaaagagcaggcatgattacctttgttttggggatgctatcacattcgacaccacgtacaggacaaataagtataacatgccctttggattatttgttggggccaacaagcacttccaatctgtaatatttgctggtgtgttaatgctagatgagagcatcaagagttttgagtgggggttttcacacaatttgtggctctaatgggaggcaaggtaccaaagacgatacttacagaccagtgcagtgcgatggaagttgcattggccaataagttccctgagataacacacagatggtgcaagtggcatgtgtttcggactataaaggctgagttaggccaaaagtatacgaaggagttcaaggaagagttgaacaagatatgcaaccatatgctaacctctgaagagtttgaagctggatggggtgctctcgtgacaaagcatggactgaagaataacgtgtatatgtcaaatatatataataaccggcacatgtgggcaaaggcctacttcagcgggaagttttgtgccaagcaaactagcactcagcggtgtgaaagtgcaaaccacgtgcttaaggggtctttgtcgccaggagctaccatgcatatcttcgtggaacaataccacaagttattatcagagttgattgagaaggaagatggcaaggagcatgaggacaagctgccattgacagaaacttctactgggtggccaattgagtcgcatgctgctgagttttacacgaagacaatgcttggcaagttcgttggacctactattgtaagtctagggt

SEQ ID NO: 18378 - DNA, 2230 bp, Setaria italica
  Peptide Sequence Number=SeqID_84352
tcctgttaactgtgcaagaagaggatggactaacattgagccagatgttataacatgtgaagcttgtggtgcacgactcatgttctccactccttcctcgtggtcaacacagcaagttgaaaaggctgctgctgttttcagcctgaagctggacagtgggcataaactgctgtgtccatggattgataacacatgtgatgaatcacttgccttatttcctccgacgacgcctcctgttttagttgagaactactacgagtgtttctcctctctgctacgacttttagcacttccaagaatttcgtgctcttctctggagaccatgaaaaagaggagtccacagctagatcagttcctgtcagaaccattatcttcatcagttgtcctcaaagggcgctttatgcttactgaagactctacaattaaggatttggatgatgcttttcaagatgctgacacatattatcaggcactgaagataatcagtttgtgtggatgggaaccccgcctacttccttatgctattgactgtggaaccgaatctcattcagatgccaactctatctctaaaatggtgcaaccacagcaaataagtaagacaatggaggatcgggtcatactttactcacctaatgatgctaatggtgcccgagcatctgcagatgctaatcgagaagatcagcattatgatccattatcagctgttttagattgccaattttgtggagcatgtgttgccttgtggcctttttctcttgtagaacgacctcttcaactctttaagctgatttcagattctaatagacaagatgatcaggataatgggcatgacagtgtcgtcagtggagtaggacattccaaggatgcaaacattggctttaatttcaccattgctggtggtcctccaccaactagacagagtttccgaccaaaagtttcatttcctgttgttagtcgacatttgaaagctgacttgaactcccgtgggaatttgctttcctctggaagtcatagccacatggttcctgttgcttctaatgcttcaggttccatgaaacggaaaagaagtacagatcagcctcatttgttggaaggtgatatcgatgatgttgatacatccaccataggggcaaagcatgaccaacctggagataattctgaaaagagcataccaaactcggaagtgagcactgaacagaaacaaggcggttcacattcagatacagataaggataccaatatggatggagcttccaatgaagaagaaccagcaacaggttctccttcaaagaaaaagtataacaagcacagatgaggcacttgatcaacatggattggaacctagatttccgtcagttcagggtatgaatgaagaaccttctaatggagtgaacctggcagagacagatgcaaacaattccatgccaaatgagctcagcacaagaacaaaatcattagtcaacaaggaaaaaggtgcatacaggtcatcagaaaaacaaggactgtatgacagaatgaatgagtttgatcctatcaagcagcaccggacattctgcccttggatttcccctgattacggcgaatccttgcctggatggaggctgactctcacggcattacttgctcaggacagaagatctgatgaggactcgcaaggggaggttcagaccggccttctcgatgaggatgacgaccctcttacatctgttagaaagcttttcatgtcaccacctccgaaacgccgtaggatacatcaatcagagaagagctgagaactgtatccacttgtttgaaaagctgggttctaactcaaacagttggccatatcaagggacaaaagcagaatgtcatatggactgaaagttggaagcatttacattgatgcacgacgcacagatgctttgggcggcagcaggaaaaggatgtgacttggccaactgttccagagcaagcgatactgccaccgtgaaagaccattgagcttccacttcctgctgtggtggttagagaatgtagaagttgcttacctcttcccctttaaaaaaccacctgggcgtatacacacaccgtgattttgtagcttagtaatgttgtattgcattcgttattatatttctgtacaagcacctgttaactgttaaacccttgaagaattttgatctgtaaaattgtttgacgccttgctgattcattcacctggaactgagacatctgatgtgctcttgaaatt

SEQ ID NO: 18379 - DNA, 1489 bp, Setaria italica
  Peptide Sequence Number=SeqID_84353
gcacggtgatcgtgaggagccggcggaggaggcgcgggaggaggatggatctggggaagagggtggagatgaagcagaaggagggcgatgccggcggcaagcaggaggaggagcgggagttcgaggagatgctgctccgggagcactcggtgtccacggacatgggcagcctcgactggaagcgcatgaagatcccgccggtgcttagctccgctcagagcgcgcgactcttcaagaccatgcagccaatgaaggcgatcttcgaagtgcaagagagcttgagggaggacttgcagagggatccgaccgacgctgagctcgccgaggccaccggcatgacggtccagcagctgcgccgccgcctcgacgtcggcagggccgccaggaacaaggtcatcaagcacaacctccggctggtgctgtacgccatcaacaagtactacccggacatggccaacgacgagaggttcgacgacctctgccaggccggcgccaacggcctcatcaccgccatcgaccggttcgagcccaagcgcggcttccgcatctccacctacgcgctcttctggatccgccactccatcgtccgcgccatgacgctctccaacttcacgcgcttccccttcgccatggaatcggtaggagaggcaggagatcaacaaggcccgggaggagctggcgttcgagctcgggagggcgcccacggacgaggaggtgatcaagagggtgggcatctcccagcagaggtaccgcgacgtgctgcggatgacgaggcccacctactcgctgcactcgcggaaccgcgtgacgcaggaggagctcatcaacgaggtcaccgacgacgacgccatcggggtcgacgccggcaagcacaacacgctgctccgcctcgccatcgacgacctcctggactccctgaagcccaaggagagcctggtgatcaggcagcggttcgggctcgacggccgggggaagcgcacgctcagcgagatcgccggcaacctcagcatctcgcgggagatggtccgcaagtacgagctcaaggccctgatgaagctcaagccaccccacgcgggtggagtacctgcgcaggtacatgtgagctcatcgttcgtaccgtgccgtagcatcatgcatgcggtgcacagcctactagtactacaaaaacatagttactctgctgtatatatttctgcctccgctactccgcagtctctgcactgcacagtccatcgcactacactgaaatcactccgtgttatactagaagacactgtacatatacaggaatggtgtgtgtgtgaatcgtaatgagtgagttcattcgagtgaggttgtattgcagacctcgcatgcaattcttaccatacattatatatagtatacatgatgtaagaagtcgagcaatgtcccctgctttttgcagctccgcatggtaattagtaaatcatcatatttctgcaattatgcagacaagaaaaaaaaaaaa

SEQ ID NO: 18380 - DNA, 1524 bp, Setaria italica
  Peptide Sequence Number=SeqID_84354
caaattcaatgaaacaacaactggtaccatatagaaggggccataaactggagagtcttgaccaattcgaaagatcgtttagtgtagttgaaataacggaattggaacttgtttggtcgagtaacggaaactcaatcaaacccataattgtctcaatggaatcttttccttcttttttttgtctgaatattcagttaagaccattccaaggctccattcatggaaaatcatagagacaggaaaagaaaaaaagaattttgatcaaatcaatagaaatagaagaaaggatcccttaactaatttgacttccatcctccttcaaataggatatgctctaagtccctatactttcctataatgactgcaacgattttctccattttgcgaattcctattttgtttgaagtatattactatatatacattatctaaatatacattatctaaatcgatccactttaaagaaaataaaaaaaatcgaaagaaaaaaaaaaaagaaagagtaaataataaaactggatattctgtttcataattctgaaatagagttcttttttttagtattactcttcattaggatgcatacattagttatcccattttaattaggttctaatcgaattagtagtaagtattttcttttttatttaatagtctctgactatcattaaataaagggtagagcaattcttttttctagagattttagagaaagcgagacaaagtgaagcgaaagagttttctttgtataagaattaggtctctatcatatctaaatagatgataaataaaaaaaaaagggagtggggattccattggatgaatctccttaaggagagacatgttacaaaagaaacaaaggctaaagtaagctgctttttgcctttggtttgagcaaaacagattcttgtttcactgaggaaaagagagaggttctggataaattgataatgtcatgtcaacttgaattgactaattcagttctgcctattccacattaataggagtacatttatgtttctgctttacgaatatgatattttttggacatttctaataatagcaagccttattcctattttggtattttggatttcaggacttttagcccctagtagtgaaggaccaagagaagctttctagttatgaatcgggtatagaacccatgggggggggcttggttacaattccgaatacgctattacatgtttgcgctagttttttttttttttgatgtggaaacggtctttctctatccttgggcaatgagtttcgacgtattgggtgtatccgtttttatcgaagctttcatttttgtgcttatcctagttgttggtttagtttatgcatggcgaaaaggagccttggaatggtcttaactgaatattcagaacaaaaaaaaaagaaggaaaagattccattgagacaattatgggtttgattgagtttccgttactcgaccaaacaagttccaattccgttatttcaactacactaaacgatctttcgaattggtcaagctct

SEQ ID NO: 18381 - DNA, 1063 bp, Setaria italica
  Peptide Sequence Number=SeqID_84355
cgcagggggccgtgctcgaggaggaggtggaggccgaccagggagggcggtacgacgacgacgacgggtacgaggggggccgcggccccgcgttcacgccacccacgcggccgcgcaccggcaaggccgccctgccgctcaagcgcgaccgcacgaggtcgaagaggttcctcgagatacagaagctcagggagagcaagaaggagtacgacgtgcccaccgccatctcgctgatgaagcagatggctagcgcgaaattcaaggagtcggcggaggcgcacttccgcatgaacctcgaccccaagtacaatgatcagcagctccgtgcaacggtgaatttgcccaagggaacaggccaaacggtgaagattgcagttctcacacaaggtgagaagatagatgaagctagagctgcaggagctgatatagttggtggagatgagttgatcgaacaaataaaaggaggatttatggagtttgacaaattgattgcatcacctgatatgatgcctaaggttgctggcttgggtaagattctaggaccaagaggactgatgcctaaccccaaagctggcactgtttctccgaacattactcaggctatcgaagagttcaagaagggtaaagtcgaatacagagttgacaaaacaggaattgtccatattcccttcggcaaggttgacttccctgaagaagatcttatcacaaacttcatggctgttgttcgctctgttgagaggaacaagccatctggtgctaagggtatatactggaaaacggcatacttgtgctcatctatgggaccttcaatcaagctaaacataaaagaaatgcttgactatggcacagattcatctaactagatgtcaccacaggcaccagttaagtcatctggcatttgcgaccacttccaccggatttaatccgtcccttgctgatgagcacagaaacaatgttttggggtgtgtgtgtgggggtggggggggggggggggtaggtgatggcagggaggtgcttaggtactagttttttcagtttaacgggcacccatcatcagagcagt

SEQ ID NO: 18382 - DNA, 2137 bp, Setaria italica
  Peptide Sequence Number=SeqID_84356
gcgctgtctccgcgcctctgaagaagggtgcagctgaagtgaagcgaagcaaggttgagatcatcaaggaaaagagcaatttcctccggtaccccttgaacgaggagttggtctcagaggccccaaatatcaatgatagtgctgtccagttgatcaagtttcatggaagctaccaacagactgatcgagatgtccgcgggcagaagaattactctttcatgctccggacaaagaatccttgtgggaaagttccgaaccagctttacttggctatggatacacttgctgatgagtttggcattgggacactccgtttgaccaccaggcagacattccagctgcatggtgttcttaagaagaacctgaagactgttctcagcactgtcataaagaatatgggctcaacattgggtgcttgtggagatctgaataggaatgtgcttgcacctgcagcgccttatgtcaggaaagatatcctttttgctcaacaaacagcagagaacattgcagcactccttacaccacaatctggagcttattatgacctgtgggtggatggagagaagataatgtcagctgaagagcctcctgaggtcacaaaagcccgcaatgacaactcacatggaacaaatttccctgactctccggaaccaatctacggcacccagtatctgccgaggaagttcaagattgcagttactgtggctggtgataactctgttgatattctgaccaatgacattggtgttgttgttgtttcagatgatgcaggagagcctgttggctttaacatctatgttggtggtggcatgggaaggacacaccgagtggaaactacattccctcggctggctgatccattgggttatgttccaaaagaagatatattatatgctataaaggccatcgtcgtcacacagagggaaaatggaagaagggatgaccgcaagtatagtaggatgaagtatttgattgaccgttggggaattgacaagttccgggctgaagttgaaaaatattacgggaagaagtttgaaagtttccggccattgcctgagtggcagtttaacagctaccttggctggcaagaacagggtgatgggaaattattctatggagtgcatgttgataatggtcgtgttggtgggcaagcaaagaaaactctacgggagataattgagaagtataatttggatgttagtattaccccaaaccaaaatcttattttatgtgggatcgatcaggcatggagagaacccatcactacagctcttgcacaagctggcctgctggaaccaaaggatgtggaccccctgaatttaactgccatggcatgccctgccttgccactgtgccctttggcacaaacagaagctgaacgtgggatcctacctattcttaaaagaattagagcagttttcgataaggttggtatcaaggattcggagtctgtggttgtgaggataactggctgccctaatggatgtgctagaccatatatggcagagcttggttttgttggtgatggcccgaaaagttaccagatctggctgggtggaacaccaaaccagagtaccctagcagaatcattcatgaacaaagtgaagcttgatgacattgagaaggttttggaacctctattttcctactggaacagcacgcgcctggaaggtgaatcttttggaagcttcacaaaccgaacaggattcaacaaattgaaagaggtggtggacaagtgggtagagtcaccatcagccgcataaaaggatcgcttttgtcggataaaatcccgggctcgcagcacaattttgtctccgacattcacggtgtgcgacgaaaggctctccagataaacgagataaagaggttgtcaaccccgttgacaatagaaaacgaaggctcggtttggagtcgttatgtttgttgggttgagtgatcaaatttttttgcgtgtgctttgaaggaaacctatgtcgacttgaataaattcctcgcaaagttgtgcctcagaataaattcgaccgaggcattgagttctgccatcgtcctgaccaaaaaatttgatcactcaacccaacaaacataacgactccaaaccgagccttcgttttctattgtcaacggggttgacaacctc

SEQ ID NO: 18383 - DNA, 1873 bp, Setaria italica
  Peptide Sequence Number=SeqID_84357
ttaaaaatgggataactaatgtatgcatcctaatgaagagtaatactaaaaaaaaagaaactctatttcagaattatgaaacagaatatccagttttattatttactcttcttttttttttttttcttttcgattttttttattttctttaaagtggatcgatttagataaccaaccctgctgcattgtcttaatctctcccccctttgtataaatatttcatatttcaaatgcaagtttgaaagattgcactgctctttctttttctgcacaaaagaacccctcctaattcactaatttgtaggaagatattggacttttggatttgaaaaaagtttcagaagatatatctaaagtagtaagtattttcttttttatttaatagtctctgactatcattaaataaagggtagagcaattctttttctagagattttagagaaagcgagacaaagtgaagcgaaagagttttctttgtataagaattaggtctctatcatatctaaatagatgataaataaaaagggaagtggggattccattggatgaatctccttaaggagagacatgttacaaaagaaacaaaggctaaagtaagctgctttttgcctttggtttgagcaaaacagattcttgtttcactgaggaaaagagagaggttctggataaattgataatgtcatgtcaacttgaattgactaattcagttctgcctattccacattaataggagtacatttatgtttctgcttcacgaatatgatattttttggacatttctaataatagcaagccttattcctattttggtattttggatttcaggacttttagcccctagtagtgaaggaccagagaagctttctagttatgaatcgggtatagaacccatgggggggggcttggttacaattccgaatacgctattacatgtttgcgctagtttttgttgtttttgatgtggaaacggtctttctctatccttgggcaatgagtttcgacgtattgggtgtatccgtttttatcgaagctttcatttttgtgcttatcctagttgttggtttagtttatgcatggcgaaaaggagccttggaatggtcttaactgaatattcagaacaaaaaaaaagaaggaaaagattccattgagacaattatgggtttgattgagtttccgttactcgaccaaacaagttccaattccgttatttcaactacactaaacgatctttcgaattggtcaagactctccagtttatggccccttctatatggtaccagttgttgtttcattgaatttgctgcattaataggctcacgattcgactttgatcgttatggattggtaccaagatcaagtcctaggcaagcggacctaattttaacagctggtacggtaacaatgaaaatggctccatctttagtgcgattatatgagcaaatgcctgaaccgaaatacgtcattgctatgggagcctgtactattacagggggaatgttacaagtaacggaattacctatagtactgttcgaggagttgataagttaattcctgtggatgtctacctgccgggttgcccgcctaaaccagaggctgttatagatgccctaacaaaacttcgtaagaagatatcgcgagaaatagttgaggatcgaactctatgtcaaagtcaaaagaaaaatcgatcttttactacccgtcacaagctttatgttcggcgcagtactcacactggaacttacgaacaagaattgctctatcaatcaccatctactttagatatatcttctgaaacttttttcaaatccaaaagtccaatatcttcctacaaattagtgaattagggaggggtttcttttgtgcaagaaaaaag

SEQ ID NO: 18384 - DNA, 1828 bp, Setaria italica
  Peptide Sequence Number=SeqID_84358
ctgcctcgccgcctggagtgacccccgtctcgtaaaccccgggcctccgccccccgcccgccgacccgccggaggaggccgccgctgccaacaccgttatgccatggccgtcattctttcctcagcagcgccaacgccactgagtcctcccgcgcgcccgcggaggcagcagcagcagccgagggccaccagcggcctccgcggtggcctcgctcgcctctccggcgcgctcgtcctctcccacgccggcgccgcgctcgccgtgccactctcctacgaggaggcgctgcgcctctcgtccgactccgggcggggacgggggcgagttcgcgctcacgctcccggacctcggcctcgacgggctcgtcgacttcgtcaccgagaaccctatcgtcattgccgcgagcgtagctgccgttgcgctgccgctgctcctcgggcagctgctggggggcggcggcggggggtccgaagtcctacgccgtcgtgtccgcgaggacggcgtaccagcggctgctcgaggagcccggcgtgcagctcgtcgacatcagggcgctcaaggacgcgcgggaggccggcgcgccggacctcagggagggccaagaagaaggcggccgccgtgccgtacaacggggaggacaagaacggattcttgaagaagctggcgctgcggttcaaggacccggagaacaccacgttgatcatcattgacaaatttgatgggaactccgaactagttgctgaacttgtcacaaccaatggttacaaagctgctttcgcagtgaaggatggtgcagaaggaagtcggggatggaagagcagtaatcttccctggaaggagcctgcaaaaggattcagtttggacttgggcgagctatttggggatggttcagatggcttacctctgacaattggttttgctgcagctactggtttgggagtacttgcctacacagagattgagactttgctacagtttttgggttcggctgctattgttcagctagtggcaaccaagctcttgtatgccgaggatcgacaaaagacccttaaacagattgatgagttctttaacaagaaggttgctccgaaggatcttgttgatgaaataaaggaaatcgggcaggctctactacctttacctggtgaacctaagagccaaccagcactagaaacagggactccagctgccgcaccagcagcagaagccaccacggaatcggctcctgcaacgcccacacctctttcaccttatacaaattacccagatctcaaaccaccaacacccccttcagcaccctcctgcggaggctgaagccgaggtgaaggttgagagcaccgccactgaagccccggcgtcggtcaactcggcacctcctgccccgccccagacctctgtcaccataccctaattatccggatctcaagccgccatcctcaccttcgccatcaccaccttaattaggcatgagtacaagaaaccgggtctagaggatattaaagaaaaattgagctgttcatacggagccggcgtctcaccaaaggtgtatgttgtactatgatactgtctgtgtatttattggccactgtggcattgttttttggagcagtaaatatatgatgttaatgtcaagtggtcatcgatgtagtgctctgattttcttgtcttcttattttggtacttgtaaatgtcgaattactagccttccgatggagagttcaagcctatagagcttgatatgtttgacctgtaaatgtgtattttttgtcgtggatggataatcagaagtttaatacctctgttaaaaattgtagtgatcaagagggt

SEQ ID NO: 18385 - DNA, 3081 bp, Setaria italica
  misc_feature (1232)..(1232): n is a, c, g, or t
  Peptide Sequence Number=SeqID_84359
gggaacttattatgcaatgaacataattgaacttaattgcaaaatcaatgtcttacttcatggattcgaaagaataggagaacagtagcctgacaaacagtcggttcagtccgattcaggtgccaattcaggtacttaatcaaatagaacccctattgatttgctagttgataaggtaaatatccagcccactcaatgctaggcgtaatgaggataagggcctccaaaaaacttcttttcgttctatgaactttaaggtgtatgaagtctcatagtaaactcttgcagcggaacgatagagactccatttcacttaggttgatttaatttaggccggaggcagacctaagtcaaggtaatcctcctttgaaacactttggtattgctcctagatagatcataagaaaaataatcaatcagagcacagggagccatcttattatctttctctaaagaaaaactatggcggattaactgatctttacatcagttgatgaaagagcccaatgcagaaaaataaaaatgcatgttgggtctttgaaacagttcgaatcatttcgataataatccgtttgatctgttttaccgagaaggtctacggttcgaatccgtatagccctaatatatacgtctttttttcattttaggatggatatcttatgtttactttagtatagtttttttccttattagtacttgtttatagactcgacgatcgattgcgccatagaatagagataaaagcattaccataggctccattcatggaaaatcatagagacaggaaaagaaaaaagaattttgatcaaatcaatagaaatagaagaaaggatcccttaactaatttgacttccatcctccttcaaataggatatgctctaagtccctatactttcctataatgactgcaacgattttctccattttgcgaattcctattttgtttgaagtatattactatatatacattatctaaatatacattatctaaatcgatccactttaaagaaaataaaaaaaatcgaaaagaaaaaaaaaaaagaaagagtaaataataaaactggatattctgtttcataattctgaaatagagtttcttttttttagtattactcttcattaggatgcatacattagttatcccattttaattaggttctaatcgaattagtagtaagtattttcttttttattttaatagtctctgactatcattaaataaagggtagagnattctttttttcttagagattttagagaaagcgagacaaagtgaagcgaaagagttttctttgtataagaattaggtctctatcatatctaaatagatgataaataaaaaaaaaagggagtggggattccattggatgaatctccttaaggagagacatgttacaaaagaaaacaaaaggctaaagtaaagctgctttttgtcctttggtttgagcaaaacaagattcttgtttcactgaggaaaagagagaggttctggataaattgataatgtcatgtcaacttgaattgactaattcagttctgcctattccacattaataggagtacatttatgtttctgctttacgaatatgatattttttggacatttctaataatagcaagccttattcctattttggtattttggatttcaggacttttagcccctagtagtgaaggaccagagaagctttctagttatgaatcgggtatagaacccagtgggggggggcttggttacaattccgaatacgctattacatgtttgcgctagtttttgttgtttttgatgtggaaacggtctttctctatccttgggcaatgagtttcgacgtattgggtgtatccgtttttatcgaagctttcatttttgtgcttatcctagttgttggtttagtttatgcatggcgaaaaggagccttggaatggtcttaactgaatattcagacaaaaaaaagaaggaaaagattccattgagacaattatgggtttgattgagtttccgttactcgaccaaacaagttccaattccgttatttcaactacaccaaacgatctttcgaattggtcaagactctccagtttatggccccttctatatggtaccagttgttgtttcattgaatttgctgcattaataggctcacgattcgactttgatcgttatggattggtaccaagatcaagtcctaggcaagcggacctaattttaacagctggtacggtaacaatgaaaataggctccatctttagtgcgattatatgagcaaatgcctgaaccgaaatacgtcattgctatgggagcctgtactattacagggggaagtgttcagtacggattcctatagtactgttcgaggagttgataagttaattcctgtggatgtctacctgccgggttgcccgcctaaaccagaggctgttatagatgccctaacaaaacttcgtaagaagatatcgcgagaaatagttgaggatcgaactctatgtcaaagtcaaaaagaaaaatcgatcttttactacccgtcacaagctttatgttcggcgcagtactcacactggaacttacgaacaagaattgctctatcaatcaccatctactttagatatatcttctgaaacttttttcaaatccaaaagtccaatatcttcctacaaattagtgaattaggaggggttcttttgtgcagaaaaagaaagagcagtggcaatctttcaaacttgcatttgaaatatgaaatatttatacaaagggggagagattaagacaatgcagcagggttggttatctaattggctagtcaaacatgaggtggttcatagatctttgggcttcgatcaccggggaatagagactttacaaataaaagcgggggattgggattccattgctgtcattttatatgtatatggttacaattatttacgttcccaatgtgcttatgacgtagcaacctaggtaggaatctttagctagcgtgtatcatcttacgagaatacagtatggtatagataacccagaagaagtatgcataaaagtctttgcccaaaaagataatcctagaatcccatctgtcttctggg

SEQ ID NO: 18386 - DNA, 2020 bp, Setaria italica
  Peptide Sequence Number=SeqID_84360
atgaagagtaatactaaaaaaaagaaactctatttcagaattatgaaacagaatatccagttttattatttactctttctttttttttttgcatttcgtattttttttatttttctttaaagtggatcgatttagataatgtatatttagataatgtatatatagtaatatacttcaaacaaaataggaattcgcaaaatggagaaaatcgttgcagtcattataggaaagtatagagacttagagcatatcctatttgaaggaggatggaagtcaaattagttaagggatcctttcttctatttctattgatttgatcaaaattcttttttcttttcctgtctctatgattttccatgaatggagcctatggtaatgcttttttttagttgtttttgtatgtggaaacggtctttctctatccttgggcaatgagtttcgacgtattgggtgtatccgtttttattcgaagctttcatttttgtgcttatcctagttgttggtttagtttatgcatggcgaaaaggagccttggaatggtcttaactgaatattcagacaaaaaaaaagaaggaaaagattccattgagacaattatgggtttgattgagtttccgttactcgaccaaacaagttccaattccgttatttcaactacactaaacgatctttcgaattggtcaagactctccagtttatggccccttctatatggtaccagttgttgtttcattgaatttgctgcattaataggctcacgattcgactttgatcgttatggattggtaccaagatcaagtcctaggcaagcggacctaattttaacagctggtacggtaacaatgaaaatggctccatctttagtgcgattatatgagcaaatgcctgaaccgaaatacgtcattgctatgggagcctgtactattacaggggggaatgttcagtacggattcctatagtactgttcgaggagttgataagttaattcctgtggatgtctacctgccgggttgccccgcctaaaccagaggctgttatagatgccctaacaaaacttcgtaagaagatatcgcgagaaatagttgaggatcgaactctatgtcaaagtcaaaagaaaaatcgatcttttactacccgtcacaagctttatgttcggcgcagtactcacactggaacttacgaacaagaattgctctatcaatcaccatctactttagatatatcttctgaaacttttttcaaatgcaaaagtccaatatcttcctacaaattagtgaattaggaggggttctttttctgcagaaaaagaaagagcagtgcaatctttcaaacttggatttgaaatatgaaatatttatacaaagggggagagattaagacaatgcagcagggttggttatctaattggctagtcaaacatgaggtggttcatagatctttgggcttcgatcaccggggaatagagactttacaaataaaagcgggggattgggattccattgctgtcattttatatgtatatggttacaattatttacgttcccaatgtgcttatgacgtagcacctggtggatctttagctagcgtgtatcatcttacgagaatacagtatggtatagataacccagaagaagtatgcataaaagtctttgcccaaaaagataatcctagaatcccatctgtcttctgggtttggagaagtgccgattttcaagaacgcgaatcttatgatatggtgggaatttcttatgataatcatccacgtcttaaacgtatcttaatgcctgaaagttggataggctggcccttacgtaaggactatataacccccaatttctatgaaatacaagatgctcattgaatgataataaattcatgttcacttatacaacacaactccagattttattcaagtcaaagaattatttttaggttctgttcctagacgaaacgaaatacttattctattctaattaattcctattatattataacaaaaagatacagatagactagaaac

SEQ ID NO: 18387 - DNA, 315 bp, Setaria italica
  Peptide Sequence Number=SeqID_84361
aatatgttcttcctgatgaaaatatttggacgcaggaccacgagtatcaagcactgtctcaagtctctcatttatgtcctccacatatcccttcaacttctccacgacatgagaagtgctatagaaaggagtcaaccttatatctcctgaaattgtacattctccaggaatttgattgaggcctccaccaggatagctccattggttggcttcattgtagatggagtagcaaacttatagactttctctttctcatgtggagggaagtctataagtttgctactccatctacaatgaggcctccaccaggatagc

SEQ ID NO: 18388 - DNA, 1736 bp, Setaria italica
  Peptide Sequence Number=SeqID_84362
ttttttttttttttcaatgtaacacgggtccttagctcggattttttggtttagaaagtcacttaggcgccccgtagagttacagcataactggtgttaccgtgttaggcccacaaaaactcttcggtaaaaacgggactggtctccacgtttttttttttatttttagcgccaaacaatctcaatcttattattagatgtccctgtcacagactattgaaaagagttctaaaaagaccactgagcaacacgagtaatttcaattgaaggcactcttctatccctgcaagacgggtcaggcctcttcttccagctgtgaaatgatgctcacaaatacctgaaagccctgggtcatgtctgaaaacaagcagtactcgttcttcgcgtggtatgtcttcagtaaaccgtatccagctgtttgaacatcaaatccttcgtcctgtaattccctaatcagaggtagactaccggtgatggaatatggctccacgtggccaactatttcctcggttgctttgcacaatgctttaaagcctcgagactccagattgcaggccaccccattcatcacatctccatcaaaagtgatttcaagccttccccgcagattttcatcaggaagaacatatttggacgcaggaccacgagtatcaagcactgtctcaagtctctcatttatgtcctccacatatcccttcaacttctccacgacatgagaagtgctatagaaaggagtcaaccttatatctcctgaaattgtacattctccaggaatttgattgaggcctccaccaggatagctccatttggttggcttcattgtagatggagtagcaaacttatagactttctctttctcatgtggagggaagtcagtataaaaccgtttttggatttcttttagtgcttccatgttcatctccattgaatttatggccttatgtgcaaggccactgtggaacagcttccctgttgccttgagatgccatggaatcattccaccggtgccaatgcatggctgcttatcagctgtatctatccagaacaagggtccggtcttgagcttatccagcaacccatccttcacgaggccatcaacaccaatgccagtgacagatgagttttcctcattggcaatgaacacggcaatgacagaatgcttcaagggtggcttgacctcaccaagccgccgcattagctgagccactagcgcaacatggccgagacagtcagttgtcccacgtccccgaagcttgtccttgtcctcgctatcaaaggttagtgagaaaggatcgaagtcccactcgctggggtttgccgggacgacgtccatatgcatgccaacgaaggagacgacgcggccggggacggtgcctgggtactcgacgatgacgttgctcctgccctcggcgtagctgaccttccgcacgacgagcgggccgcccccagtctcggtggacaccgggcggagcgcgtcgacgacgtgctgcgccacgaggtcctcctgaggcatgtgggccggcgggtcgttctgcaggcgcgcggactcgccgatgagcttggagaggagggcgacgaagccgtcgcggtcgaggccgcccacggcgtccttcagcagcgccggcgacggcgatgccatctcagacggacggggatgcgggtgctccgacggcggcgccggcgtgggctagtggagctggaggaaaattttggtgcgttctgccttgggcacgcaa

SEQ ID NO: 18389 - DNA, 327 bp, Setaria italica
  Peptide Sequence Number=SeqID_84363
ccggccactcgagtgcggcccaggagtcgtcgtaggctgccgggagggggtgctcgggggccaggcggtactggacggagacggcgacggcgcccgccctggcgaccagcgagttgacgtagcggtggtacatgggctcggcggccgagccgacgatgaagtagccgccgtggaagaagacgaggatcgggagcttggtcttcgcagcctcctggtcctggacgggaggcaggtagagccgcacggtggcgccggtggcggcgtaacgaaatagaacgaacgtaccttggaggcgacgcccgtgttgtcggggtcgaagccggcggg

SEQ ID NO: 18390 - DNA, 550 bp, Setaria italica
  Peptide Sequence Number=SeqID_84364
atgagtctgcaattgagcgaggtgccttgatgagtagtagtcagtcatcacatacctcgggtatttggcgccgaggaagttcttctggccatacttcttccaggagtagccgtcgtcatcaggcttgctcgtctttacattgcccctgatcattgacagtggtacgtaaatccacctgttgtcagcatcattgttcccttctttttttccaggcaaaggaattgttccggcctctttgactgcacacagcacttcttgtccggagttgtccggcataatttcgtcatgttcataggagtcgtggtcatcatgcgttgttatgctactctgacctgccttaccaccaataatgtgctgtacacatcgtacattgactctttgacatctcccgtgaaccatgatggcttctctgaacgccaactcggcagcccttctgtgggatttgtcaggaccagcaccaccaattttcactgagaactctttaagctctgacaagaagttgataccaacaggtatcgtactctgtagatcagcactgtgggcattgaaa

SEQ ID NO: 18391 - DNA, 314 bp, Setaria italica
  Peptide Sequence Number=SeqID_84365
tcttgtccttgttgtgtacttgcagaatcatattgatcagcttaaacttgaagcagaagaactgtatgtgcactctatacctccgtctctgtcactctctgctgatgggtctgacaaaatacttcttaacaggggaatgcccatggaagaccacactggaaccaattcacaagcatcatgagggattcgagatacagaggtggcaaggaagaagttatggcgcttcaatgagatagggagctggaggttccattagccattgtgcttacttgacttgcagttatcaattccactggctgtttgacattggaaac

SEQ ID NO: 18392 - DNA, 527 bp, Setaria italica
  misc_feature (515)..(515): n is a, c, g, or t
  Peptide Sequence Number=SeqID_84366
cccgccgtccgaccccgcgctggcgccgtggcgctcgccgccggacgcggaggccgtcgacgcgctgccctacatcgacggcgactacggcgacccggcggtgaagcgggaggtcgaccgcctcgtcgaggaggagatgcggcgcgggcagcgcaagcccgccgacttcctccgagacctgccccccgtccccaccgccggattcgagaatcatcctatgcttgctaaagagtatgaacgagttagggctggtaaacctccttttatgttagatatgtctcgctatggtttggaaccacctccaatgaacaagaggaatgatgttgctgcctggaggcaggctctacggaatgctcagagccagttgcagcatcaaattataaggatagagaatcttgagcttatgctgaaatatggtgttgatgtttggaagctccagaacagacaaatggaatcagttctgtctaggatgacaaaagcagctgtcgaatacaatagaaaagatagagaccgtnaatcgtgagagg

SEQ ID NO: 18393 - DNA, 670 bp, Setaria italica
  Peptide Sequence Number=SeqID_84367
aacatcattcctcttgttcattggaggtggttccaaaccatagcgagacatatgatgttgctgcctggaggcaggctctacggaatgctcagagccagttgcagcatcaaattataaggatagagaatcttgagcttatgctgaaatatggtgttgatgtttggaagctccagaacagacaaatggaatcagttctgtctaggatgcaaaagacagctgtcgaatacaatgaaaagatagagaccgtcaatcgtgagaggaagttccaccagcaaaacactggaggacagctccatgccctgacaatggaatggcaggagctgtgtcagaagaatatagctattgaggctgcctgtgttgacttgcagaatcatattgatcagcttaaacttgaagcagaagaactgggaatgcccatggaagaccacactggaaccaattcacaagcatcatgagggattcgaggtactgttctttatttgccatccagttaagttcagacaccatgagacaaccattgcctttgctatgattaaaagtttgctgtctacagatacagaggtggcaaggaagaagttatggcgcttcaatgagatagggagctggaggttccattagccattgtgcttacttgacttgcagtttattcaatttcctaccttggtcttgt

SEQ ID NO: 18394 - DNA, 927 bp, Setaria italica
  misc_feature (874)..(927): n is a, c, g, or t
  Peptide Sequence Number=SeqID_84368
tagttttagtaaaagtattcaaagttcaaatcttgaaactttcatgccttataaaagtgaacagagggaatagtcattactgttattctattaccaaataaactgttatacgttttgaaacagaatgctcagagccagttgcagcatcaaattataaggatagagaatcttgagcttatgctgaaatatggtgttgatgtttggaagctccagaacagacaaatggaatcagttctgtctaggatgcaaaagacagctgtcgaatacaatgaaaagatagagaccgtcaatcgtgagaggaagttccaccagcaaaacactggaggacagctccatgccctgacaatggaatggcaggagctgtgtcagaagaatatagctattgaggctgcctgtgttgacttgcagaatcatattgatcagcttaaacttgaagcagaagaactgggaatgcccatggaagaccacactggaaccaattcacaagcatcatgagggattcgagatacagaggtggcaaggaagaagttatggcgcttcaatgagatagggagctggaggttccattagccattgtgcttacttgacttgcagttatcaattccacctggctgtttgacattggaaacacatttgtggacggtgcctagcaatccatcactagaaggtggtgctgctgaaaatacctcaaagaggatgaacctaaatttgtgtattcttcgtccattggagtgtgccctaacctgtggtatgagttatacaacgctcatttgtatccctatgtcaattgcaaatgtttgtcgacttttcgtggcttgaacttgtagtgcagcatcaagtttttatattagctgaagccttcagttgcttcccnnnnnnnnnnnnnnnnnnnnnnnnnnnnnnnnnnnnnnnnnnnnnnnnnnnnnn

SEQ ID NO: 18395 - DNA, 384 bp, Setaria italica
  Peptide Sequence Number=SeqID_84369
ataataatcatgtgcaagcagttagccctcgtgctcacgctgcttgccatctctttgggccatgccgccgcagccgcgtctgtcaggatgaaggtcatgcacgtcgacgccggccgcggcctaaccaaccgcgagctgctccaacgcttgtcgtcgcggagcaaggcccgagccgcacggttactccccaaagcggccagcgccccggtgacaccgggggcgatccccggcgccgtcccggacaccgagtacttggcgcacctggccatcggcacgccgccgcagcccgtgcagctgacgctcgacacgggcagcgacctcgtctggacgcagtgccggccgtgcatctcctgcttccgccaggcccttccttacttcgacccg

SEQ ID NO: 18396 - DNA, 804 bp, Setaria italica
  Peptide Sequence Number=SeqID_84370
tcgaatattccaagcttgcgattgcgcgaggaggaggaggaggaggaggggaggggagcggagcgcggcggaaccctaattgcctccttcgactgctaacagctcagaggcaagggaggaggtacaatgcctagagcaaatgagatgttcagggcagattcaagaatgatggtggcctttggtgccttgacatcaaaaccccagcagctgacatttgaagattcgcttagatttgtgaagaaagtgaaggcccacgattacatgttgtatttgtcactatttgacattctcggaagaatggaactgtcccagcttgatgcctaccaagagttacagctgctatttcgaaatcatccagatttgtgtgaagagcttgagaagttcagaccacctgtgcgtataaagcacgcaacaaacaacatctggccctgggttatcgtgtgtgccgtcccattggttgcagtcagcctaatcccagcgcttggaaacccagtactgtggttcgttcaacaaactattggcgaaaagatggccacgtgattgaagctccagtgcggtacatacatatgtagttacctccaattattggccccatcatgatcaaattaatatagtctttatatatatgtatatagttagttagactggcattgtggaaggaaattggtgttcttggtgatcaaagtatcacttgcaagaaatttagtcggtacttgcattggggggtgcaaccgtgcaagccttacctgaacattactcatctccatttagactgggtttaagtgctaaatcaaattccatggc

SEQ ID NO: 18397 - DNA, 526 bp, Setaria italica
  Peptide Sequence Number=SeqID_84371
gagaaataggtcgacaatacacgtgacagaagtgaggctaaactgcaaggagaaaatagaattcatcagggtagtaatcatgatatgtatcacaatgacaatgattaataatgaaagttacacaaattataaggagaaggctgaaggaggatggaatatatagttatatcaaagagtctaagtcatatactaaggtaatactttcacagcaatctccaggttcattactaaaccacaggatactccaaaaatcacactttatcatttgaaccatttcaattattggtagactctggagaaggcaaaatattattctaccttccaaaggcactacatacagaacccaaatgaaaaatgaagggagaagagatattacatataaagagggcctcagaggattttggcagcattgacagtgatgaggtaagagaagaaataaaaagagcatatcccatttcaattcaacatgcctgttagcctgtataagctcaagcttttctatatgattacatgtacaagttttcta

SEQ ID NO: 18398 - DNA, 372 bp, Setaria italica
  Peptide Sequence Number=SeqID_84372
gctcattctccggcagttacgccgccggccgccgccttccgtccccgccggaagcgcagagaccgaccccacgatccgctccagctctccactcctctgccgctcccaagcgctcgaatcgccggagtctcccaagacgccgggtggagtggaagcggaacgcaacagcacctctcaccgatgcagcagattgcgccggctaccaacccagcagacgcagcggccgtcgacatggatagaggcaacaactgctcgaggaaatgcctctaaggtgatcgattggtgccattcgcaattaacaggcaggtgatttcccctaatccccacccttctcttgcatacaaattcgtgagatttgttggtattatttct

SEQ ID NO: 18399 - DNA, 476 bp, Setaria italica
  Peptide Sequence Number=SeqID_84373
actaagttacctagtaggacttacaagctgttgaaccttcagagtttcaaagagcctacgtactaaccaaaagatgagaaactttgagctataattaacacaaacaggatgcctccagaaacatttgagatacctaacaaagttgtacatacagctttatgatcacacatgacttcaaagaaccaatggatataaaacccattaaaacctgtactaggagttgccattttctgaatataatttgccccatgccggtttgtgtagtgacattccaacacaaactggcatttactggttggcaacagtaattatgtctccattgagcctcacggacaaggttgtctcgtgatagatcaccgacggttccctgctagcaagatataagaagactgctagatttccaacctgagttattgcagctccataaccagcaagccattttggcaaagtgtgttgcagccaagtcttgtaactaa

SEQ ID NO: 18400 - DNA, 469 bp, Setaria italica
  Peptide Sequence Number=SeqID_84374
cttcatcggcctgcccaggacggtggccgtgccgctgttctacgaggtgcaggcgaggtgggtggcgcaggtgctatccggccggagatcgctgccgtcgccggaggagatgatgcgctccgtcgaggagtaccaccgcgccagggagaccgccggcgtgcccaagcgcctctcgcatgccatcttcttcgacttggagtactgcgacgagttcggggagaagcactgcggcttcccgcggctgccggagtggaagaaggagctcctccgggcggccgtcacacgcttgtgcgacgacacggagacgttccgtgacgactaccacgacagcgaccttgtcctgcaaggcctgcgctcggagggctggcttaagaccgaggacaacgatggccaagacgacgacgtcataccagagccagagccactacacccaccgccaaagatctgcacgtgataaatttatttaatg

SEQ ID NO: 18401 - DNA, 1658 bp, Setaria italica
  Peptide Sequence Number=SeqID_84375
tacctagacatggccattcagatgcagaccaattatatggatatgatgacacgcagaagaattctcagaccagtggaagtaatataatctcttcagataatagatcagatcttagtgatcagtttgacaatggagcgaaaggatcaaaggctctaccgggcattgatcaagatcaagatggtaaaaagcatggccaattttctgggaacagcacaggaggattacctaagcctggctcaatcaaagaaattagtccaaagtggcgttctcaggagcccagtgttcttacttggagtatggttctgggtgttaattcacctgatttgctgacagatatgggtgtgcttgaaccaaaaactcttatgctttgtgatgtcagaaaatgaaacaaatgtcagtgatgcacttgcatctcagtctcaggcaaatttagatagtctaatacctgattctggttcagggagtgcagtggcatcagaaggcggattcatgcattcccatctaaagggtttcagtcagaaagaagaccttgaggtcctcagtggtggacttttttcagattctgcagtggacacaaatcagaaagattcagggctccatacctttgacgcaaccaaatatgctaaccacatagatcctgttcaaaggaaacaaagtgtggcagatgtttctgaagcggacactatacctgcttcatcgggaatgctttatcctgaacataatgccaagtgcgtgttgaacacagaagattctgaaatccctttcagtgatcatatatttataccctgtcagtcctctttagaacccacctcctccatggaccaggattctcagcacggtacatgtttggttctggctaaacttataaatatggaaaatgcccaaccttcatcaccatcaccactagtaaatctggaatcaggcatcctagagaaaaatacaatggtgtctcttaatgaaggttgtattatgggaaatgagccacggggcctgcatggtgattttggtggtaacaatgcaaacatgtgtgtttcagctctgcattctgttgatggagatgaagaagcagcttatggttttgttaaacatgagtattgtgataatttgcataatgtgactttgaacaagtcaattcaagggcccggtcaaatgaatggcgagtttctttctgataaacccaaaataggctgtgaaactgctatcaaaagctgtcagttgtctgatgcatttccagatacagaatttgataatcccattggaactatttcaactttgagccaagcagaaggatctgacagtgaaagtagcgttccaaactattttgacctagaagcattgatacttgatcatgacctgattccgtgggatcaagaatctgacttcatccaaccggaagtttcaaggtttcagtatcctgaaagcaggaaggatctgataagattagagaaaggggcttgctctcatataaacagatctatcatgtctaagggggctttcgccattctttatggccaacatttgaaatgctacataagggatcctgaggtaacccttgggagacaaacaggagaggtacatgttgatatcgatttgggaaaggaagggaaggcaaaataaaatatcccgtacgacaggcagttatcaagatggatgatggt

SEQ ID NO: 18402 - DNA, 501 bp, Setaria italica
  Peptide Sequence Number=SeqID_84376
agacgacccaagctcgccgccgggggtcacgtgccgcggcgtgcccaacagcatctccatatgatgcatcgtacaagaagagaccccttgattttttttccccttcatttttctacgggtaaatgcagtataatcattttgaggaaatgtactgtttttcaagcaaaaatacgggagtttcactcctgaattaaactgaatcttcacattttggagagtcagtgatcaggcagacgggagggtacagagaacaacaacgccggaacagcgcatctgccaagcttgaggtttgaaactgaatgttgcctccatgtcggtgcttgacttgaacttgagcagctgtactcccaagagcgtgaaatttctcgaaaaagtgaagggtgtgtaaaaaagtctgagaattatcgagtatgaagtgcggaaaagtgtgcttgcaaaatgtgtgggaaattgagttgaatgaaatcgtagaatttacgaagttaaaaaaaaaaaaaaact

SEQ ID NO: 18403 - DNA, 782 bp, Setaria italica
  Peptide Sequence Number=SeqID_84377
taaatagcacagagaatcagattagattactccaaagttaacccttcatggcctttgttttatttttttaaaaaaaacacattctgtgacctttgtaagccattaacctggagatattcagaagaacatatccatcaatgcagaaacttttggtgaaacaaaggttaaatctatgatactgcattgggacaaagagcaagcttcagaaatattgaatacttttgacatcattgttgcaagtgactgcacatttttcaagcaattccatgagagccttgcccggacagtcaaatccttgctgaagcattcggcaacctcacaggccatcttcctgagcccccaaagaggtgattcacttgacaaattcctgagaattattaaagagaatgggctcaattatgagttgatagagaattatgatcctactgtctgggatctgcacaaaaaatatgtggctggtgatgacagagcttggccaaattatgacaaggagcactgctaccctctgctggttagaattagctcattttgtgagtagtcattttaggatattgttgtttcattggaatatccatttataattcattagctaaatctgttctttaatctactccatccagcagaatagtgtaatcctggagtttgatattggttggacattttggaaaaatcttcctttctatggaagtaccaacaagactgttcaaaggttgcaaactcaccttcctcatctgagaggcttccatgacatcactgatacaagtgcatgtgtgacatgtaac

SEQ ID NO: 18404 - DNA, 1035 bp, Setaria italica
  Peptide Sequence Number=SeqID_84378
tttgcactgcaaacgagcaaaaaggctcgggtacatttttattgaatcaaccaaaaggaactgatcaatacaatacccagaaagggcattccgtacgtagcgaaaagaagacaagagacaccgtagtcaggcttcacgttattttagcccacaggacgtacgataccacgaacttgacaaccacatcacggtaatgaagcctgacgatcgaagccgcgcgccgccggcgaggaaccggcgccgcagatcaaccacgccgccgaccgaccgatcactcgaacgcgccggggtgctccttctgcatcttcaccacctgcctccacgactcgcggttggagatcttgtcgtaccacttggccacgtgcttcttggcggtgaagagtttcttgcccctgtcggaggagttgacgatgtagtgggagttggggaggtgggacaggtcggccagggtgaactcatcgccggccaggaagttgtgcttggacaggatctcgtcgtaaacgcccagcatgttctggagcttcttctcgttctccgcgatgcgggcctcgtcggggttcacgtccttgaggtgcggcgcgaacgcgaggtggaagacgagctccgagctcggggcgtcgaagctctgggcctccgcctgcagccactgctctatcgacgcccgctccagagagcccgtgccgtacagcatcttgttgccgtcctccgggaaatgggtgcacaggtagcggcagatggccctcgaatcgacaacagttttgtcaccatgtttgaaagtcacctggccagttggatcccgtagcttgatgaactcggggagcttgtgcgacttcttgaaggtgtcgatgcggacgagctcgaactcgaggttcttctcgaagaggcaggtcaggaccctcgccacgtcggtggacgccggctgtccgaacacctgcagccctgccgccattgctcaaaagaattttcctgctagttccttgcttcctcggcgagcaagcgagcagtgcttcgatgatctgcaggtgaatgatgcgc

SEQ ID NO: 18405 - DNA, 907 bp, Setaria italica
  Peptide Sequence Number=SeqID_84379
acttgttcgtaacaaagaaagcttgctgcttgcagcatagggcataggtacaggtaaacttcaaggtttgatgtgtgtgagcgttaccttcagcattccaacctttcttgcggttaccttcagcattccaacctctgtttcgttgggaaggcctcgccaatggccatatcgatgaagggcatattcagagggttgaagatcatcgctcagatattcacagtgcagagggagcacgagatcgagatcgggtaccctacagacgtgaggcatgtgtcgcacgtagggttcggcgctagcggctcctgcccaagctgggtaagaaaaggaaacatcttcttggcaatcacctgccgatttcgatttctgcatgattttctgcctgttctatctgaagcagatgaatgaattcagaggagcagaggaggtagcagcggcaggtggaggaggaggaggagcatccataagctctgctgtccagtcgaggcagacctcctgggcttccctaggcaagtagctcgccctcattttattacctttggtctccatgaatcttgaggtcagtccatacaacgaactagaggaagatggggtgatcgattccttgtgtcaggagtagcgtacgactgtactctctgctcttgccacgtagaactatctgtcttcaaaacttgcaatgtcaggctagagtctcctcgtatggtttcagttcgaaaaaaattaggactcttgattcatgcgtgtggtgttgcttccatggccgtgattctgtgcagcaggcgatgcgcgcttcggcccaggtccgtcttccgtgtgctgtattcggcccaaaacaaatgcgaactaacccgtagacaagtaagacgtacttacctttagtttttttttttacgtacgacaacgacaacga

SEQ ID NO: 18406 - DNA, 410 bp, Setaria italica
  Peptide Sequence Number=SeqID_84380
cttcaaggtttgatgtgtgtgagcgttaccttcagcattccaacctttcttgcggttaccttcagcattccaacctctgtttcgttgggaaggcctcgccaatggccatatcgatgaagggcatattcagagggttgaagatcatcgctcagatattcacagtgcagagggagcacgagatcgagatcgggtaccctacagacgtgaggcatgtgtcgcacgtagggttcggcgctagcggctcctgcccaagctggatgaatgaattcagaggagcagaggaggtagcagcggcaggtggaggaggaggaggagcatccataagctctgctgtccagtcgaggcagacctccttggcttttagtactttctgacttcgagcaaccggtaggcgccggcgtgccgccgcc

SEQ ID NO: 18407 - DNA, 1376 bp, Setaria italica
  misc_feature (1)..(33): n is a, c, g, or t
  Peptide Sequence Number=SeqID_84381
nnnnnnnnnnnnnnnnnnnnnnnnnnnnnnnnntttttttagttaactttatgtgtacagatgatacgcactgagatgaacaaagttatataagttacattttctaaattccgagaagagattgcatctttacacacaatatagcaacctgggattctaaaggctttcctcgtataaaagttgggcaagctcgggaccaagggtggtagcttttcactctgccattctgtatttaccacgctgtatacactatccatgagaaacattgctctctaatggattgggtggtactgcgtgatccctcgttttggaggcagtttccttagaatgaagagcaccagagctgaaggcacaatctcaaccagcaagtaatagaagaagttcaggattggatggttcagaacatcaagatccgcagctttatcaaatgtgttaaggcacatcatgacacatctgatcaagaaacaagaaaagcagatggtagtcacatagccaacctcctgcaacttcttacgccttcctttcgattctacagggaaacgctgcaacatcaggaataaccttcccccatagagaagaaacccgagagctgcaaatagtgacacacctgcaaagaacatctttgacaagatgaccataactcgaactggtttccaccacaaaaccaaccatagaattatctgaattgcatagaccacgccgttgatccaatagaaagttggcctaagcccatcagtcgacatcgctcgtgcctgataataaatctctgcccagaacagcaccagaagtgcgtacgtcgtgaagaacgcaagcccaggcatatcgagaagcacatgttgtattatctcaggctgtaccagctgcacattgcgccgcagcacgaacacaacggatcgcacgccattcacgaggaagttcaggaaatgaaacaccttctgcgtcgtccacccatactcaggcaccctgcactcgattctaatcaattggaccagcgcgatggcggagacgatgccgtagagcacggcgagcaagtggaagatgcggtcctgccacagcggcgaatcgttgacgtcgcgccaccagtcgacggcgccgttgagcaccgaggccgaggccgacgtggccgccgcgcccgcggcctccaccgccagcaaccccctcatcgggcaaccgaccgaccgacccacgagcggggggaaaggggaacgcgggcaggagggggcgtctccggagaggggtccggatcgggcctcggcgacgcggggcgcctcgagaggggaggggtggctggaaccgggtgggacggagggaggattggttcggggggcttccgtttcgttcgcgtggaggcgaagaggaaggaaggcgaagccccg

SEQ ID NO: 18408 - DNA, 304 bp, Setaria italica
  Peptide Sequence Number=SeqID_84382
cccactgattgttgatcagggtcccaggtctttgcaggaatacggtggagaagctcgcgagcatacgacacgaggaacattcttccagtcccttgatcttgcatggacattgcttcgtatcttccctcgcgagcttcgtccaccgtattcctgcaaagaccttggaccagtactacagcagagatgccacccactgattgttgatcagggtcccaatgttttggcaagtgcagctttgaataaattgaacagattggccttgtggccattttgctgtatttatctatagtcaggtccaattctt

SEQ ID NO: 18409 - DNA, 216 bp, Setaria italica
  Peptide Sequence Number=SeqID_84383
atgagagtgcctcctctccaacgactgccttcatagcctgaacatcctttcccattctaacgatgcctaatgatgatatcacacatccgactcctgatcttacgggatacattaccgagggacagatatacattgataggcagctccataacagacagatttacccaccgatcaatgtcctgccatctctctctcgattgatgaagagtgctattg

SEQ ID NO: 18410 - DNA, 275 bp, Setaria italica
  Peptide Sequence Number=SeqID_84384
aaacaaaggtacccaaatactagatgttctgtgttgattctaacttgtactctgggtacctttatttcctcattcattcagctggacgaggggggaaacatgctcttacaggggaattgagaacgacttcttcaacttctctacctctaaataagcagtagagtaagggaggaactccgagaaatggctttgcatcagatcgttgatggccgtcgcgagctttggaatctccatgatctcctcatttgtcagcttccggacaaacctggctgggt

SEQ ID NO: 18411 - DNA, 639 bp, Setaria italica
  Peptide Sequence Number=SeqID_84385
agggtaaataggaaccctagaatcgtccttcaatccgtccagcacgctcatatattgataggcagctccataacagacagatttacccaccgatcaatgtcctgccatctctctctcgattgatgaagagtgctattggtgagggtatgacgcgtcgggaccattcagatgtatctaatcagctttatgccaactatgcaattggaaaggatgttcaggctatgaaggcagtcgttggagaggaggcactctcatctgaggatctgctttacttggagtttctcgacaagtttgagaggaagtttgtggcacaaggagcatacgacacgaggaacatcttccagtcccttgatcttgcatggacattgcttcgtatcttccctcgcgagcttctccaccgtattcctgcaaagaccttggaccagtactacagcagagatgccacccactgattgttgatcagggtcccaatgttttggcaagtgcagctttgaataaattgaacagattggccttgtggccattttgctgtatttatctatagtcaggtccaatgttttggcaagtgcagcttttgaataaattgaacagattggccttgtggccatttttgctgtatttatctatagtcaggtccaa

SEQ ID NO: 18412 - DNA, 247 bp, Setaria italica
  misc_feature (219)..(219): n is a, c, g, or t
  Peptide Sequence Number=SeqID_84386
agaggtccggccacaccagagacagtcctgtactctattgctcgcgggcaaaagattcctctcttttctgctgctggtctccctcacaatgaaattgctgctcagatttgtcgtcaggctggccttgtgaagagattggagaaaggcaagcatgcagagggtggtgaagatgacaactttgctattgtgtttgctgctatgggagtgaatatggaaacngcccaattcttcaaacgtgattttgaag

SEQ ID NO: 18413 - DNA, 649 bp, Setaria italica
  Peptide Sequence Number=SeqID_84387
aattgaacgtatcatcacacctcgaattgctcttacaacagcagaatatctggcatactaatgtgggaagcatgtccttgtcattctgacagatattgtagtcttctttattgcagatgctcttcgtgaggtctcagcagcacgagaagaggtacctggtaggcgtggttatcctgggtacatgtatactgatctggcaaccatatatgaacgagctgggcgtattgaaggaagaaaaggctcaattactcaaattcctattctgactatgcctaatgatgatattacgcatccgactaccggaatacttaactggatacattactgaagggcagatatacattgatagacagctccataatagacagatatacccacccatcaatgttctgccatctctctcacgattgatgaagagtgctattggtgagggtatgacacgccgagatcattcagatgtgtccaatcagctttatgccaactatgcaattggcaaggatgtgcaagctatgaaagcagttgttggagaggaggctctttcatccgaggatctgctctatctagaattccttgacaagtttgagaggaagtttgtagcacaaggcgcatacgacaccgaacatttccagtcacttgacctggcatggtc

SEQ ID NO: 18414 - DNA, 871 bp, Setaria italica
  Peptide Sequence Number=SeqID_84388
cgttacaatagagaacagtgcattgcattgcattgggtaaacagatacaaagacatggttcctgcaagagtggcccccaggctcacagcaacaatggacaaaaatttcgcgatgcaacatattaacccagagtacaagttagaatcaacacagaacatctagtatttgggtacctttatttcctcattcattcagctggacgaggggggaaacatgctcttacaggggaattgagaacgacttcttcaacttctctacctctaaataagcagtagagtaagggaggaactccgagaaatggctttgcatcagatcgttgatggccgtcgcgagctttggaatctccatgatctcctcatttgtcagcttccggacaaacctggctgggcttccagcccagagttcaccggtaggaatccgccttccaggggggcaggacagagcctgcctcaaggatcgagttggtttcaaccagcgaaccttccataaggatggagtgctgaccaatgatgcactcaggctcgatggtgcatgatcgcagcagagagtaggcgcccactgtcacataccggtcaacaagagtctcagctggaagtcctgtgggagccgcccaggcggcgtggaggacgcatctctcctggacgttggcgcagaagccgagcgtgatcttgttgaggtccccccgcagcaccgcgccgctccagacggaggcgccgtcgtggacggtgacctggccggcaagcacggcctcgggggcgacgtacgcgtcgacggccaccttgggcatccactgccccagcggcaccagctcccacacccgttccgactcctgctccgacacccgtcccgaccctgcacccacgccggcacc

SEQ ID NO: 18415 - DNA, 2093 bp, Setaria italica
  Peptide Sequence Number=SeqID_84389
cgacaaccaatttcctggaatcgactccaatccagatccgccgcccacatcgcgagatccaggcgtgtccttccacgacagcacgtctcccatcccaccggccaccccgagtcctccctctcttcctcccctcgccctcgcccacgtccacgtcgttctcgcgctgccgcggagtggagatcccatccaccggggcggccttggatcgatctcttcttctccccgcggtggttgctgctgctctaggtcgccggcagtatgggcgtgccgaaggatggcgccgagctggaggagggaaccttggagattggcatggagtataggactgtctctggtgtggcaggaccactggttatcttggagaaagtaaagggccctaagtatcaggagattgtgaacattcgtttgggagatggcaccactcgtcgtggtcaagtcctggaagtcgatggcgaaaaggctgttgtgcaggtctttgaaggtacctcaggaatagacaacaagtatactactgtgcagtttactggcgaggtcttgaaaactcctgtctcacttgatatgcttggacgcatctttaatggttctgggaaacctattgataatggccccccaatattgcctgaggcttacttggatatttctggaagttctatcaaccccagtgagagaacctatccagaagagatgattcaaacaggaatatccaccattgatgtgatgaactcaattgcgcgagggcaaaaaattcctctcttttctgctgctgggcttcctcacaatgaaattgctgctcagatatgtcgtcaggctggtcttgttaaaaggctggagagttctggcaagcacaaggagggtggtgatgaagacaactttgccattgtgtttgctgctatgggagtaaacatggaaacagcccaatttttcaaacgtgactttgaagaaaatggttctatggaaagggtcaccctttttctgaatctggcaaatgatcctacaattgaacgtatcatcacacctcgaattgctcttacaacagcagaatatctggcatacgaatgtgggaagcatgtccttgtcattctgacagatatgagctcttatgcagatgctcttcgtgaggtctcagcagcacgagaagaggtacctggtaggcgtggttatcctgggtacatgtatactgatctggcaaccatatatgaacgagctgggcgtattgaaggaagaaaaggctcaattactcaaattcctattctgactatgcctaatgatgatattacgcatccgactccggatcttactggatacattactgaagggcagatatacattgatagacagctccataatagacagatatacccacccatcaatgttctgccatctctctcacgattgatgaagagtgctattggtgagggtatgacacgccgagatcattcagatgtgtccaatcagctttatgccaactatgcaattggcaaggatgtgcaagctatgaaagcagttgttggagaggaggctctttcatccgaggatctgctctatctagaattccttgacaagtttgagaggaagtttgtagcacaaggcgcatacggacacccgaaacattttccagtcacttgacctggcatggtctttgcttcgcatattccctcgggaacttctccaccgtattcctgcaaagaccttggatcaatactacagcagggatgccacccattgatatctttgtccagaacaagaaaacacatttttccgaatcacggcttgaataaagaggagagttcaaagactttgtatcttttttggttctatatatagctatcctattctttcagtctctgtgcgcaagttaccattgacagtgccttgtgcacaggtggctcttgtaatattatgccatgtatacttgaatcctatgctggagctcattagttggatggaactgcgtagagcactgtaaagccatattggctgaaatgctcaattgtggttattatatttgtttctcactttgtaaatgaatcaaataatgtctacgtgatattcctctcctgatgtaacgaagctgaagttatgttgatccaaaa

SEQ ID NO: 18416 - DNA, 1455 bp, Setaria italica
  Peptide Sequence Number=SeqID_84390
taaatgtgcgctaccgcctcatcaagggctctggatccaaggccacagctgccactgagttatcaagcatcattgctgcagccatattcggtgttgatgatgcaaaggaggagaatcggagagtggatctcctccaactgatcaacaaggagtgtgatgaccttagagtcattgcggtgtggggaacaggtggtgatatgggccaaacgtccatcatcagggcggcttacaagaatccagacacccaaagcaaatttcccagccgagcatgggtgagggtgactcatccattcagttcaaaaggctttgtccagagcttagtgaaccaatttcttgcagtggaaggatttaaagatatattggacacagagaaaaccgcgcacaatttagttcaggagttcgatggatatgtgaaggagaagaggtttctcattgtgcttactgacctctgcaccattgaagagtgggaccagatcgaaaaatgcctgccaaacaacaacaaaggaagccgaatcatagtgtcaacaacacaagttgaagttgcaagcttatgtgcagggcaagatagccaagcctcagagctaagcaattgtctgccgatcacacgctttatgcattctatgacaaggatcctcaaaatgaaatggtttccgtggatccagtatctagcccagatgtggtcactgccagtacaaatgcccaaacagtggcccctagtgagataacagaggatcagtgtaagaatgttgatgaaacgaaggtggacaaaaagagcctcactcgcatcagagcgggtgttggttctttagtggaatctcaacttattgggcgagagaaagaaatatccaaaattataggattaatctcaaacaaggctagccaacagagtcaggtgatctctgtttggggaatgggtggtcttggaaaaaccactctagccaatggcatttatcaaagcccaaagttaagtgacatgtttgagaagcatgcttttgtcacaatcatgcgtcctttcaatcctgcagatctacttagaagtttagttgggcgattacaagaagagtcttctaagaaggaagaactgttgaacaatagacccagcaagaccgaatcattagcaatgatgggggttgaagccttgactaaagagttgaaaaggcttttagaaaagaagagctgcttgattgttctggacgatctgtcatccattgaagaatgggaccatataagacaagggttttcttggatggaaaaaacaacccgaataattgtgactacaagggaggaaagcattgcaaagcattgttccgggaaatatggaatagtacacaaccttgaagttctaaaagaagaggacgcacttaacctcttcagcttaaaggtatttgggaaggttgctgattttgttaagcagaatccagaatttgttgaagaagcaaaccaaaacttgaagaa

SEQ ID NO: 18417 - DNA, 303 bp, Setaria italica
  Peptide Sequence Number=SeqID_84391
cctgctcccagcccacccaaagcagggtacactataatagggaaattaaacttttcctttatgcgcccaaataaccttgaaaaccatgctaccagtcggtcaaataccacactgaccactccacagagcattcctaagatgagatacaggggtaactcggcagcagattttagctcatatgctggcactataaaagctggtcttgctccaagcaaaacatttgatacagtagatgatacaacagatgccaatattatcattgcagtcgtaaatggaggtgaattttctgctttaaggggcctc

SEQ ID NO: 18418 - DNA, 654 bp, Setaria italica
  misc_feature (441)..(441): n is a, c, g, or t
  Peptide Sequence Number=SeqID_84392
tagactagacaacaacaataaacctggatgctgaaatcagaaacatcacatggcacgctaaagaaaccaaaaaagaacacattgactactgtactgtatcctcctaaatttgctcctccctaatggctgctctgcaattcacagagcttgaggattgggggggaccccttgggctgggaacgttgctcatgctcgcagttctcaggagcttgcggaattcagacaggcttattctcccatctttatcaatgtcagcctcctccagcagcggctcaatagatccctttaagccagtgtgctgcatcattctaagctcctctggcgtgatgtatccatcaccatccagatcaaatttgctgaaagcagcttggcaacgatcgccccacctttcattgtcgagctcggccatctgatgtatatggagagttgctgcaacgaacnctttgaagtccacaagaccatcggtgttgctgtcgattgcttgaatgatctcaagcacacggggacccttcaacctccaaggaagatcctttgcaagggcatgtcgcaatctacctacgaataactaaataggaacccaacttttaatacaaataatacaaattagacgtacaaaactagaataccttacaagaatactagactaagactaca

SEQ ID NO: 18419 - DNA, 524 bp, Setaria italica
  Peptide Sequence Number=SeqID_84393
ccttagaaacctccttaaatataccatcttctgtcttatcccaaaatggtcgcctcccacagagcaaaatgtaggttataactcctatgctccaaacatctgactcagggccagatcgtcgttttaatacttccggtgcgacataataggcactgccaacgatatcatggaacttcttccctggctttatgaagtctgacaaaccaaaatctgttgcctttagcggagagtcctccttatttgatttgaaaaggaagttctgggaaggaaaataggtacagtcttacatgacctcaggcttcatatctcggtgaactagcccacgcagatgacactcagcagctactttaagcatttggcgcactaccaccgcagcatctttctcactgtaacggctattttttttggccaatatccggtccagtagttcaccaccctcacatagttccatcacaatatacacgttacgaattctattccttctaaattgtcgttttgtttagttaagtttgttaacttaattt

SEQ ID NO: 18420 - DNA, 653 bp, Setaria italica
  Peptide Sequence Number=SeqID_84394
agcaaaatgtaggttataactcctatgctccaaacatctgactcagggccagatcgtcgttttaatacttccggtgcgacataataggcactgccaacgatatcatggaacttcttccctggctttatgaagtctgacaaaccaaaatctgttgcctttagcggagagtcctccttatttgatttgaaaaggaagttctcaggcttcatatctcggtgaactagcccacgcagatgacactcagcagctactttaagcatttggcgcactaccaccgcagcatctttctcactgtaacggctatttttttttgccaatatccggtccagtagttcaccaccctcacatagttccatcacaatatacacgtacgaatcatcctcaaatgcgttgtagaagtgaacaatattctcatgtcctttaagtgctttaagaatcttcacttctcttttcacatcctccacagcaacaggacgggtcatcttggccttgtcgatgcgcttgacggcgacgcggtccccggattggcggtcggtggcggcgaaggtgtagccgaactggccgtggccgagcaggcgtccgacctcgtagcgcgcctcgaagtccctctcgtagccgaactccacccgcacgggggccgccgccgccgccgc

SEQ ID NO: 18421 - DNA, 566 bp, Setaria italica
  Peptide Sequence Number=SeqID_84395
tgccttgtccaagaacctgaacttgttgatgtggcgaatgttcgtagtgttaaccgacatctcatgggcggtaatgcttgcgttggcctgcacggtggcggtcgacgggcaaacttgcttccgcttagtcacagcggcgacgaataccttggctatgggagtgaagatgctgccctgcggcggcttgttgcggtagaaggcgacgccggcgacgaggctgacgaggccgacggccatggcggcggcggataccccgaacccgacgtccatcccggagcgcgtctgcacccagacgagcacggtgagcgccaccagctctcccacgcagaagctgaagtaggccgcgttgaagtaggtcgacagccgccgggcgtcgccggcgctcccccgccggaactggtccgcgccgtgcgcgatgatgttgggcttgaggcacccgctccccaccgccaccaggtacagcgccgcgaagaagagccccccccgtcctttctaggcctcctcgcacgccgccgccgccgcgatcatgtcgcacggcggcggccgcagctgcggcaggtgcgcct

SEQ ID NO: 18422 - DNA, 1387 bp, Setaria italica
  misc_feature (1)..(81): n is a, c, g, or t
  Peptide Sequence Number=SeqID_84396
nnnnnnnnnnnnnnnnnnnnnnnnnnnnnnnnnnnnnnnnnnnnnnnnnnnnnnnnnnnnnnnnnnnnnnnnnnnnnnnnnttttttttgtttttttcggcataaacaccttcatgctactttactcatgggatcaacaagaagtcaagaagcatgaatccacatcaagttacaagggaaaggaaagccatacatgaaaaacgaaagaacaaatgctatctttaaacacagtgctccatagcagagtgagtgaatgaatgctttcaacatttggttaataattcaataaggagtatttggcgcgcacaacaatcctgcccttctcgacacccagcttagctcccgtgaccagccagtggccaggcgcatcttgtgggcccttcaatgtctctgtcatgtcaacgatcttcacaagtttagcattatcactagaggatgatgaagattcatctgttctctgagtcgaagaacttgatgggctgtggtcccacactgatcttctaattgtgcacccaggaactcgggagaacaagagtttaaggtggagaacactctttgcaccaaaatcccacactcccaactgtgctcctgtgacaatataaacaccggacagatctgtaatatttgtttcagtgtactctatgggcgccgtgctgacatgagcaaagttcttccatttaattggctcaaaccatcggctatcctgttcttcagggccttgccattttggaggtccaattgtaatatgggagtcccaatgaggtaggaatattttcggtaatgagccaaggtgctgcaaatgaatagccagacggttctgtttggctccttccaagagcagtttgaggccaacaaccggtcgacgcccaacagagatctgttctgtgctaatgaagagcttcgggcccatcaagctaaactgaagcgatgggcagacaggttccttcctgtggtgaccagcaatacctggtggagctggagcccaaactagtgggacttgaaaatctaagaagtactgcaactcttcaattggaggtttgtatgtcaagtatagctcaactgcacgagcaaggtgcttttttcctggtacatcatcaacaagagagacaattgagcgaaaggtcatgcctatgacatctggagctgaggcaacagttcctttccagtcactaaaactttgaacgagatcacaaccacccctccttctgaatattactgtcatatccttctcgctgtaattgataggaattgcattagacttattttccacatctgagaatctttccctcccaatttccctcacataatttttgaattccatctcggacaattgggatgatgaatgctgcttaatatatacctcatccttcccaccaaccgtaacaga

SEQ ID NO: 18423 - DNA, 608 bp, Setaria italica
  Peptide Sequence Number=SeqID_84397
acaagggacaacaaagggacgaaaaggaggcggaacaggtttccggcagcgattctgccggtcccttccgtctccggtggcctgtttggcgccggagatggaagaggactggggaatatacgtgcggctgtgcatagactaggtagtttagtatctaggtcttcgtttttctcaccgtcgatgatgagggtggaggaatgatctccgggggtgccgtgttgccactccgcgggcaaataaggtcgaatgctgttgctgacggcgcggcgacgtctttgcttctccaagatggctctgctgattatggcgacgacggtggtggcgccagatctgctcatggcctacggtggagctgcggagcttctttccggccggcgaggtgtgcgttgccggcggcggattggtacctcttttcttcttgtcgacggaatcgctgatgttctttcaacggaatagaagcgttgtggtgccacggcatgggctgatgcagcagaaccaaagctttggagttcctcgataaggtggaaggaggtgatggccggactccggcgactgtctggaggtgccagcgacgaagatggagttgaggacattctggggtgtgtgcg

SEQ ID NO: 18424 - DNA, 287 bp, Setaria italica
  Peptide Sequence Number=SeqID_84398
aacatacagaattggcactaaagtatgtcaagcgtgcgttatatcttctgcatcttacgtgcgggccatctcatccaaatacagctgctacatatatcaatgtagccatgatggaagaaggattgggcaatgtgcatgtagctctcagatatttgcacaaagctttaaaatgcaaccagaaattacttgggcctgatcatatacagactgccgccagctaccatgctatagccatagctctctcgttgaatggaaagcttaattaccttagaagtagttacaagaca

SEQ ID NO: 18425 - DNA, 833 bp, Setaria italica
  Peptide Sequence Number=SeqID_84399
tcacgtactcaggagacatgtagccaaatgtcccgacgatgcggttcgtcacatctcgtgtctgatcttgctcgaagagcctggctaggccgaagtcaccaatcttagggttcatgtccgcatccagcaaaacattgcttgctttcatgtcacggtggacaattttcttctgagagtcttcatgaagatattgtagtcctcgagcaattccttctattatgttgaatcgtttcttccattcgagccgtcttttttcttcagggtcaaaaagaatggtgtcaaggcttttgttggccatgtactcgtagacgagcaatctctctccctcttctaagcagaaaccctccaatcggacgagattcttgtgatgaagtttggccaccaaaactagctcatttcttagttcttctagcccctgatttgaaccctttgacagcctcttcacggctacttcttgtccagaaagatctcccttataaactgaaccaaatcccccttcaccgagtttattgctttcatcaaagttatttgttgctacttgcagtgacgacagagacaacaatgttgacttgatgctttcgaagtcctcaactgtatgtgttcggcggggaagctttgttcctggggatcttctcttcttacgcatattgcagatatacaaggttatggcagctactacagagataagcactattggcaatataattccaagaagtttgccagctgaattgttttacctgattttcgaccccctcaggagtactgcagcccgtggtgcccggtacagtcaccgaaggcgccggcgctggaacggccgcttcgccgttcatcta

SEQ ID NO: 18426 - DNA, 361 bp, Setaria italica
  Peptide Sequence Number=SeqID_84400
tttttaaacggaacaaagggagtagaaatttcatttgcttaaaagtttcagattcaacaagttcaattactacatacatctacaagaaaccttgcacatgttcaatgacggctcgaacgtttgaacctcgagtgctgcgagcgcacagggagagcaagtcaggctccggctatgaaggccacgacgcggtccaggagcttcttggcgttctcgcactcgggcttcggaaggaagaagacgtgctcctcctcctcggactcgagccagtccacgtccccgggccacgcgctggccgacacggcttcgtagtacgcgcggtccctcacgtagagcgggtccttcttcccggcgcacaccagca

SEQ ID NO: 18427 - DNA, 1301 bp, Setaria italica
  Peptide Sequence Number=SeqID_84401
tttttttttttttttttttttttaatttaacgttaaataggaactttccatattcatggaaatatgaaaaatcttatcataaagcttcgtagcagaataagcaattcaagtctcgagaagagatgtattttgacacgacgacaacactctactgccctcctcgactgtggcagaggcgcagagctggaatagtgaacaattttcagtttcaacaagctcaaaactacacacgtccacaagaaaaatcatgcccggaccaagaccgatttattcaaccagaaaaacttgcacaagttcaatgacagctcgaacctcgaatgctgcgacgagcggaacacagagggagagacagcaaagtcaggccccggctatgaaggccacgacgcggtccatgagctgcttggcgttctcgcactcgggcttcgggaggaagaagacgtgctcctccccgtcggactcgtgccacgccacgtccccgggccacgcgctcgccgccacggcctcgtagtacgcgcggcccctcgcgtagagcccgtccttgttgccggcgcacaccagcatcctcgcgcacccgagcttctccagcgacggcgcgccgggcgccagcgggttcatcctcgggtcatcggcgccgccgaccgctcccgggcacgcgtacgtccagagcccaacggtcgccgctgaagcgccctccggctctccctcgatgggcgtgttcccgccgaaccacgggtggagcatgatggcgccctcgatgctcgggccgccgttgccggacgccctcagcagcatgtcgtgcacgatgttggcgccggcgctgtcgccggcgaggaagaggcgagccacgtcgccgtgctcggcgatccactcgtcccgcgccgacgccgcccactggagcgcggcccaggagtcctcgtaggcagccgggagcgggtgctcgggggccaggcggtagcacacggacaccacgaggacgcccgccgcggcggcgagggggttgacgtaggtgtggtacgtggcagagccggctgactcgagcatgaacccgccgccgtggaagaagacgaggacggggagcttcttggacggctcctggccgacctttgggaggtagaggcgcactgacaggccggtttcggggtccaggacgacgtccttggaggtgacgccggtggcctcgtcgaggccggcggggaggaccggaggccggttcaggcgctcgatccttccactcttgtagaggcggaagtgcgccggggactcgatggctatctcgtctgcggccggctccatgatgtatc

SEQ ID NO: 18428 - DNA, 375 bp, Setaria italica
  Peptide Sequence Number=SeqID_84402
gggtcttaagatagggatggatttccatgacatgaggtcaaaatcttcagtcattcatgttttcccatttaactcagacaagaaacgtggtgctgttgcagtacagtcagatgaaggtgttcatgtccactggaaaggtgcagctgaaatagtgttatcttcttgcaaaagctggctttctgttgacggttcagttcagccaatgagtgctgagaaagtaatatcctctcctaacttgtttgtcggttactctgagacccatttgaatttttaaagtactggtttctctgaggctcacttggacttttacgcatttgcagcatgatgaatacaagaaatctattgaagacatggcagtgaattcattacgctgtg

SEQ ID NO: 18429 - DNA, 453 bp, Setaria italica
  Peptide Sequence Number=SeqID_84403
tgaataagggaataggaatttaccaatagaacaatagaagggtcaaaaatcttcagtcattcatgttttcccatttaactcagacaagaaacgtggtgctgttgcagtacagtcagatgaaggtgttcatgtccactggaaaggtgcagctgaaatagtgttatcttcttgcaaaagctggctttctgttgacggttcagttcagccaatgagtgctgagaaacatgatgaatacaagaaatctattgaagacatggcagtgaattcattacgctgtgttgcttttgcatattgtgctcctgatggtgaaatgattccaaaggaagacatagcaaactggaagttgcctgaggatgacctgattctgcttggcatagtaggaataaaggacccctgtcgcccaggagtaaggggtgctgtacgactatgcactactgccggtgtaaaggtgcg

SEQ ID NO: 18430 - DNA, 2139 bp, Setaria italica
  Peptide Sequence Number=SeqID_84404
gagcacgcgagagagagggagagggagagagagaagggggttgggtgaagcggcgaggcgagctggggttgagcaggcccgccggaggttctagaagcttcgcgacgccgagggctcgcgcgcgtcggtgtcgtctctcctgcgagcggaaggtgggctggctgcttctgctgctgctgctgctgctgcgggggattgtctgatcgggcggcatggcgctggggaggtcgccgccgccggagatccgctcgccggacgagcggggcgccgcagaggacgccgaggaggccgaggcggaggaggaggaggtcttcgacgacgccttcgacataccgcacaagaacgcgccgcacgaccggttgcgccggtggaggcaagcagctcttgtgctcaatgcttcgcgccgatttagatatactctagaccttaaaaaggaggaagagaaagagattataagaaggaagatccgggcccatgcacaagttatacgggcagcatttcttttcaaagaagctggccaaaaagatatcagagaagcttatagtggtataaatcttgcaacggcctctcgcagttttccaattgaactggaaaagcttaccacattaaacagggaacatgatactgttcttcttcaagaagttggaggagtcaagggcctgtcagatttattgaagagtaatttagacaagggagttagtccaaacgaggatgaattgttacaaaggaggagtatttatggagcaaatacatatccacgcaagaaaaggaaaaacatactgcgatttgtatttgaagcatgccaagatttaactcttgtcattctaatggtagctgctgccatatcactgacattgggtatgaccacagagggtgctgatgacggatggtatgatggtgggagtatttttttagctgtcttccttgtgatacttgttaccgcaatcagtgattatagacaatctcttcagtttcgacatctgaatgaggagaaacagaacatacaagtggaggttgttagaggtggtaaaagatcggcagcatcaatatttgaccttgttgttggtgatgtagttcctctcaaaatcggtgaccaagttcctgctgacggtgttctgatatctggccattctcttgcaatagatgaatcgagtatgactggagagtcaaaaattgttcacaaggatcaaaaggcaccattcttgatgtctggttgcaaggttgcagatggctatggttctatgcttgtaacaggcgtgggtaccaatactgaatggggtcagttgatggctaacctttcagaagataatggtgaagaaacgccattgcaggttcgcctgaatggtgttgcaacttttattggtttggtaggcttgtccgtagctggtgcagtacttgttgtgctttggataagatattttactggacataccgagaatcctgatgggactactcaatttgttgctgggactactggtgtgaaacaaggatttatgggggcaattagaattttgactattgctgtgactattgtagttgttgctgtgcctgagggactcccattggcagtaactctgacgcttgcgtattcaatgaaaaagatgatgcgagacaaagcgctggtcagacggctctcatcatgtgaaacgatgggatcagctactacaatatgcagtgataagacaggaactcttaccttgaataagatgacagttgtggaagcatattttgctggaacaaagttggatccctgtgacgatattagccagatatcagatgattcagcagcaattattctggaaggaattgcacagaacacaacaggaacagtatttttgccagaggatgggggagagccagaacttacgggttcaccaactgaaaaggccattctttcttggggtcttaagatagggatggatttccatgacatgaggtcaaaatcttcagtcattcatgttttcccatttaactcagacaagaaacgtggtgctgttgcagtacagtcagatgaaggtgttcatgtccactggaaaggtgcagctgaaatagtgatgaatatttgtgttaaatatttgacttatcttcttttccattgctttatcttagtacatttaacactttgttcgttagggggta

SEQ ID NO: 18431 - DNA, 941 bp, Setaria italica
  Peptide Sequence Number=SeqID_84405
tttgagagcttgtcttatatgtagagttacttggaggctggaacaaagacaatgtttataacctagaatgattcgtaatatgaaaagagagcacacctcttatccttaaggaaacctctaagtgcatttatgagctgattctcatcccctgtttctgtattagcacaatcttgattcttgacttgagaaagtatgacccataaaatcttctttacatcaggtttctgggacactgacacaaaagccttacaatcgaattgccagctaattcttttataagcttcatttgcaagggtagttttccctagtcctccgagtcccacaattgaaattaccttcaatgactgttccccatcatctagcatgctaatgaggtgatgccttggaatatcaataccaactagaacagatgactcaacatagagtgcaggtaatcgaggatcaatagacaacacattgttggtttcaggatcaacttcattgtcaagtttgtacctctttcttctgtgctttgcttcaacaattcgatccttgagctcttttatctgctgagcaacaccatggtgacctgacagctccttttactttctgaacatacacatggaagaatccgattattccactagatctcttttggcaagactggtgcatgtaattgtcaatgcaatcttctatgtcgtaggccatctccctcacttgctttctccactccttcgtctgcaggtcaagaacctccatgttggccagtttctccaacagagcattgatgcagctaagctcatccttcaagaaggcaatgtcacgcttcaccccattgtccagcctgaattccttgcccagcaaagcggtaagcttgtcaagtagggagttcatcgccccggtggcaacactaaccatgatcccttgcaatactacctaatagactagttacttactagaca

SEQ ID NO: 18432 - DNA, 444 bp, Setaria italica
  Peptide Sequence Number=SeqID_84406
gcaggtggcagctgccaacttcctcacgtgttgcaagagaggtttgcatgctttatctgctgctatcaacgcattgcagcttgttgatccctcgtttgcatggcttgattctgtttgtgaagctgatgatcaaatttctccaagtaaaaggcctcggaatcttttgatggagaattgtatgttttgtcagactttttaactgctgtttgatatgtggcactgcacagcaagcacttgatttaacttttattctccgtttgcagtggcttttggcacagattctgagctttctcgattgcaattttgtgttgacattgaaatccttgaaaaggaatacacattaacgaaagcacagtttatgctcagcactgtgaaatcaacattcaatttttcagaaagccaatctattgagtccctgatggatattcttataaacgagaaatt

SEQ ID NO: 18433 - DNA, 3514 bp, Setaria italica
  Peptide Sequence Number=SeqID_84407
ctgtcagattctgaagttccagtcacttacagctaatggactacgaaaagagatattatccattatagaacaagaggtaagttcacagacagcgagtgctacagcctatcactggaaaaaaattctgtgcacgatatctccacaaatttggtgctggaataataggccatatgggttgcttcttgatactaacaaagaagtgtttggtttgataagaaagggttcattttccctgttccgttgtttggagggtgtggagatgcttatttatggttcatccgatgaactgcgcaatattgatgacctagggatgaacttaatggatgctgacattgaacttctcaatgaagtccttaggtgcatgggccatatacaccatctgctggggagatcttccactgcaatatattacgagtccctaatcagttctgttatatcatctgatgaaattgcttcgcaaatagtaaagattctagagactggttttagtcctcaatcatcctcatccctcgttacattacttggaacggatgcttatgtagaaagaaggcaggcggctcacaaaagtcaaaggaagttttctgttgatatgttactatcttttcataagttgcgatcatccgccgcatcctggtccgtggtattcgatgtgatcgagaagtttatgaagtgtttgaacacaaacatcaacgtacaagactatgaatcaaagagagtttgtaatgtaaattctgtgttattagttcaagctacttcacaggttgcaaggacgatgtttgagtctgcttttgatctatttctgttcctcagttatctggttggtgttggtgggcaggtctccttgttgcaaagtgatgttgccagaataaaactgaagttgttcccaatgattcaagacatattgggacaatggattgttctccactttgtaggaatctcaccaacatcaccaccaaccattgaagattttagctatcaactttcttctcttcagcttggtaaagtagatgagctgtctttgcacagaaagcttggctgctctgattttacattggcttgtttacttgattttccaatatctcctcgagtcggtgttatgtcacattgttttcctagtccagtggaagtaatcaatctcgtaaggagttttagtagtttgattatgggtggaggaaattttgattgtgtacagactttcttgggttccacaattaatctatcagcagttctcatccgccatggtcaatatgaagctgctcagaatctgctgggaattctggaaacatacttgaacaatgagaaagtatcccgtactggtcaggacgcagatactgcatgttcagcatatcttcatcttaatggattttgccttctgatgcttgcacatgatgaagcaaatacagttttgagagaatccaaggttcatgatgctatccgatgctttttcagagctgcatccggccatgaagcttcaaaggctctgcagaagttttctttggaaacagggtttcaagtttcaggggaatgcagatctatttctttgtggagacttcattactatgagtgggcaatgcaaatttttgagcagcactccatgagcgagggggcgtgccagtttgctcttgctgctcttgaacaagttgacaacattgttgatttagataatggaactgaagccgagagccttccggagactgcagcaatgattaaaggacgactatgggctaatgtattcaagtacagcttggatttgaaaaactttcaagatgcatactgcgcaataatctcaaacccagatgatgatagcaaatatatctgtttgaggcgtttcatcatagttctttgtgagcttggggagacaaaggttctttgcaacggagagattccattcactggtttggtagagaaagtggagcaagagctcttctggaaggctgagcgctcagatctatcttctaggccgaatctctacaaggttctttattcatttgaagcatacaggaacaattggaggaaggcagctggatacatgtacaggtacttcgttagattgaatagagagggtaatgcaggtggcagctgccaacttcctcacgtgttgcaagagaggttgcatgctttatctgctgctatcaacgcattgcagcttgttgatccctcgtttgcatggcttgattctgtttgtgaagctgatgatcaaatttctccaagtaaaaggcctcggaatcttttgatggagaatttggcttttggcacagattctgagctttctcgattgcaattttgtgttgacattgaaatccttgaaaaggaatacacattaacgaaagcacagtttatgctcagcactgtgaaatcaacattcaatttttcagaaagccaatctattgagtccctgatggatattcttataaacgagaaattgtatgacctggccttcacaatcgtgctcaaattttggaaggactctggaatgaaaagggaattggagcgtgtcttttcagctattgcgcaacagtgctgcccaaacagatcagataaatcagggagaaatttgactgacagtaaacaactgctagtgctgccttcttctgaggatgatgcatgggatggcaacattaagagtattgctgtgacccaacagctgcagggaaactgccactgggacacccttgaactatttatgaagaaatacaatgatctgcatcctaggttgcctgtcgttgttgctgagacgcttctttatactgatcccgagattgagctacctctttggttggttcagatgttcaagactaacaaggcagggaacaggatatggggcatgtctgggaaagaggcagatcctgctgccttattcagactctacataaactatggccggcatgcagaagcaaccaacttgctggtggagtacctggagttgttcgcgtcatcgaggccagcggacgtcctccaccgcaaaaagatgtcagcagcttggtttccgtacaccgccgtcgagaggctgtggtgccatcttggggagatgcagcgcgccggccacagcgtggatcagtgcgaccggctcaagaagctgctgcacggagccctgatgagccatctgcagcaggtcgtggttgactcggaggacgtgctgtcgtcagttggaggtggtcagggaatggagggccagagcaactgagatcgtgttggtgttggtccgtgatgtagagaatagagaacgttatgtcacggctgaatcttgtacgtaattgtttgtatggttctgttgtctacgagtgatccatgtgtcttgggaagacaaatgcttgtgctgagacttcaacatggaagttcccataacgtgttcgagttccacatgtatgtagatggagtgacaccattgtagtacgtcggatatggctgtctaatattcattaccgttttaaaatattcgacgtctagaaggagctaagataattaaaaataaactaaatttacttatattttaaaatataatatatttaaaaat

SEQ ID NO: 18434 - DNA, 357 bp, Setaria italica
  Peptide Sequence Number=SeqID_84408
acttatgagcataggaacacgctttgggatgaaccactcaagcatctcacacatcacttggaagttcatcgagtgcttggaggagcgcgctactggtcatctgaaatggcctgatcctgaggagatggcaaccatcaaagcaaagtttgaagagatccagggtctccccaactgctgtggcgctatggacacaacacacatcctcatgtgctcttcggcgcagcctaacagcaatgtctggctggacggcgagaacaagaacagcatggtcctgcagacagttgttgaccctgacatgcggttcagagatgttgtctgtggctggcccgggagcttggatgactcgtgcatcctgcg

SEQ ID NO: 18435 - DNA, 654 bp, Setaria italica
  Peptide Sequence Number=SeqID_84409
ccggcaccaccttcccctcccctgctcccgcgctcgcccgcgaaatcgctcggccttccctccagattggcgcgcaatcgctcactccttccctccaaaatcgcccgcctcccgtcccccgcctcccaattcgcccatcgacgagcaggccggcggcaccggtgagatgtcccgccgaggaagatccgcagcgcaggttggcggcggccctgcgaaggttggcggcagcagtacttctcccgcagctccatctccggcggcagcgccaccgcagccccctgttttcccgtcggaattcacctgcagatgcagcaccgctgccggcgccaacgcagtggggctcgtcgtactcggaatctccaccaacagcaggtttgtggcctggatctagagaaagcagcggcccaagtcattccccacatggaaatcaatccgcaaatccatgtggacaagtggcaggaaataggaaggacttggtggatcatatttggaacaagctcgggcgcaatccaaatatatctacagtttgagatataatgtatgcaatcattttcatatatgcgaatatttaacatcgtatgaatgttgaagttaaacgacacattttttggaaagcaatgcttatttacctatatgaatttttaatacgagaga

SEQ ID NO: 18436 - DNA, 378 bp, Setaria italica
  Peptide Sequence Number=SeqID_84410
gcaggaattttgaataagcaggcggtcagttaagacatcatgctggttgtacagattcagcagttcatgcacctaaatataaagataccagtttttaggaaactgtgactgagaagcacatatgttttctcaaaggatatccagtagccctgcttagtcacaaacatcagcaacacatacatggataagaccaaccttctaatgcaattactcagagaacaaatatcttaacatgctcgtatcgacatattgaggtttagggacaattactttaaacaataaatgggcatttcagttaaattgtaacatcacaactaaagtcgattcatacaataaatgtgtggaactgaaaagaaaaatcagtaacattgatcacta

SEQ ID NO: 18437 - DNA, 479 bp, Setaria italica
  Peptide Sequence Number=SeqID_84411
ctgagaatgtgtattgagctttttgtgattcaaatgaagtaatatttttgttacacagcagtctcagactgctgggtaaatcacattggagaaccggtgcaggcgggagaagtgttctcttgcctgctgttattactctctgttggaactggaaactgaggcccagcaaggcggttttaaacgttcggaggtggccagatcttcccaaagagctcctcaacacggcgtgcttggttcacatatccctccaatccagaagcaagtaattcttcagcagcgggccccatagcagctgcaagactcaactggtcccacttcacaagctgcatacatcatttgccggaaatgtgatcagcgtacaaatacaagatcaaaaaggtccttgtaggaatcctaaaacgaatgtttaatttctttgcagaggacagtcagtttggtttccctttctttgctttattcatcagttgactttttatttt

SEQ ID NO: 18438 - DNA, 1509 bp, Setaria italica
  Peptide Sequence Number=SeqID_84412
ttttttttcgtttaaaggaactaaagggaaatatttctttttgtaaattactgatcaatccagcatatcatttgaatcacaaaaagctcaatacacattctcaggctaatgcaacattgggggcgtgtcgtacccgtaccatatccaaaagaagtaatatttttgttacacaacattctgagactgctaggtaaatcacattggagaaccggtgcaggcgggagaagtgttctcttgcctgctgttattactctctgttggaactggaaactgaggcccagcaaggcggttttaaacgttcggaggtggccagatcttcccaaagagctcctcaacacggcgtgcttggttcacatatccctccaatccagaagcaagtaattcttcagcagcgggccccatagcagctgcaagactcaactggtcccacttcacaagctcctcttcagtgaagttgtacgtcttgccaagggcaggagtcaaccttggggcataactgtactttacatcaggatcagtgacagattcttccagagactgcaatatcttcagaggtgcaatgatgtaatcaatccccagaaggctaaatacatcctgcctgttccgtatggcagcagccatcaactttgttttgtacccatttctgtgaatataggcatatactttctctgccaaagcaaggccagcatcttctcccttcttcaaagcttcatctatttctgggtcaccagagtgattccttgcccaatcccgcaaccgccccacaaatatctgtacaacagatgcacctgcttgtgctgccgctgctgcttgtgcgaaactgtatacaaatgttaaatgtgtttgaattccatcagattcaagcaaccttgaggcctctatgccttgccatgtagcaggaattttgaatagcaggcggtcagttaagacatcatgctggttgtacagattcagcagttcatgcaccctctggataatgccctgggtgtcataagccaaccgagcatctatttcagtcgaaacacgtccaggtacttgatgagccagttcagcgccaacgtttgccagggccttggtgaggtaacaggacatcctgtcctcgagcttatccaatgcattgcactcaccatctgccagtgcagtatctatcgcactcttgaacttggtattcgggagcccagcgatcccgagcagcagcgaggagctcgccgtggccgccgtgggtgcgaacctctcgaaatcatcgaacacgacggtgtccggtacgatctcgctgaagccggccactgcatcgagctcggtgacgatctcgtctacgggggaagtgggtgcgttgccggcggcggcccgcgcagccagaggcgagctccggaggctgaaaggaacaggcttagccgacctcgccaatggactccacctgcccacctgacgggagggcgggaggagggaggaggaggtgggcgcggagacggagagcgccatgggagttgggatcggagccggtggact

SEQ ID NO: 18439 - DNA, 391 bp, Setaria italica
  Peptide Sequence Number=SeqID_84413
tttttttttttttttagggggttaaaactaggtctaacttaaatagtatctagtgaggagattcttaaataagggtgcttgtaaaacgtttgcagcgctagtgcagcaacacacaggttcagttttttttgttgaaacggtaataaactccagcatagaactttgtttctgatacgcgcaggattttccactagctgcaattcgaaatatattgcatccttgtagtgcactctgaattgcagcgaccagattggttacgtcaacggcgcctgcggctcggccctgcctgagaggaacctccagagcttccacccgccacagggcctgggccaggatgtggtgcaccacccgccgcgggagctaagcctggatgtgcatgactcggtcctgc

SEQ ID NO: 18440 - DNA, 494 bp, Setaria italica
  Peptide Sequence Number=SeqID_84414
tagacggcgcggtcggtgctgtcaattactacgatgacagcgtgagttcctcggtagtatgttgcccatgaagttcgtaggctctcttgtccacccagatcccacacctgatgtattcaagcatatgatgttagaacaaacagtgcattggtatttgccaaataacagcaaagaattgcgtcagttttcggctaaagatgcaatcatttggacaccatctgaatatggcagtacaactcttattattatacttggcaccggaaaacaacttatattgggcttaaaagaagggaaaaagagcttgtttccaagtgaaacatgtataggccgctagctgaccttgtcccatgatgctagtaaaagcaaaacactgatgttgataaacaacgaaacataaaagatatgataaatcctgcaacatggaagaaccaaagactttcaatagtaaagaagtaacatgataaacatcatccatagttcatgcaacttgcagc

SEQ ID NO: 18441 - DNA, 1033 bp, Setaria italica
  Peptide Sequence Number=SeqID_84415
ttttttcgacgccgtgcaaatttgctcctttcaatttttatattcagattggttggaatacaggcacagtttcaggcagttttgcaacataaataaacactaagggtggtggcagcaagaacaaacccatcctgccaccttcaacaaacccatggaaaacacagtcaaccagcgtcagcttgcagtcgccttgccggcaactttctgggcgatccaacccaggccatcatagaggccctcaccggtgatggcgcacgaggcctggatgtgccagtcgtggttctttatgctgtggagggagagggcgtcagtgatctcagcgggggacatggcgtccttgaggtcctgcttgttcgcaaacacgagaaccactgcaccctccaggtccgcgtgttggagcaaccggaagagctcatccttgatgatgttgatccgagcgcggtcggtgctgtcaattactacgatgacagcgtgagttcctcggtagtatgttgcccatgaagttcgtaggctctcttgtccacccagatcccacacctcgaagcgcaggttcttgaagacgacctcctcgacgttgctgccgatggtgggcgcggcggtgacggcctcgccgaggtggagcttgtagagcgtggtggtcttgccggcgttgtcgagccccaccacgacgagcttgtactcccgcgccgggaacatcaggaaccacacgcgcgacatccacgcgcccatccttgctcctcctcctcctccggtaccctccctccgcgccggggcaaaatctgaatcttgcgcgcgccggcggctggtgggtggatcggggatccggtgctcgcgggccggatcgatcgggcgatcgatctcccggtggtgcggatcgagtcggaggaggagaccggtgtcgccggggaaggaggaggaggagggggagtaaggaatcgattgacgcgtcgtcgcctgccggacgaggcggttggatggatggggggatattcgtgctccgtccgtgtgccaagaagtttcgtcagtcgttgcc

SEQ ID NO: 18442 - DNA, 973 bp, Setaria italica
  Peptide Sequence Number=SeqID_84416
ttaatggctaggaaatatgcagttccattagaatgaaagcgatagctacaatgacaacacatcgttaacacgtgcatgcggcaatatggaaaagaaaaggatagggcctgatgtcattggtcaaacttccatggcattcatatgagcaggctgttgacaagtccaacacctgtagacttgcatatcattagtttggagaaatcagggtaggagcagacaatgtcacaagttctgtactgaactgactactgagcaacacgacgaagacggacgaactgaaacataggtggcaagtatcaagctaactagagttaacaaaccccggactacaacttcccaacccactgatattcagcagctacagcacttcacttcctaaagcaaccacaagatgtgtagtacctccacagcaggaaacagcagcagaacactcaattagcacggcccctgatcacatcaaggcccatctcagtgggatcagttgcctgcagctccacctggataccatcaagctccctcttgaacctgtccttggagcttgcatacagcatcttgctcctgatctttgcagtgtccggggaccacgcgatgaagaagatcttgctcttctggcatccctcctcggtgacgaagtcgaagtcgtagatgcagtatctgcactcgtcggcggggaggatggcggcgaagacgtcgtaggtgaggttgggctcgccgagcttctcgacgacgacctgcttctgctcctcgtcgatcctgaagacgacgaagcggtaggtgcgcttggccttgagctccaggaacctgcgcttgcagtcgtcgtccacggccatcccggacgccgcgttggcctgcttccggagaggaagacaagtaccgggagtcggcggcgcgaggaggaggggaaaacgtcccgggaagggaagcggcgggcggcggcggaggagaaggaaacgcgggacgggacggtggtgtg

SEQ ID NO: 18443 - DNA, 273 bp, Setaria italica
  Peptide Sequence Number=SeqID_84417
aattgaattaatataaatagctactttaaactgcacttcagaataccagcaaactatattcagcaagtaacataccccagaagtggtggaatggcaccaacaactgctcctacccatgtattaactgggtgtatttgcttcaatggagtatatacaaatgcgtacagaacaagattagaagctgcaagcccagctgccaagccattagcctgcacaaaccttgccaaattttgcatgtttagttccagtttcagctttctaccaacttctgta

SEQ ID NO: 18444 - DNA, 1669 bp, Setaria italica
  Peptide Sequence Number=SeqID_84418
ttttttttgtcagtcaacatgaagaccaccagcattgaaatgaaacttgaatgcgcgtcattagtgttaaaccaaatttggaagaaaataaagcacagggtaaccgtgttactcgaggcatcagaaagaggatcagcggcacttttttacattcagatgggccgcaaagagctcacccccataaaaattattctataatttcaacaacagatagaccaaggacccccttggcggcagaaaattcatgtatgaagccaaaaatgcatgaacacattgcttctacaggtccagtgctgcaggaagaaccagagaaggttttcatgactcgtatatgggtactggtaagaaagggaatggagccacagaagcataggcgactggagggcgtgattgcacacgagaaggtttcctgtcttcgtgtttctgtctcgctctttcgttgtcctgcagatcggccctgtaaagaactccaccgagctcacttgtctcagccaggttgtgcgcattttgtttgttaggcagccgatgtaatagaagtccagccatgaaggcagggagatacagcaggcttccatagaacattctccttgcagtttttggacttggttccagcacaaacgatagagctccaatggtaaggcccatcgttagaagtgatgcttcaacaccgaaccactcagatgtgaggccccagttgtatgcaaacaatcccaaaggcagcatgtacagacaatttctgagcgatacccacgcagttcttttaccagtagggtcagcaaaagaaaacatacggtaccctccagcaaggtaatcattgcgacataagtatgcgagcgccataaaatggggtatttgccaatagtacaatgcggcagggagaatcatagcatttagtgacaattcagtacaagctgctgcccaccccagaagtggtggaatggcaccaacaactgctcctacccatgtattaactgggtgtatttgcttcaatggagtatatacaaatgcgtacagaacaagattagaagctgcaagcccagctgccaagccattagccttccaggccaacaaagctgttcctgtagctccaacactcgtagcccacatagcagcatgtgcaggactaatgcgacctgatggcaagggccgccgcattgtccttttcattttagcatcattttttatctcgaacacctggttgagggtatttgcagatgctgcaaccatcattgtaccagcacatgtgcaacaaagtccggcgatgtccacgatgttgccactaccaagcacatagccagcccccgaagttgccacaacaagagcactgaggcgggctttggagagctcccagtagcacctcccgtagtgccgcagcgcgtcggagacggatccggcctgctgcgaaacggatacagccgccgccgccgctgcttcttcaacgacgttgttcgctgctgcggcggagggtgcggacgaggaggcacgcgtcgaggcgataagagcgagcgacgcgaccgggtggtggatggggtcagggaggaggcgagagcgtagagccctcgcggcgtaggccgcggtggcgccgcccctccacatggcggctacgggcggcggcgcaggcggcgatgacgaagcccgattcgatggccggtgggaacgggagagctgg

SEQ ID NO: 18445 - DNA, 1222 bp, Setaria italica
  Peptide Sequence Number=SeqID_84419
ttcaggtggtgggaaaatggaatccaaacagccatcttgatcttgtccagccacagtgacaaggattccaaatgtgcatagcccgagatagcagaacacaactctttacagtttcccggtttcaccccagacactccaagcttgcgcaattgggtaaggttcttcagctcttccaagatagccggcccctttgcgccactgacgtcgatgacgctgatattgtgtaccatcatcattttcccaatccctcggggcaccttaacgccaccattttgagagccaggaagcagctgccagcggcgtgtccatgactctggaaaccagaaccgggacactggtgtagcagcaggtggccttctcatcgatggtattgataacgatgggccggtagctgttgctgatcctgcttctggtgatggtggtaagctttcaacaatgctcgtggcgtgatccagttgcacagtagtgccagcacgaatgtgctgcagcttctttatcttggtgatgcacagtggaagcttgacaatggaggtgtgtctgatatccacagtctgaagctgcctcagaccaccaaaagaatccggcagacgtgtgatctctctgcatcctcttagggagaggaacttgaggcgaggcagcagcatgaccatctgttcaaggtcaccatctgttactgatgatgcgtcctccaaatccagcacccggagtatactcatcttgtcagagatgaagaatgtctcccacttaccaaaaaccgtcaatgaccgcagccgcgagaagtcgatgctctcatacacactcttgtccctgtcccaggtgctccctatggtgagatgccgtcctgcgtgtcgctgtgaattcacgctacaatgccccgccagttcaaagacaaggttctcttccattgaccgtgagacgatgtattcacggaggaagccattgacttgccacaagggcatcctcgtcatatagctcagacttgtagatcctggcacctggaccatgtttcggaagcagagcttttcaaaggactcctcccctttctcctcggcggtcatatctttggtgtccctggagtagccttccgcgatccaccgccgcaccaagcgcctccgccgaattttatggttcacagggaagatagacagatagaagatacatggcttgagagaatctggacaggaacggaagaaggaatccacccaggaaaataggtcgctta

SEQ ID NO: 18446 - DNA, 521 bp, Setaria italica
  Peptide Sequence Number=SeqID_84420
ataatcttgttacctgtaacattgatatccagtcttgtttaactggatttgttgtccatttcttgcctgttgccttgcactgaatcttcctagcccctggatattgctctgctgcctctgacacagctgctgagtagtcatggacgtggcaattgcaatagcccaagcatggcacaccttctgttagtcctgctgttgtagctcttctgacttttgatctggctaatttttaattccctattaagcctgcggtgcggtttgtatttaactaacaggtctgtgctgaggtaacaggttgaagttactcagttttcaacaagtctggtacatgtaaatctgatgcattcggacgaggctgttatcttgtcacgaaaatgttgggcgttcgattttgtcacaaatgtcaggatagttgatgtaggaagagttagtgtgttccttgtactggggttttgtttctgttggaaatatttcaggattgttaattttgggatagtcactgttaactgtattacgctttt

SEQ ID NO: 18447 - DNA, 868 bp, Setaria italica
  Peptide Sequence Number=SeqID_84421
tcgagttccacccgcagtgcgttagaaaggccccactgcggggtgcttcagcacctcctgctgcggagcccagctcacgatccgccccctgccccgtacctcctcccgcagctcagcaggaagctcgctggactcgcatccacgcaccagcctcgggcggaccacccacaggaaggagcgcttgctgccagccagtccccaggccatctccgtgagctcgtgcgcatcaatggacaccaagctcccgaagctgacgtatatcacggagcttggtggctgcgcatccagccattcgatgcagcttcggtcctggagcagcaagctgctgtccacggacggtgagaggatgtggagggggccgacggcgaacaccgggacaacgatgtcctggcagatgttggaaatgtccgtgccctcgatggcatccaacgtgttgagtatgaggcctgatgactgtcgtgcttcagcaaccatgtgagtgagcaggtctgcgtaggcgcggtgccgagtggcgtccctctcatgatgcaagtcccttacgagcaaaggagggagctccttgacgtccgtgtccaaattcgactctcggatgggcaaatagcctttctcctccagaagcgggaacgccaagtacatcctgaacttggccgcgctgctggtcatcagagggagcgccttaacgccgagctccctcgcaacgccaagcggcgcgaaccagtccacgtcggcgaccacgcagacgacgtcgcgcgcgccggcgaggtactccctgaacggcgcagcgcagctcctgttcagcgtgaggacgaacggcgcaacgtcgctcgactcggcgagctccggcgggacgccgtccctgatggacacg

SEQ ID NO: 18448 - DNA, 746 bp, Setaria italica
  Peptide Sequence Number=SeqID_84422
cgacgacgaccaacttgtgcttgatgtagcagagtcgacatgggatgacctcgttcttcactgcgagtccccggtgcttgttgagttctgggcaccgtggtgcggcccctgccgtctgatgcatcctgttatcgcagatgtggcaaaagcatacactggcaggctgcggtgtctgaagctcaacactgacgagaaccaggatgttgcaacgtggtacggcatcagaagcatccctaccatcttgattttcaagaacggggagaggaaggagacggtgatcggtgccgttaaggacaccacactggcaatgacggtggagaggttcttgtaggccacgcacaaggttgttcaccatctgctgagagaggtcaaagtggcaaagtgaaaagactgagattgcaattgcatacaggactcgtttagtgtttctttgatttttgctgatgattgctgtcgtcgttacgaaatacacagcctgctgcagacatgaaaagagataaagaaaaacatgttggtatgcatggtactagtgttacattatgtctctctaagaaaaaatgtttgctggcatgtttgccatctcatctcaggctccaccccagtgtaacaacctgctttaacttaactaaaaacagacaaaattacatcacgcgtgcatctttcaactcaaaattgaccgtgggttttattcgttcgttgtactattcgatcaagccatacaatcctgttgcattgtatgctatcaa

SEQ ID NO: 18449 - DNA, 652 bp, Setaria italica
  Peptide Sequence Number=SeqID_84423
gcttttctcaatggaagagagcgtgtttcacggtccaggaaggtagatagcacaatcttaagcacggacaacatttcatcagcccttgttgatgtatgtgaagaatgtgaaagcctccttgttgaggctggcagaagctacaggactgccctttcgatagattcgggtgacgtcaaggcattgtacaactgggggctggcacttattttccgggcgcagttacttgcagatatcggaccggaagcagcagttgatgctgaccaggtgtatctggctgcaattgataagtttgatgccatgctgtcgagaagcaacacttacgccccagaagctctctacagatggggcaccgcactgcagcagcgatcgcatctgcggcctcggaacaacagggagaagataaggcttctggagcaggcgaagagcttgttcgaagacgtgctgtatgtggaagcagataacaagatggtgagggaagcgctgtcatcatgcatatcagagctcaactaccatggccgatggctatagcctgttgtttgctttggcagtgcagttgcctatatatgtgctccctataaggaattcaggattgccgcgtgcatctttcaactcaaaattgaccgtgggttttattcgttcgttgtactattcg

SEQ ID NO: 18450 - DNA, 873 bp, Setaria italica
  Peptide Sequence Number=SeqID_84424
cagaagcaagactgttgtggtcaactttttgtttctctatggtatgtgagaactcctggaggaagaattgattggtttgaactggccattctctccaggacagcagttgcatcagacattctattttgtacacaaaggtagcgcggagactcaggtgtaagtccaaagaaaggaagcaagaggaagcatggaagggcggtaaatgccagtagccacctccaattcagtaccggtaatacaacctacaagaaccaaatacaaattactaaaatttgacagaaaagcatgtaactaataaaatataagcaagaagcatcattaaactgattaccaaatccaaaatttactgaaaattcaattatttacttgctgcagaaagttcaagaatttagactgcacacacattaagacatcataaatattgcgataaaataatatcaactgcatgcaaatgataaatgtgctagacatgaagcattttggcggtttcaatttcagaaatgtgcttgaatcatattccaccatatttgcataaaaagatcacattccaccatattctacataagtgtacacaaggttctttgtggttctgttctgtatattcattataatagagtttactcttcatttttgggttttgaattttatttaaacaatttgctcatgcaaatgggaacaaatcagcatgaaaagggggaagctaagcactgcatctcaaaggaacagaaattatcatacccatgcaagtgaagcctccaatattgtgccaagggtccagaaaagggacaagacaatcatacaagtgccacgatttcgtgcaggaacaaattccaaaaccagatgtaaaaacatggctgccaccactcctactcc

SEQ ID NO: 18451 - DNA, 526 bp, Setaria italica
  Peptide Sequence Number=SeqID_84425
catggaagggcggtaaatgccagtagccacctccaattcagtaccggtaatacaacccatgcaagtgaagcctccaatattgtgccaagggtccagaaaagggacaagacaatcatacaagtgccacgatttcgtgcaggaacaaattccaaaaaccaagatgtaaaaacatggctgccacccactcctactccaacgagaaaccgaagagccaccaagcataagtaattaggagataaagcactaagaaaacccattccactagtaaagatagttgaaaacaataaaccggtcctgcgtccatatttgtcggaaacaaagccccaagaacaggcacctagcagcatgccagcaaagacaacacttgaaatcatgctctcattctctggggagaggttccactcctctcgtatgaatggtccaagaaacgacaacagcatgagctccatggattctgcaacccaaccaataccagcatagacaaggacaagagcttggaatctcccaaaccccatcattgtgagag

SEQ ID NO: 18452 - DNA, 2039 bp, Setaria italica
  Peptide Sequence Number=SeqID_84426
aacaagagggcaaacaaccccgccaactctaccaatggcggttgcaatcccagcacctgttgagcgcacatacgatggatacacctatgaaaaggagcgagggaattagctgacaaggcatactctgctgcaagaaaataagttccaaaactgacaaagcatgttcagagttaggcccacagacaaacataaaggggatcagtaaaggatatgctattgactgagaggagaatgcatagtagatccaaatggatgtggaatactctctccatggattttcagattattatggtgttggaccctgttctacaagaactaatagatggtagttttacagattaatcaataatggtatagcaaataatgctatatgccataagaagctgatacaaacctctggagcataaagacacaaaattgtaaagctccccatggcacacgcgcgagcaccaaatagaagaatagttgtcaacaactcattctcatgaagtacaagtggtccaaggaaagcacagcatgcaaacatcatagaccacattgaagcttttcggccaaaccaatcaacgagaatagcagacagaattaaacctgggatttctgctagactagtgataaaagtatctttgtaaagattgccatctttttgggtgcatttcaaaaatcagatcagaactacagcttctattcacatcacttaactgcgatgtcagcaatgctatcccataataagcgaaggaacttgcatagtaaacaaaccaaagaagaagagttgatctgagcaagttatgtgataatagcgtgcgcaatgtagcaatagcaccagtgttggagcaaatagcattcacaactgtatgtttcttctctctgattggaatcaggtgttcatcctcagaaatattatgagtaacgcagtcggtttttggttctccatggtatgtgagaactcccagaggaagagctgcttggtttgcattggccattctctccaggacagcagttgcatcagacattctgttttgtgcacaaagatagcgtggtgactcaggtgtaattctgaagaaaggaagcaacaggaagcatggaagggcggtaaatgccagtagccacctccaattcagtaccggtaatacaacccatgcaagtgaagcctccaatattgtgccaagggtccagaaaagggacaagacaatcatacaagtgccacgatttcgtgcaggaacaaattccaaaaaccaagatgtaaaaacatggctgccacccactcctactccaacgagaaaccgaagagccaccaagcataagtaattaggagataaagcactaagaaaacccattccactagtaaagatagttgaaaacaataaaccggtcctgaaataagggaaatgtaagttttatctcatttatgcttgacatagaggaagtaaaaacaaagtaaagaatggtattgaaagaaaaggaaatatccaacttatccctttctagtttcatgaaagtacagattatatcctcttcaacaaaactggttctttactacccattttttaaaccagttcaatatgcaactattcttcaagatggttctcaaattcaaagtggttttgcaatgttgattgcttatgtggatacttattggtattcaggtacatacagggtagagggaatgaggatgaaaagcaagatgaaggaaaattatctatgctcttaccctgtaatccttgtgaatcactgtatgaggtagcttgcgtgttgacatggctagttagtttgctgacgaagcaaatctagcccagccgcatgccatgagcaaaccactaccaataccacagtaaagatgaaaattacacaggttctcaaatttgagaacgtgaaatagctgattttgtaataaagggtccaatatgtacttgcatgaaagtagaggatggtaaattagaacttatccttgagaacacattgcagatccctttttgtggtgtgtgtcaaatttgcaggtaattttatttaaatgtgctgtggcttcttactaaagtgcacta

SEQ ID NO: 18453 - DNA, 2435 bp, Setaria italica
  Peptide Sequence Number=SeqID_84427
tttttttcagctcgatttgcaaacgcactacatatgcaaaagtttgcttttcaatattttgggagtacagaatccacctgaagtatccaacaagcttggaaagccctgctttatattttgagggactgtccagcttcgtatacacatacaccatatttataacatctatacacaacgatggtagaaattgatgaaaatggtgaagaactagaactacaagtgatcatataaaattaatccattccacggcccttggtctctacagggaagaatatacagcccactgcagcaaggcacaataccacctcaaacaccacgattgcttccatctggtggcagctccgcagcatcgcaacggcaacaagagggcaaacaaccccgccaactctaccaatggcggttgcaatcccagcacctgttgagcgcacatacgatggatacacctctggagcataaagacacaaaattgtaaagctccccatggcacacgcgcgagcaccaaatagaagaatagttgtcaacaactcattctcatgaagtacaagtggtccaaggaaagcacagcatgcaaacatcatagaccacattgaagcttttcggccaaaccaatcaacgagaatagcagacagaattaaacctgggatttctgctagactagtgatgaaagtatctttataaatattggtatcctttttttggtgcaggccaaatatcacaccagttgcacagcttttatttgcatcactcaattccgatgtcagcaacactatcccgtaataagcaaaggaatttgcatagaaaacaaaccaaagaagaagagttgatctgagcagattgcgcgataatagcgtgcgcaatgcagcaagactaccagattcggagctcatggcatcgtctacagtacaatccttctcttttacaggaagaaggcattcactctcagaagcaagactgttgtggtcaacttttgtttctctatggtatgtgagaactcctggaggaagaattgattggtttgaactggccattctctccaggacagcagttgcatcagacattctattttgtacacaaaggtagcgcggagactcaggtgtaagtccaaagaaaggaagcaagaggaagcatggaagggcggtaaatgccagtagccacctccaattcagtaccggtaatacaacccatgcaagtgaagcctccaatattgtgccaagggtccagaaaagggacaagacaatcatacaagtgccacgatttcgtgcaggaacaaattccaaaaaccaagatgtaaaaacatggctgccacccactcctactccaacgagaaaccgaagagccaccaagcataagtaattaggagataaagcactaagaaaacccattccactagtaaagatagttgaaaacaataaaccggtcctgaaatagggaaatgtaagttttactgtaatccttgtgaatcactgtatgaggtagcttgcgtgttgacatggctagttagtttgctgacgaagcaaatctagcccagccgcatgccatgagcaaaccactaccaataccacagtaaagatgaaaattacacaggttctcaaatttgagaacgtgaaatagctgattttgtaataaagggtccaatatgtacttgcatgaaagtagaggatggtaaattagaacttatccttgagaacacattgcagatccctttttgtggtgtgtgtcaaatttgcaggtaattttatttaaatgtgctgtggcttcttactaaagtgcattattcagcattcaggtcaatttggtacacacttgcagttataatcatgccataccaagcatatattacttcctatcccttcaccgcatataccatagcttgatagcaagatatcataaatgtgcaagttgaaccttaataactgatatggttattcggttatgatatactcaagggtaagatttgtactagaaaactgaagcatgaaagtgtttgttgtaggaaaccatacctgcgtccatatttgtcggaaacaaagccccaagaacaggcacctagcagcatgccagcaaagacaacacttgaaatcatgctctcattctctggggagaggttccactcctctcgtatgaatggcccaagaaacgacaacagcattgagctccatggattctgcaacccaaccaataccagcatagacaaggacaagagcttggaatctcccaaaccccatcattgtgagagcatcatctgtagtatatgtctccatgttggcagacagcacccttgagccggaaggggagggaggatgggctgctccgctgccggcggcggacgggccggggccggagaggcggcgagctcctgtggcactggcgttgggtttcttccttcctttcttccgtgggagggggagggggttggtgggggaggagcaaatgcg

SEQ ID NO: 18454 - DNA, 566 bp, Setaria italica
  Peptide Sequence Number=SeqID_84428
aatttagacgtatttcagttgtcaccatgaaagatatggtggtgttacctagcatagataaggagcagtagtataaagtgagaacttggaggacatcatatgagaagtcattaagagttggtaataaaatatttagaaaacttcaatgtattcgagtattggatttgactgactccgttatacaaggtatgccagattgtattggaagattaattcatctacgattacttgatcttgatggaactgacatatctagtcttcctgagtccatttgttgtctcataaaccttcagatactaaacttgcagcgatgtgttgctttatatagtctccctctaggaataactcggttatgtaacctgagatgccttggtcttgctggatcaccaataaatcaggttccaaaagggatagctaaactgaagttcctcaatgatttagaaggatttccaattggtggtggcagtgataatagtgctagaactcaagatggatggaatctagacgagctgggtcctctttcgcagctgagaaatcttcgtatcattaagttggaaagagcatct

SEQ ID NO: 18455 - DNA, 590 bp, Setaria italica
  Peptide Sequence Number=SeqID_84429
cgccggcggcgggcgccacggccgccggcacggcactgggcttgtactggtgcctcctggcgaagacgaggaagacggcgaagttggcgacgccgagcacggcgagcatccagtagaagcggtccagcttcccgcggtcgaggttgttccggatccacgtgccccgcgtggcggcgtcgacggcgaagacgaggaagctgctgaggaagaagcccatggacagcgtgacgaggaagagccccgtgctcatggacttcatacgctcaggcgcctcccggatgaaaaactccagctgcccgacgtacgcgaacgcctcgccggcgccgacgaggaagaactgcggcacgagccagaaggcgctgatggcgacgtgcccgtccccgacggacgcgtcgcggcgcttcttctcgacgagcgcggagacgaccatggcggcgacggagaggacgagcccggtcccgacccgctgcagcgaggtgagcccctgcgggcggcccgtggcgcgggcggcgagcggcaccaggacgcgctcgttgagggaggtaaagagcaggatggagatgaagaggaacacggaaaaggagcccgcc

SEQ ID NO: 18456 - DNA, 1586 bp, Setaria italica
  misc_feature (4)..(4): n is a, c, g, or t
  Peptide Sequence Number=SeqID_84430
taancgtaatcagtgtccacaatcaatcctgcctctttccaggaagctcaccggcaggaaaattatttcagcaagtaagccccaagctagccattacaatatataaaaatcaagagaaaaacctttcttcagaaagcccaaaaggccaaggccaagccaaaaccctctgtcattctgaagacctcagcaaggcaacttgaagcccatgtacgctccgctggtgtactgcatcaagacatcctgcgctccgaagcaggtgacgatcaccgtgctgagcgccatgatggcggtcaccaggaacacgatcagcgagacccgcccggacttcctgatggcccgctcgatcacgacgagcccgacgaccgacgcgacgaagcatatccccgcgtaaacggaggcctgtccgatgccttccatgcccagcaggatgaactgaaccatggacatcgacgcgcagaacaggaccatgaacgaagacgtcgctgctgctgtctgcgggtttattccgatctgaagaagaacagggttgagaagcagtccccctccaatgccgaagaggccactcagagccccagtgactaaagccgccagcgggagtgtaagtgacggcagagtctccattgtagctgtagctcccacgagctctgccttgccatcctcttggctacagacaacgcgtttcttcctcttggcgtatatgatataccctgtgaaagccacggcggcgggtagctgggacgaagtgatgagccagtaggtgacgccgcagggttttatcctgatcacaccctttccgtgcttatctccaatgaggacatggagcgcgaagaagcagagccacaccacgaccagcagcgccacgtccttccacgggaaccccgcgacattgccgcggccgccgtcctggccgtcgctcgcgagcagcaggggctccgtgatgctgaggtgggcggcgcagcgtgcatccccggcgcgggtctcggagcgccagatcttgagcccggcgcggcacgtcttgacggtgcagaaggcgaggaacagggagaagagcacggtgatgagccactcggggaacatgacgttgcacaccaccccgatgctcacgcccaggagcaggcacggctggaacagcagcgcgacgtcgtagtcgatcagccgccgcccgccgccgcccgcgcacgccaggttgtacagcacgttcgacgccgcgccgcccgtcaccatgaaggacgagtaggccgtggcgcgcttcaggctcagccccgccaccaggttcaggatgggcaggaacagcgacccgccgcccacgccgccggcgctcgacacggacgcggcgaagaaggagagcacccacgcggccacggtgttcggccggaccccgcccgagggcgaggacggctcggccaggtggcgttcccgccatcgcgacacttcggcgaggaggccttggaggcggccggggtgtgacgaggtggtggtgttggacgctgccgccgccgacaagaaggagacggcgatggcggcggcgaggaggggggcgagttcagtagtcctcgtcatctccggcctctgtctgcttctttgag

SEQ ID NO: 18457 - DNA, 328 bp, Setaria italica
  Peptide Sequence Number=SeqID_84431
aagggggcgaggaagatggaggattacaacatcgccatgaagaggatgatgcgcaatccctacgagtaccaccacgatctcggtatgaattatgctgtcatcagtgatagcctgattgttggctcacaacctcaaactcctgaagatatcgatcatttgaaaaatgaagagaatgttgcctacattctttgcttacagcaggacaaggatattgagttctggggcattgatttcccagctattctcagcaggtgcaaagaacttggcattaagcacatcagaagaccggcagttgactttgacccagattccttgaggtcacaattgc

SEQ ID NO: 18458 - DNA, 845 bp, Setaria italica
  Peptide Sequence Number=SeqID_84432
tgttggtccttactatttcttttgttttactagtctaggtcctaaggacattgagtactggggcattgatttcctggctattctcagcaggtgcaaagaacttggcattaagcacatcagaagaccggcagttgacttcgacccagattccttgaggtcacaattgcctaaggcagtttctgcattagaatgggctatatcacaacgcaaagggcggatttatgtccattgcactgctggacttgggagagcacctgcggttgctattgcttacatgttttggtttgagaatgtggatctcaacacagcttacaagaaactaacctccataaggccctgcggacccaataagagggcgatccgtgccgcaacctatgatctagctaagaatgatccattgaaagagccttttgagactcttcctgaacatgcttttgagggtattgcagactgggagaggaagttaattcgtgaccaggtgcgtgctcttcgcgaagcatgagcagaagaagaaaagcttaacaatagcctcctcaatgactggaaatggagcatgctcatgatagtgccaattactcttaccagcatagcttttcaagtgcaacaacttcctttcatgcattaaacttaccttcccaagtgcagtcttcattgccagattattagacgttgaaatgaagaggtttgctcaaaatgctctcagtaaaggttaatagcttatacaggtcttatttgttgctaggtagttggtaatgagaaggaaataaagagggcgttcataggttacatgggtattctcagcaggtgcaaagaacttggcattaagcacatcagaagaccggcag

SEQ ID NO: 18459 - DNA, 253 bp, Setaria italica
  misc_feature (240)..(240): n is a, c, g, or t
  Peptide Sequence Number=SeqID_84433
catccggcggctggaggacgcgatcaagcactgcgcggcgcgccacaagtacctcgcgcgcaccaacagcccctccgacggccaggaggtccgctggtacttctgcaagctccccctcgccgacaaagtgctctcttcttcggtaccaaggacggagatagttgggaaaggagactacttccggttcagcgagagggactctctggcactcgaggcatctttcttggagagggaggaagngcttcttgcatac

SEQ ID NO: 18460 - DNA, 949 bp, Setaria italica
  misc_feature (906)..(906): n is a, c, g, or t
  Peptide Sequence Number=SeqID_84434
ggaactaaggcactccttgataaagattgtctcattggtggtgggtcaatcgtacggtgtacaaagcctcttttgaaaacggcctatccattgctgtgaagaaattggagaccctggggagggtcagaggccaggatgagtttgagcatgagatgagccagctcggtaacctcagccaccccaatttggttgctttccagggttactactggtcatccacaatgcagttgcttctgtccgaatttatggccaacgggagcttgtatgatcatctccatgggaaccgcccttatgctttctccgagagcagcagcagaggtggtggaggtgagctgttttgggaaaggaggtttaacattgcacttggagcggcacgagcactttcttaccttcaccatgactgccggccacagatcctgcatctcaacatcaagtcctccaacattatgttagatgggaaatatgaagctaagctggctgattatggattggggaagctattgccaattctaggaagcattgagttgagtagaattcacaccgccattgggtatattgcaccggagctagcatctccgagtttgagatatagtgataagagtgatgtatttagctttggggtggttttacttgagattgtgacagggaggaaaccagtagacagccctggagtggctacagcagtggttctgcgtgattatgttagggagatattggaggatggaactacatcagactgctttgatcgaagcctgaggggatttgttgaagccgaatttgttcaggtgctcaagttgggtttagtgtgcacttccaacacaccttcaagccgacctagcatggcagaggtggtacagtacttggagtccattagaactagttcttgatcttctgctgtcaaaaacntggcagaggtggtaacaggaaaggtgtttatgtatttttcaac

SEQ ID NO: 18461 - DNA, 366 bp, Setaria italica
  Peptide Sequence Number=SeqID_84435
tcatagagcaaatgtctaataaatgcttgcaaaattattttaaatgaaagaaggaaaagtccatgaggatatccttacctgcaacaaatcattctgaatgatatcacgaatgatacctcttgcgcgcctcgattctcttcttcctctccttctcctgcaaaaccttctgtgcttcctttcttctcttcttcttcctcttgtggaacccagtaacgaaatccctgcttggacgaggacgacgaggtggccctgacggtcttgccgtgggaggagaaggtgcagagcagttggtggagaaggcggccgccggcagccgcggggatcagcagcgcggcggcggcgatggggagagtggcggcgtcggta

SEQ ID NO: 18462 - DNA, 551 bp, Setaria italica
  Peptide Sequence Number=SeqID_84436
cgggcctaaacccgaaagaaaccaaactaacgacaatactaataggggaactagacaatcttggagccctgcactgttcgtgtgtctggcggtgagagcatgaatgccatggaagtgaaggaaggagctgagtcctactggctggtgaagtgcttcgatgacggcgaggccggcgaggagatcctaagctcctgcgtctcttgcaagaagaagctggatggcaatgactcctgcatttatcgcggtgagaaggcattctgcagtgggaattgtagggataatgaaatacttactgaagagaacagcatagcaatatcctccctcagctcagctagctcatcttcttccttcaacgatgacatattcatggccgaaatggttgtgctgacggcaccagttgatgcttacctcccctgataatggagcaatgctccgcgagccaggtagatgatcaataatgtcaaacggtgcagttttcaccaccgccatcatcggtttgctggttttgtaagttctgttccaatcctcaataaatgaccaatgaccaacta

SEQ ID NO: 18463 - DNA, 1023 bp, Setaria italica
  Peptide Sequence Number=SeqID_84437
gcggcaagccggtgctgtgcagcaggtcctacggggatgtgaagtctggtccagaggtcaccgtgcctggcggcgctcagcccggcgcgagcagccaccctgccgatctcggcaagctccgggcgtccgggtccctgccggcgtcgatcggcggcccgcgccggtacatcgggtccgtgtccgcgacggaggtggagcagtcggaggactacacctgcatcattgcgcacgggcctaacccgaagaccactcgcatctatggggactgcatcttggagccctgcactgttcgtgtgtctggcggtgagagcatgaatgccatggaagtgaaggaaggagctgagtcctactggctggtgaagtgcttcgatgacggcgaggccggcgaggagatcctaagctcctgcgtctcttgcaagaagaagctggatggcaatgactcctgcatttatcgcggtgagaaggcattctgcagtgggaattgtagggataatgaaatacttactgaagagaacagcatagcaatatcctccctcagctcagctagctcatcttcttccttcaacgatgacatattcatggccgaaatggttgtgctgacggcaccagttgatgcttacctcccctgataatggagcaatgctccgcgagccaggtagatgatcaataatgtcaaacggtgcagttttcaccaccgccatcatcggtttgctggttttgtaagttctgttccagcatttgagaaattcagtggcattggtcatttattgaggattggaagctccatctagaatttgccgagaccttatccctcggcttttagaacggagagcttgcctgcctttagcattgtaattttggtcctaaggctacaggcattgcaggttcccttcttttcattttctctcttctttggtttcattctgagcagcaatgacgatgttttcatgctgtaagttgcaacaatattttgagataatggcattgagctgctttttctgctgattcgagcagtagtgatta

SEQ ID NO: 18464 - DNA, 627 bp, Setaria italica
  Peptide Sequence Number=SeqID_84438
cagggtcatgaaatatgtcaatcagtagttattgcttgtaaaatcaatggaccctatggcctatgggcacgcattaggcgtgcataatttgtttgttccatgatctaccgctcagaacatcagaatatcatatagaataaaacaatacagaatgcagtgagctatacttagtcatccgtcgttgccgtggtgcatggtggcgcaaaaatgttcagtgaggatgtgagattcttcgttgctacgacttcatgactaccacgccgtagatagcaagtgcggctgctgcaatcatccccagggccgagcaagccagtatgttggtggccgcgttgatgacaactctggctggacgacctccggacccgaagttcatcagaaacatgagcccgaggccggatgcaaacgccgaggtcagcaggaacatgcaggtcttgtttgccgcggccttgtcgtgattttggtccgaatctccaatgaagcgtccaaagattaccatgactcctcccagcgaccacgcagtcacctgtttgcctatgtcagccatccaccccgagctgcgtctcctggatcgggttcaggtctggatgcacgtcgttgctgtcatcttgcctgccttcaaccggttca

SEQ ID NO: 18465 - DNA, 584 bp, Setaria italica
  Peptide Sequence Number=SeqID_84439
gtggtgctggcgctgtggtggtgcgggcgcggcggtcccctcgctggcgatcaggtccttgtcgctgcggatcggggccgcgtcgggcgctgggggcgactcggctttcttcaggctctgctggtggtagatttgcctcagcctctcgatctccttcttcagtgcctcctgatgagcatctttgaagatcttgtcctgcgcgagcgcggcgattcgctgcttgaggtggctgttccccagcgtcagcagcgagcgctggtggtcgaggaaggcaacgcgcggggataacgccgacacctccgtctgaagcgacgtgacgctgcgctccagctccgagatgtactgcagcttgcgcacgcgcgaccgctgcgccgactgccggttcgccaggatcctcttgacacgcttgggatcgactgcggcggcggaggccggctgccccggcgcggcgtcgtccccgtggcacttgctctgcgcctcctcggtctcgcccctgtccgtcttctcgtcattgatgctgttgtggtcggacggcgacgacgagctcgccacgggcgcgggcgcgggagcggcttgctgctgcg

SEQ ID NO: 18466 - DNA, 262 bp, Setaria italica
  Peptide Sequence Number=SeqID_84440
ggtgggctgggtggcgacgcggcggacggagatgctaccggtgacggggaagtcgtgggggtcggcggcagttgcctgcgtggcgtgcacggcagagcacgtgcggcacgtgtactggccgtcttcagcgtcgtcggcgctatagtcgtcggcgatgctgcagttatcgcataccaggcggatggtgccgccgccgccgtaggggtcgggagaggcgccgccgtaggggttgtaatccatggctcgacggttctgtgggcgg

SEQ ID NO: 18467 - DNA, 519 bp, Setaria italica
  Peptide Sequence Number=SeqID_84441
gagggcggcctgggcacagtctcgatggggatcctctacacctccttcacgctcttctccgtggccgcgtcgccagtggtcacgcgggtggggcccaagcgcgcgctcgtcgtcggcagcagcggctatgtgcttttcatcctcgccaacctcgtcccgaaatggtacacaatggtgccagcttctctctaccttggttttacggcatcgatcatttgggttgggcagggtacataccttacttcagctgccctcagtcacgcaagagaaaataatttgcccgagggtccaactttagggagcttcaatggggagttttggggaatgtttgctagcacacaggtcattggaaatttgatctcgcttgctctactgagaaatggaaaggatggtggaagtgttaccggaaaaaatctgctatttgctgtgtttcttggctgcatgattgtgggcattgtactaatgtgtttactttccgaaaagagatgaggaaaagagataatgcctcccacacattcc

SEQ ID NO: 18468 - DNA, 259 bp, Setaria italica
  Peptide Sequence Number=SeqID_84442
cgcccgaggagctcgatcgggtcggagacaacgtggccgaagatggcctcggtggcggaggtgatggcgagcccggcgaaggtgaacattcccatgaacactggcagcccggcctggccgagcacctggtccgcctggctccgcgcgtaccgcgcgaagtccgggatgttgatggccaccgtcgcccagaagctgatgttcgcggtgagcgacgggaagaagaccttcctgaactcggcgcctgtcagcctaggcggca

SEQ ID NO: 18469 - DNA, 256 bp, Setaria italica
  misc_feature (252)..(252): n is a, c, g, or t
  Peptide Sequence Number=SeqID_84443
accaaagcagagcaggcggcggcggcggcggcggcggttgcggccatggagctgtcgatgagcggcagctctctgcggacgttcggccggtgcgtgaccttcctcgcgcgcgtcgcctccgagctcgtcctccaggcgcaccccgccaagctggagctgcacacgctcaacagctcgcggtcggcgtacggctcggtctccctcgcgcgcgacttcttcgaccactaccacctcgacgccgcggcttcggcnccgt

SEQ ID NO: 18470 - DNA, 1582 bp, Setaria italica
  Peptide Sequence Number=SeqID_84444
tcgtcttaaaaaataagaaaagtcatctacaccgtaagttacagagaaccgtcgcaacagacccggtgaaaaacaccatagctgtagcaaatcatgtccaaaccaaaccaaagatgctcttgtgcataaaccgtatacagcccatgtgcactcgtcaaatggggcaactctctgttttgtccacgtgcagaaaagacacaaagatacatctgtgcattatataaaatgcttggaacaaccagcaatacaaatatcagagccatctccatttgatccatgccatcccaagatccagatttgtcagcaacgctgtccagctgatgacttccttagtctcttgggttcaaattctgatgtacacatcttgaccatttgggccattgttcaatgtggggagagtgcagtgacaagaccatatcctgcaaaagccagaccaaacagaagaatcacgtagtccagcacccgcctccacaaggacattgacgagcccacaatgctgagatggaagagggcgggcagcacgaaggagaggagcgcgcacattgtgctcccgatgaatgagatgaatgacccaaaggcagggatgaaggacgccaccacagttaggatggccaccacgaggatgcggcttgagtgcaggcctagccactccgcgccacgtacattgcgggagagcttctggaagcatccgcttgatctgaaccttgtctcgacgatctcatggatcgggtgcatcatgactgggaatgttaacgccagcgcaacacataggccaaccttaactgcaactgacgaccaattgtttggaagattaagtgttatgatgtctttggtggcgtcaccataggccaagtacccacacactccaaaacacacgtacacggttatgatggcggcaactgcttgagaaagtaccccgcggaactttctccgctccgccattgatgcttccagtgcaagggtcatgctgaatccttcaaaacagaagactgcaaccccaaaagtgaatggtactgcccacagtccattaaaagcacttctgtttgcaaatggatgatcaaaaagctgaagatcctctttgatcacaattgccatggcaaggacattgcacacatctgcaaatatactgaacggagaaagagaagacagtgaacggatgaaggagagagcgatctgcacaggcaggaggatggcaaagatgaagccagctggtgacatctgctggctgaatatggaatgaagattttgaccaatgaatatcaggtacgctacagaaccacccgcctgggaaacaaggatgaggatttctgtcaggcatcggcctacagtcccgaagcacctttcacccaaatccccatatgtatagtgaccatgatagcactcctcggtttcgtcctcttcgagtttatccctgcagtccactgacgagtaggagcatgcagtagagcgtggcgaagccggcggcggcgactccgacggagcccgcgagccagccggcggcgctgaaggcgtaggggaggccgagcacgccggtgcccacgatggagaccaccacgttccccagcgtctgcgccgacgttcg

SEQ ID NO: 18471 - DNA, 1320 bp, Setaria italica
  Peptide Sequence Number=SeqID_84445
tttttaaagttttaagttaagttgaaacaaaatattcattcttatacgttcgttaactactacagctactaccaacatggcaacatgtagcattttttcgcgtatatatgctacatcgctcgtacatcatacgacacacgacaagcagagacccgcacacctgaaggcgttcacagctcatgattcatgaacgacaactacttgtaggagggagagcagctagctacccaagtacccatacgcatacgccacgtctgcctgcgtcctcaagggagatcaaggcagcatgcagcccacggccacggccatgcatgtccagctgcgcgcgtgcacacgtacgccaacgacgtcgtggtgacatgcgcacgcgtccgacccgatcatcagaacgcgaggctccggggcttcacggcggcgagcagcggccggtccatgaccaccgtgaactccaccttgtccttgaagtccggcggcggctgcgacgggtgcgcgcgccactcgaacgcctgcaccatccgggccaccatcagcgcgatgtgcgtcgtccccatggccagcccggggcagatcctccgcccggccccgaacgggatcatccggatccccgccgaccccgtcatgtccgccgcctcgccgccggacaggaacctctccgggtcgaactccgccggccgctcccacagcttcgggtcctcggagatggtcggcaggaagatgtccaggttcgcgtccgccggcacgtcgtacccggcgagcttgctccccggccgcacggcggcgtgggtcagcgagaagtacgtgggcgggtgcttccggaggagctccttcacgaacgcctgcaggtagggcatggcgtcggtgtccttttcgtccacgggccgcgcgtcgccgacctgccgcgcgatctcctcgtggagccgggcctggatggacgggttgtccacgatgcgcgccatgccccactcgatcgcggtcgccgtggtgtcggtcccgccgtttatgagctccgcgcagagcgtcaccagctcgtcgtcgctgggcgcgccgtcgcggccctcgacgcggaggtcaagcagggagtcgaggtacgagaagggcgcggcgacgctggggtccggcggcggcgacgaaccctgcatctcgcggagaatggcgcggcgccggttgatgagcgggagcagcgtgacgacctgctctgcgcgaacggcgagggcgcggcgctggtgccgccagaagaaggggcggaggaacgggaggtagtcgtccatgcgcacgccgacggcgagcagcacgcgcttcatgacggcgtcgatgcgcacg

SEQ ID NO: 18472 - DNA, 290 bp, Setaria italica
  Peptide Sequence Number=SeqID_84446
cggcgaggaagtagagctgggtgccgactgcggccatggtgaggtagagccgctgagccgacgacgggaggctggccagcagcgacaggtctggcagggcggagtgatcccagatgctccagatgttgagctcgccgtcgtagacctccacgtggcccttccagctgttgaggcagtcgccggagctgaacagccggtccgccaccgccacgatctgattcgggggcacgtcgagctgccacatccccggaaggatctcccacgtgcccctgagcagtggaacacctccg

SEQ ID NO: 18473 - DNA, 604 bp, Setaria italica
  Peptide Sequence Number=SeqID_84447
taggaaactaagaaaaagaaccaaacaatttacaaaagaacccaaaaggtttagaaataggacaagcgaaagagggctggagaattagctaccggtcgaatttcacatatacatccgaatgggtgtcttgtcgtgaaattcccaggcaaatttagccttggtgaagtatgcagttgcttggcagatccttctgaggtggaggtagtgagctttgacaagtgtgaggggatagtaaagaagtatgagcatcttgaagactttcattgggcagtaaggcccctgttcatcgctataggtttcttcaccgctctcaagctgggtgtgattgttgggaagagcattgcaaggccaaggagtcggaaggttgccagcatctctgatcagaatgatgattacccgcaacagcaggtagtccaaaacaatgctaatgcagcatggcttcctccaccagttgcaaacatgtttttcatagatggtgctgcgtcttctggatgagaatcataagatcaattcaaagatgagatctcctaaatatgcacaactaggatcggctgaagcactacgtaatccagaattccccatgctgtttccaggagatctcatc

SEQ ID NO: 18474 - DNA, 1947 bp, Setaria italica
  Peptide Sequence Number=SeqID_84448
accggtaccacgaggttgcggtgaagatgctgcatccaatcaaagaggaccagctccagctcttctcagcgaggtttgatgaaatcttcagcaaatgccagggtctcagcaacatttgcttcctacatggcatctcgacacagaatggaaggatttgtatagcgatgaagttttatgaaggatctgttggtgacaagatggctcggcttaaaggtggaaggcttcctttgccagatgttttaagatatgggactgatttggcacgtggaatattagatctacacaataggggaatattgatcctaaatcttaaaccttgcaattttctaatcgatgaacatgaccgtgctgtgcttggggattttgggatcccatccctgctgttcggactttcactgcctcatccagaccttatccaaaggcttggaactccaaattacatggctccagaacaatggcagccaaatatcagaggtccgattagttatgagactgattcatggggttttgcctgcagcatccttgagatgttgagtggtattcagccatggcgtggaaaatcaccagatgagatttatcagttggttgtcctgaagaaagaaaaaccaatattcccatacagtttgcctccggacattgaaaatgtgctttctggatgctttgagtatgactttagaaaccgtccctcaatgaaagatatcttgcatgcatttgagagtgctaaagatgcagatcatgacaacattggctgggacaactctgaaaatgtatcggtggacaggccaaccatgacaaatcacactaattggttgcttttcaaggacaagctgcaagtgggagacaagatccgctcaagaaagcttaaaaactcgtgtagtcctgaaactatggaaatccctgatggaaccatagttggcatggaggatgatggggaacgtgatggttacattcttgtacgagtccatgggctacacgatcctttgagggttcgctgctcatctgtggagagggtaacatatggttttgctgctggtgattgggtacgcctgagggaggaggacaataaacgttctcaggtcggtattcttcatagcattgaccgtgatggtacagtggctgttggtctgataggaatggacaccctttggaaaggtaattattcagatctccaaatggctgaagcctactgtgttgggcagtttgtgaggctgaaagccaacatttcaagcccaaggtttgaatggcagcgaaagagggctggagaattagctaccggtcgaatttcacatatacatccgaatgggtgtcttgtcgtgaaattcccaggcaaatttagccttggtgaagtatgcagttgcttggcagatccttctgaggtggaggtagtgagctttgacaagtgtgaggggatagtaaagaagtatgagcatcttgaagactttcattgggcagtaaggcccctgttcatcgctataggtttcttcaccgctctcaagctgggtgtgattgttgggaagagcattgcaaggccaaggagtcggaaggttgccagcatctctgatcagaatgatgattacccgcaacagcaggtagtccaaaacaatgctaatgcagcatggcttcctccaccagttgcaaacatgtttttcatagatggtgctgcgtcttctggatgagaatcataagatcaattcaaagatgagatctcctggaaacagcatggggaattctggattacgtagtgcttcagccgatcctagttgtgcatatttaggcctgaaatgttttatctaaacacttatgtaaatatctgtatcttctctagttgtgcaactctgcatctcagattctgtacgtctactctgtaatcatctccagatgtcttaaatatacaattacatgaagctagatttcctacctaatcgactgtttaaaaaaaaacaaaaa

SEQ ID NO: 18475 - DNA, 579 bp, Setaria italica
  Peptide Sequence Number=SeqID_84449
cggcgagtggtgggcgccgctggtggggtggtcggggaaggccgactacctggaggccccggcgccggtggtggcggtggcgcaggacggcgcggcggcggcccggaggcagttcgtggggggcctgacggaggagaaggcccgcgagctgcgggcgcggatggcgcagacggagtcgttccacgacgccatgtaccactccgccatcgcgtcccgcctcgcgcgctccgcctagggccagtaggccgccgccgcggggacgaggaactcgccggcgccgcggggacgaggaactcgccggcgccgcgtgtacatagtagtagtagacaggtagtggtagtcgttgtcgaggaggagcgggacggggttccggttttagcgcgcgaccccgttctggtccatctccgactccgcattttaccgtggatgtacagatggtgctgtgatctcggcctaatgtggtttacatcatcacaaactttgttgttttgatccgattggtgcttagatgtgtgatgatgataaccaaaaaaaaaaattcgtctatccacacaagccgcggatgaggctcccaccgcc

SEQ ID NO: 18476 - DNA, 711 bp, Setaria italica
  misc_feature (641)..(711): n is a, c, g, or t
  Peptide Sequence Number=SeqID_84450
gtggcccgcgccgcggcgggtggcggggagggccgtcggcaagtggtgggcgcccctgctggggtggtccgggaaggccgactacatcgaggctccggcccccgcggcgaaggaggcggcgtcggcggccaccccggggagggcgttcgtggggggcctgacggaggagaaggcccgggagctgcgcgcgcggatggcgcagacggagtccttccacgacgccatgtaccactccgccatcgcatcccgcctcgcccgctcctccgcctaaggccgtggagacgacgacgagagcgacccgccgacatcgccgtagatctggcgctccgtccgtgtgcgcctacatgtgtatatgatatgcctgtcgcgaccttttttttttctttttcttctttggattggggattcgttcccccattgttgttgttgccgaggaggagaaggcaagagagcaaagggagggggatctggttttaaaagtgacctcccttcgccgcctccccgatctggagcgcgttgttcccaaatcatttccggtctgcgctgaaatgccagatccgcgaaaagttgttgcgaactttgtactgctactcctgatgaaattggatctcagacattgttgctgaccaaaaaaaaaaaannnnnnnnnnnnnnnnnnnnnnnnnnnnnnnnnnnnnnnnnnnnnnnnnnnnnnnnnnnnnnnnnnnnnnn

SEQ ID NO: 18477 - DNA, 316 bp, Setaria italica
  Peptide Sequence Number=SeqID_84451
atttatcagagaacatttatatatacatctaatgattactgcaacttatctgcttatgttctaatttttttctttccttaaatttgcagacgagaagaattttgtagagcagtggctttcttcgctccagaactgatagctcaggcctcccctagctacgtgtaaatactaaatagtatcactccgtttcgttctactaagtttgtctagacgcagaatgtatcgatgaaggaagacatgaaaaaacccccaaaaaaagaagcaaaaccaaaagaaaacaatgagcagtgggattctgaagcagcacgaatgggta

SEQ ID NO: 18478 - DNA, 1089 bp, Setaria italica
  Peptide Sequence Number=SeqID_84452
ttcgtctttctacgtctaatggctgtggccggtcggctccgcggcgcgggtgtccacccacgagctctcgagcgcggggctgacgagctcctccttcccggacttcccctccggcttccgggagcccgacaccgtcactttctacaccggcggcggcggcggcgcgggcggccgccgcacgcgcccgaggagggtcaggaaccggcgccgcagccgcggggagtcccgggtcgaccgggagtacgacatggtcatcgtgccgtctgacggcggcgggtgcctgtccggctcagactccgacgactccgactggtccatcggctggctcgagccccaggcgccggagctgcagacggacggcgaccccgagaactgcttcgccgtcctcgtcccatgctaccgccacggccgccaagagcagcctgggaggcgcgagggcaggtttctgggcgccggagccctggccgacggtggcctctctgacgagaagaattttgtagagcagtggctttcttcgctccagaactgatagctcaggcctcccctagctacgtgtaaatactaaatagtatcactccgtttcgttctactaagtttgtctagacgcagaatgtatcgatgaaggaagacatgaaaaaacccccaaaaaaagaagcaaaaccaaaaagaaaacaatgagcagtgggattctgaagcagcaccgaatgggtatgtccttcctgaggttccaaggctattctactcttgcaatgcaaggcgaatgctgaacagtacaagctgtgcgtcattgaaaaaagatttttgccgtcctgatatgtgctgagtgctaacattggattgataacatgtagagatgaactgctattccattggtaaattgtcccacttgcttggggacctcgaattctactgcctgtacatactttcttgtagtgtatatagtcggcgtagagctgcggttgtgtgattcttcgtttgtggtgcgtgtgcgtgttatttcttgtacattggaactgaatcccttatgaatcaatcagtctgctgtatatctttcctaattaattgtgaattttgatctctgctgagtgt

SEQ ID NO: 18479 - DNA, 461 bp, Setaria italica
  Peptide Sequence Number=SeqID_84453
cgatgttgttatcggagctgccaccttcactcacagctcgtttagccttctccttccatccagtagcattctgctgatactccatgctcctctcgccatccatcacctccctcacacacctctcaacctcctccttcctgacaacgccctcctcgtcaggacgcacccgaacgcccactcgccacacgtcctcaatgtacttggcattcgtgggttgatcggaccactgcggcatcgctaccattggcacgccggcgcttagcgcctccgtcgtcgagttccacccgcaatgcgtcacgaagcaacctacggccggatgcgctagcacctcgagctgggggctccatgtcacgacgaggcccctctccttcgccttctcggcgaagttctcagggatcttcgccgtctcggatgccctgaccacccacaagaatggcttgccgcagttgcacaggccctcg

SEQ ID NO: 18480 - DNA, 296 bp, Setaria italica
  Peptide Sequence Number=SeqID_84454
ccacttgaaggactcaaatgtttcatcatacataagagcagcaccaaaactacagtttctctaaaatgattgaatccgacaaagacaccaaaaggcttgttctccttgtctgttccaaaagtagtgtcaaaactaacaacaggtcaccaaaatgtgcatagtccattatcattttagcatcaacccagaatatatttgctatttgttcttcacagtccatttgcaatacatattggaatgatgggttctcagtaattttgtcttgaaaatacttaagcatgctacctgcttggcca

SEQ ID NO: 18481 - DNA, 452 bp, Setaria italica
  Peptide Sequence Number=SeqID_84455
gtttttggttaatcttcttattttgaacaatttatgcatctggtattgaggttgccattagctatttttcttgaaattatttctttcattctaaattgattggagtcgctccatttcttaaatacttgctgatttgtatttcttctacttgtccattgtgcagcgcaattaccgttattttttcctgtttgtttcctcttcaagtctcctctgcatttatgtgttcgctatatcagccttgtacatcaagtttctcatggatggagactatcctacagtgtggaaggcgttgaaacactctcctgcttctctagcactaatgatatactgttttattgctctctggtttgttggtggactcacaggatttcatacatatctcatcagcacaaaccagtgtaaggtttgtcttggagaaagcacatcgcatcccttagataatctgagacctc

SEQ ID NO: 18482 - DNA, 283 bp, Setaria italica
  Peptide Sequence Number=SeqID_84456
gctggaactccaggcccgtgagtggcgccgggaagtcgtgctgcctccgaccggacagcgggttcccataggcagccggcgcggcggggtaccggtcgttggccgtgtagtacgcgcctccaccaccgtagccggccacgtcgtagtcatagccaccggcgccggcgccgtagccatagccgtacccgtacccgtagccaccgtacccgtatccggggtctccctgcatagggccgctcttgaagtgatgcttgatttctggcagtgtttgtgcgggaattcg

SEQ ID NO: 18483 - DNA, 1218 bp, Setaria italica
  misc_feature (1147)..(1218): n is a, c, g, or t
  Peptide Sequence Number=SeqID_84457
gactcatcctcgctggagacctcatctggggtccttgacacccctccacgaggcactgcgttctggaggacaagaagatcaggaagaccagggaagattgtgccagcctgagctctgctcaatccaaggactcaaactcaaaggagagcaccaaaagaggggaggaaaagagagagaagcagcaaggaggtagatgaggaggaggagcccaaggggtacatccatgtcagggcaaggagagggcaagcaacagacagccacagccttgcagagagggtgaggagggagagaatcagtgagaggatgaggatgctgcaggccctggtccctggctgtgacaaggttactgggaaagccctcattttggatgagattatcaattatgttcagtccttgcagaaccaagttgagttcctttccatgagaattgcttccctgagtcctgtgctgtatggttttggcatggacagtgatgccttcagtgaccacactcaaaaaatggaaggaatgctccaccatgaggcgcttgcaatgccgacctctgtcatgaaccgagctccatcccaagctatcatggacacaaacacctccaactcctctccctcctacgagcttcacggcgatggcagcgccaacatcactttccctcaggacagtggcagctacatggtgcaagagccaaggcaagagctgttcaatcaagtggctttcagtaaccacatgtgctctttccagtagaaagagagaatgagggagaaaccaagtagaggaccctacgcgatgacgacaggaggaaataatgctgtgatcgacggaggtagaaggtagcaccagatgagtttgtgatgttggacgtaatccatccccttgtctggtggttgtaacgggaccctgcagtagctagcattagcagtagtagtagactttgttacacgctattagatttgaagtctatgttagtatgacctcagttaggcattgttgctcttggggctcttcccaaagggtttcttgccattgtactctacctggaaaaaggaaaaaaaaggtcatttgttcatacaaaaagtaaatttatgctgcccattgagcgactgtgtctcactaagttttgaatatatatttacagcatggaaattggttaacnnnnnnnnnnnnnnnnnnnnnnnnnnnnnnnnnnnnnnnnnnnnnnnnnnnnnnnnnnnnnnnnnnnnnnnn

SEQ ID NO: 18484 - DNA, 466 bp, Setaria italica
  Peptide Sequence Number=SeqID_84458
aaagaacaggcaatgatggagccactggtagatacagtggatgcaaatcagattgtcactaactgccagttactgaagacaatggatatatccaaaatgacccctggggatgcttcctttactgtgcccttcaagcttactgcagagcggaatgattatattcatgctcttgttgcatatttcaacgtgtcattcaccaaatgccataagctgatgggcttctcaacaggcccaagatcaaaagccactcactggaagcaaactgttctttaccttgaggatgtaataacaatctgcgagggggaaaccctggggcatctctcgtttgctcattttggtcaccgcatcttgtagaactgtgttcttgatacctgacatctatgcccatttagcatgtacttgagcttaatgtcgatgtcccggggattctttttattgggtgtaaccgtcatgctacccgtcaggg

SEQ ID NO: 18485 - DNA, 1477 bp, Setaria italica
  Peptide Sequence Number=SeqID_84459
tggatcggcgcaagggcggcgaccgcgacgccaacggcggccttgcggaggcgacggcgtcgaggctgaggttcgactccgacgaggaggcggagggggtggagatggaggtggaggagagccccgaagcggcggagggggaggagcagcaggcggaggaggaggtgatcggcagcgacaagaccagcgccgattactacttcgactcctactcccacttcggtattcatgaagaaatgctaaaagatattgttcggacaaaaacatatcaaaacgttatcacccagagtagctttcttatcaaggacaagatagtccttgatgttggcgctgggactgggattctttcacttttctgtgcaaaagcaggagctaaacatgtctatgcgattgaatgttcccagatggcagacatggcaaaggaaattgtgaaaacaaatggatattctgatgtcataactgtaataaaagggaaagtggaagaaatagagcttcctgttccaaaagtagatgttataatctcggagtggatgggttatttcctcctgttcgagaatatgttgaacactgtcctgtatgcacgtgataaatggcttgctgatgatggagtggtcctaccagacaaagcctctttgcatcttactgcaatcgaagatgcggaatataaggaagacaaaatcgaattttggaataatgtatatgggtttgatatgagctgcataaagaaacaggcaatgatggagccactggtagatacagtggatgcaaatcagattgtcactaactgccagttactgaagacaatggatatatccaaaatgacccctggggatgcttcctttactgtgcccttcaagcttactgcagagcggaatgattatattcatgctcttgttgcatatttcaacgtgtcattcaccaaatgccataagctgatgggcttctcaacaggcccaagatcaaaagccactcactggaagcaaactgttctttaccttgaggatgtaataacaatctgcgagggggaaaccctgacgggtagcatgacggttacacccaataaaaagaatccccgggacatcgacattaagctcaagtacatgctaaatgggcatagatgtcaggtatcaagaacacagttctacaagatgcggtgaccaaaatgagcaaacgagagatgccccagggtcccctaaattttgtttaactgagtatcctttggcagaagtgatgccttatctcatggtcatgtattaagtatgcatcagttagattctttggaatctatcgaaggtagagagtagattaaactggcccgcagatgtgagttgctgtagtgcaaaacttttagtatgtctttgcccaaggatattggcagatgttggcggttgttgacttatatccatctaaagattgcttttgcactttattgtgtttgaaatattcagatagtccttgccccgttttgtgctcaaaa

SEQ ID NO: 18486 - DNA, 332 bp, Setaria italica
  Peptide Sequence Number=SeqID_84460
ttgctgaacttgggcttcttccgtgtgatggcgatggaaacgtcgttggggaagaggtccctgagcacgaaggcgtggaacaccgtggtgaccagcagcccggcgacggtgacggtggcgatgccggagagcccgatggagagcgtccgggtgaggacgttggtcacctccgtcgcgtaggtgatggtggccaccgacgcgccggtcatcgggaacgtgtacgcccaccacgccagcgagaaccggaagccccggaagaagttgatccgcacggccagtgacatgtagaggaagagcgcgatgaagaagccgatccgtgcgccggcgtcgaa

SEQ ID NO: 18487 - DNA, 1143 bp, Setaria italica
  Peptide Sequence Number=SeqID_84461
gcataatcttccacgacaatcacccaccatttcatacgacgcaatacactctgtacatgtagtagttttaccgagtactaatatagctgcaatcgatcgatcaaaagctcttcctccattttatacaccacactaagccaagcaggcaatccgagaactgccccccggaatgaacgatccaagctacccaagaacccggtcgcgtcatgcccccacgcacggcgtacgtgaagctcggcgactccggcgtgcattcagctcgatccggcggggtccatcacttggcgccggcctcgatgtcgttgctgctgttggtgctgccgtcctctccctggccctcgtgcagctccatgatgggcttcatcttgcgctcggtgatggcgatggagatgtcgttggggaagaggttccggagcacgaaggcctgcacgagcgtggtggcgaagagcgccgtgacggtgagcatggcgatggcggagagcgcgacgcagagcgccttggtgaaggtgttgtccacctccgtcgagtaccgcgtcgtcgcgatggcggcgctcgtcatcgggaacgtgtacgcccaccacgccaacgagaacctgaacccgctgaagaagttgatccgcaccaccagtgacatgtagaggaagagcgagatgaagtaggcgatcctggcgccgtagtcgaactcgccgctgatcctggcccaggccatggacgccacgctgggcgccgccacgaagaggaagaacaccgggtggagctccttggggagcgtcacgttggtggggagccgctggtagagcgtcacgaagagcaccatgtagtgcgcgagcccgacggcgaagaagaaggtggggccctcgcggaggcccatcttggcgcccagcagcgcgccgacgaagttgccgacgatcgagaggtggttggacgggttggcgaccttggacagccggcgctgcccgccggacatccactggccgtagatcttgagctccaggcagaagatgggcgccatgaggccgtaccagacgccgtggtgcatctccgccaccagccgcggcgcgcccagcaccaggaacaggcacgcgacccacggcgcgaagaagaagttggcgcggatcgggtggtagaactcgcgccgcaccg

SEQ ID NO: 18488 - DNA, 272 bp, Setaria italica
  Peptide Sequence Number=SeqID_84462
agaccctcctaccttcaaattgaatagttgaagacaccggagtatttggacttgtgtgattgagtaggtgaaaagtttccagagcaattcccaccttggtctagtcccacaatattgtaaaatgctgaaatactgtttcagttgaaagatggcatgaattcctcgttgtggcctttccagtggctgccaagaggtttcaaatgctgagtctagattactgaaaatacagtgtgccttcaattgatcttattgtatttgctcagacctcagaa

SEQ ID NO: 18489 - DNA, 240 bp, Setaria italica
  Peptide Sequence Number=SeqID_84463
acgaagttgataccctctcattcagccatttgatgatgtctgaaaacacactatcaatgttctccttaggttcaccagaagtcaaagcatggcacatccctgggtacaactttagtgtcttatccttgctctccgctaatgtatatagtgcctcacttacagatgggtcagtcacagcatcaccaccaccgtggactatgatgaacggtagagtaaccttgtcaagattgttttcgatat

SEQ ID NO: 18490 - DNA, 844 bp, Setaria italica
  Peptide Sequence Number=SeqID_84464
atgcagatctttgttcaagacccttactggcaagaccatcaccttggaggtggagtcttctgacaccatcgacaatgtgaaggccaagatccaggacaaggagggcattcccccggaccagcagcgtctcatcttcgctggcaagcagcttgaggatggccgtacccttgccgactacaatatccaaaaggagtcgacccttcaccttgtgctccgcctgcgtggtggtatgcagatctttgtcaagactcttactggcaagaccatcaccttggaggtggagtcttctgacaccatcgacaacgtgaaggcgaagatccaggataaggagggcatccccccagaccagcagcgtctcatcttcgccggcaagcagctggaggatggccgcaccttggcggattacaacatacagaaggagtccaccctccacctggtgctccgtctccgtggtggccagtaagtcttggggctgtcgagctgctgtcattcctgggttcacaagtctggtgcctgccttgtctctccaatggagattgtctgcgtgtcctgttgttgtgtcatggtcgagtcgtgcccgtctgatgtgcgtcttatgtcgtctggtggtgttttgtgaacacttgctgctgtgcagcagtttggttgaactatgtgatgaataagtgaaccctgaaattgctgtgtctatctgtctgttaatggtttctgccgttctggatgtttcgttgctattatacggtttattcatgtttatgaagtggaagcactaaacttttcctggtgcgttgcttaaacagttctgtatatgttgtgatgatgatagtcggtattgctaattatg

SEQ ID NO: 18491 - DNA, 399 bp, Setaria italica
  Peptide Sequence Number=SeqID_84465
cgagaagaagaggttctggttcgatctgtcctccttgggcttcttgaacttcttcacgatgcagttgccggtccggaggagatccttgagcctcttctctttctgcacacatttcaggctccagggtcatgacactggtacttctactcgtactgtagcaaatcatagcttttgccggcactatgttaggcacttaccttctgtaacgcggcatggatgtgcgccataagatcatgatctgaagggtcctgaagctccacgtgggtgctcgacaagcccttgatcactgatgtcggtgtcgtctcgactttgtcggccttgatgaactcccacaggatgtgcatcgcctcctccatgatttcctccagctcctcactggtgatgaccattacgttcccc

SEQ ID NO: 18492 - DNA, 657 bp, Setaria italica
  Peptide Sequence Number=SeqID_84466
aaaagaaacctaaactaaggaaacctttactagaagtaatcagaaatagcttcacctgagtaatcattgagagtgatggtttccttctctgaatgatccatactgttgtctgcaggagccagatcatacactggtgctgattctaccttcttgccctttggtgagtgctcgcgtcgctcatgtcgacgcctcccctcctcttccaccacgcttctatgttcgacgtcctcgtcatactgttcttcagtcttcttttgttactttctcctcgtcctctttgtactcgacgtccggcgaaggactgcgagaccacatgtcttcagggaacttaggagagccatcgggaatagtgtcaggggagccctggcagaccgaacccggcgacactgtcgttgccgagtcctgacgccgggaagtccttctccgagaggaaccagtcgctgtcggagtcgacgacgaggtccttcaccgagtaaccgtcgctgccgctggactcggagtcggagtcgccgaagccggagaactccgacgcgaagctcatcctcgcgccgacggcgctgcccttggacgcgacggacggggagctcgccggcttccggctccgcggcggcgacctcttcctggacgacgccacgctctcgcacgcgtcgggcttct

SEQ ID NO: 18493 - DNA, 3185 bp, Setaria italica
  Peptide Sequence Number=SeqID_84467
ttactaaaacttagaacaattgcgatggttgatctaataattattatatatagtagtttctaggtaatgtaagtacctagtaccatggcaggcatggactctgtggactctggcatgtcatgtttaacaagttacaactataattacgagcctgtggaaaggaatgtattgccaaaaggttaaaacaaaatcctaaacccgtggattgttatatggcgaagacattttttttatatcgggaataaggagcaaaaaaggaaaacatatatatgtactctctcaacaggggaacaacaaaaatgaagcctccctgtggatcttcctatctaccagtatgatcttgtccagcttcgccttgcaccactgcagctgctcgctggtgatcctcggcatcctcagcacccgcgccaccagtttcatatcaacctgcgagaagaagaggttctggttcgatctgtcctccttgggcttcttgaacttcttcacgatgcagttgccggtccggaggagatccttgagcctcttctctttcttctgtaacgcggcatggatgtgcgccataagatcatgatctgaagggtcctgaagctccacgtgggtgctcgacaagcccttgatcactgatgtcggtgtcgtctcgactttgtcggccttgatgaactcccacaggatgtgcatcgcctcctccatgatttcctccagctcctcactggtgatgacatagttccccttgcgctgatcctccatcctgtccttcaagctgtcctcttttattacgggtacttgcaggagattgcggaggacgcaacggttgttgatgtagtttggcagcctggggcccttgaacgattcatcctcgacgaacctctgcaccacaacctgaaactgctggaactctccggctacctggttgtactgatggctgtggtaagggtcagactccggcaggtcacgggcctgctcgtactgccaccggaggaactcccatgacaggcacatctgtccgacgtacaccgtctccaaatcataccgaagctccttgagaaaccgctccgacgggtcctcgggggatctccgacgcgatggccggaaattgtgtgacaggatggacgccacggtcggtgacaaggactttagagagttggcggactgctgaggccctctgagctgtaggaaatctattgcatacatcttctggtagcacaatatgtcaaacttcctcatcctctccctgtaactcttgtagaacttgttcagctcgtccatcgggtcttcgcggaggaacttagcatcgatcctccatggcttgaggtcctccattggggcctttggtgtctctgactcctccaggatcgtgggcagcccgattgaccgcaccttcttcagctcaagcttcagctgctctatcaggtcctggtgctcccacagtgactccagttcatcctcctcttcttctgtcaaatccttccacttgacttccggatcctctccttcctcttcatatatcttcgccttcccagtaactgaaatataggcttgtcgagcggcatcgtccatataatcatttgcactggcttgttcctcatcttctccggtctctgaaatgttcttggcttcatgaactactccatttcgatggtcagttaaactgaattgttcctctggagtctctgggatgctcttctcatcagaaattactgcaaatgactgatcatttatagtactgaaagtcactttcttctcattagaaataaactcgtttgtacggtcatttctgcccacaaattcttcctctgacgcatccaggcctccctcattggcgtaagccactgtggatgtttgatcatttctactgataatctgtttccaaacatcagaaataagttcatgcgactgatcattcgtacctacaaattctgtctccgaaggctctggccttctcttgtcgtcaaaaactatttcatatgactgaccactttcactggaagtttctctcctgtcgtcagaactgtgctcaagtgaatgatcaaccaaaccgataaattccttctctgatggctcagggcttctcttggctgggccagcaacttggtctgatgatacagcagctaattctttcgcagagactgcctctggacctttctgagtatcagaaatagcttcacctgagtaatcattgagagtgatggtttccttctctgaatgatccatactgttgtctgcaggagccagatcatacactggtgctgattctaccttcttgccctttggtgagtgctcgtcgtcgctcatgtcgacgctcccctcctcttccaccacgcttctatgttcgacgtcctcgtcatactgttcttcagcttcttttgttactttctcctcgtcctctttgtactcgacgtccggcgaaggactgcgagaccacatgtcttcagggaacttaggagagccatcgggaatagtgtcagggggagccctggcagaccgaacccggcgacactgtcgttgccgagtcctggtaagactgctccagcttggccgctgcctccagggcttccatggccttaagcaccttcgccttgtaacttttgaggttgccggagttgcgcgcagacgccgggaagtccttctccgagaggaaccagtcgctgtcggagtcgacgacgaggtccttcaccgagtaaccgtcgctgccgctggactcggagtcggagtcgccgaagccggagaactccgacgcgaagctcatcctcgcgccgacggcgctgcccttggacgcgacggacggggagctcgccggcttccggctccgcggcggcgacctcttcctggacgacgccacgctctcgcacgcgtcgggctcgtccgccgtcttccggctccacgacggcgtcctcttcccggacgacgccacgctctcgcacgcgtcgggctcgtccgccgtcttccggctccacgacggcgtcctctttccggacgacgccacgctctcgcacacgtcgggctcgtccgccggcttccggctccgcgacggcgtcctcatcccggacgacgccacgctctcgcgcgcgtcgggctcgtccgccggccggaagtccctctccgtgaggaagccgccggtgcgggggacgatgttggccccccgtgctcctcgtgctgctgtggcagcggcggcgacggtgtcggcg

SEQ ID NO: 18494 - DNA, 557 bp, Setaria italica
  Peptide Sequence Number=SeqID_84468
cctcatgcgtgttctcaccgtcaccggcgtcttcagcgtccagcatcactcggccgacggcggcggtgatgagcttctgtacgggctcactccggcgtctcgtcttctcgtcggctcggcgctgaacgtgagtccttttctgaccttgatgctcgacaccctcttcgtgtctcccttcctcggtctccgcgagtggttccagcacgagatgcccaatccgtcacccttcaagatggccaatggacgggacctctgggacctgaacgaccacgatgcaagcttcggcaagctcttcgacagagggatggtcgcggacagcgacttcatcatggacatcgtggtcagggagtgcggcaacgtcttccaggggattagctccctggtcgacgtcgccggcgggctcggtggcgctacccaggccatcgccaaggcgttcccgcatgtcgagtgcagcgtgctggagctctcacgtgttgtcgccagagctcccaccggcaccgatgtgaagtacatcgccggtgacatgttcgagagcattccgtcggcaaacgctgtct

SEQ ID NO: 18495 - DNA, 355 bp, Setaria italica
  Peptide Sequence Number=SeqID_84469
ataaccatggctcccagtactgtaccgcatgaaaggataccctggtgacctcaagtagaacccatctgatgctagtgaggatccggcagaagatggaatgtagttgggcggtggaggaggagctggttgctgtgtgggcaatgccgccggaggctctatccgccggcgctttttcttgacgaaccaaatggtggcgccaataaagctgagcatagcgagaccggcaagtgctacaatggtggtggccgcctccctcgatatctcgatgttcttgccgctgccactagctgcatgggtcgagttatgcttcgggggcgaccgcggcacggcatgcggcttgacgtgatagtgccga

SEQ ID NO: 18496 - DNA, 2610 bp, Setaria italica
  Peptide Sequence Number=SeqID_84470
tattattgtctaaacctattggtcttaggtccttcctacgtttctttctaggtaacttgtaggtaggttggtcttgtacctaactttcctagtactattgggtattgtccttctttgactggatttgcattagatcctagcagaaatcatggtatctcaacccgtccggaaatcccagttggcaaggcttgctcagcgctttcatctggagatatcataaagtttttgactggtgatttcagactaagcaaggcaagatccaatgatctattctgggaggctgtctggcctcgcttgctttcaaggggctggcactcagaacaacccaaggactcttcacaagttggaaagcatgctttagtctttctcatcccaggtgtaaagaaattttctagaaagaagcttgtcaaaggaaatcattattttgattctgttagtgatgtcttgagcaaagttgcatctgaaccaaggctgcttgaatttggagttcagggtggtaatgatgacagtgggattaagcatgaaaatggatggatccatgattctgaacatgacagaaacacacttcctaacaagaaaccttcctataaccgtcccactgagcctgggtgttccccagaactaatgaaatttactgtggtggataccagccttgttcaaggggaagaaccttctaaggtgaggtcactaagaaatctaccaacagattccagtcatggttacatgtcttcaccaagttctgaagattctggtagtgacagcgcagaggaacactcagattccgaggacagctcccagccttatgaacatgtaagtactgatcgatgcacaactggcgcacagtatgctagtgaggagagaaaaagtaagctcccgacaattgttaagatggattctagtgtaattcagaaggctgcttcctcaggcacattaacatcgatcaatggtcatatttcaactgatcaaggtttcagcacaatgagtaatgcatgctcttcaacagcaagtattcttcctgttgacgttaaaagagtccatgctactacttccactgaaataagctttcagttcgatcaaagggcgaatgctgagtcccaagttttcttagcacccttttcgaagagaagaaggttagtttcctctaagactgaaagaactggccgcagaaatacgacgaccaatgaaaatcattactggaagcaagctgacgagccgctgcaacatgatgtgtctggagcaaatgaagcaagcggagaggccaagtcttttgtatggggtgcaattccgaactcatcaactaacatatcctttgatgtcaataacaagaagccatactgcagacggcttgacaatgtgccccctaatgctgaaacaatggtttacagagaatctattcaaaataggcatgtcattgatctcaatataccacaaatgccttctgattatgagtcaactgtgagctacattgcctctccatctgacaaaaatatgcaaaccatggctaggcctccacgttcttcaggaactgaggaggtggctgaccaacttccagacatggatgcctctagtgatgtgctctatgaggagctttctttcaactcaagaaggcatagtagccgaagccgcccgccaacagcccgagctctggaagctcttgcctgtggctttcttggtaccaaacagaagggcagggaggcaaatttcccatcttcgagcaggagcagcagacctgttcggcgaccacgacgatcgcctgatgtttcactgccatttccttctgatggcaaaggatgtatttctcattttcctgatccgcccacggatgtcaatggatggaacatgagtaaccctccattccaaatgatccacagcagcccctctgataaatccacagataaagttactcctgacttgtttggagcagacaagtctactgacaaaggagttcatgaattatttagcataccttagatcccatgaaaatgaggaaggtcgacccatatccagtaatacctttggattagtcaacctttatgaatggattggctgctgattaagagaatgaagtgatcgtgtggtcaaaatgcaacctgcagtaagtgatgggtgctgcttgttcagacttcggtttatggttgagaaacgaattgaggaagattatacagctcagttttcaatttcatctatagtcttgtgcatgtctattgcctaaatattcaatcccgatacttatcaagaacatatgacacccatgaactacaaagatgtgatagacaattgccttcgcatcaggcgctccagcctgcagtggcttatcaagttttatgtgacagatcaagaccacacgcttcttgttcggaagcctatgatgaagcttttaccttttttctttgaggttttctgataaaactttaccgggagttatactcttgcttttttttacatgtactatgtgggataacggaacaagcatgtagcgtgcccatataagtaccatacctgaactaaacttgaaactctctgttgacaaacccataaggcctatgttctaagtatacttgtgaaaatctgtatgcccatgatctattctgaggttcagagtttctaccc

SEQ ID NO: 18497 - DNA, 845 bp, Setaria italica
  Peptide Sequence Number=SeqID_84471
agccctccaaaaacgggctgattgtctcaagtagaaggccaacacatccaacggaagttaaattctcctggttgaatggaccagcatttgctagcttctcaatgaatctcagcaactcaagttgcactttaggtgtaaaaaccagcaaagaacggatcaacacaacaactgcactagcattgtacacgcgctccttgtcaagccttgaaagtccaaatgatgttgcagataagaagctcgattcatcctctgaggtttcagatgaaatgcactctacttgcaagttactcgtgggtggaagaacaatctcaagtgcaagctcaagcaaaagcaaaataacttgtttttcacagtccacacagagcaacccagactcagagagcagatcatagaaagtgttcgacgaaaggattgtgtgcagccttaccctattgacagaattgttgcatactgcagctgtcattgctcgcaatagaaaaccaaagatcttcatatgagtatgtaaagatgattcagtctcttcattttcgctgtcgttctggaaactatgcagcattgtcagtagcagggaaaatccagtggcttctccaaaaattctttgtgctgaactatttgccccaagaatgcgccacaaagcaccaaatgtatcacattttgcatcattatcaagcttgaattgagaacctgatgaggttgactgagtcccactcttcaagatttcaaccagtgatcctatttcttctggatgagcctgaagagaatcttcaattatcaggcatgacaatagtcgtaatacaccagatctgtgactttcagataccaagaaaggaagaatgatgttgacg

SEQ ID NO: 18498 - DNA, 253 bp, Setaria italica
  Peptide Sequence Number=SeqID_84472
cccgaaaaatgcgagccgtcgggagcaccagatacattcggagcacctgatcttctctcagatggcgactcctcctcagggatttaattaagaaaaaaagcccagaagccggctgtcgcagtcgccaccgccatcgtccacaccgccgctgccacgaccggcggcatcagcggcgcgaccctggacgcgaacattagcgtgagcagcgtcgtgagagcccacacggcggccttgatcacccttctcccgcggg

SEQ ID NO: 18499 - DNA, 307 bp, Setaria italica
  Peptide Sequence Number=SeqID_84473
actagaagacttctgagctttctgagatagggctacctgccatctcctttgccttgctctgttgtctggtgaaccctcttctcctgctgctgcgttcgtattccaatgtttgaagaaggtgaaattctcgagcttttgttcatgctgagggcagaataaagctcgaaatcaagcaacaaatttcctcttttctcttgggttcctgacctcgaattgtaattggctgatattagcttcaattgctccttttccgtttgcagagaagacgactgatgcgtccaggcaagagagctccgagcaaggcaca

SEQ ID NO: 18500 - DNA, 2797 bp, Setaria italica
  misc_feature (2745)..(2797): n is a, c, g, or t
  Peptide Sequence Number=SeqID_84474
tgttgacattgatgtacaggctgtagaaagttgtgatggcactattagctggaatacaagttctacctttgcacggcccagaattttttgcttgcagcatgcccttgagattgaagagttgcttgagggcaaaggtggtgtccgtgccctcattatttgccattcagattatatcaaattaaaagcgcttgcaatatcaatagctgaggaaattgagtttcagtttgactgtacagacgttcctcttgcaaatgcatccaagtctgatttacatctaatcaacatttcaattgatgatgaggggcatgaggaagatggaagggactggacatcacagatgggtctaaacctgaaatattgtgccaagcttaggaaagagacatcagggattcgggatcaatctcctttgtcagtttgggaactattttccaacccttcgcctgtttcagttgttcctaatctcaagtggctctgcagaaaagcgcggacgccatacaaagtcattggtattattaccagctctggcacctcggcaactgctgaggaggtcaagcctgaagtgaagaaagaaacatgcactactggaaatgttcatgaggatgacagtaggcaacatatttcccaacaaagtggcctcgtgcaaccaagtgggctgcatgattctgatgatagagagaataaatcgtcgtgttcggaggagaatgaccatgacagacattgtcttattgatatccctattgctgttgctgaatatcctatgaagcaccaagtttgtgagggtgcagttggtgttagtacgtgcaatgacactatttgttcatcagattcccaggattcatctccacttgccacatcaccagttgatgttacaagatatcaaggatgtatacaatcaactgagttgagtagttcatcaaccttttctgttcgacagttccttaatgatgaaagtacctctgtggaaggaagcatgaactgtatgagcaatcatgagtacttacaatctcaggatgttactttacagtgcagagatgaatgcttacaagttcaacaagatcaggaggagatgagactttgcaatagttctaacaggacatcagttgatccatgtcttaaggaagatttggttatttcagaagaaaagcatgggagtaatgtgtcagcagcccttgaaaatgaacacgactgtgcgaagacatctaaatgttcttataaaactaatgaatctgcagcagttaatcaattgaagactcatgatgcgggtgctgttccagagaaacaaaagtcaagctgtgatgagatgacctgtggtagtgctgatgtacaatgcagtataaccttcggctgtcttggctctgctgatgttcctggttcaactcagcctcagtcggttccgcatgatttaatgagtgacgagctgcaggttgatagccaccattgtgttgtcaaggccgtcgagctgaagagcaataattctgctaagcatgaatctccacagatagataacctcattttagaggatgctcaagctgctgcaacgactgcgatccctggacatgatggaaaatctgtccacgctggatcaaattcctttgatattttacttggagctctggctgaagagtccaaggtaacagatgctcctgggaaagatgaggttgggaaagcttccttgacattaatgacactggctagcaatgaccactctgcagatgaaattgcagaaggcaaagttgtcgaggtggcaaaaacgaacacaattttcggagcaacaaaagatgatgaacaagttgatcggccacatgactttcatttatcagatgtggtgtctagaagcattggaaactcaaatagaactgagatcatatgctacgtcagacgcaaacacaaaagaaagaaggattcacagtcaaatactgatagttcacaaagtcttgggaattttatccgctccccgtgcgagagcttgaggccaaggactaaacctgcagtagttgaaactatagaagtttctgctggtaaaaagggcaagagggcaaaagtggtattatttcagtgtgatattgatctttgtgacatgacattttgagactagagccgaacttaatgcccacaagcgcaatatttgtactgacgaatcatgtggcaagcgtttcagttcccacaaatacttgaagcgtcatcagtgcgtccacagtgataaaaggccattcaagtgtccctgggatggttgcgaaatgactttcaagtggctgtgggctcagaccgaacatgtcagggtgcacacaggagaacggccttataagtgctcagcacctagctgtggccagacttttagatatgtctcagattacagccgtcatagaaagaagtttaatcattattgatggattcagtttgagtaactggtcgtagctgggggcaaatcttcagctgcttgtgttggtcctatgtttgttgtagcacctcacatatttaaccacgtgatagctggtagggctagtgtatgttcctttgttaacaatgtgctaataattttagagtaggggttagaaattgttgggggttaagagccaccccacctgttgatgtagatttgcataagctgatctagccactgacatgttgccattcattatttgttcttctgatcagtgatgtaatctaatccctgataaacattattaacattgtgaaatcatgattgatttcaaatgatctcggattaaaggttaaaaaaaaaannnnnnnnnnnnnnnnnnnnnnnnnnnnnnnnnnnnnnnnnnnnnnnnnnnnn

SEQ ID NO: 18501 - DNA, 482 bp, Setaria italica
  Peptide Sequence Number=SeqID_84475
cgagcgggacggacctgatgcggcgggtcatggtgcccgggttctggaagtagcccgcgtactgcatcatcgggatggtggcggccttgtcccgggccttgatctcggcgtgcacgcgcgcccacgacaggaggaagcgcgccagcgccagcgggtcgcacagcatcagactgcagctcacgcccacggcgtagcccccgtcgccctggaaccgtgtcagctgcacgaagcagagggcgcacatgtcgggatcctcggcgtccacgtcggtccacggcacgagcgcggcctcccggcgctcgcggccctcctcgccccgccgacgaagtcgtccacggaggcctccaccgtggccagcacgagcctgacgcccgtgtcgttgagcttcacctcccaggacccgtcggcgcggcgccggagccggccggccatctctgggtggtcggccacggcctcgctcagcgactccttcaccaggagcg

SEQ ID NO: 18502 - DNA, 826 bp, Setaria italica
  misc_feature (763)..(826): n is a, c, g, or t
  Peptide Sequence Number=SeqID_84476
cgaggctcctcccgcgaaggccgtcgaggccgtggccgcggcggcgccggtgccggtgccggctttccgggacgcgaggtgggtgaacgggacctgggacctcagcaagttcgagaagggcggagttgtcgactgggacgccgtcatcgacgccgaggccaggagaaggaaatggcttgaagattatccagaggccactaatacagatgaggccgttgtctttgatacttcagttattccatggtgggcatggatgaagaggttccaccttcctgaagccgagaagctgaatggacgcgctgccatggtcggtttcttcatggcttactttgtcgatagcttgacgggtgtggggctcgtcgaccaaatgggcaacttcttctgcaaaaccttgctgtttgttgctgtggctggcgttctgctgatcaggaaaaatgaggatcttgactcactgaagaagataatcgacgagacgacattctacgacaagcaatggcaggcaacctggcaagatgagaccaccggagggccaaagaactagctcagcgtggccaaagaactagctcagcgttggggcctgatcgcagaatgctttacttgtgttgtgtttcgtttttttggcctttttgttttcccgtctagtgaggcttggaggaacattttgacaggctattaatctacggtatcttgtaaaaaaatatggacttattttctgtgctatagataattacgatgcggtttcatttgttaaaaaaaaaaaaannnnnnnnnnnnnnnnnnnnnnnnnnnnnnnnnnnnnnnnnnnnnnnnnnnnnnnnnnnnnnnn

SEQ ID NO: 18503 - DNA, 272 bp, Setaria italica
  Peptide Sequence Number=SeqID_84477
acattccccttggggactgtcctattcctcattgattgagcatgcattggaggtgaagcgagtcagcgacctcactgagtctaatgccttgtggaacaacagatttattcctgaaccgatcatatcacaaatgcaactaatcaaatagtggcttatgcaaacataattagaatatctgatgactcagctgtctgtctgttgggtcatgtggtgccagtgctgtttgggcatcacaacaatatcaatcccccacattgcaaatttcatatatt

SEQ ID NO: 18504 - DNA, 1404 bp, Setaria italica
  Peptide Sequence Number=SeqID_84478
gtgctagctcgtcgatcagtcgagccatccgtccattcccagtttcccactgccatggcctcggctgcaagcagccgcagcgtgcagatcctcctcctcatttgcacttgctttctcctacccttatccctagctgctcagggagctgatgataagaattctgtgcaactagtagactcgaaattctccttcagtttcgacttcgccaatgaatccagctaccaagtaggcgacttaagcttcgagggcaacgcttcgaggcaaagcaatcgaattgacctcacctgtgactcgcgcgggagcatccagagttgccaggggcggatgtcgtacaacgaaccggtcacgttctacgacgacacaggcgccctggcgtgcttcagcacaagcttcaccttcgcgatcttggccgaaaactactccaccgcgggggacggcctagcgttcttcctctccgattacccgtccaaaatgatgccggactccgcggggggacgtctcggcttccttagcgagaccacactaccctcacagccacagcacttcgttgccgtcgagttcgacacgtaccaaaaccgttgggatcctagcaccagccacataggcgtcgacatcagttccatccgctcctcgaactatacaaacttgccaagattgaatggcaccatgacagccaaagtccaatttgacaacaccaccaacatgctgcttgcatccctttggtttgatgaccatctcgatatcgaccccgttgtagtcacttacgtgttgacagatccaaagtcgttgcttccagggcaagtggcggtggggttttcatcgactaccggcacatcgactgagctccatcagatgctcgcatggtccttcaactccactcttcctgctcggtctccacataaagggtgtgacaattgcacaggccaagacaacaggaaatctacgattattactgttggaggagcactagctctagtgctgttggtcctcggggcgtggtctatcatctcatgttggaagtggagaagaaacagacaccatggctttgagaagctggggaagcacgagcctactcggttcgagtatcatgatttggaagccgcaacagaccatttctccgaagagcggaaacttggagaaggttcctttggggtggtctatagagggtacttgaagaaactaggatgtgaggtagcgataaagaagatcctggataagtcccaggttgtgggaccaaacatggatttttatgccgaactcgacaccatcacttcagtaaatcacaagaatctcgtcaaactcgttggttggtgcaggggaaagagctggaacttttttgagttcttgtgttggtgttggaagaaggaaaacgatgagctcttcctagtctatgaattggtgccc

SEQ ID NO: 18505 - DNA, 715 bp, Setaria italica
  Peptide Sequence Number=SeqID_84479
ttagtcttcatggcttcaaattcatgctgcttctgtttatcagcatttacatactcttcagctatgctcaggaggtcctccacagtaagctctacatcatcatcaactgatactggtgatgatgtttctgatttgatattctctagtttgcgtttcctgttattctttggagcagctccttcgctcacttttcttcctttcttaataggtacatccctaatttcttcaacaacatcttggacagcacccttgctctttcttctggcattttctttaccctgacaccactgcaaaactaccagttcactagcaccctctgaatccacactttttaaccgccttcctgtattccttttgataggttttgttggatccacagtccctattttcacgttagattccaatgcttgcctattccggtcttctgtctttggcacttcattacctgagcttgctttcagcatccatgctggtagactgcgtttattctcagcatgcgaaacagtacatgcttgtgccatgttctgggaccgaaggaatgtaaagcacataaatcaatgagatccaactcaacatagcgacgccggagcaagctgtagaaaagttgccctttttatgcaccctggacggttactttcttccagttcggtctagggcggggcggcggcggtccggcgaaaggccggcgccggcggcgagcaaggactttggattg

SEQ ID NO: 18506 - DNA, 316 bp, Setaria italica
  Peptide Sequence Number=SeqID_84480
cgcccggcgggggctctgctgctgcggcgccggctgtagcgccagagtccccgggcgcgcgccgttgatgccgctgccgccccggccggcgggggccgccgactcagggtcttgagggggcgccgccacctgcgcctcccagttcttgaagctgagcgagcgctcgaggccgccgcgcgccatcttggcggtggccctgggcgatgatgtcctcaccggcgagaagcagccatcccgggggctgcgcggcttcggggacaggaggtggttgcgctctgtgttgagcagactcagagacatctcccaactgggtcct

SEQ ID NO: 18507 - DNA, 476 bp, Setaria italica
  Peptide Sequence Number=SeqID_84481
ggggtgccactttaactgaaacaccaccccacaccacctcatcccccttcctcctcctcctcctcttaacttggtccctctagcgtttctctctttctctccccctttggtgagcacaaggggcaattgctgaggaggaggtagccatggcctgaggttgctggtttcttcatcggcagcttcgtcttcagactttcggcgttcgctgcagtgaagcggtgcgcggaattctgctcctgggtcactgggtggttgaggtgagacaagaatccaactgacgagtgaaaagattgttgcgatcagccagagatgaacagcaaggagatgtgccaagaaccgtgcgacgagctgtccgagatcagcagccaggcggcgtccaacaccgaggcctccaattcctccggccgggtcagcctcgacctctcgctcacggtcgccgccgccgccgccgccgagtccagcaccaccgacaaaca

SEQ ID NO: 18508 - DNA, 1205 bp, Setaria italica
  Peptide Sequence Number=SeqID_84482
gcttaaccttgcggaagaaattcttggagatattaaacagtgtggacttggcacattctgaggagatgaagatagaggtcctggatgacctgaagaaagatttctcccattgcgaggactattgggattggtttgctaggcttcagctaactgacttgaataagtccagtactttgaacggaaaggatgctctatcgaataagttgaacaaatcaattcaggtatatgatgaagctgtcagaaggctgccaacttccaaaatgcattccctttatgcaaatttttggatggatgttctatatcctgatagggaagattccattgcatcattccaaaattctgaatttgatgcttcagaattcacttcatctatactgaaagtttatgaaagtgctgaatcatgtgggtgtcttactgaggatcttgcttgccaatatgtatcactttgtttgaaactcgaaagactggaggaagctaagaatcttgcagaaaagctttgcaacggtcctctttcagatgctgcgaatttgtggagcctgagagcttctatggagataaattcgtttgctactgcgggcagttctccattcagcaaggagaacttgagttgtttatttgatctatttaacactgtactttctaagttacccataactcagactgagggattgtggcacatggccatgaaattgttttctaatgagaagatctattttgagaagctggtgaagtgtgcgatgctatcattaagtttggcaggtgggagtgatttgggtgcgtcggtttcttctgcaattgttggatggtatttgcaaagagacggtatgaaacaagctaggaagatgtacaagaggcttctcgctctaccccgtccgagcctgaagtttttccagtactgcatagagctggaagctaaccttgcttcgctgggagacaatggtgcccttgcaaatgctcgtaagctttatgattcagcaatcgaccactatccgcaggaaagagaagtgtggagaaactactacaacctggagttgaaggtgggaacatcagaaactgcaaatactgtttactggcgtgctcgtaaggtgcttggtgactccactgcactgactgctcccagtagctagcaggatgcgacctgtgttaacttgttacttaccctttttttgtatttggtatttttattttatttttccgttgggtct

SEQ ID NO: 18509 - DNA, 707 bp, Setaria italica
  Peptide Sequence Number=SeqID_84483
gagccgcccgcgggagtccatcgagcgccgtgactccgccgaccgcgagccgccgtcctcgtcacggaagcggaagggccacgagggcggtggccgtggagacgaggccgaccgagatgtcggcaagcgggctagggcctctgtggacccgcctccgcccaaggaggagaggcctaggcgggagcgccggaggtttgaggatgtcgatgcaaatgggaaggatggtgatgtgaggagtaaggggagcaagcaggagggggagttagcagttaatggagatttacagagcggtgccgcacaaaatgctggttctcagcaaccgttcaatgctgcatctgctgtagtgccatcttctgttcccgtgtcttcaaaggtatcttcgattaccaccaacaatgaaaatgagggggttagtattagatctgatgaggttactggaaaatctagtacagatggaagtgcaatctcagctgctggcaaaagtagtaacctatctcttgatgctttagccaaagctaaaaaagctttgcaactgaagaaggaactgtcagagaaactcaagaaactgcccatgcttaatgacaaacttggtactactggttctggtacacaaattaagaaagaagatgcaaaaactttatcagctgtagaagtgcagccccttcctaaaaggagaagcaaagtctactggtgcagtttctagtctg

SEQ ID NO: 18510 - DNA, 253 bp, Setaria italica
  Peptide Sequence Number=SeqID_84484
ttggctcggaagtgatctgatcacataattttgaacttcatgtcttgccgagaattacaagctatatataatttgaacttcatgtgctgccgatgattacactacacatgctcagccaatattctctctacccaaaccatcaccccaaaaaagtgggacaaaaggccaaggggaaaggggaaaaaagataggttaattaattaacaaatcatggtgcagaatctgctgatgccacaaagccattgcctactcg

SEQ ID NO: 18511 - DNA, 483 bp, Setaria italica
  Peptide Sequence Number=SeqID_84485
actaagaggagcaaatgattctgtcctaagtgtatggtggaggctatggtggatatgagtacgataaccaaggaggttatggcggatatggacacccaggaggatatggacatcaaggtggatatggcaaccagggaggatatggccacaaccaaggtggttatgggggttacggttacaaccaaggtggatatggaggatacgaaaatggtggtggctggaactacaaccggagcagaggaggcggtggtggccgagggcggggcaattggggctatggtggtcctggatatgaccgtggtggcagaggtgcaggtggcccaggcggcagggggctatgtgcgaggccgtggacgaatgggtggtggccgtgggcggggcaatcaaaactctagattatcaagggttggatgtgcctaaccctctcctggtttctgtatgtcaatggaaagggaaaaaagatagggcgctttccattgctgg

SEQ ID NO: 18512 - DNA, 444 bp, Setaria italica
  Peptide Sequence Number=SeqID_84486
acttaggttggtaactatactgtagcaagatggttctttaaaatgtagaattgcatcatgttgtgtgtttttattttgattgctgcatctgcattagctttaaaggtacaagctttaatttttagtatcttattggtgcttgtccttttagattaatagagtttgcgaggtcatccctttctgttcctttggcatcttatacaaccacttgtggcgctcaattatacacaggtcctggatatgaccgtggtggcagaggtgcaggtggcccaggcggcaggggctatgtgcgaggccgtggacgaatgggtggtggccgtgggcggggcaatcaaaaactactagattatcaagggttggatgtgcctaaccctctcctggtttctgtatgtcaatggaaaggggaaaaaagataagggcgctttccattgctggaactgtagt

SEQ ID NO: 18513 - DNA, 1201 bp, Setaria italica
  Peptide Sequence Number=SeqID_84487
tccttccttcccctccccatcccccttcaacaacagcagcgccgccgccgccaccgccaccgactctccgggagcgtcgccggggtagagcgccatggatcggtaccagcgggtggagaagccgcggcccgaggccgccgccatcagcgagaacgagatccgcatcaccacccagggcctcatccgcaactacgtcacctacgccacctccctcctccaggaaaaacgggttaaagaaattgtgctgaaggctatgggccaggctataagcaagacagtggctattgcagagatcataaagaagaggattcctgggttgcatcaagatgcaataatcagttctgtcagtattactgatgtatgggagcccattgaggaaggccttgtaccattggagatgactcgtcatgtttcaatgatctcaatttccttatcgcctaaggagcttaacaagaattcacctgggtatcaagctcctctgcattctgaacaagttaagccacaaagataccagcaacctcagcaatatcaacagcaccagccaagacaaaatcaaggtcaaacagattcatatggacgcggccgaggtagaggccggggacgaggaaggggctggggtggcaggggtgggtatggtggaggctatggtggatatgagtacgataaccaaggaggttatggcggatatggacacccaggaggatatggacatcaaggtggatatggcaaccagggaggatatggccacaaccaaggtggttatgggggttacggttacaaccaaggtggatatggaggatacgaaaatggtggtcctggatatgaccgtggtggcagaggtgcaggaggcgcaggaggcaggggctatgtgcgaggccgtggacgaatgggtggtggccgtgggcggggcaatcaaaactactagattatcaagggttggatgtgcctaaccctctcctggtttctgtatgtcaatggaaaggggaaaaaagataagggcgctttccattgctggaactgtagtgctgttcccagcttctcccggattttagtataatggtcaatggtgcttgtaccattgcttcaattctgtgggattttgacatgagtgttaagttttccctgggacacctttcctgtatttaagagtgcatttttgatagtttatcagtaatccagtttaaaaaaataacaaaaaaaa

SEQ ID NO: 18514 - DNA, 254 bp, Setaria italica
  Peptide Sequence Number=SeqID_84488
aaagcacatgaacaccgacaagaacacaccaacactgacccctgttactactttgagggctaacgtgaacttgtcctttggacggcaatcattcttgatggcatctccgctgaatccagggtggcaatcacacttgtagcctcccagcacatttgtgcagactccgtagcatgggtacttgtccaagtgttggcactcgttaatgtctttgcatccacgatcgtcgagaaggtaggggttgccctcgtagcccg

SEQ ID NO: 18515 - DNA, 744 bp, Setaria italica
  Peptide Sequence Number=SeqID_84489
agtctctactctgtgcctctgaccgactcctcgcacgcaagtacccccacctgctcctctcccctctcccccaccccacctcgccgcctctccccgtgtccggcggccaccacgcccattgtgaccgcgcggggcacgggagcgaccgggctggtctaggggcctctcctccagaaagcgcgcggaaagaagaggggccggggcggtagctttcttggatcgattgctcccgagctgctcgcgacgattagtcgtcccgtgcggcagccatgtctgtggagctcatcctctggctcttctccttcgcctccgtcatggtcctcatcggcctcaccgcgtaccagcttatctgtttgtctgatttggagtatgactatatcaacccatatgattcatcatctcgcatcaacgcggtggtccttatagaatactcgcttcaagcagccctgtgtgcttctttcctcttgacccttcattggttcccctttctagtcatggcacctgtaacgtactaccatgtgaaactgtacatggatcagaaacatcttgtagatgtcactgaaatttttagacaattaaatggcgagaagaagtacaggatgatcaagcttgccttctacttctgcctatttattataactatttacaggcttgtgatgacagccgtgatgctgtttatcgacgaggatgtaaatctggtagaaactaggactatctagactttgcctccaacttttcacagct

SEQ ID NO: 18516 - DNA, 615 bp, Setaria italica
  Peptide Sequence Number=SeqID_84490
atctctgtggatgatgcccttctggtgcaagtaggacatccctctgcatacatctaatgcatacttcagaactgctgggaggtccaagacattgtgctcattgtgcaagaaatcaaacagacttcctctagacatgcattctgtaactaagtaaaactgaggtggctttgtgcatgagccaatgaatcggacaatattgggatgatcaacttcccttaatatgtagatttcttgcttaaattcactccatgcattttggtccaaattctcaggattaaggattttaacagcaacctcctcaccaccataagtcccaagaaacatagccccacaagatccagaagcaaccttctttacaatcttcagaagtcttgtgtcaatatctgattcacaatcttgtgctaggaatggaagtgactttcctgaagctgaggaatcagagccagaccatgaaccctcatttcgcaaaattgatgcttcaagtgccttatgcaaaccctcagtatcctcaatgggccaaccatcgacaacaaacacatcaagagaataaccatctgttgttgagaacacatgtgcctcctaatgttcagtccaatgtcagaaagcaaagcagac

SEQ ID NO: 18517 - DNA, 410 bp, Setaria italica
  misc_feature (107)..(107): n is a, c, g, or t
  Peptide Sequence Number=SeqID_84491
aaaaagaatgatctttagattatagtaaaggcacttgggtgttcttccgcaaataaccgttccattaacacaggctgcagattagctcctgcccattggcgcaaaangttttactatggccatatctgattgattttgtgagctgaagaatcctcttcagcactgtaattctaacatcgtacataggttcagtgagacatgacataatctccttgtgtagttcaggtagggagacctccccaggcatcgctgaaatgtttgaagtgtgttcaccaagtatttggagctgtacatcttcctcggaagcttcatcatttctcttagaaagaccaacacagctgaaaaatgattcagttgcttgttgttgaagttcaatccgggttggatcatggaatgcataccgggttgat

SEQ ID NO: 18518 - DNA, 306 bp, Setaria italica
  Peptide Sequence Number=SeqID_84492
tgcggaccttggtgggcgggcgcgacgccgccgtgggcgaggagagcggcggcgtgacgggagcgctgctggagacgcggagcggcgggaggtttggcaggccccggaggaacgggaggagcgaggaggccgcggcggcggcgcccgggttgttggtgttgctgccgctgctgtggtccaggcgcgtcgggctcgggaagctcgaagacgccgggctggcgtggtatgacgggaccgggctcgggtagctcgaggacggcgcgctgagcagctgcgacgacgagcacgggctcatcatccccggcg

SEQ ID NO: 18519 - DNA, 636 bp, Setaria italica
  Peptide Sequence Number=SeqID_84493
aagaactaagaacaaagaaaaagttaagacgacaacttaataggaagaatcaataataaaggttgaggtgaagggagttgttcttgtaggtgtaagcttatcaagagaagtgattcctgcatttgctcgtatactactgcatacacctctgaggaaaaagcacatggtccgtccacttcttcgtactgaaataactcaggttatcaatcgacgagcatggtatgatgccacaaagctaacaacggaagttcttaacctgtacaaggctccgctatttgttgagggctgggatgaagcactacatgaagtgggccggctttcgttttctactgtcctatcatcaaaaagagcggcagatttattaagatcagtggaagaccttcctgttctggtggtagcgggctctgaggatgctcttgtttctgtgaagtcggcacaagctatggcttcaaaacttgtaaattctaggatagtaactgtatcgggatgtggacatttgccacatgaggagtgccccaaggcattactctcggcgctttctccttttatctctagattggtaccatcagaagattcgttgcaaagactctagtgtatacttgtcctcttcccgccccccccccccccacactctct

SEQ ID NO: 18520 - DNA, 554 bp, Setaria italica
  Peptide Sequence Number=SeqID_84494
atgtacatgtatggccggatggccccacttgtcatcgtcttataaaggctgctcagcatcagccgtaagatttcaacggcttctgtaaagcacagcatactcgtgaagtgtggacggacggagatttcaacggcttctgtaaagcacagcatactcgtgtagtgtggacggacggagtgaccaactgcctcacacgcccgctccggcgggtcctactgctgccctccacgtcagcagtcttagccgtagaaagcggagcccaaacagtcaaacacccaccagtgtcacctttgaccgagtcaagcatccgagctggcatcccgctacttgctcttgctcccgcagtcccgctcaccctttcctgctgttgaccgctcctgcctcgcgctcctcttcctcctccgccgcagcttccacccgccgccgcggctgcccgaccggcaggcgcccgtcgacctgtccccgcccctccccgccgccggcggcctcctcacgaaacctcgcgtagatgtcccccttgtagaacccccaggtccgccacaccctagtcagcg

SEQ ID NO: 18521 - DNA, 224 bp, Setaria italica
  Peptide Sequence Number=SeqID_84495
tcaagttcgtcaagactgccatgaaactgtcaacgatgtgctgattggagtgaccagcgcaggattgtcgcgctattatttccgcaagacaagcattggcagaaatgatggattctagcaagaacaatggtgcaaaatgggggaatctgattggttacgttatactacctttccatatagccatgcacgatgatcctcttgaatacatccgccaagggaaaagc

SEQ ID NO: 18522 - DNA, 413 bp, Setaria italica
  misc_feature (382)..(413): n is a, c, g, or t
  Peptide Sequence Number=SeqID_84496
tgggggacgaagtaagcaacaagaatggaagcaaggtggaaaaggaaggtgatgaggagggtgaccaagaagaagaagaagcacaagaggaggaagaaaattcagatgatgactacaatcagaatattgagtttgacgacgacgacgatgattggaaccaagcggaagaagcacatgaagactactatgattaagtacggatggccagattttgctttttttcttttcttttcatttgtaactcatccagaaaatttgttgggagtagtgactagctttgttctggtctttcttgtcaaaatggtcacatgctttgtcagaaactctggactatcagaatagtgaaatacgcagttgcctaaaccttctgttagaacaaaannnnnnnnnnnnnnnnnnnnnnnnnnnnnnnn

SEQ ID NO: 18523 - DNA, 276 bp, Setaria italica
  Peptide Sequence Number=SeqID_84497
aattatactccttactcaaaactgacagatggccgcaccgttataaatataatgacagacaaaagggaagcgctatgttctgtgctaactcatagtcagatcagctactctcaagaaccaccaaaatcactggtactccgactggggacacaaacagaatggaacttccctattgagcaaccgaatggggcacctttcatgagtaccttaagggggtgtttggttcctccgcctaaagtttagctcctcctccattgtagcccgagagggcagaat

SEQ ID NO: 18524 - DNA, 415 bp, Setaria italica
  misc_feature (366)..(366): n is a, c, g, or t
  Peptide Sequence Number=SeqID_84498
ttgctctgtttagctttaacccaacgcctcctataatcttagccatgtcctagtttcctcttatagtctcaatcgctacggttgaacatggtgacagtgcaacggacatgaaacttgaactacctatgggactatgatcaattggagacacccatgattgacaacttttcagcagcgcctcctgatattgccgttgtggttggtacagaattgtggggcgccaccatgttcatgcctgcttttccacctcccctgcctctaccctccaactttatatagtatctagagtcaggaaggtgtaaaagtggttcttaggccggatcttcagcccgttgcattgcatggaatccgaagtcttcaaattangttcatcgaatcatgatctgatttgtttagaaacaaaaaaaaaaaaaat

SEQ ID NO: 18525 - DNA, 563 bp, Setaria italica
  Peptide Sequence Number=SeqID_84499
ctcactcaatcgatcctagcccactccagcacctctgtcaggcgagtccacaaaccctccgctccgcagcccgcacaccccttcatcacataagcgctcgccggagaggagaagggacgaaaccctagcttgtggcggcggcggcggagaaggagaagatgatttacgacgtgaactcgcccctcttccgctcctttctcagccagaagggcggcgccgacaagaggaaaatggaggagcataaaccaaaggagcagaggcccaaggccaatgagaacaagcctgtgatgaacgaatgaaaatatccagaagctccattcattagacccgtggcgaatctcaatgtgtgtttgctctgtttagctttaacccaacgcctcctataatcttagccatgtcctagtttcctcttatagtctcaatcgctacggttgaacatggtgacagtgcaacggacatgaaacttgaactacctatgggactatgatcaattggagacacccatgattgacaacttttcagcagcgcctcctgatacttacctaaaacttaaaaaaaaaaaa

SEQ ID NO: 18526 - DNA, 960 bp, Setaria italica
  Peptide Sequence Number=SeqID_84500
ttgttccgttccgtacgtctagtcgggtagtccccttcggcgcaggatgcaagagagggcgagcagccgccgccgggtgctgatgcagaagtagggggcgagcaggagagggtgccggatctcggggaggacctggtgttcgaggtgctgatgcgagcggaggcgcggacgctggcgaccgcggcatgcgtgaaccggggctggcggcagctggcgcgggacgagcgcctgtgggaggcggcgtgcgtgcgggagtgttcaaacctcggattctccgagcagatgcttcgcatggtcgtgctctcgttcggtggctttcgccgcctgtacgagctctacatccgtccggtccagcggcgtgctgcaggcgcgccgcccgggcaacggaggggtcaggtgccggtgaggttgggcccggatcaggtccaagtctcactgtctatgctctccacatcattctttttgaagatgccgaatgccccccctccacctaagaaggacaaggataacgatagagataagaatggaggtggacagtgtgggtgatgaagcttgcaaaaatagcgagcctaccttccaagcatcatcatcacaagctgcaaatgcagtattaggtggccagatcatggatccttactgcatttgtgggaattagaatgcgatagtattgtttgatcagtggatggaaaggactgtggatcctgtactgatggggaggcagataagctgagtaagatgggattgaaggggttgcagtagtttcttgaatagctgccaaatctatgtgatgtacctgctaaattacgcaccattagctgatgtgtaaagtttccttcaaatatatgtgccaagagagcagcatgcattgtcctacgtttgtgctgttgtgctatgtacttgtcgaattcccataagggtaaacaaaaagaaaaagaaaactaaacaaactttaagacctag

SEQ ID NO: 18527 - DNA, 1176 bp, Setaria italica
  Peptide Sequence Number=SeqID_84501
acattactgccaaatcttggagttgtctcgttagattttgatgctacaatggttgttgcagaccttcctggtctgctggaaggcgctcatcgtggatatggtttgggttatgagttcctaagacatagtgagagatgttcggtcttggtgcatgttgttgatggttctgcccaacagccagattatgagtttgaggcagttcgcttggaactggagttatttagcccatctttggttgacaaaccctatgtggtagtgtacaataagatggaccttccagaggcatccgatagatggaatacatttagagaaaagctacaggctcaaggcattgaaccttattgcattagtgcaataaacaggcaaggcacacatgatgttattcatgctgcttacaagcttctacagaaagagaggcaaaggataaaggaaactgaagaatggagtgggacagaaaatttgaaccacgtgtcggatgcaattaaaagggaaaggcgtgctcccatgaatgagtttgagatttttcatgataagggtacaagtacgtggactgttgttggagctggaattgagcgttttgttcagatgaccaactggcagtactcagattccttgaaaagatttcagcatgccctagaggcatgtggtgtcaacaaaactctcatcaaacgtggagtcaaagagggagacacggtgataattggcgagatggaaatggtttggaacgatgaagctaaaagtaaccgtccatcaaagacgatgaacacaaaagatgatgctgtccggtggcccgaatttggctagagcaagagttattcagcttcttcttagatgtagagcaagatgctagtggtcggcgtgcacatctttcgtgcagtttgcacgcaatgggcacgattggcgttcagatcagtgagcccactatactgcttccactttccagatgatctgaacgcgcgctggagagacgcgtcgattggagtccgatggttggaagttggaacaagttgccaaggaagagcgacgctgggcgctgaagttttctcacggttttccacagaacgcaagagtagattatacagatgtgatgtttgctgagaaatgtaacttattttgtaagaaaagaaggtaaatgtcttcttgtgcagtgtatgtacgcaatcgaactgttttagt

SEQ ID NO: 18528 - DNA, 558 bp, Setaria italica
  misc_feature (524)..(524): n is a, c, g, or t
  Peptide Sequence Number=SeqID_84502
cgctcacactccgttgtgcttgtgctacccactcgaagtagcagccattggctagtcgccacccatgcctgcggcgccggggaccggccccggctgcctggggtcgccggcgcaggccccctcgggctccctcgccggggttcaaggccgccccgcggcggctgggaacatcgaagccgttagggatcgtccgcactgagtcaaacgtgaggagggagaggccaaagcgacctgatcctccttgcaccatctgcaaaggcacagggaggaataggactgccggaactgtttcggccgaggcagaacaaaccatgccgagcttgtcatgctcccgaagggcgaatggccacactggtgtcgaatttgtggtggcagtggactggactactgcttccggtgccatggaactggtgaatatcgagaaccaatgggcttccacttcactgttaaaagcaaatgagcttttcgcgtctgcaactgactagtcgggtaaaaacgcatcaatagaagaggaaaacataacngttatgctacgatgtgcagttgaactgtaccagt

SEQ ID NO: 18529 - DNA, 586 bp, Setaria italica
  Peptide Sequence Number=SeqID_84503
gtgctccgcctggaatacaatcataaagttgaaagtaccagatattcctaaaggcataccatcagagaaacttccttgaccaataggataaatcaagaaaacagcagtagcagctgcaacaggagctgaatatgcaacagcaatccaagggcgcatacccagacggaaactaagttcccactcacgacccatataacaagctacaccaagtaagaagtgtagaacaattagctcataaggaccgccattgtataaccattcatcaacagatgcagcttcccaaattgggtaaaaatgcaatccgatcgccgcagaagtaggaataatagcaccagaaataatattgtttccataaagtaaagaaccagaaacaggctcacgaataccatcaatatctactggaggagcagcgatgaaggcgataataaatacggaagttgcggtcaataaggtagggatcatcaaaacaccgaaccatccgatgtaaagacggttttcggtgctagttattcctagtttgtctagtaagtcgtacccctactaggtctttgttacttttcgtcgttcttcttcttaaaaattagca

SEQ ID NO: 18530 - DNA, 308 bp, Setaria italica
  Peptide Sequence Number=SeqID_84504
taaaaactaaaaaactaaaaaaacgtaaaactaaaaactaaacgctcatcacacgcacatccaaagagcccgaccgctcaaagaccatcctctgaacctgcactgcaccgtgcctagctagctccagctcgcctcccgccgacgatccgccatggggatggtgctgggcaagatcacggtggagacgcccaagcacgaggtcctccacaccggcgccggctacgagatccgcaggtacccgccctgcgtcgccgcggagttcacctacgaccccaaggagtggaagggcgaccccgacggcgggttca

SEQ ID NO: 18531 - DNA, 367 bp, Setaria italica
  Peptide Sequence Number=SeqID_84505
cgcaagttcgcaacgcaccaagggaggactccgcctcgtgctcctcgcttcctcctcctcctagtcgtcttacccacccgtaccacccctccccaccctgctcccctttccttccccaattcccaatccctagccctcgccctctcctcctcctcctccgccgccgcctccgccggacccggagatgcaggccgccgcccgccgccgcttccggtgggtcaaagagtgggtcccgcaggacctggtcgtcgccggaggcccctgcgcgctcttcaagtgggtgcgagaggatagactagcagctttgaaagctaaggacaaggaacagggggcagaatctgcaacacctgaaccgaacaccgaggtt

SEQ ID NO: 18532 - DNA, 1173 bp, Setaria italica
  Peptide Sequence Number=SeqID_84506
aactaaccgaaactaacaaagtctccgactcagtcgcactaggagaggatagactagcagctttgaaagctaaggacaaggaacagggggcagaatctgcaacacctgaaccgaacaccgaggttctcttcctgtgcagctatgaaggatgtgggaagacgttttttgatgcaggggctcttcggaagcatgctcatgtccatggggagagacaatatatctgtcactatgacaactgtggcaagaaattcttagatagctcgaaattgaagaggcattttcttattcatacaggagaaaagaactttgtgtgccctcatgaaggctgtgggaaggctttttcattagattttaatttgaaggcacacatgaaaactcattctgcggataactatcatgtgtgccagtacccagagtgtggcagaagatttacacaagaatcgaaactaagagctcatatcaggtcacaacatgaaaaagttgttggcctacagaatccaggtgtgtcgaccgtgaaccacaatgccctaggagattatcatcagccccctaagccagtaaaggcttctgcaactcctccagctccctcagccgagcgcccttatgtctgcccttatgatggctgcgacaaggcatacattcatgagtacaagctgaacctccatttgaaaaaagagcaccccaaccactaccaggacaatggtcctcaaggcgctgccccttcttcaaagcgctccatctcgaagagttcccacagaagcaagccggacatcaccgctaggattccaccgcccaagattccaaagcgcaaaggagggtacgcagcaccattgcctgcggtgactgccccggaggagcaccagtggtcaaggaaagcgacgtacgaggatgacagcgaggagaccgaggaagagggggacaacaatgttggggatgcatggagatacagcaaacctgctagcagcgacgacgaggaaactgaagacgaagaatgagctgctagcgcccattcgtcgttcagtagctgtggatataatttacagactttgggggggatatagtttctcatacatgtacaatgttaaaaataaggctgacttgttagtagacaacagaggttttagttggcctgcccctttcaagtagacgtctcatgacttcatcagaaagtat

SEQ ID NO: 18533 - DNA, 409 bp, Setaria italica
  Peptide Sequence Number=SeqID_84507
cggttctagcattcaccagtgatctactgatggataatgccttttccctttcctcacacgataggtgcacattgcgggagctcatggcaagaccatcagcttctcgcactatttctgagccaataatctcaatggcaaaatcaagatcatgaaccatccggcagatgacgcgccactgttgataatccttcttcccaaacaccgcgatgtccggctcgacgatgttgaagagcttggcgacgacggtagccacgccgcggaagaagacgggcctgctgctcccgcacagccccttctccagccgctccacgcgaatccacgtctcgtgcccgtacccatcgccctgctccaggcaggagatcgcgcccccggactcgctggcatcggggcggccgcgcggacatagagg

SEQ ID NO: 18534 - DNA, 602 bp, Setaria italica
  Peptide Sequence Number=SeqID_84508
cgaagcgcaagagggcggcggcgtccgccgcgcccgccaagaagaagaagccggccgccccgcggaggcgaagaaggccttcttctcctcgcccgcggcgagcttgaaggaggccttgaccttgacgagccggcccttggcagcgaagttgcgcagctgcacggccagcaccttgcggtagttggccgggagcacgtcccggtgcttctcccccatgtgcttggcgatcgcgtacgggctcgcccccgccttgccgtcctgcgacaggatcgcctccttgatcatctcgaagtagggcgggtggtgcggcccggcggacttgggcttcctgctccgcggcttcttcaccttcttctccacctcctcgggcttcttcccctcctccgccgccggcttcggctcctcctccaccttctccggcgcctccacagcgcccgcttccttcacttcctccaccttctccggcgccggcgcctcggcaacgacaggtgcaacttcctcagtcgcggtcgccatgggaaaacaaaagaatacaactactaactactagtttacggttagttagaccttagttagtaattagtacttaaagttacggttaa

SEQ ID NO: 18535 - DNA, 675 bp, Setaria italica
  Peptide Sequence Number=SeqID_84509
ccgccttcctggcccgcttcgcgcgcgccttcttcgcctccgcgggggcggccggcttcttcttcttggcgggcgcggcggacgccgccgccctcttgcgcttgcccgccgccggcgccttcgccctcgccatcgcggcggcggccttcttctcctcggccgcggcgagcttgaaggaggccttgaccttgacgagccggcccttggcagcgaagttgcgcagctgcacggccagcaccttgcggtagttggccgggagcacgtcccggtgcttctcccccatgtgcttggcgatcgcgtacgggctcgcccccgccttgccgtcctgcgacaggatcgcctccttgatcatctcgaagtagggcgggtggtgcggcccggcggacttgggcttcctgctccgcggcttcttcaccttcttctccacctcctcgggcttcttcccctccgcctcctctgccttcttcccctcctccgccgccggcttcggctcctcctccaccttctccggcgcctccacagcgcccgcttccttcacttcctccaccttctccggcgccggcgcctcggcaacgacaggtgcaacttcctcagtcgcggtcgccatgggaaacaaagatcactctactctgtttcggtgtgcctgtgatgcaagcggatttttctttatttcta

SEQ ID NO: 18536 - DNA, 319 bp, Setaria italica
  Peptide Sequence Number=SeqID_84510
gggtcattattgttatccaacttgagatactgcgatctgagtttgcgctgatcggcagtcccgcaatctatgaggccaatccaactcaacatatcggtgtatcctgctctggtggtcttgagagccatgagccttgcttcatgccagatgctgagcaagttgttagcaactcatcgtgtttttctagtcatggcttgttggattctttaattactccaagcgcagaacctgctgtgaataatatgccattcggaggatgtcttagtccaatgcaagcacagagcacagtaaatgccaagatgcagcagctttcattaaa

SEQ ID NO: 18537 - DNA, 761 bp, Setaria italica
  Peptide Sequence Number=SeqID_84511
ggggagcgccgcggcctcctcctcgggcgcggtgaggcaggacggccagcccttgaccacccgacgggccccagttgtcgccgacggcggtgagctgcacgacgcaggtccagagcagcaccgtggtggtggcgcgcacgacccagagcttcatccgcgagcgcgcggcggcggaggagggagggaacctgagcttctcgctggccgccgccgccgccttaccccctgacgccaccttccaccccatggaccatggaccaagcaagaaggggcgagagccaccgacggcgttgggaacgaagctcctcctcccgaatcaaatccgccgcgtcctcggcgcacccgccgcgctactcccgcccaatgcggctgggaacagggcctctcctcctccttccttgcccccaaccagcaccgccgcccgaggctccggcctacgcgagcttcgcaggaaaaacgagagcctcaccggcgcccgcaaacgcggtcctcgcccgaatccggccgccgcgagcctctagctaaggcaccgcgcctcctcaccaccacggccagcgtcctcctcctcctcctcctgtgtagcggctccctcgaccgggcagccaaaaaccggccgcgcttgctcggtcggccgcgggcgcggcgagatcgcgggggaggcagcgtcggccgccgcaggcggaggggggggcaggccggcggagaggacgcggcgtggatctcggggggacgggggtagcagcgctagcgcagcggagcga

SEQ ID NO: 18538 - DNA, 593 bp, Setaria italica
  misc_feature (554)..(554): n is a, c, g, or t
  Peptide Sequence Number=SeqID_84512
cactcgctcggcccagccgcgcctctctcctcgttccccttccctcacctctcgagaaatttctgacgcaagcatccgccgctgtcgcctcatcaccagaatctgaccgtgatgggaagccccctctccttctcgttccccttccctcgcctctcgggaaatttctgacgcaagcccccgccggcatcgccgtcatcaccagaatctggtcgtgattggaaggctctggcgtgtgcgtctacaacctctgccgccagggctgcacctccgacgccaccggcatactcctcgccgccgagggctgcggctcctccgtcgacgtcgtcacagggtaagggtactgatggtatgaccacgtcgtcgatgcgcgctggttcatctatgattccttgcttgcagttgcaggttgtgaatcatgaatctgcaacgaagacaatgaatttcatggtgatgacagtgatgtattccatttgctactgtggatgatgcagttgagaatgtacactgccaatttgagaatttcagtttctataactatggcagaaaaagcttgngctttgcttggcaaaaaatttcaggtaattgcagagttg

SEQ ID NO: 18539 - DNA, 243 bp, Setaria italica
  Peptide Sequence Number=SeqID_84513
gggctgtcagtatccagcacaaggccaggcacaagtagcacagtttttgcagtcttagggggacttcctaccaacaacactagaactgcaacaaggttcagcgaaacggttaaaatggttacaagttccagtgtgttgattcctctgctgaccaggcgcatattcttctctgcctttgcctgaatctccattgcttcagagttgagagcctctactgtggagttgagatgatcccacgcttgg

SEQ ID NO: 18540 - DNA, 380 bp, Setaria italica
  Peptide Sequence Number=SeqID_84514
agacattgtaggactgccagttcttggcatggaggtcgtcgtcgtcctcgtcgtcgaggcggagggagaaggcgagcgcgagcgcggcccactcgaggacgaagatggcggtgccgaggccgccgaccatcttgaggatgacggcgccgtcctcgtcgcggacgtaggactggagctcggcgaggaagtcggaggtgcgggtgaaggcgaggagcgcgacggcgccctggaagatggcggtgagggcggcccccgcggtatgcgcgttgtgccactgggcgggcgtggcgggcgccgtgaaggagcccgagcagcccgcggcggagaagacggcggtgagcgcgtggaggaagagcaggagcaggccgcacggggagggg

SEQ ID NO: 18541 - DNA, 308 bp, Setaria italica
  Peptide Sequence Number=SeqID_84515
agccccatctacaacaccgcagcgcatttcgcgacaaaaaaaacaaaaatcacaacggtcgcctcaaattaatttaatttagcaccgcaattatatcaatttgttgtggtgtaatccatggacatggggcagcggttcatcgccagatatcatcgatcactgcgtggggatgaggggcgacggtggcggctggacggactgtgcgagccagtcggactccggcagcggcgtcatgggcggcagcgagaagtggccgacggtggagctgccgctgcggacctcctgcatggtgagcagcgcggcgacgg

SEQ ID NO: 18542 - DNA, 351 bp, Setaria italica
  Peptide Sequence Number=SeqID_84516
tctaggtaccgacaagctcatgcaggacaagaaggggaatgctgtggccccaaagaagttcgacaagctgcagaccccggcgtcgcacaaggacgtggggctcttcagggtgaccggcgtgttcccgagcatttccatggatggcaaaaggctcgccttcgtcgacaacgagttcaaggcagtgtgggtcgccgacaaggacggcctgcgcgtcatccacaaggagaacggtgagaacaaggtcttctcgacggcatggagcaacagcaaggagaagaccatcctgtacatctgcgacggcccggccttcacccgcgcgaagacggtggagatcaaagccatcgtgaagaa

SEQ ID NO: 18543 - DNA, 368 bp, Setaria italica
  Peptide Sequence Number=SeqID_84517
aaacttagacaagttagtacaatggcaagacctactggatgctcttaggtaatgtgggactggcttctccttcctcttaacatcaagcgtcgtgctggtaccatctatgatcactggagagtttatgaggaggtcttcgcactttggatcagctgatgcaggagttgaggtgatgacctctttgatcacttcttcagtcattagaagcacaggagctcccgcgccgatccttgatggagattcagagacgcaggcgggcagaggccgcgcgacgcggtgccgtgcgccgggaggaaatggcttcgcttgccgccgcgccgccgccgaagggacgagcagctggtcgagagagggggagaaggaagggg

SEQ ID NO: 18544 - DNA, 325 bp, Setaria italica
  Peptide Sequence Number=SeqID_84518
gcgccgtcccctccgcctccgccgccgaatccgagactccgatctcgggttcaacgcagcgcaccaaagcaaccccggcgaccggcccgatcagctcttctctccgcgcgtcaggtggtcgcctccccagatctccccgcctcgttcctcatggcgggaatggcacctgagggttcccagttcgatgctaagcactatgattctaaaatgcaggagctgctgaacactggtgagactgaggaattcttcacctcatatgatgaggtttttgagagcttcgatgacatgggcctccaagagaaccttctgagaggcatttatgctt

SEQ ID NO: 18545 - DNA, 232 bp, Setaria italica
  Peptide Sequence Number=SeqID_84519
cttcatccaggacaaacatcttgatgtgatcaggacggagagactgcctacgcaacatgtcaaacacacgtccaggtgtccttggtcatcaactacgatctccccacccagcctgagaactacctgcatcgcattggtcgtagtggtcgtttcggtaggaagggtgttgccatcaactttgtgacccgtgatgatgagaggatgctgtttggcaggcagctcctcaatcacc

SEQ ID NO: 18546 - DNA, 246 bp, Setaria italica
  Peptide Sequence Number=SeqID_84520
tagcatgctagtcatcacatagatgatagatctgcatattcttgttgtatggtcttttgcttcagccttaagaagttactatttattttgttgcaggcacagtttttgttagatggatcctctggccctggaatgtggattgtccctataaccgcaggatgtggttcatatggtatgcagaaaaaatttctactgaaaggaaaaagtgataggctggatataagaaacatttcttcacagtgtagg

SEQ ID NO: 18547 - DNA, 231 bp, Setaria italica
  Peptide Sequence Number=SeqID_84521
gaatttttacatgatttcagtgcttagtagaattgtaatatgcactgagaatgtttctgacctggttgtgcttagtctaatcttcctaaaccagatttgaaatgttcatgtcctttgaactgacatatgtgccatttgctgcagatctatgatatcttccagcttcttccatcaaagatccaggttggtgtgttctctgctaccatgccccccgaggcccttgagattacc

SEQ ID NO: 18548 - DNA, 767 bp, Setaria italica
  Peptide Sequence Number=SeqID_84522
ttttttttttttttttgttactacaaataaataccatcattcggtcatacatagttttaaacaaaaatactaaagacgaaaagactccagcaccagcagcgtctcccctccatactaatgaacccccacagtagcacatagcacaggcctaggcagctacaaaaattcccaaaacatggcataaggaaaaatcacaaattgtccatgaccacgacttgacatagaaaccccaccgaccttgtcactccaccccacatatggcgatatttcaacaaaaacaagccttatcaggtccccttaccacttttttttgttctgttttgttttttcttcaactcgatcacagaaggtcagcgacgttggcaggcagctcctcaatcaccactttgtgacccgtgatgatgagaggatgctgtttgacatacagaggttctacaacgtggtgattgaggagctgcctgccaacgtcgctgaccttctgtgatcgagttgaagaaaaaacaaaacagaacaaaaaaaaagtgctgcctaggcctgtgctatgtgctacttgtggggggttcattagtatggaggggagacgctgctggtgctggagtcttttcgtctttagtatttttgtttaaaactatgtatgaccgaatgatggtatttatttgtgtcatccttgactcttgtattctgctgcaaccgcatgtatccttctatcagcactggtctttgttattctgtgcgagtaaaacctgtttactcatcgcaaaaaaaaa

SEQ ID NO: 18549 - DNA, 671 bp, Setaria italica
  Peptide Sequence Number=SeqID_84523
agaagggaacaatccccctttgctgaatagctgatggtttctcaaaaccgtaggcatagatgcctctcagaaggttctcttctgcaaggggcttgatgtgattcagcaggcgcagtctggaacaggaaagacagctacattttgttctggaattttgcagcagcttgattatggattggttgagtgccaggcattggttcttgctccaacccgtgagcttgcacagcaaattgagaaggtcatgcgtgctcttggggactacttgggtgtcaaagtgcatgcctgtgttggtgggacatctgtccgtgaggaccaaaggattcttgctagtggtgtgcatgttgttgtgggcacaccagggcgtgtgtttgatatgttgcgtaggcagtccctacgcccagacaacattaagatgtttgtgttggatgaagctgatgagatgctctctcgtggtttcaaggatcaggtttgcttcttactcctctttatgttacaactttggtgctatgatcattcatgctttatacttgttatgctgctacttagtgttttttgtttagttatgttacatgcacctgtggtttatccagttgtctgctgacagttcgattgatgtggaatgtgaccaaaaacatatctgattgttagagttgcatgatctgattaagttt

SEQ ID NO: 18550 - DNA, 543 bp, Setaria italica
  Peptide Sequence Number=SeqID_84524
gatgctgtttgacatacagaggttctacaacgtggtgattgaggagctgcctgccaacgtcgctgaccttctgtgatcgagttgaagaaaaacaaaacagaacaaaaaagtaggtaaggggacctgataaggcttgttttgttgaaatatcgccatatgtggggtggagtgacaaggtcggtggggtttctatgtcaagtcgtggtcatggacaatttgtgatttttccttatgccatgttttgggaatttttgtagctgcctaggcctgtgctatgtgctactgtgggggttcattagtatggaggggagacgctgctggtgctggagtcttttcgtctttagtatttttgtttaaaactatgtatgaccgaatgatggtatttatttgtgtcatccttgactcttgtattctgctgcaaccgcatgtatccttctatcagcactggtctttgttattctgtgcgagtaaaacctgtttactcatcgcatattgtggttgccggcgttgatgcccatgatggtgtagaagctgccattggtg

SEQ ID NO: 18551 - DNA, 566 bp, Setaria italica
  Peptide Sequence Number=SeqID_84525
tgctagtgaagttgatgaaatttttgtatgccataagctatgataagggtgcttctgttattcgcatgctacaaaattaccttggtgctgagcgttttcagaaagcattggcttcatacataaaaaaatttgcctactcaaatgctaaaactgaggacctgtgggctgttcttgaagagaaatctggtgaacccatcaagaatttgatgactacatggacaaagcaacaagggtatcctgttattaatgcaaagcttaaagggaatttcctagaacttgaacaggcacagtttttgttagatggatcctctggccctggaatgtggattgtccctataaccgcaggatgtggttcatatggtatgcagaaaaaatttctactgaaaggaaaaagtgataggctggatataagaaacatttcttcacagtgtggtaaccaagagaagagtgggaacttttggattaaattgaacattaatcaaacgggattttatagagtgcaatatgacgataatctttcagctgcacttcaaaatccattacagagagcttcttggacagtaatg

SEQ ID NO: 18552 - DNA, 543 bp, Setaria italica
  Peptide Sequence Number=SeqID_84526
atcaactatgacctgccgacccagcctgagaactacctccaccgcatcggccgtagtggtcgtttcgggaggaagggtgttgccatcaactttgtcacccgcgacgatgagcggatgctgtttgacatccagaagttctacaacgtgaccgtcgaggagctgcccgccaacgtagctgaccttctctagattgtgtcctaggtgtctgctaaggtgctggataaagaagtctgttttagttaaaaagtatcgccaacttctctatgttctggaggagtggtaatgagttctactatttgaattgtggctaaggatggttttctaagcttttccttctatgcaacgtttgtgaaaaattttgtagcgtgtagagttgtgccgcagcctgggatagctgggcgctgagacactgctggagtattattttaccttcattgttaagctactatgcctgtcctgtgctcttgcttttctgtgcagtggtaaatcaactgcctatttgctgtttaaactaaaaaaaaaaaaaaaaaaaactaacgagac

SEQ ID NO: 18553 - DNA, 824 bp, Setaria italica
  Peptide Sequence Number=SeqID_84527
tcctcgtgaagagagatgagctcacccttgagggtatcaagcagttctatgccaatgtggagaaggaagattggaagcttgacactctctgtgacctgtacgagaccctggccatcacccagagtgtcatcttcgtgaacacacgccgcaaggtggactggctcacagacaagatgaggagcagggatcacaccgtctctgccacgcacggtgacatggaccagaacaccagggacatcatcatgagggagttcaggtccgggtcctccgtgtgctcatcaccaccgacctgcttgcccgtggtatcgatgttcagcaggtgtccttggtcatcaactacgatctccccacccagcctgagaactacctgcatcgcattggtcgtagtggtcgtttcggtaggaagggtgttgccatcaactttgtgacccgtgatgatgagaggatgctgtttgacatacagaggttctacaacgtggtgattgaggagctgcctgccaacgtcgctgaccttctgtgatcgagttgaagaaaaaacaaaacagaaacaaaaaaaagtggtaaggggacctgataaggcttgtttttgttgaaatatcgccatatgtggggtggagtgacaaggtcggtggggtttctatgtcaagtcgtggtcatggacaatttgtgatttttccttatgccatgttttgggaatttttgtagctgcctaggcctgtgctatgtgctaactgtgggggttcattagtatggaggggagacgctgctggtgctggagtctttttcgtcttttagtatttttgtttaaactatgtatgaccgaa

SEQ ID NO: 18554 - DNA, 989 bp, Setaria italica
  Peptide Sequence Number=SeqID_84528
agacatgcttcagatggctaatcttgtgccaactaagttgcataaaaaattatttctttgccctgtgcttattatgatattctaactgaaactgaaacattctaaaagaatgaatgtcataattttttttttgatttatgcctcaaccaaaatcagtaattcatggtgtggtatcctgtctttgttaaatgcagatttatgacatcttccagcttctcccatccaagattcaggttggagtcttctctgctaccatgcccccagaggctcttgagattacccgcaagttcatgaacaaacctgtgagaatccttgtgaagagagatgagctcacccttgagggtatcaagcagttctatgtgaatgtggagaaggaagactggaagctggacacactatgtgacctgtacgagacccttgccatcacccagagtgtcatctttgtcaacacccgccgcaaggtggactggctcactgacaagatgaggagcagggaccacactgtttctgccactcacggtgacatggatcagaacactagggacatcatcatgagggagttcaggtctggttcatcccgtgtgctcatcaccaccgacctgcttgcccgtggtatcgatagttacaagacaaggtagtaccttggtcatcaactacgatctccccacccagcctgagaactacctgcatcgcattggtcgtagtggtcgtttcggtaggaagggtgttgccatcaactttgtgacccgtgatgatgagaggatgctgtttgacatacagaggttctacaacgtggtgattgaggagctgcctgccaacgtcgctgaccttctgtgatcgagttgaagaaaaaacaaaacagaaacaaaaaaaaagtggtaaggggacctgataaggctttgtttttgttgaaatatcgccatatggtggggtggagtgacaaggtcggtggggtttctatgtcaagtcgtggtcatggacaatttgtg

SEQ ID NO: 18555 - DNA, 1671 bp, Setaria italica
  Peptide Sequence Number=SeqID_84529
ttttttttttccagaaaaatcaactcttatatttatttcccatatatagaaatcgacacagaattacatatgcacaaccatcaagcatcaaatgatcccaaaaagatcaaacatcaaactctttcatcatatcttcttgcaactgttcgtcgagggtaaaactggaactttcttgaagaatgggatgttctgaaatgtccaccagaatgaagttagtaacgtcaaacaaaaccatgaataatacttgaataaactaccaaaaacagagcaacattccaactgaatttagcataaaaaggaaaggtaccatcaaacacatgcattcgttacgttatcagacaagttagacacatatagggccatcttttcaatcacgtaactgatggaatacaattaaaccatgaaagtagtttgtcgtcaagctgttaagcatctatttgctaataaccctagtttaggaatttggaattcatttcaagccagccttgctaccctcagcttatttggtgtacctggctttactctttaggtctacttttcaatagagtcgaacaattgactgtctcagaattgtaatttctaaccagattccatttaataagttacaacaaatccaccaaaggtaagccagcctaacaactaaatgagataattactttgtaatccgatatccacgaagtaacaagacaaagtcattaaagcttaacattacaaccccaacaatggcttccgttactcgttacacttcctttcctcttacagctgggactagttaaaaaaaaagaaggaaatggtttgtcttgattgcatttgaactttatatcccacctaattacaccgtgttggccaagtttagtctagtggggtaggctcataagcattcaggcaaagcaaattattttggtgacaggcatatgcttcccagacaagcctcccatggatcttgcgtgcacacaaccactaacaatgacagcgatatgtatgagaatcaatcaacacaaccaaattttgaaataaaaaaacaaggcagatacatgctggcaggctataagtttcagaattagtgcatcacaaagaccactctacagactactgcaaatgcacccaataaagcatacgagagcaattgaatgcttgctgcaccataatttataccttacagagctcatagcacatcccaagcagtaatagcagtcagataacaactggatcaattaatctctgcacagttcaatcaagacaggctatccagacacggcatccccgtgatccaggacaatattgacgacatgaccaaccaattttacaccacacacgcgaaatcccagcctcccgaaatcacagaaatttgccttgatgacagatgagtaatctaaaaggatggatcctgcttattcgaacggcatcatccaatcaatcggatcaaactaccaaaattacgcgccagatccagatccggatcgctaaacctaggcagagatccgcacgccaccccctatcaacctccacggcgctacagaatcacagcaaaccaacaaccatcacgatccatcctagaaacgcaggcaacaagcaggctaaacgactcggtaaccaatcaatagcgcgagagagcggcggccgcggcggcgaccgtacgcacggcggcggcggcgcggccggggtgctggg

SEQ ID NO: 18556 - DNA, 2668 bp, Setaria italica
  Peptide Sequence Number=SeqID_84530
cgccgtctccgcgcccacccgcttcctcgtcctcaacgccgcagacctctccgtcgatcgcgcctccatccgcttccgggatttggcgcctaaggatgtggtgtttttcgaggacgatgagatcctggtgctggggttctccaatgagctgccactcggcgagggcgtgctcagtatgaagttcaacggcacgctcaacgaccagatgagggggttctaccggagtaagtatcagtataaggggaagatgaagaatatggcggtaacacagtttgagtctgtggatgctcgacggtgcttcccatgctgggatgagccttcattcaaggctaagttcaagcttacacttgaagtaccacctgggctggtggcattgtccaatatgccaatagctaatcagacacttactggtcctttcaagactatcagttatgaggaatcacctcttatgtcaacttacttagtggctatagttgttggtttgcttgaatatatagagggtgtaacaccagaaggcacaaaagttcgtgtgtacactcaagttggcaagagtaatcaggggaagtttgcactggatgttggagtgaagtcattgcatctctataaagattacttcggtactccttatccacttcccaagttggatatggttgctattcctgatttttctgctggagccatggagaactatgggctggttactttccgtgaagtagctttgctttttgatgaggagtcttcatcagaatcaagcaaacagaatattgcaattactgtggcacatgagctggctcatcagtggtttggcaatcttgtaaccatggaatggtggactcacttgtggctaaacgaagggtttgctacatggatgagtcatctagcagtagattctttctttccacaatggaatatttggacacaattccttgatgacacaaccgctggtctcaaattggattcacttgaagaatctcaccctattgaggttgaaatacatcatgctagtgaagttgatgaaatttttgatgccataagctatgataagggtgcttctgttattcgcatgctacaaaattaccttggtgctgagcgttttcagaaagcattggcttcatacaataaaaaaatttgcctactcaaatgctaaaactgaggacctgtgggctgttcttgaagagaaatctggtgaacccatcaagaatttgatgactacatggacaaagcaacaagggcacagttttgttagatggatcctctggccctggaatgtggattgtccctataaccgcaggatgtggttcatatggtatgcagaaaaaatttctactgaaaggaaaaagtgataggctggatataagaaacatttcttcacagtgtggtaaccaagagaagagtgggaacttttggattaaattgaacattaatcaaacgggattttatagagtgcaatatgacgataatctttcagctgcacttcaaaatgcattactgtccaagaagctctctgtaatggataaaattggcattgtggaagattcgcatgccttgtctatggcctgcaagcaaaccttgacatcgttgctacgcttactgtatgcttatcgtgacgaagctgattacagtgttctttcacacatcaatactgtgagtttaagtgttgctaaaatatcagttgatgctactcctggattggttggtgacatcaaacaacttctgatcaagcttctcctgccacctgccgtaaaattaggctgggaccccaagaatagtgagagccacctggatgcgctgcttagaccagtgctcttggttgctcttgtcaaacttgggcatgataagactataaatgagggtgttaggcgtttcggtatctttgtacatgatcgcaacacttcacttcttcctcctgataccagaaaggctgcatacctcgctgcaatgcagaatgttactagttcatacagatctgcttataatgatcttctgaaagtctacagggagtcagatgaagcagaggaaaaatcacgtgtcttaagcacattgtgtttttgcaaggataaaaatattgttcttgagtcattgaatctcctttttaccaatgaggttcgcagtcaagatgcatattatgtacttcagggtcttggcgtggagacacgtgaaacagcttggctgtggttgaagagcagctgggaccgtatcacaaagaaatacagtgacacacaagatggaggttttatcagatatatcgttacattgttctcctccaacgagaaggcagcggagttctccagcttcttcgccagccgcaagaagcccgagttccagaggacgctgaagcagagcctcgagagcgtgcgggtgaacgcgaggtggatccagggcatcaggagcgagaccaggctcgcacagacggtgcaggagctgctgcggaggccctgatccatctgccttgttgcgttgctggggtgtgtgtggctggtaataaggtgacggcaaagatggcaatggtgtgcgtttgtacattctcagtgtgaaaaggttgtctctcgtagtgttctctgcaccatattcggttcaatttttagctgtatatcggtgatttggatatctgatgtgagaagtatctatctatattatctatagaaagtatatggagcgagtttttttt

SEQ ID NO: 18557 - DNA, 589 bp, Setaria italica
  Peptide Sequence Number=SeqID_84531
cccatggccaccgcgtccctgtccgccgtcgcggcgccgctgtccgtcgccggggctcaggaagccgacgtcgtcgttccagcccctgcagctgagggcgaggccggccgccaggatggccgtccgggcgtcggcgtccatgaaggagaaggcggcggccgggctgaccgcggcggccatggcagcggcgctggtgctgcctgacgtcgcggaggccgcgcagtccgggctgacgccgtcgctcaagaacttcctgctcagcatcgtgtccggtggtgtcgtgctcgtggccatcgtcggcgccgtcgtcgccgtctccaacttcgaccccgtcaagcgggcctgatcggtcattcgttcgttaggaggcacgcctccccctgtatcatgtatcgagtggtgtaatcttgctatcttgttttggagaatgttcaaacatgtttatgatacggagttcgagttaaatcatcgtttgctttttgtatatgtgattgatgctttgatacatgcatggtgtatagttcaattaacactgatgcttttactttgaagtgattactgaatggtagaaaataaaaaaatcaataaa

SEQ ID NO: 18558 - DNA, 1609 bp, Setaria italica
  Peptide Sequence Number=SeqID_84532
cccccccaaccgcaaaacgccaccgccgaatcgaacccgagacgccgatctcggattcgcagccgccgccgtcgccgtcgcaccagccctccagcgtcccccctcctcgccgcccgtcgtcgcgctctcctccccgccgctcgtcagccatggcaggattggcaccagagggttcccagtttgacggcaagcagtatgacaacaagatgcaggagctactaactgaggagttctttacctcgtatgatgaagtctgtgaaagttttgacaacatggggctccaagagaaccttctgagaggcatctatgcctacggttttgagaaaccatcagctattcagcaaagggggattgttcccttctgcaaggggcttgatgtgattcagcaggcgcagtctggaacaggaaagacagctacattctgttctggaattttgcagcagcttgattatggattggttgagtgccaggcattggttcttgctccaacccgtgagcttgcacagcaaattgagaaggtcatgcgtgctcttggggactacttgggtgtcaaagtgcatgcctgtgttggtgggacatctgtccgtgaggaccaaaggattcttgctagtggtgtgcatgttgttgtgggcacaccagggcgtgtgtttgatatgttgcgtaggcagtccctacgcccagacaacattaagatgtttgtgttggatgaagctgatgagatgctctctcgtggtttcaaggatcagatctatgatatcttccagcttcttccatcaaagatccaggttggtgtgttctctgctaccatgcccccccgaggcccttgagattacccgcaagttcatgaacaagcctgtccggatcctcgtgaagagagatgagctcacccttgagggtatcaagcagttctatgtcaatgtggagaaggaagattggaagcttgacactctctgtgacctgtacgagaccctggccatcacccagagtgtcatcttcgtgaacacacgccgcaaggtggactggctcacagacaagatgaggagcagggatcacaccgtctctgccacgcacggtgacatggaccagaacaccagggacatcatcatgagggagttcaggtccgggtcctcccgtgtgctcatcaccaccgacctgcttgcccgtggtattgatgtccagcaggtctccctggtcatcaactatgacctgccgacccagcctgagaactacctccaccgcatcggccgtagtggtcgtttcgggaggaagggtgttgccatcaactttgtcacccgcgacgatgagcggatgctgtttgacatccagaagttctacaacgtgaccgtcgaggagctgcccgccaacgtagctgaccttctctagattgtgtcctaggtgtctgctaaggtgctggataaagaagtctgttttagttaaaaagtatcgccaacttctctatgttctggaggagtggtaatgagttctactatttgaattgtggctaaggatggttttctaagcttttccttctatgcaacgtttgtaaaataatactccagcagtgtctcagcgcccagctatcccaggctgcggcacaactctacacgct

SEQ ID NO: 18559 - DNA, 1809 bp, Setaria italica
  Peptide Sequence Number=SeqID_84533
ctcctgcgccgcgccgtcccctcgcctccgccgccgaatccgagactccgatctcgggttcaacgcagcgcaccaaagcaaccccggcgaccggcccgatcagctcttctctccgcgcgtcagtcatggcgggaatggcacctgagggttcccagttcgatgctaagcactatgattctaaaatgcaggagctgctgaacactggtgagactgaggaattcttcacctcatatgatgaggtttttgagagcttcgatgacatgggcctccaagagaaccttctgagaggcatttatgcttatggttttgagaagccttcagcaattcagcagagaggaattgtacctttctgccaagggccttgatgtcattcagcaagcacaatcaggtacaggaaagacagcaactttctgttctgggatcttgcagcagctcgactatggcctggttgaatgccaggccttggtccttgcacccacccgtgagcttgcacagcagattgagaaagtcatgcgcgcgcttggtgactacctgggtgtgaaagttcatgcatgtaagtgggtggaacttcagtccgcgaggaccaaaggattcttgctaggcggcgtgcatgttgttgttgggacacctggacgtgtgtttgacatgttgcgtaggcagtctctccgtccttgtattctactattctaagatgtttgtcctggatgaagctgatgagatgctttctcgtggtttcaaggatcagatttatgacatcttccagcttctcccatccaagattcaggttggagtcttctctgctaccatgccccccagaggctcttgagattacccgcaagttcatgaacaaacctgtgagaatccttgtgaagagagatgagctcacccttgagggtatcaagcagttctatgtgaatgtggagaaggaagactggaagctggacacactatgtgacctgtacgagacccttgccatcacccagagtgtcatctttgtcaacacccgccgcaaggtggactggctcactgacaagatgaggagcagggaccacactgtttctgccactcacggtgacatggatcagaacactagggacatcatcatgagggagttcaggtctggttcatcccgtgtgctcatcaccaccgacctgcttgcccgtggtatcgatgttcagcaggtgtccttggtcatcaactacgatctccccacccagcctgagaactacctgcatcgcattggtcgtagtggtcgtttcggtaggaagggtgttgccatcaactttgtgacccgtgatgatgagaggatgctgtttgacatacagaggttctacaacgtggtgattgaggagctgcctgccaacgtcgctgaccttctgtgatcgagttgaagaaaaaacaaaacagaacaaaaaaaaagtaggtaaggggacctgataaggcttgtttttgttgaaatatcgccatatgtggggtggagtgacaaggtcggtggggtttctatgtcaagtcgtggtcatggacaatttgtgatttttccttatgccatgttttgggaatttttgtagctgcctaggcctgtgctatgtgctactgtgggggttcattagtatggaggggagacgctgctggtgctggagtcttttcgtctttagtatttttgtttaaaactatgtatgaccgaatgatggtatttatttgtgtcatccttgactcttgtattctgctgcaaccgcatgtatccttctatcagcactggtctttgttattctgtgcgagtaaaacctgtttactcatcgacaaaaaaaa

SEQ ID NO: 18560 - DNA, 1680 bp, Setaria italica
  misc_feature (1599)..(1680): n is a, c, g, or t
  Peptide Sequence Number=SeqID_84534
gctcaacacattgctgatccattcatcagtattgatgctatagaagtgctagaggccatcaagaatgctcctggatgcttacagccccttgtgtcccgaatcctcccaacaattggatccattttagggaaacccaagatccagccggatggactagttgcaggttcactggacctgttggcgatgatactaaaaaatgctccaactgtcgtggttaaagcagtctttgacacatgctttgtttctactgttcaaattgttcttcaaagtgatgaccatggagaaatgcagaatgcgacagaatgcttggcagcattcatatcaggtggccggcaggagttgcttgtttggggtggtgaacaaggacatacactcaagatgctacttgatgcagcttcaaggctcttagatccaatgttggaaagttcagtatcactctttgttggaagctttgttttgcaactcattctacaaatgccttcgcacttatctgcccatataccggatcttattgctgctattgtgagacgaatgcaaacaagcagcattgcaggattgaaaagctcacttattgttataatagccagactagtacatctgagtgtaccaaatgttgatcagtttatcaatcttttgctttctatccctgcccagggatatggcaattcacttgtttatattatgtcagcatggtcagagctacaaggtgaaattcagggagcctaccaaataaaggtaactacaactgcattagctcttctcatatcaactcgtcatcctgagctatctaaggttgaagttcaaggtcatcttattaagactagtacaggtataaccacacgatcaaaagctcgggtggctcctgatcaatggaccaagattccactcccagctaagatcttctcgctattagcagatacattagctgaaattcaggaacaaatcggtggtggtagtgacgatgactgcgaagaggatagtgactgggaggaagtgcataatggtgacactagtatacctgatgatatcatatactcggcatcagttccttcaaatgcgaatccatcagttgaacatctaaatgctatggctaaagtttttgatgaggacgaggatgacagctatgatgatgatctgacaaaaaatgaccctgttaatgaggtgaagttagcagattttctgacaaacatatttaccaacctgtgggagaatgatcgaccactgtttgagtatctttgccagggcctatctgattcacagaggtcagctgttgaaaaggttttgaggaagtgatgcgtttacatgatttcgagcctaccttttaggctatatattcgtcacactagtgagcgagtcttgtaggcattggcgtggttttcatgcttgttgtaggttatcggtgtaaaactgatccagttctgaagcgggcattgcaaggttttgttagcgtaggtttctttatcttctttgtatttaaaatgtaaaagatgtagctacccatgtgtgcgtttgttgtacggtgggatgatgttggtatccatagctggcttatcgaagggccgcaaaatctcagaattcacaacttttgttctgcaaaannnnnnnnnnnnnnnnnnnnnnnnnnnnnnnnnnnnnnnnnnnnnnnnnnnnnnnnnnnnnnnnnnnnnnnnnnnnnnnnnn

SEQ ID NO: 18561 - DNA, 724 bp, Setaria italica
  Peptide Sequence Number=SeqID_84535
gtcccttcaccctctttctcacatctgccctagccttgcgagaagcatacctgatcttcttgtcgaactttcttctcttcttcttctccttgtaccgtgtgatagcactgtctctgctacctccaggagtggaactctcagggccaggagccagtcaaaccagaaaaggaaagagacagactggacctagcctgccttgcagggatgcaaacactagaatcacctttcactcctgggttcgacatcccagagtcagcagataccgcattgctattcgcaggctgcaccagcttgggctcggtagaattcccagcaggcacttcattcacttcaaagtaactgtcgattccagcgtcatcgaagagttgctctgtttgaatatgagaggtaccaaataattcttcataattttcgaatgcaaggtcaacatcatccacacaaaaatcttcatatatgctgtccttgctgaacatatctttatctggcgtatagggcacatatattgcacatggaagtagattatgcagcagcagaggtgagtaattaattctatgtatgaggtatcagggatatgtgaatagccttatagcaccttaggtgttgttgaatccacagatccagctgcctgatcagtagcaagtggaaggagatttactccagctcctgaagaggagcctaccaaaggcttgtcacaagtatcaagatcactcataagtgttgcact

SEQ ID NO: 18562 - DNA, 1464 bp, Setaria italica
  Peptide Sequence Number=SeqID_84536
gaagattccagatccaagcaagtttacatcataataataaacaagtacaggaaatttcacgggtcaggtctacagtgtctaatcaggaagaacacagccaaaaacatcgcagcaaggctatgcggaccaacgccacacagccagcacaatggagatcaaaatgcaacaagagtctgtttagtcgtatccagtctaattcacaaaagggtgaagagtgactcaaatcgctcccccaaaaagaaacggaagatgcaaactccatccactgtacaggagaaaaaggaggaagtgcatccaaaaaacttctgaaacatccaaatatttttcacttcttttttgtcttgctgactgctttcatttttttccttttcattcaaaggcacttatcttgcccaattgcttggagtatcagatgcttttgtgttgtgccagctgcaacaagctttggtttaagtttgctaatctaacaccggataaaggtcatatgcttcagtaactccttgtttggctgagaggatcatagtcatatgcttcgccagccttaacaaaccgtcccttcaccctctttctcacatctgccctagccttgcgagaagcatacctgatcttcttgtcgaactttcttctcttcttcttctccttgtaccgtgtgatagcactgtctctgctacctccaggagtggaactctcagggccaggagcctgccaaggaggctcacccataaggagcagtgatgataccacacaatcttgatgatctccagcactgctctcaccagtcaaaccagaaaaggaaagagacagactggacctagcctgccttgcagggatgcaaacactagaatcacctttcactcctgggttcgacatcccagagtcagcagataccgcattgctattcgcaggctgcaccagcttgggctgctcggtagaattcccagcaggcacttcattcacttcaaagtaactgtcgattccagcgtcatcgaagagttgctctgtttgaatatgagaggtaccaaataattcttcataattttcgaatgcaaggtcaacatcatccacacaaaaatcttcatatatgctgtccttgctgaacatatctttatctggcgtatagggcaccttaggtgttgttgaatccacagatccagctgcctgatcagtagcaagtggaaggagatttactccagctcctgaagaggagcctaccaaaggcttgtcacaagtatcaagatcactcataagtgttgcactagccatatctaacaaattattgtcccctgcagcattatcttgattactgacaccactgtcgctaatactcatcatgctgattccttgctcgcagttgggctcaggtgctacattaggaatatctgaaacgaaggaccagattctagaaagttcagcagatgatggacaccctgagtaacaatttatagtctgtccttttgtgtccgg

SEQ ID NO: 18563 - DNA, 495 bp, Setaria italica
  Peptide Sequence Number=SeqID_84537
aactagtgcttgtcctttgtctagggtattgtctaaactacttagtgaatcacctttcactcctgggttcgacatcccagagtcagcagataccgcattgctattcgcaggctgcaccagcttgggctgctgaaaagcatgagacatgaaccttataataaatatataatgaaaccagaaaaaagcaaaaggtctaattatgttcaacaaatggaaaatagcaaatggattacagatccactaacgagcatttaaatgattgtaggttacaatttacatttagttgtgacttattcttgaagacaatcccaaatacaatacttggcccatgcccaatctgaacatatatccaagacacacagaaagaaggcaagactgctccttccttttgttcacttcagaacatatacccaatctgaagaatttgaccaattacaatctatggataaagaaataaaacacggaccccatataccatatcttctggactactaa

SEQ ID NO: 18564 - DNA, 367 bp, Setaria italica
  misc_feature (318)..(318): n is a, c, g, or t
  Peptide Sequence Number=SeqID_84538
tggtaatggcaacaatccacaggcaaatgattcctccaacaccattcccataccggcttttagaaggcaaggtagaaacacttcagcaatcgcataacctcccgcatcattgtcagggttcaggaggtagggaatgtccttcactgcaaacgtgatgccaattatgtagccccagccaactattatcgatataccaatcgcgctgattataccaatcgggccattcctgtctgctattttttgtttcttcggtcatatgtgcagacgcgtcgtatcctgacagtgtgtattggctcataaggagccccagaacaaagntgtagaggttattgtgaattccagcactgttatcgttgttgaaatgggt

SEQ ID NO: 18565 - DNA, 836 bp, Setaria italica
  Peptide Sequence Number=SeqID_84539
tttgggttttcgcccctttcggcaccttcttcccctgattcgactttcttggctttgctgcttctggcttttccttcccgcttccttggtttgtcggctcctcagcctgcaccttcttcccttcttcatcctttgccttcttatccttcttcatttccttttctttctgaagtagctctctgacagggcgataagcagccgtcacgcaaagattcttcagatcactgccgctgtatccttcagtcattttcgcgagttccttgaagtcaatatcctcaaccttctctttcgacagcagcttcttcaaaataagctctctactctcaagagttggcagcccaaccatcaccctgtgctcgaaccgcctgattatcgcctcatcaaggtcaaagggtctgttagttgcagcaagcacaagaatcctttcattgggcttggacaagagtccatcccaatgcgtcatgaattcattcttgatcctccttgacacctcgtgttcgtttgaacgttcccgtgaccctaacatgctgtccacctcgtccacgaaaataatggctggtgcgatttttgtagctagactgaacaacgctcggatgctcttctcggcctcgccataccatttcgacacgatagtggacattgagatgttaatgaagctagcaccagcttcattggctacagccttggcaagcatagttttaccggttccaggtggtccaaacagcagaatccccctgcatggtttcaatagaccaccattgaagaggtcaggccgctgaagtgggagcatgacaagctcctgaattgactctttgatatcagctagtgctccgata

SEQ ID NO: 18566 - DNA, 1678 bp, Setaria italica
  Peptide Sequence Number=SeqID_84540
atccggagtggtgggcgaggtggcggtgtccatagagatgggatccatggactcctcccagcatgattcaacctctgcgccaggaagtttggagggtgttgatggaagcagaagcagcatcaacaagtggacaaaaatgaccagcacagactcatggagatggtgccttgggttgatttacattgttgctgttgcgagtatatggattgccgctagctacgttgtgcagtctgttgttgatggtggtgtttccccgttcttgatcacctacatatgcaattctctgtttgttgtctacattcccataatcgaggttgcccggtactttgagggttctgtcagcaacttttggactaagttgaaatgcaaggatgctgaaagcctgcagcagtctgctgatctggagagtgtgaatcttctccaaagtggtggacatgagatcaatgctgccttggatcaatcgccaacaaggtcgcctgaaggcactttgactccagatgcaaggttccctgcccagacagagcttaacgttgcagattgcagcaaaggattggatgcaaaagggcgctggacacgtgctcgtgtagccaaagtcagcatgatagtctgccctttttggttccttgcccagctaacgttcaacctgtccctaagatacaccactgttacgtcaaacacgatcctgagcagcacgtcaagcctcttcactttcttggttgcattagtatttcttggagaaacattcacatggctgaagctagtcagtgtgcttctctgcatgggaggaacaataattgttagcctggcagattcaagtagctcagttaatgctattgccacaaatcctcttctcggagatttcctttctattgtttctgctggttgttatgcaatatatatcaccttgatacggaaaaagttgcctgatgaaaaggaaggtgaaggccaagtgagtatggctcagttcctgggattccttggactgtttaatctgttgttttttcttcctgttgcattggtgttgaattttgccaagctggagccattccacaggctgacatgggagcaagttggtcttattgttggaaaaggcttgttagacaatgttttgagcgactacctgtgggcgaaagcggtccttctcacaacaactacagtcgctacagctggcctcacaattcaagtcccaattgctgcagttgtcgacacgctcactggtcatgctccgcatctgctgaactacgtcggagctgctgctgtactggttggttttgctgggatcaacatcccagttggagagtctccacaggctgctcagcaagagcaggaaactccaattgctagcatggttgatgacccgcttcatttgcccaccagtaggaatgctactgatgctatctcatagtagcttcctggctggtttattcatagttcttaggatgctgtaattatcaagcaatgcctataatttcccccctttgagccgtgacaccagaacagaagagtagcctacctagtttgttcggattgaaccttgagcgaaaagtgttttgcgctttgtatttatctgtaattctttacatctgtcgaattgggtctcacacggggacataaaacccctctgtaagatctgctgcacatggtgaagtgatgttatttgttacggcaaaatcaactg

SEQ ID NO: 18567 - DNA, 746 bp, Setaria italica
  Peptide Sequence Number=SeqID_84541
tctacttagttttttttttttttttcctttgtcagtgacaacacaacaactgtattacccacggcatgaaataacacataacaagaagctatgtaccactaagcaacacaatcaatactcttgcaaagggggcgaaacaccaaaggaaatggcgatgaaattgaaaccccgccaacagagctttgcttgagcacgtacagctctttattacagaaacagtataggatacgaacgatgtgccatcaagcataaagcagcaacacttatttcttttctcaaagcaagcaagaacagaactggtcatcaaagaagttgacgggattcattcattcagatggccgccgcggtcggtgtgcagcggcgcttgcagaagttagtgaggacgtcgacgcaccggtagacaggcgcctcggtggtgctggtgtacttgacgcagttcatgcacgctgggtggcaaccctggaacgagatgtccaggcaactgcaatctggtggattcttcctgttgcagaagccgcactggttgcagcacggccaggagctcgcgttcgcggcgtcgtcagcgaccgccgctcctccctcctccccgctccctttgctgaggagtggcagagttgcgaggacggcgaggacagccagtgtgacgagcaacacctgtggtctcatgcttgtttctcttggtatgtaggaatacagggtgttgccaggtttgttgtggttggacttccttcctacctttccttact

SEQ ID NO: 18568 - DNA, 419 bp, Setaria italica
  Peptide Sequence Number=SeqID_84542
cccggtgcacgccgtcgccgtagttgtcgtcgccaggtggtggtggtggtggtgatccagcagcgcaggcttggtgtcgtggtgcttggtgttgctgccgcagggcctgccgccgatgtactggaggatgtggtcgagcgcgtcgtcgctggccgagtggagcagctgcgccttggcgtggtcgctcaccgtcaccgacgagcagttgctggggctgccctccatgggcgccgccatcttggacgaggccgcccccgtgtggcctgtcaccgatgcggtggcgccgccgccgctgctctggccgtggtgcaggaggttcttcttcttgaacaccctgcagatcacccacccctcctgctcctgcgccgccgcttggtcacccgccgcgccgcggattgcggcaggcggcggcgaggagt

SEQ ID NO: 18569 - DNA, 950 bp, Setaria italica
  Peptide Sequence Number=SeqID_84543
gagctgattgctggtgtgaaatctgtgaatggccaaatatttggagacccaaagggtttggagctgagcctgcatgatctccatccagcctcttggtattgcgttgcatggtatcctatataccgcataccagatggtaaattgcaggctgcattcttgacatatcattctcttgggcactggattcggcggagtagctcagcagacgaggctgttgttttgcctgtcataggcctgcagtcttacaatgacaaggcggagcggtggtttgagatgaggaaatccgactctgaaggtggtgagccagcagagttgcagtatagcgaagcatcggaggttctgaaggagagggtgcgcgccttgaatgaggctgcagcggggatgtccagggccaaggtggtgaagaatgggccgatcatgagcagaaacaggcacccggattacgagttcttcctttcacggtaccgatagattgatgcttggctgctggctgctgagggaggggttggttgctgcctgctgaggctggagcaaccactagtcagtgttgtcagatttaggctcgtttgtacatatgaccgatccttttgtaagataacaactactagtgtagttagtgttgactgttggctaccttgaggctttgttatggtgcaagtgcaagcgctggatgatgatgatgatgaagcccaatgcagatgatcatgatgagtctgtttatttattgatatacaatatatagaacatgatgaagcatatgtagcaagcactgcagagattgctgctatccatatatagcaagcaagatgctgatgcatcttgtttctttctttctcatgtcatgtggtacattaggggcacttgagcttcttggtgtgagggttgaccatggtgtcgtagcaggggcagaggtggcgggtgtcctgtccggtgcccgggggcacgcagct

SEQ ID NO: 18570 - DNA, 341 bp, Setaria italica
  Peptide Sequence Number=SeqID_84544
cggtcagagttggtcaactccattcccaaagcttagtgttcacagagcttttctcctccgaattccaggacgtatagcagcagttggaacagaggagctcaagtttcgttgaccgcataccatgtatcgaggatgcaatcacataccatgcccgttggctggccgggccggcgagggaacgggatgccttgcggacgaagcgatcggaggagcgttccttttctcccggcggttggggtctccgtctccgctcctggccccggccggcgactctttccttgcgtctccttccctctctgcgtccgtcccctttttttcctcctcttcctcgtgccgtgctg

SEQ ID NO: 18571 - DNA, 936 bp, Setaria italica
  Peptide Sequence Number=SeqID_84545
aacggagcaaaaaccagcggcgcagcgaccacacccaaagcccacagctttcctccccctcccctcctccccggcgcggcggcgccacccagcaagccaccagacttagctcccaccaccaccgtcccggcatggcggcgctgtcccgcgcggcctcctccgcgatccggcgcccgctgccgaggctgcagctgcaggcgagggcgatggcgtcgtcgctgttcggccacgtcgagccggcgcccaaggaccccatcctcggcgtcaccgaggccttcctcgccgacccctcgcccgacaaggtcaacgtcggcgtcggcgcctaccgggacgacaacggccagcccgtcgtgctcgactgcgtgcgcgaggccgagcgccggatcgccggcaacctcaacatggagtaccttccaatgggaggtagtataaagatgatcgaagaatcgctgaagctggcgtacggagaggactctgagttcatcaaagataagaggatcgctgcagtgccggcgctgttcggccacgtcgagccggcgcccaaggaccccatcctcggcgtcaccgaggccttcctcgccgacccctcgcccgacaaggtcaacgtcggcgtcggcgcctaccgggacgacaacggccagcccgtcgtgctcgactgcgtgcgcgaggccgagcgccggatcgccggcaacctcaacatggagtaccttccaatgggaggtagtataaagatgatcgaagaatcgctgaagctggcgtacggagaggactctgagttcatcaaagataagaggatcgctgcagtgcaggcgctttcgggcactggtgcctgccggctctttgctgattttcagaagcgtttcttgccggattcgcagatctacatacccacaccaacgtggtccaaccatcacaatatttggagggatgctcaag

SEQ ID NO: 18572 - DNA, 3757 bp, Setaria italica
  Peptide Sequence Number=SeqID_84546
ttttttttgagcaacaacattctattcaaaacatcatacaaagacatacaatcttcaagtttcaaacaatttacagggcgtgaacaataaactttacaccatgtacattttacaaaggtacataaacctatttctttttgcacaatcagttttatgtttgtgtttgtgcctttctagacaaaagtgtggacagctgagggaagaacgacttctttttttgtaccttctcatccgagcaaaatgatccacactacctttttgtaccttctcatccgagacaaaatgatccacactaccagttgacctatgcaacttcggatctgttaggaatacatcatcttcctggtgagagctcttgtgctcgtcaaacgtccttggtggagtgctcacagtactaactgcatgttttgtagcttcatgggctttccgacgctgcatatgctccgctctccatcttctcagctcctgctcagcgccaagtttcccttcgtttgccttctcagccctctccagtgcgattcgaagatcactcttcttttcgtccatctccttggatgcttcatgtagcttctctaggctccttgattcagactcttttgccaactctatctgtgccaaggctgctgctaccttctcatttgcaacctcttcggcttcatgaaccctcttgctcagagcatggtattcatttataggaagtgttactcctctaggagaatcaccaacacttcctgtttcctcactctcctgcattgcttgagctgccactacagctagcctctcagatgctttagacgcctctatttctttcaaaactgcacgtaatctgatatctgcagttgtcgcagcagccttggtttgttcagcttcttccttggcctttctcaattcttcttgtgccgattgagctgccatcttggcatcttctgcctccttggctgcttgctgcaacatcctcggaagttctgccattttctcccgggtttctgcttccttcttatgtatcatttctatctcttgctttgttctctcgagctcggcgtctagagaagagactgtaatggatgccataccctcactctgctgcaacgtagaaagtgaagctttctccctatcaagctctgatctgagcgattctgcaataactcttattaagttggcttcagtttttgcattttctaatttccctctgtattcatcaagctcctttctttttgaaactagagcttgcttgattgacctactaatttcttttgcttcgtcagaaccttgctcctggatcactccagcttcttcattcaatttgttatccacgtaggcagctagctcacttttgaggctaagcagcttgtgctcatttccatcaatttcggcctccacattagctttggacacaatttgttcgttgagctggtgcagctcctcttgtacctgctgcagctctttctcccaagccaggcaatcctgctctttcgccaaagctgccccaagtctgtgctcttcagcttcatggtgtgaagcatgggctacctcgagagactctttggatgcaataagttctaaagtgagttcctctacttgtttctcagtatccttcgcagcagctacaacttcctcagccctttttattgctacatccctttcagttgctaagacagcatactgttcgtgcattgatgttaactcctctttcagcaatttcagttcctcaacagccttttgatgtctttctttggcaactgtcatctgcgtttgggctattacactagcttcatcatcaatcccctgttccatctcttgtgccctaagcagggcgagttcagaatcttgctttgcttggtccacttcaagctgtgccctctccagcttatgcttcaactcctcaacaagtctactagttctctctagctcctccatcacgtgtgacttggccacctcagcagtttcccagtcttctttgaattgtggaatctcctgctgaaccttttcaagttcaagttgcatgaccctgcgtctctctaatgatttagccctgtaggctttccaatcaataattcctccaaatttggtgacagcctctttaacagactcaaacggtgcagtagtgtcaacaagacctctgtatgagccttcagatcccttttctgattttactatattttcttgggcgacggcaatgttcttgtgatgattcatattgttttctttagatttcatttcagctgctggcatagtattcacgctggtaaaaccattttcagatatgtttttcgcttcagtcttatttggtaaaatagcatgatctccctcctcctttgatgcctgagctggtcttatgtgggatagcatttccggtgacgaactcacagtatggcctacaggagacgtcaattctttctggtgctctgccaaattgtgaggtaacttctcttggacttccaaggacatatctggactcttaacagaaactggtgctggattttcagtattctgcattcttgtttccctgtgaccattactatcaagaacttccatcgaagcaggaaaatatggtagtaaaaaaatctttctattattgacgaagatgaatatagagaagactatttggctagtttattcggcagagttggtcaactccattcccaaagcttagtgttcacagagcttttctcctccgaattccaggacgtatagcagcagttggaacagaggagctcaagtttcgttgaccgcataccatgtatcgaggatgcaatcacataccatgcccgttgtaccaaaccaaattttgcatcagaggacattaaacaggaagaaccacttcgctgctacaccaactccgaaccaagtagctgactagctgaaacgccccaaccaaagtagctgaaacaccgggacaggatggtcccatcctatggtatcaagctgaacgaaagaaaacccatagttctcaattccaccgcttttattttattaacaccttaaatcatgctacagccatttgcagctagtttaagaattgtcatgagaagatggataaaaggaaaagaaatgaacaaaatcagatcgaactctatggttctcattcttgtgaaattctccgttggacagccccaacaggctcaacttattctcgagaatgataatgttaatatgtcaggaaccaaaaaagctgcttggaagcctcatttcgttggctgatgagggtagtaggacgatactcaatttgctttggtaacctcatgaatagcatttgccaagtacgaaacatttcctgtcgtcacaccagccatgcttatcctcccattgcgggtcatataaatatgatattcatctgtcaaacggtcaacttgttcaggtgtcatcccactgtagcagaacattccaatctgattagtaatgtgctcccacgacaaaggtgaacctaggttttcaagattttccttaagtgccttccgcattccaatgatacgatcagccatacccttgacctcttttaaccataaactcttcagctctggatcattgaggattatagaaacaaccagtgcaccatgaacaggtgggttgctgtacattggtcttgcaatctgttgcagctggctcttgacagcaactgcttgcatctcatcctcacacaaaatactgaggcatcctgctctctgtccataaagccccatgttctttgcatatgactgagcacatccaatttggtgtccatcttcaaggaaattcggattgccttggcatctctctc

SEQ ID NO: 18573 - DNA, 1320 bp, Setaria italica
  Peptide Sequence Number=SeqID_84547
tcgtcccgtactaaggttctaacgttcggtcgttcggtcgtccttaccgggtacgtactaacggtcctagtcccgttcgttgtcctcgactgcgtgcgcgaggccgagcgccggatcgccggcaacctcaacatggagtaccttccaatgggaggtagtataaagatgatcgaagaatcgctgaagctggcgtacggagaggactctgagttcatcaaagataagaggatcgctgcagtgcaggcgctttcgggcactggtgcctgccggctctttgctgattttcagaagcgtttcttgccggattcgcagatctacatacctacaccaacgtggtccaaccatcacaatatttggagggatgctcaagtgccacagaagacattcacatactaccatccagagtcgagagggcttgatttttcaggattgatgaatgatatcaagaatgctccagatggttcattctttttgctccatgcatgtgctcataaccctactggtgtagatcctacagaggaacaatggagagaaatatcgcatcagttcaaggtgaagaaacattttccattctttgacatggcttaccaagggtttgccagcggtgatccagagagagatgccaaggcaatccagctattcttcgaagatgcttcctttcaaaaacaaaattctcaaaagtggcccgtgaccatacttcatttcacaaaagcatgcacgtcataatactacgaagtaatgcaggtgacaacgctatatgtaaacaatagctaggcattggtcaactgaataccccaaataaactcttcagctctggatcattgaggattatagaaacaaccagtgcaccatgaacaggtgggttgctgtacattggtcttgcaatctgttgcagctggctcttgacagcaactgcttgcatctcatcctcacacaaaatactgaggcatcctgctctctgtccataaagccccatgttctttgcatatgactgagcacatccaatttggtgtccatcttcaaggaaaattcggattgccttggcatctctctctggatcaccgctggcaaacccttggtaagccatgtcaaagaatggaaaatgtttcttcaccttgaactgatgcgatatttctctccattgttcctctgtaggatctacaccagtagggttatgagcacatgcatggagcaaaaagaatgaaccatctggagcattcttgatatcattcatcaatcctgaaaaatcaagccctctcgactctggatggtagtatgtgaatgtcttctgtggcacttgagcatccctccaaacctaaa

SEQ ID NO: 18574 - DNA, 338 bp, Setaria italica
  Peptide Sequence Number=SeqID_84548
gtgtggcgcgcgtgggtgcgcgccctggacccgcccggcgcgctccgcgtgaagctcctcttctccgtcaacgtccgccgccgggtgaagcccgagctgccccggggttactacggcaacgggttcgtgctcgggtgcgccgagtccacagcggcgcagctggtctctccctccccctccgccgccgcccgctacggcgtgcggctggtgcaggaggccaaggagtgcgtggacgacgactacgtgcggtccatggtggacctcctcgaggagcggcgcggcgcccggccggacctggcggcgagcctggtgatctcggcgtggacgcggctggggct

SEQ ID NO: 18575 - DNA, 423 bp, Setaria italica
  Peptide Sequence Number=SeqID_84549
gtttcttgtatagtttgatttcaatccccgctgaagcctggcaaggtgatattccagcttctctctgcatggaggagtacatcttttgcttctagggtgtttgacttcctatgctttgctaaagaacaagcaaatgtagcgacctgcttaaaacaatcatcagcatacgaaacttaaagtagcaccggaaagggacccaagttataattgacatcatggcatgcagatataatgatacacgattaaagttttcagcatttttcatctgccaatcatctaatggtacgatctcctatctacaataacaatacttatgagcaagagaacaaaaacattgaaagcaaaatgaagattaaggagccttaagccctggaatgactaaggagtttggcatttcaaggaaaactacacagagatatttag

SEQ ID NO: 18576 - DNA, 442 bp, Setaria italica
  Peptide Sequence Number=SeqID_84550
cctgctatgctattatattaacctctctaacaggaattttgccaatccaatagtcataattgactgtttccaataaaaacaaaaaattttagaatatggttccaagtttcaacataagatggaagatgtgtggctacatgcgcccaatcatggatgaaattagatggatagttgctgaaacttaaaaaaggtgggtaccagagcaagcctctccctgtgaatatcatttatgtgctgtttcttgtatagtttgatttcatccccgctgaagcctggcaaggtgatattccagcttctctctgcatggaggagtacatcttttgcttctagggtgtttgacttcctatgctttgctaaagaacaagcaaatgtagcgacagactcaacaaaatcttctgcgatgtccataagaacatcttcaacttcaggatccagcttttcg

SEQ ID NO: 18577 - DNA, 1574 bp, Setaria italica
  Peptide Sequence Number=SeqID_84551
cctccatccatataattagttttattaatccatataattagttttataattaactcatgtttagttctcctaattaaccttcgaagattcgacgtgacacgaagtagcttaaatccgaacacccgctcacactaacgaggaacacccgctcacactaacgaggcacccgcgataaatcatctgtacatgtaaccattgcaacacatctactacagtagcaatactgccaccaacggttcatagtacaacagacgcactgtccaaacacgaaaggtttgcagggcttgcagacatctttcatggggaagcaggggcaggtggtttcggagtctgatttttctggttcgttgcagcttgggcggcagagttttttgtgtcagtcgccattgacttcttgatcagagcaagcctctccctgtgaatatcatttatgtgctgtttcttgtatagtttgatttcatccccgctgaagcctggcaaggtgatattccagcttctctctgcatggaggagtacatcttttgcttctagggtgtttgacttcctatgctttgctaaagaacaagcaaatgtagcgacagactcaacaaaatcttctgcgatgtccataagaacatcttcaacttcaggatccagcttttcgttaggatcaatctgtgcaactaattcatgtatgcttctcttgttgagtagtcgagtgccagtttcactaccatctgcatcagttgcagctgtatccgcagattgcaaaacagtagcttttgctatagcaggcgaatcaggctttctgttgccattgtcactggagtacgagcagcttgctgctgagaatgctgttgctgatttttgggtgttgtattctgttgagtttgttgcgaggaactttgctgctgttgcttttgctgctgctgctgcaaaagctgattgtgtggtagttgctgctgctgtgctgaaattatgttctgttgatgtggagtcacaggtgaagattgttgtggtcttggttgtggaacttgtggcctttgttgcggcctaaatgttgatgaattttgtggagtttgctgtaaagcaggggaaggagaaggagaactcacagacatcggcctcattaaagcatgggagggggttctttgtgatccgggcatttggcttccagatggaattggagttgttgatgatggaaggccaggtcttggctgctgcggaccagatattattcctggtcgcatctgggatgtgctaagggatccaaccatcccaatattttgaattccaggggaaggctgcctaaactgtgaagatggcggtgggggctggtctgggccgcgatgcatcgatccaaactggtgggcaagggaaggcggcggcacgaacccggtgtaaccagcgggcgtctgtgcgggacgcggcgcaggcaccccaataacaacccctccccttggcacagggggtgccgaggaagaagaggacggaacggaagccgaggaggaggcagcagctgtggcagcagaggaggccgaggacatcgtgatgggcgaggccaggtgggtgtaaggaggcctcattcgcggccg

SEQ ID NO: 18578 - DNA, 1667 bp, Setaria italica
  Peptide Sequence Number=SeqID_84552
cgctcccagaccacccccaactcacccggcaaggcaacccgcttcatccccgccacccaagtaacgacatggtgttcgagcaggaggaggaggtggcgccgggcgcggtgcacgggcaccggctgtcgacggtggtgccgagctcggtgacgggggaggtggactacgcgctggcggatgccgacctcgccttcaagctgcactacctgcgcggggtgtactactacccggccggggacgtggcgcgcggcatcaccaccaaggtgctcaaggaccccatgttcccctggctcgacgactacttccccgtcgccggccgcgtccgccgcgccgacgacgacgccgcgggtcgccgcccctacatcaagtgcaatgactgcggcgtccgcatcgtggaggccaagtgtgaccgcgacatggccgactggctccgcgacgacgcgcccgaccgcctcaggcagctctgctacgacaaggtcctcggcccggagctcttcttctcgccgctgctctacgtccagatcacaaacttcaaatgcggcgggctggcgctcggcttcagctgggcgcacctcatcggcgacgtgcaatcggccgcgacctgcttcaacaagtgggcgcagatcctgagcggcaagaagccggaagccaccgtcctcaccccggagaacaagccgctgcagggccagtcccccgccggcgccgccgcgccgcgctccgtcaagcaggtcgggcccatcgaggaccattggctggtccccgcggggcgcgacatggcgtgctactccttccacgtcacggaggcaacgctcaagaagctcgagcagcagcaggggcgccacgccgcggcggcgggcaccttcgagctcgtctcggcgctgctgtggcaggcggtggcgaggatcaggggcggcacgcagaccgtgaccgtggtcaagaccgacgcggccgcccggagcggcagagccctggcgaacgagatgaaggtcgggtacgtggaggcgtccgggtcgtcgccggcgaagacggacgtggccgagctggcggcgctgctggccaagggcgtggtcgacgagaccgccgcggtggcggcgttcccgggggacgtcctcgtgtacggcggcgcccacctgacgctcgtggacatggagcgggtggacgtgtacgggctggagatcaaggggcagcggccggtccacgtggagtacggcatggacggcgtcggcgaggagggcgcggtgctggtgcagcccgacgccgacggccgcggccgcctcgtcaccgcggtgctgcccaaggacgagatcgagagcctccgcgccgcgatcgggagcgcgctgcaggtcgcctgaaagctctagtgtggtgatggctacgtactcgtacggtttggtgagcttagtagcctaatttggcgcatgtttctttattggtgatcaggtgatgtggtgtatgatgatgcgccatactgtgatcagtttgagaagttttctgtattggatgatgctcacgtaataagttgttccgattagcttatgcaagaatgtaccaagatttacacaggatactttgaaaaataatagtttgagagttgagacagcatgatcttgagtgttaaccccaaaaaaaaaaaaaaaaaaaaaactagaaacgtaacgtacgaaccg

SEQ ID NO: 18579 - DNA, 522 bp, Setaria italica
  Peptide Sequence Number=SeqID_84553
cgacgacgacagcgacgacccaccgcgctgcagctgcagctgcttcgacaccgacgacacctcgctcaggggcttcttcacgcgccgctcgctgccgccgctcaccgacgcccgccgcttgcagggctcgcccgccgtctcgtccgccgccggcctctgcgccaccctctggctctggctgctgtcgctgtccttgagcttgcagatggacggcgcggagcagcccagcttgttgctgctccggctgccgctgtccggctgctgctggctgtttctgcaggagaagatgctcttgagggctaacctgtaggatgggctctccggctccctgcagtggctgctctgctttctcgtcgtcatgcagccaccactgccgccgtctttctccttctccggcttcttgctcatcagtttcttcttcatggcggcgccggtggaagtgctactcttattcttattggcctcccttgccgctgccgatctgcctggttccaccattgtggagcttgcttgcttgcttcg

SEQ ID NO: 18580 - DNA, 377 bp, Setaria italica
  Peptide Sequence Number=SeqID_84554
aaaaggccaagatgatgtttctgtaagcaggttgagcaagttccaacgtgccttgccgaggccatgaaaattcacctgcactaccaatatcatggagcttgccggttcacactggcatcttattctgcattatctatgcattcaacaagaagaatggctgtggctgtggtccatttgtgccttcagctttgaacttgccgttgcatggttggcttaccagtttgctaggtgaccctttctggcgttgcaacagttgagttgatccatttccgttgctatggttgcactgtcttctttcatcactgattgtatgtgaaatcaagggtacaatgactagctggattattgaggacaaggcatgaaagaccagtggtaat

SEQ ID NO: 18581 - DNA, 1786 bp, Setaria italica
  Peptide Sequence Number=SeqID_84555
tggcatgggttctttggcccgatgaagaaagcagaacagtgccaaatcttgagaagttagtcaaaagacgacttcatagtgaaggtgcttctgctgcaaatcgggatggaagatggagaaatcagatgcacaaagcagcacacaatggctgttgtagaacgtgctgcacagactaaggctttgtatactgttctgaataaattacttgtttctcaaaatctctatgatttggttcacacaatcgagggcccattggtaaacgttcttgctgatatggaactttggggaattggtgctgacatggatgcttgtctccgtgcgaggcatattataataaaaaagctgaaggaactagagaaagaagcttacagattagctggcaagagtttctctctaaatgcaactgctgatattgcagacattctatacacacacttaaaattgccagttccaaaaggttgtgagaaagggaagctgcatcctagcactgacaagcagtctctagaccatctaagggaccaacacccaattatcccaataattaaggaacacagaacattggcaaaattgttgaatggcactttgggttccatttgttcacgtgctcagttgtgcactcaatcacaaaggtacatcatccatggaaattggcttcagacatcaactgccactggccgtttatccatggaggagccaaatctccagtgtgttgagcacgtggtggaattcaacacagggaaaactgataaagaatactcaagcgtgtcagaggttgatcatcatcaaattaatgcccgtgaatttttcattcccactcaggagaactggttgttggtaactgctgattactcacagattgagctgcgtttaatggctcacttttctaaagatcctatgttgattgagcttctaagtaaacctgatggtgatgtttttactatgatcgcttcaaggtgggttggcaaagaagaggccttgatctcttctaaagagagagagaacactaaaagattcatatacggcatcctttatggaatgggtgcaaactcgcttgcagaacaacttgagtgtagcacagaggaagctgcacagaaaattcaaagctttaagagatattttcctggtgtttcctcatggctacatgaagctgtggcatcttgtcgccaaaaaggatatgtggagaccttgatgggccggcgacgttttcttacaaaaataatggctggcaatggcaaagagaaagctaaagcacagagacaagcagtaaattctatttgccagggttctgctgctgatattatcaaggtggctatgattagagttcattcgttaattaccaacagaatgaaggaagatgattcaacagatgaagttacgaggaacttttcagaaatcggtgggaagtgtcacctaattttgcaggtgcatgatgaattggtattggaagttgatccatgtatggtagcacaggctggaaggctattacagatatgtatggaggaagcagcttcactcttggtacctttgcgcgcaaaaattaaggttggaaaaacttggggttctctagaacccttctatcctgagcctcgttgatgcaatgttgaataccacttggactaaactccatggaagcagacttttcatgacataaaattcacctgcactaccaatatcatggagcttgccggttcacactggcatcttattctgcattatctatgcattcaacaagaagaatggctgtggctcgtggtacttatgtgccttcagctttgaacttgccgtt

SEQ ID NO: 18582 - DNA, 653 bp, Setaria italica
  Peptide Sequence Number=SeqID_84556
tcagtttgtttctaaaattacctgctctaaatctccaacttactatcttggttctccatgggagcagacttttcatgacagaaaattcacctgcactaccaatatcatggagcttgccggttcacactggcatcttattctgcattatctatgcattcaacaagaagaatggctgtggctgtggtccatttgtgccttcagctttgaacttgccgttgcatggttggcttaccagtttgctaggtgaccctttctggcgttgcaacagttgagttgatccatttccgttgctatggttgcactgtcttctttcatcactgattgtatgtgaaatcaagggtacaatgactagctggattattgaggacaaggcatgaaagaccagtggtaatgattgatggtacatgtcgcatgcggcaagcgggctattgccaaatggtctgtcaaatatcatctgatccacatatgccaagtatgggacatgctggcatcaattggggcatgcagcccgtcaaggttcgtggatgttgtatatgagttactggaagtgaaggaaaattttttctggcgtgtacatttcttctgagatcatcaacatgtatataaccagaaatttgtaaaggtttcgtttaccatgcaagcatgtacagggc

SEQ ID NO: 18583 - DNA, 386 bp, Setaria italica
  Peptide Sequence Number=SeqID_84557
tctttcaaaacttcaagccctttttaccttatgttggtctctgatccatgtacagatgacaatagattatatgagtggggtgaacagcaaatttatggaaagatatggtttctcatcaccgacggtatggccatgcacttgtatcttaatactgtttccctttatgtggtaaggatgtagggtgtttttaaaaccatttatttggtatcagaaaattgtttcagttagaattgtatctgtggaatcaaagatctttcttgtagtaaacggctctagtattgaaatattattatgtgttgcttttgtaagcatcacaaattcacaataacctgctgtaaaaaattgcaacaccattttcttcaacttttggtgtaccatatttgaac

SEQ ID NO: 18584 - DNA, 1490 bp, Setaria italica
  Peptide Sequence Number=SeqID_84558
ccacccgagatggagcccgcggaccctgatttctaccggataggatacgcgcggatgatgcgggcgtacgggattgagttcctggaagggccggaagggatgggtgtgtatgcttccagggacgtggagccgctccgcagagctagagtaattatggagattccattggagctgatgctgactataactcaaagaaaccttggatgtttttccccgacattattccactaggccatcctatatttgatattattgaatcaacagatccagagacagactgggatttaagattagcttgccttcttctctatgcatttgatacagaagacaacttttggcaattatatggtgattttctgccaggccctgatgaatgcactagtttgctgctggcaccgaaggaggatctactggaactagaagatgaagatcttgtgtcagaaatgttaaaacaccagcagcgagcaattgacttctggcaaaagcactgggataaagcaattcctctaaagctaaaacgtcttgcccgtgaccatgagagatttctctgggcactgagtattgttcagtctcgttctgtcaacttgaagatgagaatgggagccttcatccaagatgcaaatatcctcgctccttatgccgatatgttgaaccactcacccaatgctaattgcttcctgcattggcgctttaaagatcgtatgcttgaagttatgattaaggctggacatgctatcaagaaaggagatgagatgacaatagattatatgagtggggtgaacagcaaatttatggaaagatatggtttctcatcaccgacgaatccttgggagcttataaatttctcgagccctgcaaagattcacatggattccttcttatcggtcttcaatattgctggtttgcatgacgagctgtaccacaattccgcattgccctcagtagaaactaacttcgtggatggagcagttgtagcagcagctagagcattgccaacatggtcagatggtgatgttcctgcaataccaagtgtggagagaaaatctgcccaggcgttgcaagaggagtgccgccaaatgttggattcattctcaactaccatcgaacaagatcagcagatcttagattcagatgcacgtatcagcaaaatgcgggaaattgcaatcaagtatcgtctacaccggaaaatgctcctgcagaagatcatcgactcacttgacatctatcaagagagaattttgttttagctgtataggcacctctgcttatgtttagttagaacttagaattagtatcagttggtgcgttagtagacttgaatcatgaggtgttggagggtttcgaagggcagttgccacctcttttggagaggattttgtagggctgccttcgttgtattcgtaggttaacactagaggatccccacaaacaaaacaagaacgcaaatagttgtcattctgaaaggaaagatagttggaactttcaaaaaa

SEQ ID NO: 18585 - DNA, 238 bp, Setaria italica
  Peptide Sequence Number=SeqID_84559
agagcgcgcacggaggggagcgagagctctcgccggaggaggacgcggagagcagggaggggcggttactgcgcgagatgatgctccgcgctcgccgggaggcggaggaggagcaccaggtgccggacgaacagctgcacgccaaacgaccagctccagctagacgagcgacggattattgccttgcgacgtcggcagtgagggctcgatgcagcatgggtgtacacaagcctcggta

SEQ ID NO: 18586 - DNA, 272 bp, Setaria italica
  Peptide Sequence Number=SeqID_84560
acaaggagactgcgatgtttggagctatgaggatgctgatccagatttcggatcttgccaggccaaggagctccacgaccatctggagagtgtcctttcgaacgagccggtttctgtgaaagtctgggctgaaccatgttgaggtgaagccacaggtaagcttgctgccgcacaaaacagcaacagctactaacattcagttgccaacgtgccacctcaattcctgttgactaacggagaattcatggttctgcagggcgtgagcaagggcc

SEQ ID NO: 18587 - DNA, 468 bp, Setaria italica
  Peptide Sequence Number=SeqID_84561
gcaacagctactaacattcagttgccaacgtgccacctcaattcctgttgactaacggagaattcatggttctgcagggcgtgagcaagggccttgtggcgaagcggatcctgtcgacaatgcaggagcggggcgacctgccggacttcatcctgtgcgtgggcgacgaccggtccgacgaggacatgttcgaggtgatcacggcggcggcggcgcggggccgtccccctgcacccggaggcagaggtgttcgcgtgcacggtgggccgcaagcccagcaaggccaagtactacctggacgactccgcggacatcgtgcgcctcatccagggcctcgccagcgtctccgacgaccaggctctgcacggcggagcccccctggcccaaacgactagaccgttagaccaaccgaacaaccaatacccgaaggtagaaaccgaacgaacctagaactaggtttaacacaaa

SEQ ID NO: 18588 - DNA, 1737 bp, Setaria italica
  Peptide Sequence Number=SeqID_84562
aaatcttggagggggcagcggggatggtgtcgagatcctactccaacctcctggagctcgcctccggggccggcggcggcggcggcggcgagccgcttccgtcgctggggcgccgccggataccgcgcgtcgtcacggcgtccggcattgtgccggacctcgacgcctccgacgccgacgccgacgccgcctccgcggcctccgatcactcctcccacgcgccgagggagcgcgtcatcatcgtcgccaaccagctccccgtccgcgccacccgccgcgccggccccggcaccggcgccgggtgggacttcgcgtgggacgaggacagcctcctgctgcaggtcaaggacagcctccgcgcgcaccacggccgcgccgacgtcgagttcgtctacgtcggcggcctccgcgacgacgtgcccccggccgaccacgacgaggtcgcgcacgacctcctcgagggcttccgctgcgtgcccaccttcctgcccgccgacctccgctcccgcttctaccacggcttctgcaagcagcagctctggccactgttccattacatgctgccactgtcgcccgagctcggcggccgattcgaccgccagctctggcaggcctacgtctccgtcaacaagatcttcgccgacaagatccttgaggtgatcagccccgacgaggactttgtgtgggtgcacgactaccatctcatggtgctgccgacattcctgcgcaagcggttcaaccgggtcaagctcggcttcttcctgcacagcccgttcccgtcgtcagagatctacaagaccctccctgtgcgtgaggagctgctccgatcgctgctgaatgctgatctgattgggttccacacctttgattatgccagacatttcttgtcatgctgcagcaggatgctggggttgaagtacgagtcgcagaggggctacattgcattggagtattatggacggacagtcactatcaagatcttgccagtgggggttcacttggagcagttacagtcagtcctcaatctcccagagaccggagtcaaggttgccgagcttctgaaacagttctatcatcggaaccggctgctgttgcttggtgttgatgatatggacatcttcaaaggcattagcttgaagcttttggcgtttgagcagctgttgatgcagcatccagagtggcggggaagggtggtgttggttcagattgccaatccagcaagggggaaggggaaggatgtgaaggaggtacaggaagagagcgatgcaatggtaaggcgcatcaatgatgcattcgggcagccagattaccagccagttatactaatcgataagccactgcagttctatgagaggatggcatactatgttgttgccgagttctgcttggttactgcagtgagggatggcatgaatcttatcccatatgagtacgtaattgctcgacaagggaatgagatgatagacaggatcctgggtctcggaccgtcttcaaggaagaagagcatgcttgttgtgtcggagttcattggctgctcgccctccctaagcggcgcgatcagggtgaacccttggaacattgattcagtggctgatgcaatggactctgcattggagatgcccgaaggggagaaggtcttgagacacgagaagcatcacagatatgtgagcacacacgatgtcgggtactgggcgaatagtttctgcaagaccttgagcggacttgcctcgaccataa

SEQ ID NO: 18589 - DNA, 1601 bp, Setaria italica
  Peptide Sequence Number=SeqID_84563
agaacaaaattaagaacaagaaacttagtagaatagaagaacctaacaaccgagacgacggaatagggtcaaacttggttactgcagtgagggatggcatgaatcttatcccatatgagtacgtaattgctcgacaagggaatgagatgatagacaggatcctgggtctcggaccgtcttcaaggaagaagagcatgcttgttgtgtcggagttcattggctgctcgccctccctaagcggcgcgatcagggtgaacccttggaacattgattcagtggctgatgcaatggactctgcattggagatgcccgaaggggagaaggtcttgagacacgagaagcatcacagatatgtgagcacacacgatgtcgggtactgggcgaatagtttcttgcaagaccttgagcggacttgcctcgaccataacaggaggcgttgctggggcataggatttggcctaaagttcagggttgtagccctcgatccaaacttcaagaagcttgcagttgaacacttggtctcagcataccggaggacaacaaagcgtgttattctcttggactatgatgggacactgatgcctcagacttcgtttggtaagagtcctacctcaaagacgatagacatgttgaacagtctttgccgtgacaagaacaacatgatcttccttgtgagcacaaagagtcgtatgactttaaacgagtggttctcaccatgcgagaacttgggactagcagctgaacacggctacttcctcaggttgagaagagatgcagagtgggagacgtgtgtcccggtgatagactgcagctggaagcaaattgcagaacttgtgatgaagacctacaccgagacgacggatgggtcaacaattgaggacaaggagactgcgattgtttggagctatgaggatgctgatccagatttcggatcttgccaggccaaggagctccacgaccatctggagagtgtcctttcgaacgagccggtttctgtgaaagctgggctgaaccatgttgaggtgaagccacagggcgtgagcaagggccttgtggcgaagcggatcctgtcgacaatgcaggagcggggcgacctgccggacttcatcctgtgcgtgggcgacgaccggtccgacgaggacatgttcgaggtgatcacggcggcggcggcgcggggcccgtcccccctgcacccggaggcagaggtgttcgcgtgcacggtgggccgcaagcccagcaaggccaagtactacctggacgactccgcggacatcgtgcgcctcatccagggcctcgccagcgtctccgacgaccaggctctgcacggcggcgcccccctgcccaacgctgccgttgccaccgacaccatcccgaggtgaaccgcgcctggctggtttactgcgcagttagctctaggaagtatgagacctctcgctgttcccaggtgtacatgctctaggaacggatcaaggaacatggtgggtgcgtgcgtgcgtgcgtttgtggtgcttcgtcgaattgtcaggccttgtgtacataaaactcctcccagatcgtcatcgatcgatcgcgtcgatttctcgtcaaaaaaaaaaaaaaca

SEQ ID NO: 18590 - DNA, 445 bp, Setaria italica
  Peptide Sequence Number=SeqID_84564
gagcacgcctccggcgccggagcccgccgcgacatcgaagaattccgccacgcgcgcgtcggtgtccccggtctgcttgcgcagcccggcctcgaggcgcgcgagcgccgcggcggcaagtagcgcgtcctcgccgtccgcgccgcagccgtcgatggacaggacccgcacgcgcccaccgtcgagaaacgctcttcccggcgtcccggggccggaggacaggcacccattggcggcgccgaagaggaacttagtctcgagcagggagaagatctcgtagctgagcttgtcgacgtcgacgcccatggctagtgttggtggtgtggccattgccgcgtacgcttccatcaatcttttaggagcgagcaacaaggactgaactcagaagtgctggccgattaattgaagcttgggatagctcgtgatgcgagaccgagggactgcg

SEQ ID NO: 18591 - DNA, 500 bp, Setaria italica
  Peptide Sequence Number=SeqID_84565
tcgcgctccgcgtcggcgagaacttgttcaacttcatgcagtcgttctgcggcgccgacggcggcaagctggtggtgcccacggacatcctagaccggtggttccgcaagttccaggagcgggccaagaaggatcccacgtacctcaaaagcttcgacttttgagagcaaagataccatgtgggaagaatgtgttggatagcagagttttgtacctcatctaggccctcctatgtttgtacacaaggttaggttgtgttctaggggctagactgaatcaaggtgcatatgcagcttctctgtttgtagtagagaagggcgaggactctaaaaacgactagataggttggatggtgatgcaagtgcttacacagtttcacctgaacgagaagtcttgttggcaacttgtacaaaaaatctttctggtgattctacttggaatgtcagtaatttggatcatttctgggaaccccccaagctgaatgcgatatgcgataaacc

SEQ ID NO: 18592 - DNA, 1248 bp, Setaria italica
  Peptide Sequence Number=SeqID_84566
atgcagcgtacgcataatgcttcactggaactggaacaccccgctatctgaaaccttcgaatttgatgttaccctcatatgccttaacaacatctggcacatcatgagcatacctcatcacatacttgtcggagaagttcttggcgctaccgagcaatgctgtatgtaacttgatgtttggctcaatcttcccctccctcatcaacacactcagcacagcgcaccttggtatgatgcacttctccaggctataccccataagcacaggatgccgcattacatcgcttacttgaagcttaagctcgtccaggtagaactgcagcttcttcgttatggtctcatcggagaagaggggtatcgtgggctgcttcttgaacgccttgagcagctctccctcggacactccgaagctctggtacagggccacctttcgcagccatgtctccctactgaggtggcagagagcgcggaaggcgtagaggaaggcccgatctgttacacgcaggtcgagcaacttgaggtactcgaagatctgggtgatgcgttcgggcgaaagcctgagcacgcctacctggatggtgatgagcttcgagatgaactcgtcgaggagtccaagacggcgcagggcggccacggcggggcgcatgttcttctccaggctagcgtggaggatgcgtggggcctgggagatcgcgtcacggacagcggcgtcggtgccgaggacgccgcggaggaactggacgcaggggacaaggtggttgtcgaggctgcgcgtgaggaggatcggctcggtggagagcctccgcggccggacgccgagggaggcgaagaggtcgagcttggggcggaggatccggtcggggtcgagggtcaaaaccgccgaggcccggcggactatctcggtgatgtccgcgtcggtgaagccgtagctgcggaatagcgcgcggacggcgtcggccctgtcggcggagcggatgctgtgcttgcgggcggccgtggaggcgggggagagcccgcaggaggtcaggttggagacggtggcggggcgagggcgtcgggtggcggggcgcccgcgagggcagccgaggagtagccgtgggagaggagggcgtcgatggggtagggccgccggctggggtctgcgccggcagcggaggggatttggcggaagcggaggagccgccgactccggcagatggaggcgaacatgttgggtgcggctcgccgggccggactcgatgggaaatt

SEQ ID NO: 18593 - DNA, 318 bp, Setaria italica
  Peptide Sequence Number=SeqID_84567
caggtttagttaacggaaagcactgtttgactagtcctttctctacccccattctccctcctctctcacttatcgatactctttcctcttcctcctatccgtaaatattttgacagcgaaaactggatctttcctcctctttgttgtgctcatctcatgtggtgctgtgagtgtttggaagtagcaggagcctaggtgggaggcagccatgaagatgggtgggcggaggcagatctgcttggtgcaagttgaaaaggggtgcaactccgccggcggcggcggcggcttccagatctggaaatatgtttctctccggcc

SEQ ID NO: 18594 - DNA, 296 bp, Setaria italica
  Peptide Sequence Number=SeqID_84568
aggtggttaatccagatggttcaagctgtgcacccttggaccctgcattaaaaattgaagaacaaggaacagcatgcggtttatttgcttcagttaataatgttgagcaatcccgttcatcttttactgatggaactgctcctacattgccaagcgaggagcatggtgatgattctgaaacatcagaaagttgggaacaacctgaccctttggatgtggttaaaccacaggatgatgcaccgaagagtatcctaggatccaagcctccatcaaattactcacagccaatgcaagta

SEQ ID NO: 18595 - DNA, 643 bp, Setaria italica
  Peptide Sequence Number=SeqID_84569
ttgctagttcgagttcaattggtgtgcacttatgcttaaggttgctttcacttggatctggtgtagtctgtacaagatagtacatgatattgtgcatcttggtcagcggaatggttgatcgcgttgcccttcagcttcggttgactttaggaaaacgataattcattttcgaatgcaaccttcgaatatgtgctagagtctgttttgacttcacagagcagtctggtccagttttcaccatccatccttactagataaatgtttggatcctgccagggtgctctgtatttgtgtttgtatcctatcattggcagagattggccaagaagaaattttgtttcattttgatcagatagacctgtggaggtcgtcattaatttaaatgcagatgctcacctcaagatatactcccatcttgtgctaatttgaatacatgtgaggtttaccttttatctggaggaaaactctataatctgaattgagacaacaaccggaaaaaaaatgaaagacatatctacataggttgaacaagtaagcatcttaggtacagcattagtaattgttcgcgatatcccttgctacatttttgtttgcattgcacatggtgcattgcactgcaaggcacacctcgtcttatctaaaa

SEQ ID NO: 18596 - DNA, 1592 bp, Setaria italica
  Peptide Sequence Number=SeqID_84570
acagaattcctcgattctttcaaaccgcaagaaaactaagcagcacgtaattaccatttctgccctccgccgtctcccctcccctcccctccggccctcccctagtcccctccccgactcgccgtcgccgcgcacgcacggaaccgccgtgccagcatcgccggcggcaaccaccacgtgcggaggaatcaatcgtgaagcaacctcacggaagagaagaaaaaaaaagagaagaagaaggaccgctacgagcaacagcaagcagtagcgtggggggttggtgggggaacggagcagaggcagtccaattcgccgcctcgacggccactgacctcgccggcggcgggggtcccctcagctcgagccgacggatccgtggtcccatctgatccgagcctgatccgcccatgggaactccagttaacatcatcgttggttctcatgtttgggtagaagacccaactctagcttggatagacggggaggttgttagcataaaaaacaatgaagtacatgtgcagacatcgaatgggaaaaaggttaccacggacagatcaaaagtttttcctaaggatatggaagctccacctggaggagttgatgatatgacaagactgtcgtacttacatgaacctggtgttcttcagaatcttgctacccgttatgaactgaatgaaatatatacttacactggcagcattttgattgctgtaaatccgtttcaaagattgccacatctttatgatacccacatgatggagcaatacaagggtgcagattttggggaattgagtccccatgtctttgctattgcggatgttgcttacagggcaatgataaatgaagggaaaagcaactctatattggtcagtggtgaaagtggtgctggcaagactgagacaacgaagatgcttatgagatatctagcacacttaggtgggcgatctggagtagaaggacgtacagtagaacaacaagtcctagagtccaatccagttcttgaagcttttggtaatgcaaaaactgtgcgaaacaacaactcaagtcgctttggcaagtttgttgagatccaatttgacaagactggacggatctcaggagccgccatcagaacttacttgctggaaagatcacgtgtgtgccaaattaataccccggaaagaaattatcattgcttttacttcctttgtgctgcaccacctgaggacattcagaggtataagctatctgatcctaaatccttccattacctcaaccagtcaagctgtatcgaggtggacggaattaatgacgccgaagagtatttagcaacaagaagggccatggacatagttggaatcaatgaggaagagcaggaagctatattcagggttgtagcagctgtacttcatcttggaaatatagattttgccaagggaacggaaattgattcatctgtaatcaaggatgataaatccaggttccaccttaatactgcagcagaacttttgaaatgcgattccaagaatctggaaaagactctgataacacgagtaatagtcacgcccgaagaaattattactagaacacttgatcctgcttctgcaattgct

SEQ ID NO: 18597 - DNA, 1027 bp, Setaria italica
  Peptide Sequence Number=SeqID_84571
tgacaggccaagctacccaccaccgtcaccccaggagcaggaatcatcaccatgggacttcttttggaacccattctcatcgttggacagctttgcagatcctcaccctcgtagtagctatgataatgtggtccactgatgatgaactggcacggttacagcgggtacgggaagaggaaggaatcccagaacttgaagaggaagatgatgagtgtcaagatcatgtaccaatgcacagaaaaagaagagaaaagaagagcatgatgatgaggacgatgaagaagaagatgatgatgaggaagatgatgatgaggaatgtgagcattcagatgagtgtattgcttctaatgagggtgcttgctctgtgaattttgaggtcaataccaagcaagaaacaaagggatttgaatccaaaggtgttcagtgtactgaagcacctcaacctcgcaagacagtagaacttgagataaaggcacacaagaaagaactgatgaggaacaaagtagcaaatgcagaagaaactcctggtttcacagtatatctgaatcgaaggccagcaagcttggttgaggccatgaaggatattgactgtcagtttctgggaatatgtgatgctgctcgggaagtctcagtgatgttggaggcaagtagagctcagtactcaacctcaaatgatcttctgcaaagatgctgaacccagttgcacttttgcgctctgcatcatcgcgatcatcgtcttcccgtttccttctggcttcttctagctcaatagatgatctctttgacaatgagacaagcagctgttactccgaagaatcttgtagtacaatgtctggaagtcatcagtctaccttggatagattgtatacatgggagaagaaattatacaaagaagtaaaggtgggtgagcggttaagaatcgagtatgaaaagaggttgactcacttgaggaaccaggatgatagaggcgaagaaccttcctctgtcgataagactcgtgcagcattgagaagcttgcatactcggt

SEQ ID NO: 18598 - DNA, 716 bp, Setaria italica
  Peptide Sequence Number=SeqID_84572
agacgacatgggacagagtgtatggttttgttgactctttaaacatatttcgcaagaaggcagaaccaacagaatcattggatcatcgaagggatattctagatgtaaagacgagtattcactataagatcacgcagccggttgggctatacatatccttattgccttgtgcaaagaagcatgacacagaatccgacgaagataatgaaatagttgttccagtctggagtgtggatgaggaaatactcatgcaatccctttacaaggtcatagtttccgtttcagaatgcagtccccttattctttatataagggaagttaatgttctccttggtagttcaccgagagcatatgatttgttcaagaaaatgttgaacaaattatctggaagagttttggtaattggttcgcacttccttactgctgatgaagatagtggtgatgttgatgaggaggtgactgaactattcccatacattctggagactaagcctcccaaagaagagtctcatcttgagaaatggaaaacccaaatggaaaatgatgttgcaaaagctcaggaagaatcctttgtaacccacactgcaggagttctgtcagcatacaacctggaatgtggtgatttgagttctatccctcgggatgattatttcacaattggaaaatacatagagaatattattgccccagcagtctcttaccatttgatgaagtaa

SEQ ID NO: 18599 - DNA, 879 bp, Setaria italica
  Peptide Sequence Number=SeqID_84573
tctttgaagcatagacatgcttgataaataatgcattttgtacagcataactagtaaatgccaataatcacatcagaggacataaataccattaatccgataactgtagtaactactaatcaacaaattttacaatcttatgtctgaaataatgaaccacataaatggaatgaaccacatgaataaactgaacgaaaagaaaacggcagctaagaataatccttccccagcagtgtatgtattactattagtaccgatatttactgcactgtaagttcagctcgggctgccccttcttcctgctgctgacttaattgtcaacgtgagcccatttgaaatcaggtgaagggctcacgttgacaattaagtcagcagaatgaagtaagtgcggtggttctgattcccaccctaatgccttgaagaacagatctcctatagaattctgtgttgcgagcttctcgataaatccagcgccgagatcctccatgttcttccggtgctggaagtacccgatgtactctgaacaaatgtggtctcctggattgacgtatagatatggcgtccatgatgacaaaatgctgaaagattcttcagcaacagatctctgactgttcccctcagttttacctttcattgcaatggttaatccggcagtaattacacttcttgcgatgcggaaaccgtgctttaccctttcatctctgatcctttcaattggagcagcgacaaagggtggattgaagagaaagctttccaaaagctcacccttcttagccatgtttcttccggtaaggatagccatacctgcacccagtgagttggtccttgtcttaagtacctaaaacttttaggtaattaccggggttaaaaacttagtaa

SEQ ID NO: 18600 - DNA, 1771 bp, Setaria italica
  Peptide Sequence Number=SeqID_84574
aatatttcgttgtgggttctggtgcccttggatgtgaattcttgaagaaccttgccttaatgggtgtctcttgcagctccaagggaaagctaactataacagatgatgatgccatcgagaaaagcaatttgagccgccaatttctattccgtgactggaacattggacaggcaaagtctattgtagcagcagctgccgccagcactatcaaccccagcctccaaattgatgctcttcagaaccgtgcttgtccagataccgaaaatgtgttccatgacacattctgggatggactgaatgtggtcatcaatgcacttgataatgttaacgctaggatgtatatggacatgaggtgcctgtacttccagaagccactactggagtcagggacattgggtgcaaaatgcaatactcaaatggtcattcctcaccttactgaaaattatggagcttcaagagacccacctgagaagcaggcacccatgtgcacagttcattcgtttccacacaatattgatcattgcttgacatgggctcgttcagagtttgagggtttgctagagaaaacaccaaatgaagtgaattcttttctgtctaatcctgctcaatatgctgctgccatgaggaaggcaggtgatgcccaggcaagagaattacttgagcgtgtctctgaatgtcttggcaaggagagatgcattacatttgaggactgcataacttgggcccgacttaggtttgaagattatttctcaaaccgtgtgaagcagctcacattcacttttcctgaagatgcttctactagcacgggcactcctttctggtctgccccaaagcgctttcctcggcctctgcaattttcagccactgattcatctcaaattcacttcatcatgtctgcttcaatactgagagcagagtcatttggaattgctatacctgactgggcaaagaacacaagtaatctggctgaggcggtcaataaggttgcagttcctgaatttaagccaaagaaaggggttaatattgtgacagatgagaaggcaactaacctttctagcacctcggttgatgatgttgctgttattgatgagcttctttccaagttagaagaatgtgcaaagaatctgcctccaggattccaaatgaaacctatccaatttgagaaggacgatgacactaattttcacatggatttaatatccgggtttgcgaacatgcgtgctaggaactatagcattcccgaggttgacaagttgaaggccaagttcattgctggaagaatcatccctgctattgcaacttcgacagccatggccacaggtcttgtgtgcctcgagctatacaaggttattgctggggagcaccctattgaggactaccgcaacacattcgccaacctagcgctgcctctgttctcgatggccgagcctgttccagccaaggcgatgaagcaccaagaccttagctggactgtatgggatcgatggtcgatcaagggcgacctgactgttgcggagctggtgcagtggttcagcaacaagggcctcagcgcttacagcatgtcctgcggcacgtctctgctgtacaacagcatgtttgcgaggcacaaggaagactgcagaagaaggttgttgatgtggcgagggaagtcgctaaggtggaggtccccgagtacaggaggcacatagatttagtggtggcctgtgaggatgatgatgggaacgacattgatatccctctcgtgtccgtctatttccggtagtcagcttcc

SEQ ID NO: 18601 - DNA, 936 bp, Setaria italica
  Peptide Sequence Number=SeqID_84575
cggcggcgatccaggacgcggtcgggaagatggtggaggacccgctcgggtgttggccccgggtgggagttcctcaagttggccgccgccagcggcctgacggtccccgccgatcggtttatgaacgtgtccgggtcggcgggcttcagggtgtacgaggtcgccgacttcgggtgggggaagccgcggcggacggagaacgtgaggatgaacctcgacgggcaggtggcgctggtccgcgccagggacggcgccggggtgcaggcgtcggtgtccatgctgcggcgggagcacgtcgacgagttcgagtctgagatgctcaagctactcggatgattttgcaagctgcaattaaattcaggtgatgtttggatcactagttcatgggctaaactttagtccctaaattttagcccctaaactttagtcttgctgggttgtttggatccatgagctaaacaaccgtttctcatcaaacaatgactgatttgcctcttgttaatgactccatgcacatgcacaggaatgcacatgcacccgtgcgcctgctaggaactacttgttgttcctgctggtcgcctaccctgcgcctgctagtttcttccatgctgtttcacttatctcggacaaagtagtcaccagccgccagcaatgggaattctccacacggaatatttctaccactaatttccaatctgattcaatagttagcaagttttcgatgctctctagatcactgacactagtatattacatacatagcctaattaactagctagttgcagtgggagctcccaatgtgaagttcagaaaagagaagtggtagcaacaaacatgcatcattgacagcagcttgccctgcaggcgaaaatcggaagcacaagaattgtagctattgttccattccatcggagacggggaacaactgagaagggg

SEQ ID NO: 18602 - DNA, 613 bp, Setaria italica
  Peptide Sequence Number=SeqID_84576
tgaggaaggcccgtcatgaaggtttccaccaggttgagcataaaatcagggaccttcacaagtagccttggcaccacattaggcccacgaaaatcaaactggttttcactagtgacattataacaacaggaatcatctgaagaaaaatctggcgccctgacagctaaacctggcttcctgtcagttataggagcaggagttctatcattagcgtaatcatgtgcttcctcctgtgagttagtcgtattagacatactatctgatgctgacctaactgcagaagaacctcgcaaagactgtatctccacagagaatgaactaaactgttcctccagtcgctgaagccttgcatcaatgctactgaggggctttatcatgctgtcctcaaacctagagcagtataattccatcttctcaaccttagtgagcagaatatccatctttctctcaagattatgattgtgaggagtaaatttttcatttgcaaagggattaacaagatgatctgcgtctgatgctcgctggtccttcactgatggcacctgtgtactttctgttgtttgtacaggcaatggaagagaatggtccttcaactgcaagtcaccttggttcc

SEQ ID NO: 18603 - DNA, 492 bp, Setaria italica
  Peptide Sequence Number=SeqID_84577
ctggctacaacctcaccttctggaggccacaagctccctcaaattatgtgattttgggtgattgtgtgtcctcgaggtctgtgccaccttctcaggtcgtggttgctgtaagtaacacttatggtcgtgtacggaaacctcgtggatttaggcttgttcacgtattgcctggtcaagatgtcattgattcctctcagtcaactgaagcaaacgagtgttccatctggattcctgtgccaccacctggatatttagctctaggatgtgtggtaaatattggaaggctaccaccttcaaaccatgtagtgtactgccttcgttccgatcttgtgacttctgcaacattctcagattgtatacatacaccctcacatgctaccggaataatgtctggatttagtatctggcgtgtggacaatttgattgcttcgttttgtgcacatacttctacagaacaacccactagaacagaagctcttgatttgcaccatt

SEQ ID NO: 18604 - DNA, 769 bp, Setaria italica
  Peptide Sequence Number=SeqID_84578
gaaatctaagccaattttatcttctgatgaagctttcatttgtggtataccatactccatcgtctgagttaattaatgtagatattaggatgaaagaatcatttgagtctattatttcttaaatctatgctcttctttcaaagagctaatccatttcacagcatcattcttattctgagtttacccatagccgtacattctttgaatatatcgcttatgttattctgtgaccgactgcctcttatgcagctggacaggagagatttaggaccttgaccagctcatactacagaggggcacagggaatcattatggtgtatgatgtcactcgacgagaaacgtttaccaatctttctgatatatggcaaaggaaattgacctatattcaaccaaccaggattgtataaagatgcttgttggaaacaaagtagacaaggtacttcttaaaaccgattttatatcttgccaacactgttcatacatgcagttacgctgctatgctgcttaggtttggtttttggtaccccctttcatctttatacagtttattactgcgctatagctaatttgatgttctcattttggcaggaaagtgagagggctgtcacaaaaaaaggagggaattgaatttgctagggaatacggatgtttatttctagaatgcagtgcgaaaaccaaagtaaatgtagaacagtgctttgaggaactcgtcctaaagatattggacacgccaagcctcctggctgatgcttcgtcgggggccaagaag

SEQ ID NO: 18605 - DNA, 999 bp, Setaria italica
  Peptide Sequence Number=SeqID_84579
tctcctcctcctcctcctcctccccttgtcttgcgttacccgcaaccggaagcagatcaaaccctagactagatctcgtctcgccgccccgatcccatcccatcccatccgatccgaccctcatggattcctcctcctcgtcgtcgtccagcctgagtcagcagcccgagttcgactacctcttcaagctgctgctcatcggcgactccggcgtcggcaagagcagcctactcctccgcttcaccgccgactccttcgaggacctctcccccaccataggtgttgacttcaaggtgaagatggttaacattggtggcaagaaactcaagcttgccatctgggacacagctggacaggagagatttaggaccttgaccagctcatactacagaggggcacagggaatcattatggtgtatgatgtcactcgacgagaaacgtttaccaatctttctgatatatgggcaaaggaaattgacctatattcaaccaaccaggattgtataaagatgcttgttggaaacaaagtagacaaggaaagtgagagggctgtcacaaaaaaggagggaattgaatttgctagggaatacggatgtttatttctagaatgcagtgcgaaaaccaaagtaaatgtagaacagtgctttgaggaactcgtcctaaagatattggacacgccaagcctcctggctgatgcttcgtcgggggccaagaagaacattttcaaacagaaacctccggaagctgacgccgctgcaagcagctgctgttaacttggtgctaatcccgtggatgatgatatctttgttttgttgcataaagtgataagctttgttgtgtttggtttgttttgcttttggtggtgtatattgccatgctaaaattagacccacacagacacacaacattacgttggcagcagatatatgatgtattaagttgttaaatctacctgacaatatgaattcattttggccttgagactaaaaaaaaaaaaaa

SEQ ID NO: 18606 - DNA, 408 bp, Setaria italica
  Peptide Sequence Number=SeqID_84580
catcaactccaggagaacaaccccaaagctgtaaacatcagccttgtcagagactctgcaggtggttgcatactctggtgcgacatacccaaaggtaccagcaacatccgttgtggcatgcgtttgtgtaacttctatcagtcttgccaagccaaaatctgacaagtatgcgttaagatcctcgtcaaggaggatgttgctcggtttgatgtctcgatgaattatccggggtgtgcaggagcagtgaaggaaagccaatgcttgtgcaacatccaccgctatcttgtgaacctcaatccaggacacatttctgcctccccatttcatgtatgaacgtctcgaggttcccaccagagagatagttgtagataaggaaagtgtctgattctccgagatggtacccaataa

SEQ ID NO: 18607 - DNA, 472 bp, Setaria italica
  Peptide Sequence Number=SeqID_84581
gagctgagctccgatccatctcggtagctactagcctactacctatcccgccatcccggtcggtagcaatactgcaataccactaccaccacagtggggtttgtgctcttgtggacacactggcctccacccatccctctcacgtctcgccatccgcagcaaaggccacaggacagattcgggccgatttatagccacaccatggccaggaagtgctcccactgtggcaactacggccacaactccaggacctgcggcttgggaaacagcagggaaaccatgctctgccaaggcggcggcgacaacggcggcggtgtcggaggcggaagcagaagcggtggcggtaccagcgggctgaggctcttcggagtgcaggtccatgctggcggcggcggtgcgggctcggcggcggcgtcgatgaagaagagctacagcatggactgcctgcagctcgcggctcctggctgctcca

SEQ ID NO: 18608 - DNA, 1402 bp, Setaria italica
  Peptide Sequence Number=SeqID_84582
ggccgcgagggccgccgcgagtcgcaggtggtatccgtcataagccgcgccccgcgcaccgagcccgaggtgctgccggtgtcgcccgacgacgacgcggccgtcaaggaagaagcaaacttccagcatcttaaggctatccagcaacttgcaactgcagcaaatggtgtgtggtctaaaccaaatgtgaggcgcaagacaaagattgtgtgcaccatcggtccctcaaccaacactagagagatgatatggaaactcgctgagactggcatgaatgttgcccggcttaatatgtcacatggagaccatgcgtcacaccagaaagttattgatctggtgaaggaatataatgcgtcacatacagataatgtgattgctatcatgctagacacgaagggaccagaagttcggagtggagatttgcctcaaccgatttttctggaaagtggccaagagttcacttttacaattaaaaggggagttgggactgatacatgtgtcagtgttaactatgacgactttgttaacgatgttgaagtgggtgacatgctccttgtagatggaggaatgatgtcatttctggtcaagtcaaaaactgaagattctgtgaaatgtgaagttgttgacggaggtgaattgaaatctaggcgccacctgaacgttcgcggaaagagtgcaaccttgccatcaataactgacaaggactgggatgacattaaatttggtgtggataatcaggttgattactatgctgtttcttttgtgaaagatgctcaagttgtccacgagctgaaggattatctaagaagccgcaatgctgacatacatgtaactgtgaaaatcgaaagtgcagactccattcctaacctacattcaatcatctcagcatctgatggggctatggttgcgaggggtgacctgggagctgaactacctattgaggaggtcccactgttgcaggaagaaattattagaatgtgcaggagcatgggaaaggctgtaattgttgctactaatatgctggaaagtatgattgttcatccaactccgacccgggcagaagtttcagacattgctatcgctgttcgagagggtgctgatgcagttatgctttctggagaaactgcacatggaaaatttcccttgaaagctgttaaggtcatgcacacagttgccctgagaactgaagcaactattcctggtggagaaacacctgctgaccttggtcaggttttcaagaaccacatgagcgaaatgttcgcgtaccatgcaacaatgatgtcaaatactctccgaacatcaatagtggtttcaccaggacaggatttatggctatcctgcttagtcactatcgtccctctggcactatttttgccttttacagatcaggagagagttagac

SEQ ID NO: 18609 - DNA, 1099 bp, Setaria italica
  misc_feature (1073)..(1099): n is a, c, g, or t
  Peptide Sequence Number=SeqID_84583
ttcctttgatgttttaggcatttgggataattcaattgaacttacaatggactgcctggtttgatggcatcttggttattcaaagaaataacttagctcgacccgggcagaagtttcagacattgctatcgctgttcgagagggtgctgatgcagttatgctttctggagaaactgcacatggaaaatttcccttgaaagctgttaaggtcatgcacacagttgccctgagaactgaagcaactattcctggtggagaaacacctgctgaccttggtcaggttttcaagaaccacatgagcgaaatgttcgcgtaccatgcaacaatgatgtcaaatactctccgaacatcaatagtggttttcaccaggacaggatttatggctatcctgcttagtcactatcgtccctctggcactatttttgcctttacagatcaggagagagttagacaacgattggctttgtaccaaggtgtatgtccagttcaaatggaattttctgatgatgctgagaagacatttggtgatgctttgtcctatttgctgaaacatggtatggttagggacggcgaggaggttgcactggttcaaagtggcaaacagcccatctggagatcacaatcaacacacaacattcaggtcaggaaggtttgatgctgagcgcattgcggtattctgattgtcacggacatcaaccaagaaattgatgtcttgtggcaaagttgaaggcctgattataataataccacgcaggtattgctagttttccattagcttggttagcttgtgtgtagggtatgtactgagagctggtcctgtgattcttttgtcatttgctgtgtacttctctgtttttattttcatgtaaaatggcgtatggccaatccttttgttcatccggttctaactgtagtttgggaacaccgtaggcttctcgttgtaatacagtttgtcctgtgtgtctatgtgaagggcttcattgtgaacatgggcattttatcatctaaaaagactgaattattgtaggcagcataagtgcataacctgaacctacaactcgacatatttgaannnnnnnnnnnnnnnnnnnnnnnnnnn

SEQ ID NO: 18610 - DNA, 323 bp, Setaria italica
  Peptide Sequence Number=SeqID_84584
ggcaccatctcagatattacacagaatggaaagttcagctaaaggtgccatggctaccaccaccaagctagataccccagagaactggggttacctagaagccattcatctccagaaggtaagtgcgtctcttcatcagcgccttcacagcaaccttgaatggtccatcgaatgctccagagatgaacgcatcagtttccttgcggctggtatggcctccattgcttccctcggttgatggcttgatagccaccaacgtagcaccttgcaacgccataccaccaggcagctcgagatagtggggctacttgagcttcatgttg

SEQ ID NO: 18611 - DNA, 432 bp, Setaria italica
  Peptide Sequence Number=SeqID_84585
agttgtcctcgacgccgctgatgaagaagaaggcgccggcgcggtcgagcgtgaaggaggtgctgccgtcgtcgaagcgcttgtcgtaggaggaggtgttgcaggcgttgtagtcggccggctccacgagcagcaccgagtccttgtccttggggtacacgaacaagagctggtcaccgatctggaagccggtcttctccgcccaggtgttgaaggactcgtcggcggcgtccggcacggcccagccattgtcgccgccgaccttgtactgcgtcgcgccggcggtcgcgacgaggagggcgaagcagctggcgagccccagaccgcagaacctcgccgccatggctgctgcaactgctagcctgcaaagcaatgagctctactgccgattgcgctgtccctacttccgcaacacaccggatgtataaaaaa

SEQ ID NO: 18612 - DNA, 459 bp, Setaria italica
  Peptide Sequence Number=SeqID_84586
gtcatttctgcgagatagtatgggacgagcagatatttgaggttggcggtggagacgtcttccttggtctcattgggggagaagaggccgagcttgctgaccatctcgtcgcagcgccgcagcagctcgacccccttccggatcccttcctggtcgagggcagagctggaggcgaggccgtggagccgcgacgccctgtcgaagagggcggggagcgggaggtcggcgtcgtcgtcctccaccgccgcggccgcgtggaggcgcatctgcgactgcatcttgttcccgacctcctccacctccaccatttcgatcggacggggctgtctcgcggagccggaagcgagcgagagatcggcgggaaaaccctagaggcggcccggcccggcaggcggggcagattctcagggagcagaggaaacacaggaggagagaccgagagagagctcgcgaagtgat

SEQ ID NO: 18613 - DNA, 259 bp, Setaria italica
  Peptide Sequence Number=SeqID_84587
taagtattccacgcttcactagacactgaagctataggctttacatcaacaatctcatcatcagcatcagaagtaactgtgctgattgctgctggctgatcattattcttagggccagctcgggttttcttcacggcactcctcgccttgtcacgagaactcgacgcagtgacagttacattcatgttgcgccacttgtcctttaggtcaacatttgagcggtagcacaatatggaactaagttctggatcattcaata

SEQ ID NO: 18614 - DNA, 1279 bp, Setaria italica
  Peptide Sequence Number=SeqID_84588
ttttttttttttttctttgaaatggtgtccgaagaagaataccaagcgggtatcttttgctgcgttgggagctcccaaggatgatggatccaacgacacaattcgatacagctagggggacggacagctgttttgcctaaacaacagtaaatatgaactacatacatatccgtcctgcacccgcggcgcacactggaccagagcatctccgagtagcatcaaccttgggccatcaatttcgtagcatttctgttcttcaatgtcaagagcgctgcttcagcaaaggcctgtgcagcttgggcctctgcttcagcaacctctgcctctcttgcagctgcttcagcttctgccatgatagcctctgcctctgcaactgcacgagcagcagcagcagcagcagcctccggggtcatagttgcgatgcgagccaattctcttccagcagcagcatcttggggcttcggccctctaagcgtggtgaactaggtgctatcctgtacttccgattcacctttatcaatttcccactggcggccaagtccttcagctttgcagataacaagtgatcaaaatcactaggtggccaatattgctcctctatgtaattagcaatagtagttctgtgtgaccctgtaggctcattcaagttctttatagcctccattataatattgtctagccttgagtgagactgagatttctttgaatttgaagtattccacgcttcactagacactgaagctataggctttacatcaacaatctcatcatcagcatcagaagtaactgtgctgattgctgctggctgatcattattcttagggccagctcgggttttcttcacggcactcctcgccttgtcacgagaactcgacgcagtgacaattacattcatgttgcgccatttgtcctaagtagtaattagtacaattgaagcatgcaaactgagactgaagatagaatgtagaaatttacaaatgactcataatttcaatgaatagagaatttggaatccattcactaaaacaagcttaggtaagaaaaggaaagcaaaaaaatcgaaccttgaggtcaacatttgagcgatagcataaggtggaactaaattctgggtctttcaatattgtgcgccattttccaactccatgccttgctattccagctctaagagcagcctcttcctcagatgtccacctctgttttggagcccccatgcttagtcctaatctcctctgaccagtacaatgcaacacaactgtgcaccttcttcgattcccgg

SEQ ID NO: 18615 - DNA, 1143 bp, Setaria italica
  misc_feature (1)..(49): n is a, c, g, or t
  Peptide Sequence Number=SeqID_84589
nnnnnnnnnnnnnnnnnnnnnnnnnnnnnnnnnnnnnnnnnnnnnnnnncgtttttttctagcggaacacttgacattggcaaagagtttagcgtgttcaggacagtggagggccatcgttgccggtgatcatgcgttgaagctcacatggctctcccagtaacagagggtgatacaaccaccgagacagcagcttttaacccaacaacagtactcatcatggagtagtacaaatgtacaattgtacataggtaggagctggcatctgcggtgacgctgctcccgaacagctccaagtagcatcaagcttgggccatcaaatttgcagtgtttctattcttcagtgtcaaaaacgctgcttcagcaaaggcttgtgcagcttgggcttctgcttctgcagcttctgcttctcttgctgctgcttcagcttctgccatgatagcctctgcttcagcaactgcacgagcagctgctgctgaagcttcctcaccagtcattgtcgccatacgtgccaattcggcatcaacttgagatctcgtaaggattttactatcattgctccctattttgacaggctctctttgcacgtcttccaacaaaagcattttggggcttcggccctctgaattgggcgagctaggtgctatcctgtacttgcgattcacctttatcaattttccactggtggccaagtccttcagttttgcagatagtaagtgatcaaaatcactaggtggccaatattgctcctctatgtaattagcaatagtagttctgtgagaccccgtaggctcatttaagctctttatagcctccattataatattatctagtctcgagtgagatttctttggatttgatgtattctgtgcttcactaggcactgctgctataggcttttcatcaacaatctcgtcatcaatatcagaagtaactgctgtgctgattaccacggtgtgatcgttattcttgggagtagttcgtgttttcctcactgcagtctttcccttgtcacgagaactcgatgtactgacaattacattcatgttgcgccatttgtccttgaggtcaacatttgagcgatagcattaaggtggaactaaattctgggtctttcaatattgtgcgccattttccaactcc

SEQ ID NO: 18616 - DNA, 451 bp, Setaria italica
  Peptide Sequence Number=SeqID_84590
gcctccgctctgttctccttcttccttcgtttccttgcttctccccagtttcacaattctatccacatcttccttccggtcgctaacaagcccctaaacaattcctgagcgtagatgaagtttctcttacatggatctcgctgtcaaattcctcaccagaaccgatccttgttcacggacaggtaccaagacatgaccttcccttcggtgttcctcatcccatcaatgagatagcaacatgtcgaccccagcgccccgacgacgaagtccgcttccgtggccatcatgaaattgaccagggcgtggctcgtgctggcctcacgccccaggctggcctcgtaggcggccatggacgagttgccgctctggcgcgccacgcgcgaagtagaatctccagtcagggtaaagtccagccccgtcgacgacctcctgcatttcagtggagagccag

SEQ ID NO: 18617 - DNA, 245 bp, Setaria italica
  Peptide Sequence Number=SeqID_84591
aagctgagcacttccaaacagagcacagcaaagaaattcaacgagtcaaattagcagcaagcgaaggggctctgcatctggtcatcaactcatcatggacaagatcctggccttctccatcctgagctcgtcgccggccgacatctcgtcgaccggcttctccacccgcctctcgtggaggtcctcttcctccgccgtgacccagaagcagcagcagcagcagcaggcggagaagccggctccgg

SEQ ID NO: 18618 - DNA, 253 bp, Setaria italica
  Peptide Sequence Number=SeqID_84592
ataatgcttgttttcccctgttttttcttgtagccgctgtgtggtctgctggtctgatttttatgtgcaggtgtgctcgcatggtttttgcaatcatatatatgtccgtgttctatcatatgttcttcctgctgcgtgtatataattcttgccataattggttcaaatcacagtagatatttgttttgtgtcagatgaatggggttgcatataaattgcaatttttttgcataaaaatcaaagcttatggatt

SEQ ID NO: 18619 - DNA, 926 bp, Setaria italica
  misc_feature (925)..(926): n is a, c, g, or t
  Peptide Sequence Number=SeqID_84593
gacgatgtcgcgtgcggccactagatttttcctgacgcggtcgctgctcccacttcccctcccaaagtggcagcggcggcgggggcggctggggtctagcattctcgcggcgagggctttctccatggcggcctcggggttcgggggtggcgatacgttccggctctcggccgcgccgggtgccggcgcgctgaagctgcacaagggcgacatcaccctctggaccgtcgacggcgccactgacgccatcgttaatgctgctaatgagcgtatgctaggaggtggaggtgttgatggagctatacatcgagctgctggatcagaattagtagaagcatgccgcaaagttccagaggtcaaaccaggagttcgttgcccgactggagaagctaggattactccagctttcaagcttcctgtgtcccgagtgattcacactgttgggcccatatatgacatggacaagcatcctgaggtgtcactaaagaatgcctatgaaaatagtttgaagcttgctaaagagaatggcattcagtatattgcattccctgctatatcttgtggtattttccgttatcctcccgaagaagcgtcaaaaatagctgtttctactgcacaacaattttcagatgatatcaaagaggtgcattttgttctgttttcggatgatctgtatgagatttggcgcaagactgctcaggagatgctttcacaatttgagaaatgaatggtcttatagtttatgatggctgctatcctgtgtaacaatacaactatatgattgtatcgaacgacattttaatctttaaccatgtcttgcacttgtggtataacgtccaatgaataaggtttggcgaaattgagaagcgctttcaattattagtcactttatttataatactgacgaaagagcaactacctgtcnn

SEQ ID NO: 18620 - DNA, 594 bp, Setaria italica
  Peptide Sequence Number=SeqID_84594
acagcacagattttcgtcgcttgccgttgcagttgccggcatcctcttcctcttcctcttcttctcctttggcttccagcggcggacctgcgggagctcgatccacgagctgctacctgacagcagcagcagcagcaaggaggcaggaggaagaagaagatgatggcggagtgcagaggaggggactgcctgatcaagctgttcggcaagaccatccccgtgccggaggccgccgacgccgccaaggagagtggcagcagcagcagctcgactgaatccgatgccccggagaacgcgcaccaggaagcctcggacccgtccccgcagccggaggtcgtcgacgccgaggaccccaagagctcaccggagacgacgcagcagcccgacgctgctggcgacgtcgccagccagagggagaagctcaagaagcccgacaaggtgctgccgtgcccgcgctgcaacagcatggacaccaagttctgctacttcaacaactacaacgtcaaccagccgcgccacttctgcaagaactgccagcgctactggaccgccggcggcgccatgcgcaacgtgcccgtcggcgccggccgccgc

SEQ ID NO: 18621 - DNA, 313 bp, Setaria italica
  Peptide Sequence Number=SeqID_84595
gctcatcagctcttcctcgctcttcagcggcaggaactgccgcagcgccggcgcggcgggcagggtcggcgccggctccaggaacaggtacggctgcgcggccaccatcgcggcgggcagcccgagcctcaggtccagcgacgacaacggagccgccgccgccgacggcgagttctccatggaagacgacgaggaggacgaatcatcatcatccactgtgccgcggctcgcgctcgccgccggcgccgctgctggaggagcggggtagttggtggtggcgccgggcccgcggagcttgcgcgcggcggtgtcg

SEQ ID NO: 18622 - DNA, 388 bp, Setaria italica
  Peptide Sequence Number=SeqID_84596
ctccgcttctttctcccttatccgctgagacaccgccgcctcagccgcgacgagcagcgaccggtactgccgccgccgagtgtcagccagcgcgcgccggagcctctccgcatgttcttggatcagccggtccatctcgttcctgtgctgatcgcgctgcgcggcgagctcgtcggagaggaggcacgacgccgaggccgaggatgtggacgacacgtgctccgagccctcgtcgaagtcgagcctgagccccatggccggccgcttgtgcagttgcgccaggcttatcaccttggggagaaagaagcggaggcctcggaggccgcgcggcgcggcgccgacctggaggaccgtgtcgcgcggctgcgagcggaggcagcggcgtggc

SEQ ID NO: 18623 - DNA, 624 bp, Setaria italica
  Peptide Sequence Number=SeqID_84597
ttgtgccacctctgatctacgctgtcatggggacgtcgagggagatcgccatcgggcccgtcgccgtggtctcgctgctgctgtcgtcaatgatccagaacgtcgtcgacccggccgccgacccggcgacctaccggtcgctcgtcttcaccgtgactttcctcgccggggtcttccaggtctccttcggtctgttcaggctgggatttctcgtcgatttcctctcgcacgctgccatcgtcgggttcatggcgggtgcggccatcgtgattgggctgcagcagctgaagggcctgcttggactcagccatttcaccaacagcaccgacatcgtctcggtgatcaaggctgtgtgctcggcgctacatgacccctggcacccaggcaacttcttaatcggatgctcgttccttatattcatcctcaccacacggttcatcgggaggaagtacaagaagttattctggctgtctgcgatctcgcctttgatctcagtcattctgtccactgctgcggtctatgcaacaagagctgacaagcatggcgtgaagatcattcagaaggtgcatgcaggcatcaaccctagctcagccaagcagatacatctgaatgggccacatactt

SEQ ID NO: 18624 - DNA, 316 bp, Setaria italica
  Peptide Sequence Number=SeqID_84598
gattccctctccagccgcgcacgacccctgccatcctcccgaccccaaccgctgccatgtctccggccccgccaccgccgtcgcgcgcccgcatccggccgtggctggtggcgggcgacctggcgctggcggccgcgtgggtttgcgcgggcgcgctggtgaagctgctcgtgtacggcccgctcggcttcgggggccggcccgaggccgaggcggtgaaggtctcgctctccctcgtgtacatgttcatcttcgcctggcttgaggccgccacgggcggcgcctcctacaacccgctcaccgtccttgccgccgc

SEQ ID NO: 18625 - DNA, 911 bp, Setaria italica
  Peptide Sequence Number=SeqID_84599
agactgcagagggtgtcacatgaacaaagaataatgcccaagatacaattgcagaattggattccaatgatataattaggaaaaaaaataacctaacaacataaaccaattggtcatcgatgttaagttattgaactaacacacaacacaccaacccagcccaccaaatggttgctgcaacagctgttgcatattatgcggatcccactctgtatagtcgaagcagcctctatatacacccctctttcactctctccatggaagtagttagagtgtgtataaccagccaattagttctagcttaggctcttgcatccagcaagaatgtggcaggttccgatttcgcagcacagccatacctaaaagtgctgtactttctatggaccccagtaagtttcccatgagctgctctttggtgcagttcgaccatcatcctggagcaatccattagttgttcttctgaatattttgtgtgcagctcacagcatttgttccaggatttgaacccatttattgtgcattgagctgtgtagatggctgcagctgctagcatagatgggcagaacttgagcatctcgtattcgacgagagacagctcgatcatgaagaatgacaggagctcgagcttcttctctgcttgtgctgcctttaggaaccttctcataaaacaatatggagtcggcactgacatattgaacttaagcgtgttcactatccttctctccatttcaagaatatcagcccttgtgtaagcgcggtcacagattaagatgagatcttccaccaccggtacgctcacttcttcatatttgcacgccagcaacatagcagttacaccaactagctgaagcttcttccgcaccacattttcaagagccaaaaatctgtctatgatgttcacagtgaggaaa

SEQ ID NO: 18626 - DNA, 991 bp, Setaria italica
  misc_feature (6)..(6): n is a, c, g, or t
  Peptide Sequence Number=SeqID_84600
tagtcncttttaggtttttttttttttttgtccaaaaactgggtttggattttgttgctataactttgccttttgtttgcttcttggaagccatgaactcgcttttagtcttgcagcctatatggtagtgagatatagggtgtatgtatgctgatcatactatcatggtagtaatgatggtgtcagggtcatggtttgcttttggttgcctctccaatgttgtctgcaactcaaggtgtggttgcaggttgctgctcgtctacccatgatgatcctggctgccaggtggccagaaggatgggtactgccagttgctgctctccttgttaccacctgaacctgatgcttcccctcttctggacctccttgaagtgcaccccatgatcacctcttctagcccagaagttgacctaccgtcaaaattgctaggttggtgtggctgctcatcctcctgctgctgctgatgataactcgcgccatggtcatacgtctcctgctgttgaagtatgactgaaccatggtgaaccatgggcgatgaggtgatcatcgtggtgataggctccgttggtgtgctgatctggaatgctgctgcagctgcagcaagacggggttgctcctggttggtgtattgacgccgatgaagatcatgctcctggtgaaggtgaagatggcctgtatgtacttcctcgtcagccctggccgaaacctgaactgatgttccaacgtccacctcctcaaagctgctcctgaactgcgtgaagttgaactcgtcgatgccggtggcgccgtggaacgcaccgccaacatccggtggcgctaccgcggcctccgccacttgttcagcaccggcagccccgtccacggtgtcagaggaggctgcggcggcggcaggttccgccgcgacgccgcactgcctcggctgcgtctggtagaagatcttggacacgacgagctccccctcgcgtcttccttccttcgtttgttacgacca

SEQ ID NO: 18627 - DNA, 248 bp, Setaria italica
  Peptide Sequence Number=SeqID_84601
taaggacaaggaggttttgcatgtccatctcctcaaaggctatgtcgatcacaggcagagatgatcggaggtattggagccacctgtccacagaggaatcaaggtttcgcggtgttgactatcttcagcagatttggtggcttgaggtgtgcggggagattgatttctgcttccccgctggttcatacagcctattcttccggctccatttgggtcgaccacacaagtggatgagccgccgaggccat

SEQ ID NO: 18628 - DNA, 361 bp, Setaria italica
  Peptide Sequence Number=SeqID_84602
atcatccaaaactctccctattgtgagctgattcattgttacttgtgccatcgcattgatagttttgcacacacagttactcagatatcttcttaaaaggaaattcaccttgcattgcatgctctggtgttgtaactttgtccatcctatcattatatgttcgagctgtatcaatttcgtatccaatcttttctgaagtcactgaatgcgagatgattaaactgctgtgtttttactgaaggtttcgcggtgttgactatcttcagcagatttggtggcttgaggtgtgcggggagattgatttctgcttccccgctggttcatacagcctattcttccggctccatttgggtcgaccaca

SEQ ID NO: 18629 - DNA, 578 bp, Setaria italica
  Peptide Sequence Number=SeqID_84603
cggaggtattggagccacctgtccacagaggaatcaagcagatttggtggcttgaggtgtgcgataagattgatttctgcttccccgctggttcatacagcctattcttccggctccatttgggtcgaccacacaagtggatgagccgccgaggccatgcctctgagagtattcacggttgggacatcaaaccaacacggttccagctttcaacttcggatgatcagtacaccgagtctgaatgttatctaactaaaccgggaagatggatcctttaccacgtcggcgattttgtcgtatcgagttcagatgaggtgacggagctcaagttctctatgatgcagattgattgtacacatacaaaaggtggcctgtgtgttgattcggtcttcatataccccaaagatcaccgatatgaggaggagtgcatattgtgccagaaaattttgtaggagcgtttgcatggattggctagcctgtttcttcttctttgttatggtcattcttgtccaaaagcgtagtgtggatattctttttccaagagttttgcatggacataaggtcttgttctgtattta

SEQ ID NO: 18630 - DNA, 397 bp, Setaria italica
  misc_feature (191)..(191): n is a, c, g, or t
  Peptide Sequence Number=SeqID_84604
ggaggctgcacagcactctgtacgagttctagcctactcagctgaaccatttcttctgccaaggatctcttcgtggccgggacagctacgacctcgcttacggtgcagtggacgctggccgagctactccggcatccggccgttatgtcaaaagtgcgcggcgagttgcaggaagtgctcggcgcaaaggngtatccagacgaatccgacatcgacaagactgccctacctccgcactgtggtgatggagatcatgcggctgcactcgccgagccctatcatgatgccgcacgtggccatggccgacggcgcggaggtcggtggcttcggtgtgcctaagggcaccatagtgatcgtcaacgtgtgggccatcatgcgtgatccggcgtcgttggga

SEQ ID NO: 18631 - DNA, 310 bp, Setaria italica
  Peptide Sequence Number=SeqID_84605
agagcatgagggggtcggtggacggtgacccacctgtcaagctgcatggaggccgacccgttgtggcgccacggcgcgcagggctgagcattgccagtggccaccgtgttgtggacggtggtgatgaccaccatgccgtcgaaggatggcgcgttgggcatgtcgaggacgtggacggcgtcgacgcagacgttggcggcgcggtgggtcgggtcgtgggcgtccatgctcacccacacggtcagctccttggccggtgtgtagatggggatggtctggtcgcgatatatcctcaggtgctggattgtag

SEQ ID NO: 18632 - DNA, 349 bp, Setaria italica
  Peptide Sequence Number=SeqID_84606
cccttagataaaaccaagatgcaccaccatccaaggatatcactaagtccttcacgtaacaaccacattgcgaaacagacagcgccaaactcccattgctgttctttatcgccattgttatcccaacttccattccttgaaccaggatcgaggcggtgccgctgtcggcgatctctatcggaaacaaccacgagtcgtagcgatagctccagtgcatactgatgttggcggtgacgccggaggcaacgacgacgaggcccgaatctcccaggtagacggtggagttgtccccaacatcgaggtggaagagcgtgatgttggaggcggcgacgcggacgccgccgagggg

SEQ ID NO: 18633 - DNA, 235 bp, Setaria italica
  Peptide Sequence Number=SeqID_84607
tcagcatcaatggtttgaatgtaaagcttccattccgggaaattcccagcggcaatagaatcatacagatcctttgtggcatggctgtggcaggtgcctgtagttgagtgggatgccaacatcatcgaagaggaaggtgaacatgtgcatgctctctgggtggtgtgagaagaagtctactattctccagttctcctgcaaattggtctttgggtttggcttgaaagcatgaacc

SEQ ID NO: 18634 - DNA, 454 bp, Setaria italica
  Peptide Sequence Number=SeqID_84608
ccactgcagcctgttgacggatggtcctgaacaagaacattgacaacttctttgcaggtgggatgatatcctctggccaggtcttggtgacatcgagtgggtcaaaatcaaatttatcctcatggtcagcatcaatggtttgaatgtaaagcttccattccgggaaattcccagcggcaatagaatcatacagatcctttgtggcatggctgtggcaggtgcctccaacagtaacagcttcatcatccaacaagcatttcacaccacaagtaggcttccaatggaatttgacaaggtgaggctttccgtccctgctgatcaaggtgtaggtgttcacaccaaaaccctccatgtgcctgtagttgagtgggatgccaacatcatcgaagaggaaggtgaacatgtgcatgctctcgtgggtggtgtgagaagagtctactattctccagttcct

SEQ ID NO: 18635 - DNA, 413 bp, Setaria italica
  Peptide Sequence Number=SeqID_84609
tacaaattcaaactccctcccatttgcattctccatgagcgatctactagtggatatagttccctacaaaatattttcaatcaggcattttggtagttcatcagtgagattagaagctgtttgctttcagctgaatggaggcaaaacaaccaacatgattcatagatcattcactatggctttcttaatgtagtgtacagatagaaaccattctcttccatattgtgggtttaaaattacctcagatcgtgacttacaaccagtattgtgtggtgtttctttaggtccttcaggagattcacaacatcagcccgagccttccaatctagaccagcaagtggctcatcaagcagcaatagatcaggagtttgaacctacaaaatagaaaaaataaataaaggcagcctataaac

SEQ ID NO: 18636 - DNA, 774 bp, Setaria italica
  Peptide Sequence Number=SeqID_84610
aggttctctgaatctctccagtgtaaatgccaacaccattatcatcatcattttgacccatcttccaaaatccacaaggcttcaccatcttcgtcactcatgtgtgcaacaaggagctatagctggatcctcaattcaaatttcaatagcactgttcaacaatcgtgttagctcgacaaggtctgcatgacaactcacaaaactgttctccgttccagcagtcaaagtttgggattaatgtccatgatctctccatcgaagttttctagcattttccgtctccagattctcgatcaataagtacatctttacacaggcaaactttcctccttcaaactccctcccatttgcattctccatgagcgatctactagtggatatagttccctcagatcgtgacttacaaccagtattgtgtggtgtttctttaggtccttcaggagattcacaacatcagcccgagccttccaatctagaccagcaagtggctcatcaagcagcaatagatcaggagtttgaaccagttgaattgccaaagcaagtcgcctcttaaacccaccacttagagactgtggatcttcatctaatgaaatggttgtcagaccaaccaagttcaaggcattttgaagatttttagcaagctgttctttgaataggagatcggccttctgcctaggccatccaaaagtaacttcttcaagtacagtatctgctaagaatagtacctctcaggaaacttgaaatacgattccaactctttgagaagtttagtct

SEQ ID NO: 18637 - DNA, 1099 bp, Setaria italica
  Peptide Sequence Number=SeqID_84611
acccaagtttataaaagtagttgatcttaatagattcggatggccagtaatgttcatccagccagcatgcctgacagctataccaataagtacatctttacacaggcaaactttcctccttcaaactccctcccatttgcattctccatgagcgatctactagtggatatagttccctcagatcgtgacttacaaccagtattgtgtggtgtttctttaggtccttcaggagattcacaacatcagcccgagccttccaattgatttggtctgattaatataatcactacctagaccagcaagtggctcatcaagcagcaatagatcaggagtttgaaccagttgaattgccaaagcaagtcgcctcttaaacccaccacttagagactgtggatcttcatctaatgaaatggttgtcagaccaaccaagttcaaggcattttgaagatttttagcaagctgttctttgaataggagatcggccttctgcctaggccatccaaaagtaacttcttcaagtacagtatctgctaagaagtacctctcaggaaactgaaatacgattccaactctttgagaagttagcatttcagacaagccaataggatttccactatcatcatacttctgaatgcaaatagacccagaggtaggttctgatagaccagccaaaagctgtaaaagggtggtctttccactcccactccgtccaaatatcaaaccaaaacttttctcccgaagggagaggttaatttcatttaacaagttatgttcagttccaggagggcgataggtaacttttcttacctccaattgggagtacccagcctcgaccgttgccgcgcgacagctccaagaaaccctccatctcctggacggtttcacaggggagtaataagaagccgtcggcggggcggccaccgccgcggccgcggcgagcatggcggagaacggagcttcggaggaaccgggccgcccccctcacgggcttgctcgggtgctcatcgaaggtccaaggaagcctcgggttcgtggtggcggtcccggagagtggggcgggagcacggacgaaggcgggcggcgggcggctgggaggaag

SEQ ID NO: 18638 - DNA, 248 bp, Setaria italica
  Peptide Sequence Number=SeqID_84612
tggagatgtttggcgagaatggaagggacagggtttggactgttatggcaaatgtgatggacccagtgatcttgcatgaagctttcgacggctgtgttggtgtctttcacacctcatcacttgtggatccagggggcatctccggttacacgaaacacatggcacgtttggaagccaaagcagcagagctcgtggttgaagcatgtgtgaggacggagtccgtgaggaagtgcgttttcacctcgtcg

SEQ ID NO: 18639 - DNA, 442 bp, Setaria italica
  misc_feature (349)..(349): n is a, c, g, or t
  Peptide Sequence Number=SeqID_84613
tattaacacggcggtattcacgagttgcctgcttagcgaaatagagatgcgaatcgtggcaaaatcatcacgcagactgaaaaagggaagatgaacgagcacatgggccgaaccggcccattctacgacggccagtttctgtaccacccggcccacgcggacacgaggccgctgatccccagcgtgacggcgtggttgcagaaccggttgggctcgacctccgcgatggcgatgacgaggtcggcggcgttggccgctgtcgccatgagccgcatcaccctgtccatccgtatcttccgcaactccttctccttctccgcgtccttccctccgccgccgccttccctcngcagcctccgctcctgcctcagaccccgcctgatcatgatgaggtccatggcgatgaagaacacgtagccgatggactcgccgaacgccgaga

SEQ ID NO: 18640 - DNA, 309 bp, Setaria italica
  Peptide Sequence Number=SeqID_84614
gagcttctcgtcacgtttgttcgttggcaaccaacgagctagctggaggccacatgcgagccgccaacttgatgcgaatcagttcgtgcgccgatgtttagttcatatgtcgtaggagtgtttcggttggacgccgccggctcgatctttctaccgcgcccagagggggatcttctgcgggctgccgctctgccgctgccgccgatccctcttcgcggcggcgggctgcttggacctcttctccctcgcctcgtcggcctcgatctgctgctgccggcaatcctcgctgcagaacggggtgtcgacccc

SEQ ID NO: 18641 - DNA, 490 bp, Setaria italica
  Peptide Sequence Number=SeqID_84615
ctccctgcacgccggcgcgtcctggtgtgccacgacatggagggcggctaccgcgacgacgcggcggcgcagggcgggggcaacccggacgcctacgcgctctggcactggcacctcatcgacgtcttcgtctacttctcgcactacctcgtcaccctcccgccgccctgctggaccaacgccgcccacctacacggcgtcaaggtgttgggaacgttcatcacggagtgggataaaggtgcggaagtttgcaaggagatgcttgccacggaggcttctgcccagatgtatgccgagaggcttacggagctggctgctgccttgggcttcgatggctggctgataaacattgaggttaaacttgacgttcagttcatcgataacctgaaagagttcgtcaatcatctaaccaagacgatgcatgctgccgttcctggatctttggtcatatggtatgatgcaatcactgttaaaggtgacctcgactggc

SEQ ID NO: 18642 - DNA, 367 bp, Setaria italica
  Peptide Sequence Number=SeqID_84616
aatggaactggtagcatatatagtcaaagggtttgtgtcatgggaaataacatcaagtctcttcttggttctgggacacaatacgctaatggatttgcagcagccgacattgaacgctcatctctaattctgtgccgtaaagcattcgctgattcagctattgtgaaagatgcacttactgctatgtcagccccgatattatctgcaagaggcggcctccctgttccaggctggcttctgagctttggtggtcgtgttgtattattgtttgctccagtggagatcatcaggtcctgctctgaaattcagaatgttctattgtcaattgactgtggtgcagccatatcttctaaatggtctactgtgt

SEQ ID NO: 18643 - DNA, 368 bp, Setaria italica
  Peptide Sequence Number=SeqID_84617
ctggattcctttaccacaatgggtgcttgaggagatggataaggttccagacttgtcatataccaatagataccagcagagaaacaaagaatacatctcattggggtgtgatagtcttcctgttctgaaaggaagatcacctatgcaggcttactcagacttcatgagaagcttccgcaatactttcgaagattaccttggggccatagtaacagaagttcaagttggaatgggcccaggaggtgagcttaggtatccgtcatgcccaactgagaagctaaatcagccaggcagttcatctgaacttggggaatttcaatgttatgacaagtttatgcaagcatcattgagtgctcatgcacagattc

SEQ ID NO: 18644 - DNA, 1214 bp, Setaria italica
  Peptide Sequence Number=SeqID_84618
agctaaatcagccaggcagttcatctgaacttggggaagtttcaatgttatcactcaatgatgcttgcataaacttgtcataacattgagtgctcatgcacagattcttgggatccaagagtgggggagtggtggttcaactggcacagatggctcacagcagaaccttgaagaaacaagtttttttcacgctgatggaggatattgggatacaccttatggtcgctttttcctcgagtggtattcaggaatgcttgtcctccatggagaaaggttatgcatgatagctgatgctatcttctctggtactggcgtgaccatctcaggaaaggttgctggcatacattggcactattatacttgtgcacacccatctgaactgacagctggctactataataccctactaagagatggttaccttcctattgctcgaatgtttgccaagtacaaagctgcattgtgttgcggttgttttgacctgagggacacggaaagaacaaatcctgagagcagtccagaagggactcttcggcagcttgtaggtgctgctaaaatgtgcaatcttccccttaatggtgaaaattctgtgacaaggctggatgatgcatcactgaaccaagtgataagaagctcacggctctattcaggtcggagttcaggaacatccttttccttcaactatgttaggatgaacaaaagcttatttgagttccacaattggagtcggtttacgaagtttgttaggcagatgtcagatgccagaacctttctagcaagactagatgtcaggagagggcagcaatacctgtcttcaatgtcagttgtttgggtagttagtagggcatgtgcatatacatgaaagttgtcaaaagcaattggaaatcatgtacatgtaattttcaaccataaatgatttgacaacatggaaaggagaagttccgctcggcatatggctcacttttagttgccagaagggcaggcagggatatgctatattagtttcatgcatatgccattggtcgaccaaatggtccaaatcttgtatttatttgttgcaaaactgatggttggtgtagctgttgtgaacaatcttgaatcttgaaaacataatgtctctgttactatagcatgctgaaaacagggccctgtagccgccataggaccattggagtcctattccattttccctttccaatatgattcttttatac

SEQ ID NO: 18645 - DNA, 306 bp, Setaria italica
  Peptide Sequence Number=SeqID_84619
ccgtgccgccgcagcaccagcactccttctgagccaccaaattaggggtgttgtttgccgatgaattgcttgctttggggtcgcaaaaaattatttctttccccattgccatgaactgtaccattctttgatctgtaattcctgtcctacctgtagattatgagcctgcctgtaaaaactaacatctcttttgtttggattagtgtgtattggtagaagagattcttgttgtatgaactagtaccatcagtggtgttgaattcttgactggtttctctcaactctgatcatgtactgctgcctgtg

SEQ ID NO: 18646 - DNA, 296 bp, Setaria italica
  Peptide Sequence Number=SeqID_84620
cgtcgctctgctgccgctccctcctctgcgtgctcgcgccagcgccaccgcactccgccctccctctcctcttcggcggcatctccaactgccccgccggagcgccatgagctccgccgcgtctaggctgtcccacatcgccgccgccaccgccggtggcagcgcggccggggagtccaatgagccgccgccggccgggtccgccgcggcccaggaagacaatggcctttcatcaggggatatgggctaccgccttcctccaaaagaaatacaggacattgttgatgcaccaccac

SEQ ID NO: 18647 - DNA, 465 bp, Setaria italica
  Peptide Sequence Number=SeqID_84621
cccaagcccaagctcgcacacaccggttgatttctcattacttgacaaggcggccgtcatcaccgagtcggactttgaggaggtaacggaggaggccggctcgtcgtggaagttatgcaccgtgacgcaggtggaggaactgaagatcctgctgcggcttctgcccatctgggcgaccagcatcatcgtgtccgcggcgtacgcgcagatgaacactaccttcatccagcagggcagcgccatgaacatgtccatcctgtcggtgtcagtgccgcctgcgtcgatggcatcgttcgaggtagcttgcgttcttttcttgggtgatgctctacagcaaggtgatcgtgccagcgctgaggggcttcagttccggcggcgacggcgagccatcgctgctgcagcgaatgggcgccggccggctcctcatggctcttgcaatggcggtctctggactcgtggagatga

SEQ ID NO: 18648 - DNA, 687 bp, Setaria italica
  misc_feature (606)..(606): n is a, c, g, or t
  Peptide Sequence Number=SeqID_84622
gttgtgaacattggagctcttttcacattcgattcgattattgggagagttgcaaaggttgccattgctgctgcagtcaatgacatcaacaatgattcacgtgttctctcgggcacaaagctggttgttcagatgcaagataccaattccagtggcttcattggcattgttcaagccttgcaattcatggagaaagatacagttgcaatcatcggcccccaatcttcagtggttgcgcatgtcatatcccatgttgcaaatgaactccaagtacctttgatgtcttttgctgcaactgatccgactctcacatcacttcagtatcctttctttgtgcgtactatccacagtgatcaatttcaaatggcttcagttgcagacttagtttattactatgggtggaagatggtgacagcagtatatattgatgacgattatggaagaaatggcatatccaccttaggcgatgagcttgccaagagaagattgaagatcttgcataaagctgcaattaggccaggagcaaagaagagtgaaatagctgctgtactggtcaaagctgcaatgatggagtcccgggtttttgtattgcatgcatatgatcanactgggcttgacgtgttctcattagcgtacaatcttaccatgacatccggtggatatgtgtggattgcgacagattggctc

SEQ ID NO: 18649 - DNA, 637 bp, Setaria italica
  Peptide Sequence Number=SeqID_84623
tgatcagtgcgatgtctcgccagatacatgggctcgccaagttgaagggccaggagaagcaggctagggtggagcacggcagcaaggctctcacggtgcacaaggcgatggcgacgagcaaggagccagttggagatcatggtggaagggatggtaatgttggtatgtttgaggtggcaatgtttgaggaaggttaccatggttaccctgactggaccaattcccttttacgacgatgacaattgttacaaggatgaggaggacggtcatgacaacgaaaacgacaacgaggaacttgatgttcttggtgcgctagatgagccctcggtcatcgagatcatcaggagcaaccgggaggctcaaggtctcgagttcaacatggacgatgagattgatgaagcttgtgatatgttcattaggagatgtcgcagtcagatgaaccttagccttttgtgatcttgcatctctagtttacgttaatggtgtaagggatgaactatgatgagactagtacactgacaacctgatgagcgacaatagagaagtgggcgtgggatacttgaatatggtagaagctatgagaggcgttaactttttcgctgaacacataagacataataatcactcattttgttac

SEQ ID NO: 18650 - DNA, 294 bp, Setaria italica
  Peptide Sequence Number=SeqID_84624
gaggaggaggaggaggaggaggaggaggcggagagcgcgccgtagaagaaggtggggcggagcaggtagcggcggttcttgtcgacggggagctcgtagcagaacttggacctggggcggtgagggaaggagcggaacgtggcgagcgtggggtcgaggaggccgcccgcgcccgggagcgtgggtgcgctgggagcgccggcggagacgtagggggcgtcgggctcccagcggaggccgcggccgtcggtggtcgcggacgcagagccgcagttgaggaggtaggagaagcca

SEQ ID NO: 18651 - DNA, 383 bp, Setaria italica
  Peptide Sequence Number=SeqID_84625
gtctaggctatgttcctgactacagttttgtgctgcaagatgtagagctggatgaaaaggaacagatcttgaataaccatagtgagagattagctattgccttcggcattataaatactcctccaagaactccgctccacatatacaagaatctgcgggtctgtggggattgtcacaatgcaaccaaatatatatcaaaaataaccgagagagagatcattgtccgggattcaaaccggttccacctcattaaagatgggcactgctcttgtggagatttttggtaacagtaaaacatagtatatattttcctctgaccaacattttctctccctgagttcacctggccatttaagttgttaactttgtatgtgtttcatggg

SEQ ID NO: 18652 - DNA, 411 bp, Setaria italica
  Peptide Sequence Number=SeqID_84626
atctccggcacatatggttacatggctccagagtacgcgatgaacggctacctgtcgaccaagactgacgtcttcagcttcgggatcctggtgctggagatagtgagcggacgcaagaacttcgcccggcatgtggacgacgagaaggtcgacctcttgaactatacatggaagctgttcgaaggaggacgggccctggagatcgtggacccgtccctgtccgaccccgacaccgagcagacgcggctgtgcatccagctcggcctgctgtgctgccaggccgtggtgtcggaccggccggacatgcacagcgtgcacctcatcctgtcgagcgactccttcacgctgcccaagccggggaagccggcgatccacggccggacggggcgtggatgacgacgacgacggctt

SEQ ID NO: 18653 - DNA, 337 bp, Setaria italica
  Peptide Sequence Number=SeqID_84627
cgcgtccgctgtgctcgagtgggcgccagcgatcgcagcgcacatcaaggtgcagtttgggggaatggtgcattcctccaaccccatgctgctacactcgctgctcacgctcttcgtgcggttcccagatgcgtttggggccgaggatgagcgcacaatggcgcgccgattagctttggctgcttgtgaggcgcaccgcccactcacagcacgattgctggctttgcattggctacttgggtttaccaggttcaggaatctagtgcctgggcttgcccgatggttttaccctaacttatttgatccccttgcgctcaaggccaagaagctggattgt

SEQ ID NO: 18654 - DNA, 467 bp, Setaria italica
  Peptide Sequence Number=SeqID_84628
tgatgtaaacagtgatcccatagcatagacaatgcagtccactttacttaactgctccaaaactgtatggttagcttccgggaaaaccatgtcatcattaagctttgatcataaagtggaatatgaagacattcggacccattatattgagtgacttgtacttatgagctttgctgcttgggtaaacctcatgtaacaggctgctaccttcacttgacatgtaaaacacacgtttgatccttgaaggaagtgcagtacatgaattacaatccttattgacaacttctcggcgtccattgcttggatgtgatatttcgttttgaccacgaatgatagtcccatcccatagttcacatcccagagtaagtctgtcgtttgttgatataacaggaagcacaagactttctgcagggatctgtgatacgcgagaaaacaaaaaattagcagcatccaacgactggaagaat

SEQ ID NO: 18655 - DNA, 655 bp, Setaria italica
  Peptide Sequence Number=SeqID_84629
agtagaaggatctccataagtccgatttagagaatcagtaattgcagttacaaagccagaggtagacagcccgacagtctctctgtcatgcgacccattcaaaagtagtacctgatccgatttcttagcatagttaccttggggatggatctcgacgctatagtctcaccaatgccacgcaataccagtgatggacaaactgatgtaaacagtgatcccatagcatagacaatgcagtccactttacttaactgctccaaaactgcatggttagcttccgggaaacctcatgtaacaggctgctaccttcacttgacatgtaaaacacacgtttgatccttgaaggaagtgcagtacatgaattacaatcctttccggaaaaggaaataaaacaggaaatcaattagcaaagaacaatcacagggagaaatcaacaacggcgcatagattgaaggaaagaaggagcatctagaggtcacaaaatgtgaaatgaatttggagacataaagcatgtcatcaacaaagaacatgtagcaaatcattagcaatcgacatagcagagacagcttgaagcctaggcctcgtttggaacccagggacaagctttagccctcttatttgaatgcaaagtaggaggactaaacatggggtaatt

SEQ ID NO: 18656 - DNA, 1434 bp, Setaria italica
  misc_feature (1)..(91): n is a, c, g, or t
  Peptide Sequence Number=SeqID_84630
nnnnnnnnnnnnnnnnnnnnnnnnnnnnnnnnnnnnnnnnnnnnnnnnnnnnnnnnnnnnnnnnnnnnnnnnnnnnnnnnnnnnnnnnnnngttttaaattcataggtttctcatttccattaatcatatcaagtagtgtagaattgcaacattagtactagctaaaatagaaatagaagcactagcaacatggatcggttggcaaaacaataaattggtaagagtggtatatacatatcatgtttgtacctgaaacctcaacttacaaattttaccatttccattagataaccaggttcagagaggtgcgtagtcatctcttcagatatgagactggttagagcttggattagtgatggtggatcaaatatgacgcccacctttgggtcatgcactgactccacggttaccacatgaaatattccctgagcagccaaattttcaacatctaaaggaacttggcctccttctggaaccaatatagcatttacatagtcattgggatgattctttaggcttttgtgaggatctccataagtccgatttagagaatcagtaattgcagttacaaagccagaggtagacagcccgacagtctctctgtcatgcgacccattcaaaagtagtaccttggggatggatctcgacgctatagtctcaccaatgccacgcaataccagtgatggacaaactgatgtaaacagtgatcccatagcatagacaatgcagtccactttacttaactgctccaaaactgtatggttagcttccgggaaaacctcatgtaacaggctgctaccttcacttgacatgtaaaacacacgtttgatccttgaaggaagtgcagtacatgaattacaatccttattgacaacttctcggcgtccattgcttggatgtgatatttcgttttggccacgaatgatagtcccatcccatagttcacatcccagagtaagtctgtcgtttgttgatataacaggaagcacaagactttctgcagggatctgtgatacgcgagaaaacaaaaaaattgcagcatccaacgactggaagaatatgcgtgccccagcaaaaaagaaatttccgatgctgccgttggtgaagcaaaacatttcagctgaccgtcgaagtatctcattgtggaagtagaccaaaaaggcacgaattgtttccctgtatggacgagagactccatcccataacgagtggtctccttctacgatctggtaccattccagctttgcttctgaaggatcaataggcaagcgatgcccaagcaatttccgaacagaaagggcttctgaagtactttcatcagacaatctcaaacatcttgatcttatgtctcccacagcaggtccaccaagcacacgtacaatctcagccgtgcttccaccatcatcagaaacagggagcacatgcacaactcg

SEQ ID NO: 18657 - DNA, 827 bp, Setaria italica
  Peptide Sequence Number=SeqID_84631
cgcagcgcagccaggaggcacacgaaggcggagaccgccaggagcctcgacgaccagcctctggtgctccccatgtcgctgctgctgctgatgatgctgctcctcagccggagacatgcaactcctgctgatgcctgggctctaatggcttcgctgcacctagtacaaaccatcagtcacagcaatgtcctgtctgtagatatagcccaaggccacgccgggccccaaagcacaaagggacaagggaggcatgtctaaggctgctcatagaaggttctgagaccctgacaggtagattttggcaaagtcattggatgggagagcgagagcccatcgtctgttccaagagacaagcctaaagcggccatgtaggggataagagcaacagcaagaaccaaacccttgctttagacccttgttgccatcctcctctgttccagcctctagtaaaaccaaatctgaaccgttcataggtaggggtgaaaacagggtcaggttgcggtaaccagcagacaacagtacgatgcaaggctttgtgctttcgcacgctttttatttgttgtgcctgcccttcttgcaaggagcacgcttttcgctttgaatcttccaaggccaccaaagctacccattcaaacttaaaggatccgcaccaagtttcaatagcctctttcctcacatttctccatgtaggctagcaacatccaatgctttgcctgctttactgcagaatgcaaagatgggggaatcttaaagcatcagtgctagttttttttgggatccaacaggtttggtttcttcatgctgtgcatacatggactggtcatggg

SEQ ID NO: 18658 - DNA, 1017 bp, Setaria italica
  Peptide Sequence Number=SeqID_84632
cacgccttcgtccacaacctccgcgtcctggcgccccgggtgctccccctgccggagctcctccgcctcgcctgcgccaccctctcggcccgcctcgcccgcaagaagcagcgcgggtccaaccacctcaccatccgcatgaaggccggcgtcgaccacttctgcgtccacaccggcggcgccgccgtgatcgacggcgtcggcaaggggctcaccctgacggagcacgacctggagccgtcccggatgacgctgcaccgcttcggcaacacctccgccagcagcgtctggtacgtgctgggctacatggaggccaagggcaggctccggaagggcgaccgggtgctcatgctcaccttcggcgccgggttcaagtgcaacagctgcgtgtggacagtggagaagccggcaaccgacgccggcgtctggaaggaccgcatcgaccagtacccgctcaaggacgtctccaaccccttcatggagaagtacgggttcgtcaaggacatgatgaacttgtgatcggccggccaggagtcagtgatgtcgacacgatcgaccacgcactgctccacttaattcacatgcgtatataggatacatccgagtaattcttcgacaggttcaggcaaggatggagcaaacttgcttcagaagcagagagggtcgatggatggatggatcaccattatattcaattcagtgttactaccgtgttaattacttgaacacaagaaggggaacgaagattaagctgaagaggattcataggtataagtagcttatgattcttttgtggggggtggtggtggtggtggtgggaagactttacgtagcaggggatatggtttctttttcttctttcttctctcttcttctaccagtttctgcttggtcgtcagtcggtgccgtgttgttctttattatttactacgaatggtgatggattaaagtggaattattactttagtggagttcttatgtaaggttgataataaaggaaacaaaaaaaaaaaaaaa

SEQ ID NO: 18659 - DNA, 721 bp, Setaria italica
  Peptide Sequence Number=SeqID_84633
aagagaagagtagactatgtaaatggtctccagctctaccttaaattgagaaaacaaaatccagccccttatgcagcctggcttaacttctcctcagaaaacttgagcatatgctgctcttctcctgaaaggtttctacgactagatcgaagcaaaactctagaagcaaaaccaatcaaaggcactatagcacgtggcagaacaccagaggaagatgaatgcctgcgtttgcagttgcaatacagtgaaaaagatcaggctgagaacttgatgattgttgacctcctaagaaacgatctgggtaaggtttgtgaacctgggagcgttcatgttcctcgtctcatggatgtagagtcatataaagctgttcacaccatggtgagtaccgtccgtggaacaaagaagtcgaatctgagccctgtcgactgtgtcaaagcagcctttccaggtggttcaatgactggggccccgaaagttagatcaatggagattctcgattcacttgaatctagtccgagaggtatctactcaggatccattgggttcttttcgtataaccacacgttcgatctgaatattgtgatccggacagtcatcctgcacaatggagaagctacagtaggggcaggtgggcgattgtagcaatgtcagacccagaagcagaatacgatgaaatgatgcttaaagcaagagcacctacaaaggtggttgaaggttgcag

SEQ ID NO: 18660 - DNA, 1654 bp, Setaria italica
  misc_feature (1577)..(1654): n is a, c, g, or t
  Peptide Sequence Number=SeqID_84634
ggctctcgtgatcgtgatgacagaagctctcgtgatcgtgacgacagaagctctcgtgatcgtgatgacagaagctctcgtgatcgtgacaacagaagaagctcgatggagcacaaaggcagcagttatggcaaggaaggaaccagaagcaatgcacgaccaactactggcatggtctccagtgcttctgacggaagctcagctgggccatcagagaagcagttgtatgatcaacaagggaagaagggtatattccatcctgttcgtggggtcaaaaaggaacctcctcggagggtcactgcagatgaagctgctgctattgtaatggtggctactcgtgggcttggtgctgccaatgactcacttaacaccataaaaggaaagaaggaagatattcacatccgtggtagtaatgatcattcttccagctttggaagtttctcatctttacaggaccgagatgcactgtcgaaacacatttcaaatagtgaggcagatacttcacttacaagtagtggacaggttaaaaaggaaggttttggaattattgatgatgattggattgcaaacactattgcgaaagctgctgctgttgcagcttccaaagaggcagattcttctgaagcttccatgaccaaggagcagaagctgaaagctgagaggctacggcgtgcaaagatgtttgctgcaatcgttaagggtggaggaaacaagatgaatgatttggctgcagtatctgatcaaacggatgaaccttccgaggccacacctgctgatataaatgcctctggacttgatgcaccacctgaggctaaggaacgtgaaggtagctctgctccgtttgaatttgatgtttcaaacgtgacaaaggagaaagacactgatgatgaacagaacagagtgcggaagtatagaaagaaacatcacaaagagtccgacgaggagaaagatgaatcagaagaaagctataagcactcgaggaagaggcaccgttcggagcattcaagagggcatagtaaggatgcccacaaacataagcagaagaggcactccaaggaccgagaatccggacatcgtaggcaccggcatagctcttcagaagatgagcatgagcatcggagttccaagtcaaggaataggcacagggatgatgatcgctactcagatgatgaagagcacaacaggtcacgtaggcaccagagggaacatcgctctggttctaaacggaaacacgaggaagagcaagatcagagtgaacagactcaaggtcgcttagaagtatccccgagcacatcaggtgctaagcttgaatcagacaagcgacctggtgacactgctcaatcttctcagggagtaactgaagtgccgagtgagctgagggccaaaatcagagcgatgttgctagagacactttaaaacacttcaaaattttgttctcggcaatgtaaccttagacctctgcttcaagtctctgtcctgtagcctacttgcactattgtatttggttcaagttttcctattatgctctcaatggccattttatcttaatgcgaagatgtaaacgtggtttcgaactnnnnnnnnnnnnnnnnnnnnnnnnnnnnnnnnnnnnnnnnnnnnnnnnnnnnnnnnnnnnnnnnnnnnnnnnnnnnnn

SEQ ID NO: 18661 - DNA, 276 bp, Setaria italica
  Peptide Sequence Number=SeqID_84635
tcagatgacttccttcggatcatgcttttgcctcctggcgcaatatctttctggttttcttcatcttttcctggcggcacaaagtttttctggtttcctcgattgttcttttgggaacgtgtccacgtcctggactgtggcttgttctctttttcatcagaaattttgccttcaggttggtcacttttaatggacagtatttctgtgaccacctttggcagcaataattccttcatgatttgtttgtgtttgttccaatcacagtgtgtacaaaag

SEQ ID NO: 18662 - DNA, 486 bp, Setaria italica
  misc_feature (382)..(382): n is a, c, g, or t
  misc_feature (393)..(486): n is a, c, g, or t
  Peptide Sequence Number=SeqID_84636
cccccgagccctcctccggcggtggctccggcggcgccacggccgcgccgtcgccgcaccccaacgccgcgcccaaggccctcctcgccggacgctccgtggccgccaccgtcgccgcgtccctgctctccctggccgcggcggtgctggcgtgaccagaggcttccgtagtgtcggttaggagattggcgcctttgtgaattgatgaattgtgagctatgctgtgtcagttgctgtttcagtaggaacgcctggacctgcgttcgttttactgttttgcccttctggttctgtggatcctggtctgccagccttggggatttctaccggttgtcaattaatttcctcatgttttgagctcttcaaaaaaaaaaaaaaaaanaaaaaaaaaannnnnnnnnnnnnnnnnnnnnnnnnnnnnnnnnnnnnnnnnnnnnnnnnnnnnnnnnnnnnnnnnnnnnnnnnnnnnnnnnnnnnnnnnnnnnn

SEQ ID NO: 18663 - DNA, 750 bp, Setaria italica
  Peptide Sequence Number=SeqID_84637
aatcacgaagatgcaagaaaccaatgccgtgctttatccggagaagaggataggacatctaccagggatcgatgttggagatcaattttattctcgtgcagaaatggttgtgttaggcgtccacagccattggcttaatgggattgattacatgggaatgaaataccaaggaaagaaggagtatgagaacttaattttcccactggccacctgtattgtaatgtctgggatatatgaagatgatctagacaaagctgatgaaattatttatacgggtcaaggaggaaatgatttacttggaaaccatcgccaaattggctctcaacagttgaaacgtggaaatttggcgctgaagaatagcagggataatggaaatcctatccgagttatccggggtcatatttcaaagactagctatactggcaaagtctacacctacgatgggctttacaaggttgtggatgactgggtgcagaatggagtgcaaggtcatgttgttttcaagtataaactgaagcggcttgagggtcagccatcattgacaacttctgaggtgcgatttactcgtgcagaagcgcccacaactatttctgaattacctggattggtttgtgatgacatttctggagggcaagaaatcttccaattcctgctactaacttagttgatgatccgcctgtccctccatctggtttcacgtacttgaaatcgctaaaaattacaaaggcaatcaagatgccgtctaatatt

SEQ ID NO: 18664 - DNA, 659 bp, Setaria italica
  Peptide Sequence Number=SeqID_84638
caacgtatttcaaagcgagaagttgataataatacattcatatctccgctggaagatgacagctcaagggaagtatttggtctaataaagaagctcaatatcgctcctcagccagagaggagagggaaacaatcaacatcaaatcacgaattgcttatgactggaaagaacagcagtgcttcaaagtcatctttccttggccgaactgccagtggttcaatggtgtcttcttatagatcagttcatagatcttatgtatttggccgtgatgacagcaacagtagtaccaggagctgcatgtctacttcagagagtttttcagatatggatcagaccaattcaagccaacctaagaaggcaaagtttagcagttcacagcagaagccagtggggccacgagcaaattcaaagagtgatacgaattcaggtgtttccttatttgagatcctgcgcaggacttcttcagttacttctgatagacaagagcttagcagtcaggaaagctgtagtacgatcacagaaagtcaagctgtgcatcagttttcagcattcaaattatcaaggaggttttctagggtgggagcaagaaactgacagcctccttccccagctaaaacttgcggccatcctcaatcaagaaaaaagaatatactttccag

SEQ ID NO: 18665 - DNA, 445 bp, Setaria italica
  Peptide Sequence Number=SeqID_84639
acgcagaggggccaagcctagttgcaagaaacggcacaaaggtggctactttgtttcactattcgagatcagatgcttcagaaaggtattggagccagcaaatgggcgcaagaatctcaactccgaggatctgcccccgcgaactctcgcacaaaactgctatgcttctcgcgagacgcggcaagatcagatcggcgaacacgagatctcaaggaggcggtgaaatttccggaaacggaagaaacgaaacgcaagagatgggtaagggggaaaaaatctgatctttgcaacaaatgggcaaaaaagaggaggggatttgtgcgaggctttcggcggagacctctgagacgaaggtggcggcgccggagggttgggcggctcgccgcgggatctgcgtggcggtgggtgagaagggggcgatccgatcggaaatggcgatggggaa

SEQ ID NO: 18666 - DNA, 280 bp, Setaria italica
  Peptide Sequence Number=SeqID_84640
tggtggtttgagcaaatactcctgcaggaatgggtggaagcccagggataaaatggaagggtcaattaaatagttacacatgatgtagtgggcaaagaatgcacccttcattccacttagaaagaaattttcaactgcaagaggcacaaattatcagatgatgattactaggtgttatttgaggagcttcacaggcaggattatgctatattgttcttcattattacttactccaatggatggcggcacatatcataaagctacaaaccatttccataaa

SEQ ID NO: 18667 - DNA, 1083 bp, Setaria italica
  Peptide Sequence Number=SeqID_84641
gaaggccagctttgataagtatgcattcatctccttagcagaaacctgaggctgatgatattggttctatctcagttgttctttccctttcttggctccaatccaatactgtatagaagcattttattgttagagatacttggaatcacaagcacacatactcacattttatgttctgaaactgaacttgataaagttctgacagacatttgagagaattggcagtgacttcatagttaactgcatttccttatcataattgcctgaagtatggtggtggaacagcatctctgagggatgtagacaaagaagtcacagatctcacactctttttgtctacatccctcagtatggtggtggaacagcatctctgaatgttacagttgcagcttcaattgttttccaccactttgcagtctgggctggctttcctgaacgaggcagagagggcaacaaattcattgtagctgatagacctcaggggcactcgagggggctttactgtacagactcgattgaagcagtgattgaagagcggaaaatgcgaaaagaaaatgcatgtgatatacttgaagaaaatggaagcagccatcctcaggaatcaaatggcctagatttgatgtttacagagtaggcttatcactagacagcgttattacatctcgtttgttgaatcaagtccctgcgttggggttgatgacgcagatttttgcaatactacaacgcataacagaaatgtatttccaaaagagcgagaagtagaacacagattttctttccaaccttggcatggagcagaagggcgcaccgagcttttgtgaagccagggggtgagagtgtaccttgaaacccagggagtggttaaagctctgtttcgctcagattgcttacttttttatgttcccatgtaaaacaagatgtggtgcctgttgcttattggaattgctctgttgtaatgtagccacctaggggtttgatacttggcacctgacttcctcactttgcaggaagttggatgggggagtttgtatttgctcttcaaatatgaaatttattcagagttgaccaataccaaaaaaaaaa

SEQ ID NO: 18668 - DNA, 841 bp, Setaria italica
  Peptide Sequence Number=SeqID_84642
cggggagattgaagttacatgttatagacgtctctgttccaaaaaaaaaaacgataggcccctttttctctcgacggcgaaaagaatcgtcataagtttatggattctgtacagtcctactgaaacctatgaataatgtacactagggataaactgctgccccttaccaagctttccttccatctacagggattcatgacttcaagctgccatcagaagaagggaacaccccactgtactcaaaagccctgctgttcatatcaaacgtcgaggacgaagtcgatgcgctggagtacgggagcttaggcccgaccttcatcgttctcgactcgatgctgaaggaagagctcgccgacatggagtccggtgtgagcccgttgtcctccattatcccctttcaatctccctcacaatggcgttcatcgagggccggccggttcccacctcttcgacgcattgcagagccagttttaggaaccgtgggaagccgaggaggctccccattttctcaaggactgggtccatcacatccttgagcccgcagtgcttgcggtcctccatgtctagcgccatcttcacctcgcggacgatgtacttgttgtcgtgtatcggtggcttggccactatgagctctagcagcaccacaccgaagctgtagacatcgctcttcgccgtgagctgctgcgtcatgtagtactcagggtctaggtagcccagtgttcccttcacattggtgcacagatggccttcctcgctgtcggataccagcaatgacaggccaaaatccgcaacctttgcggtcatcttctcatcaaggaggatgtaggtggatgggtcggta

SEQ ID NO: 18669 - DNA, 775 bp, Setaria italica
  Peptide Sequence Number=SeqID_84643
ctaatcattggtgaaggaaaccaagagggattgttgggtcagcaagaatagcaaaccctctagctaaccaaagaagaggaaagttgttgctaatgcgtgcaaattgtttggtgatcgacggacttgcccggccgcctctttgcttttaaattctccaggataagaccaaatgagacatgggagaggcccatcttctgacggactatagcctggaggcagatacaatgtagcagtaagtttaacaccatccttccgctggtatctgattatttctttctgcaacagtgccagttgaggatatggatgtgggtaatttgtaatctggacttgcttcttgtttggccaaatcttgatataatactgggtgatttctcttcttgactctttagacacaagtaactttagttgatcaagctgcacttcacatttaggatggtatgatataagtgcaaggatagattcatagtatttttctttgtcactttcccatatccgctccttttctccagtatttacgtaaggaaaactagtgcgtctgatgcttccttttggtgtggcacccttcccttcagtaagatgtagcttccttcacagtttctcttaattcttgcaatgacagtagtacctgccggagttctgcacatcactggagatcctggatttgagtaggcgtcttctgaagacctttcaaataataaccgacgtctatgatttttgaggtcaggtgatataacccatgttcttgttattcgtgtcttgtaccaatattcataga

SEQ ID NO: 18670 - DNA, 296 bp, Setaria italica
  Peptide Sequence Number=SeqID_84644
ggcgggggtgaggtgggcgagggatcatgtaggcgtggggaggagggaggataaagaaggccttgaccgggtcgacgtggatcgagggggacaaggactcaaggagatcccccgcaccgcttcggccgcctggcccaccgccgcttcggctccccgcgccggagtggataagaacgcgtgcccgtgccgccgtgccacaaccgcgggtccacggctacctttcctcagcttcgcatgccggtgccggggtaaaaacgggtgaccgtgcctatccgcgcgcgcgtggccttatccgg

SEQ ID NO: 18671 - DNA, 533 bp, Setaria italica
  Peptide Sequence Number=SeqID_84645
cttagcaaactagattaattgtaatcgaatgttaatatattacataactactggtactccactactctatcataaaacttcataaatcataaataggagtactatgaagctgagcaaactagataataactctcttcatatcttaatctgttatccacaacattgttatctcgtgaacggcgattcttcactttctgtcatcagctgcctgccttgggtgtcttccgcttcaggaaccttggcgattcttcacttcctgtcatcagctgccttgggtgtcttccgcttcaggaacatagtcgggagtggcacctcgctcgggtccggcgacttcaggaacgccgggccagcgtagtactgcaccgtcaccggctctccggcatcctcgggcttcgccttcttctcgctccgatcgacctccaccgacggcgctcggctcaaggtcctcttcttgggcccgaccggatcctccctcgacgaggatcgccccacacgctcggtctcctccttccgctgggccttgtccttggtcc

SEQ ID NO: 18672 - DNA, 1281 bp, Setaria italica
  misc_feature (1)..(32): n is a, c, g, or t
  Peptide Sequence Number=SeqID_84646
nnnnnnnnnnnnnnnnnnnnnnnnnnnnnnnnagttgttcaaactagattaattgtaatcgaatgttaatatattacataactactggtactccactactctatcataaaacttgataaatcataaaataggagtactatgaagctgagcaaactagataataactctcttcgaatgttaatctgttatccacaacattgttatctcgtgaacggcgattcttcacttcctgtcatcagctgccttgggtgtcttccgcttcaggaacttcgtcgggagtggcacctcgctcgggtccggcgacttcaggaacgccgggccagcgtagtactgcaccgtcaccggctctactgcatcctcgggcttcgccttcttctcgctccgatcgacctccaccgacggcgctcggctcaaggtcctcttcttgggcccgaccggatcctccctcgacgaggatcgccccacacgctcggtctcctccttccgctgggccttgtcctttgtccaatcctggctcagggacgcgcggcttggaacgctcgacgaggcggtggtacgggcgagtagcttatctttggtccagctctcgctcgccgacgcgcgaccgggcttcttgttgccggcccaagccgatccctcgctcgcacggcctgcaacagtagcaaaaaagcggggggttgggagcaacggcggcagagcagccgccggggtcagcgtgcaagcgtcagccatcaacggcaagctgcgcgtgtgcacggaaacggaaaacaagaacagagcaatacgaaagggaaatgaacgaaatgcagaaactaggcaagaaattttcttgaatagactataagctaaaccgagattaagttgcaatgtaaactagacgagacaaattaacaggtgacgaagactaacaacaagtagtagatgagataaagaacacagaatttaattagcgcaaggtgataactagatcgacaatggataatagatgagaaaataacttgcaatgtaaattagcagatgagaaaaattaatagatgcgaaaaagctagataagaaagatgaagactagctagacggaagcgaaaactaacaagagattaaactagcagaatatagtaaacggggaagattaactagaactaaacggagactaacgaggaaagaaacaaaaggcggaaactttaacggaagagagaaggagacggagcgcccgaaccgttgccgtgtgccgaatcgcgggagctttctgacgcaaagcaaacggcgctatgcgaggggagg

SEQ ID NO: 18673 - DNA, 684 bp, Setaria italica
  Peptide Sequence Number=SeqID_84647
tgaccatttccatgaacgtggtctttatcgctcaatattcctcagcataatggaaggagaggaatcattgtcacgttattctcctgaaatcatcgccaagatgtcaagtgctgaaaccatagctcttctgccacttattgttcttatgcatggaactggagattattccataccatcatctgctagtcaaacttttgtcgacgtcctccatcaagttggtgctcaagcaaggttattattgtatgaagggaaaacacatacagatatcttcttacaggaccctcttaggggcggaagagatccattggttgaagatgtattgtctgttattcatgctgatgatgcaattgcacgtcaaaaggttgctttagcaccaactccaaggcgcttggtttttgagtggcaattaaagttggcccgccaaataagtccattctagtaggtttggatacgggtattatattaaacacagatgtgtgcaaaatatctagtatgaagcacggccaagcttgcactctccgtgggttttgtgccttcacgaggaaagggcgcccggggccgttgatttggattggatcaatcaaggaaagaactcttccctcatctttccttgcaccttggcccagttatgctctatgcgaaacttgtaggctgtggctggcacgcagtatgagaagaagctaa

SEQ ID NO: 18674 - DNA, 249 bp, Setaria italica
  Peptide Sequence Number=SeqID_84648
atttgaaagaatgggaattcctctcttcaaaacatgacttgtcggtggtgcgctgaacatgtgagactgcattgcttgtaaaatccgctgtcctagtatcctttgtgtgaagactgtttagcttgtcagaatggaccattgtactatcaggagttggtgcgacaacaacaccagaacgaacaaaccgagcaaaaatgtccctggaatcgagcccctctctcttctccggatcagacagcaccgcgtacg

SEQ ID NO: 18675 - DNA, 455 bp, Setaria italica
  Peptide Sequence Number=SeqID_84649
ttttttttttagggttactaaactaaactaaatttaagaaagctttttcagtggcttgtaacatcagaaaggaaaccatgagcttctggtaaaagatgcactgttcgaggcttcgagcgggggttccccgtgttgttccacaaggctgcaagttaataaagctgccgtgtcgccctttggcccttgcatgctcctcccgtctagtttcacggtcccaaggctgaagacccaactcctccctaatctgaaaccactggcagctgtagtttgatatgatgacatgcgcaattgttcgtttgaacaccccttgctctggcagtatttaggttaggctatgcttatcgtttgctgctcgcactcatgacagcaactccaagcggtgatggatgaacgattgacaatatttttagcatatctatttgtttttactgtcctcttcatgagatcgcttgcaa

SEQ ID NO: 18676 - DNA, 368 bp, Setaria italica
  Peptide Sequence Number=SeqID_84650
agaataccaatgcatgccatgcacatgatcaagtggtttatcatggggtatggatggctattgtttatacagctgcagtcaggataattctgcacgctgttggatctatcacgaaaaccaccttgaagaaattcctgtgcatacaaattttccagagccaaaagagtcaacagatctatctgaagtctccaatcgatgctttggtcttacactagcacctggagaacaaatgattgctgtggtccgtggtttggatctgaatcttttagaccagatgtatcaagccaggacacaaaaggcagtggttgagttcatttggattggtggtcaatttgttggtattccactagacaggaggattgatgttt

SEQ ID NO: 18677 - DNA, 1053 bp, Setaria italica
  Peptide Sequence Number=SeqID_84651
tgagcttttaagtacttgcagatgctttacattttgcttctttttcaggataattctgcacgctgttggatctatcacgaaaaccaccttgaagaaattcctgtgcatacaaattttccagagccaaaagagtcaacagatgtaaaaaatagataactgtttctcttcttccttgatgtccaagtatttttatctccttattatcgactttcaaatgtgcatgcagctatctgaagtctccaatcgatgctttggtcttacactagcacctggagaacaaatgattgctgtggtccgtggtttggatctgaatcttttagaccagatgtatcaagccaggacacaaaaggcagtggttgagttcatttggattggtggtcaatttgttggtattccactagacaggaggattgatgtttgcaatccacagtctgcaatcttatcctcgagtaacttgtggtggggatccaatattttgtggtcgttgaagaaatatgaaaatgttgaaaagagtattgtcttgtgggatgttgtgactgcactacaagggttcaagaaatacgcaccggcctttctggagactttaatggacatttggatctcagctttattttcagatgaccgacagtgtgtttctatcaatgccccatcatattcaaggcatgacattctgcccagtgtcagtttgcggaagctacacttactgaacatcatttgtagaaaagtgatgctcagcgatcatgcacagcatggtcctggtgctgaaaatggtaatgactcggcaactgatttctggaacactcttctgataaggagtgaaagagagctgcgtgagagactggtgggtttcacctttgctgcagtcctgaaaaggacagcatttttattgaagggtacatctactgaaaacagctggtttcctgtcggcgttgcccagatggattcttgggtatctatgaatgatgaagtgcataaccagctcagttatctcagatctaggatcaaagatctaggaaacaggattgtactacttagttttgttcgttaacttta

SEQ ID NO: 18678 - DNA, 282 bp, Setaria italica
  Peptide Sequence Number=SeqID_84652
gggtgggaacacctcgaaacaacacctccatggaggaaacgacacctgtaggtgtcgctgttgtcggcaacggcataacgccgggctaggatttctcccgacgagttcccgacccgtcggcgcagcacaggcatcgagaatgacggggagccttcgccgcccttgatctatagcaattttgaccattttgttcctacgaaaggtctttatataatccaaaatctatataataccaaaaaaaaaaaaaaaaaaaacaaaaactgagacgacgacaacggaggg

SEQ ID NO: 18679 - DNA, 1940 bp, Setaria italica
  Peptide Sequence Number=SeqID_84653
tttttaaggaatttaaagaaatttagtttgatttaatttttgttaatctgaaaaatacacgatacatcattaggccaaagagagtacaagatgctaatctcccaaaactataccaccaacaagaggaactggagttctgaacatccaagcctacaaacaaaaaaatacttccctgtatcgagaacccaaccacagatgcaacttcaacagcttttgccatgttggggatcaaaaaggtttagcaagagtatacatagaagctgctggatgtatatacagtacttggccaatccaaagaagaacgccttaaaattcttccttcatgcctttccacagcaggtaatctaatggtagccttttgcacctctggattgatacagttccaatctgatctttgcctctggcaacaagttctcgatgatcgggtcttgcatcatgtaagcttgcttggcagcccattcaagtaccgtgaggatttcggcttgtgccaactcctcactgtctggaacattgtgtgcaatgtagcatacaagggtgagtgatgcaatctgaaccacttgctcactgaagtacacaagctgaactaggtgcttcgctccgcctgcattgatgatcgctttagaatggtcgacgtgcaggtaattatctgtgcacgcaaacttggtcagggcaattgctgcttctcgagagacatctgcttccctctcatcaagaagcttcaccaatggtccaataatccgagtctctgtagcacggaaggttctggacaagcaacctagagacataatgcagggaattaggagatcgtcatattcagccttctcgacaacacgtaggagctggtcaacaacagcccgggcagcaggagaagttggcttgaatgctgatcgtctcaggtcagaattctgctcggcgacacagcagatctccatgagagccatagaagaattatattgcacatcaccttcacctttctcaagaagaaccgcaaagcagagcagagcccttgactctgtgatgctcttacagatagctgcattgcccttggcgagctgccacaatgcctttgcagcattggctttcattaatgcctttgtctcagggtcctcgaactccctgccccttgtactcgttcctgacaatgacgcattgtgctgcttcgttgccacaacaccaccattagtagtagtagctacgtgcttaccactgcctccattagacttggcagccatggtggactgcaccaaactgtgcatctcattcttgctctgcgaagcgtgccccgtcgggtacctcatggtgctgtggtctgcggcatccagcaagtctgccgaacctgaaccggtgctgttctttttgtccatgaccacggcatgtatggacatcttggacgtgatggcgtacttggagtgctcctgcactgtctcgaaggcgaggtggccgacgagcagccggatcacgttgtgctgcgcgaaggcgtcctggcacttggggtggttggcagcgagctccgagacggcccaggccaccgtggcctgcaccttcatgggcccctccttgagcaccttggcgaaggcgaggcacgcaccggcttgcaccatctgctcgacgcactccgggtcgcggccgaggaggccgacggcgtgcgcggcgttctcctgtccctcgaggcggccctccttgacgagcttgagcagcggcggcacaccgtcctcctctatgatgagcttggagtacctgtcattgtcgcgcgcgagcgagacgaggttggcggcggcgtcggcgcgggcgtcgaggttgccggtgtagagcacggcgatctgctcccagatgaggaagaggatgggctcgttctgcgcgatgggcgggagtccgatgtgggcgtcgaagtcgtcgtcgtcgttggcggagggaggaggacggcggaggagccgaggaga

SEQ ID NO: 18680 - DNA, 918 bp, Setaria italica
  misc_feature (218)..(218): n is a, c, g, or t
  Peptide Sequence Number=SeqID_84654
ttacatataggtatatgagcaaataaagccggttggatatcaacatctttctcctgttctggacttccagtacgtcgatctcaaagccttatcaagccctatctagctagctttgtagtagcactaagcttgagtacatagtagcatactatggagcctgtttggttcctcttgctaaactttagcaaaagctgtttgtatactcttgctaaaaggtntttaatgagatgtaaaaagacctatctacccttattaaaggtgcgcagaaggggggagacaaacaataaatgaggggtataggttgtccagcccaccttttagcaagttttagcaaccaaaaaacttgctaaagtgctaaactttagcaagttttagcaagggtgtttggcagttttagcagctaaaagttgctaaactttagcaactaaagtttagcaaggtggaacccctatgcacaggagaacaaaatgtttacacaccacaaacccaatcaactatggtgtccctagttgacactactactggaatctacaagtacaatcccttaccaccatatattaaccatttctttatgtttctccgccctatatttagagcccaatgttcaaatcccaatttaatgctcgagtatagtagctttcagtggagaccaatctgtcagttcatccccgtgttagaatggagcagcatgtggtggcccagggacccctgcagcccgttgcctatttggaacgttgcaccaaagcaggagccgttcggtttcttcgctgcagatgccgtgccggcgttagtactcgtctccgatgatctcttgcgcttgccggcagcgccgtcgcccgcggcggccgacgtcgaggcacacgaatccatctgcgggatcgtctgcccgttgcatgctgttgaccaagtaagctggca

SEQ ID NO: 18681 - DNA, 527 bp, Setaria italica
  Peptide Sequence Number=SeqID_84655
gccgtcgcccttagcagcttctaggggctgctcttgggcggaggcggcggcagcagcagggatctctcggatgggagcgggagagggagctgcggcggtaggaggtggggttggggcggggaaggggacggaggaagcgaggagcgaggcggcgttgaggacgacgagttgggcggtgtaggagatctcggaggagacggattggatgtcggcgtaggagaggggccgggcctcccccgagatggaggcggcgatacggccccggacggcggccatgcggtccccgagcgcagccaggcggaggagggcgaggctggggtccccgtccgctcctccggcgccgccaccgacgagcgcgtcagagggttcgcggcccggcatggtcagcggaggcggggtggtagaacccctggacgcgattgagcggctgcggctgccggcggcgccggcgacctgggtgctcgtggtggagtccattgcctgcgagtggtgcccaacttggattgacacgacgcgctttggtgctg

SEQ ID NO: 18682 - DNA, 475 bp, Setaria italica
  Peptide Sequence Number=SeqID_84656
gggccggtgacggcagcgccaccacggttccacgcgaccaacaggcagatgttctcggcctccagcggcgcggctgaggcgagacctccgccggcgctgccgcgccagtttcaggagcaacagcggacacctttcttcacctggtgactgagattgactgactgctctgtctgttgcgcagtcactgatcacattcgtatcgtctactggtgtgaacagtgtatgtaaatcatctttctgcagctgctaatacaatcctgcatttctttcctattgtgttgtattgcatatcagggcaagattggcgattggctctgtccttgctgccgcggcacccttcgtgcactccagatgggtgtcgttcctgcggattcagagtgaggtcgagatggtgaaagacacggtggaggtggtggcagaagtcgtcgaggaggcggccaccgttgcggagaaggttgttcgttcggtaggttgt

SEQ ID NO: 18683 - DNA, 481 bp, Setaria italica
  Peptide Sequence Number=SeqID_84657
cagcagcgcgaccgtcatcgtcatcgggtttcttctagcaatcagtgcaaacaagaagaagaaccaggccatggcgtctctggtcaggtcgttcgcgtcgctctactgccagaagctccgttccaccacccgtctcgggccggtgacggcagcgccaccacggttccacgcgaccaacaggcagttactaccggcctccagcggcgcggctgaggcgagacctccgccggcgctgccgcgccagtttcaggagcaacagcggacacctttcttcacctgggcaagattggcgattggctctgtccttgctgccgcggcacccttcgtgcattccagatgggtgtcgttcctgcggattcagagtgaggtcgagatggtgaaagacacggtggaggtggtggcagaagtcgtcgaggaggcggccaccgttgcggagaaggtgtcgtcggaggtggccgagcagcttgcccgtagggcggga

SEQ ID NO: 18684 - DNA, 246 bp, Setaria italica
  Peptide Sequence Number=SeqID_84658
aagagaagaggagaaaaggatcatcaccgaaggcgaggatccgcatggggctactcatccacgagacatgatcgacgtgctgttgggcaatggcagcgacgagctcaccgacgagctgatatccgacaacatgatcgacttcatgatcccagccgaggactcggtgcccgtgctcatcacgctggctgtcaagtacctcagcgaatgcccactggctctacagcagctggaggaggagaacatgga

SEQ ID NO: 18685 - DNA, 620 bp, Setaria italica
  Peptide Sequence Number=SeqID_84659
tcccgttcgtctacgtccttcgtccttcgtccctgactccgcctccgcccggcgcccgccgggtctcctcttccaaccgtcgccacgggcgagacgctcagggctccggccaccgcgctccccggccctcacgcaggcgtcgccccgccccgctctgggcagtaggccaccgcgtccgcgggtccgtgacccggtcttcccgcctgctccggtcgaggacgccgcgtcccccgccccctcctccaaagcccgtcggtgagcttccgcctggtggctctcgagttgcgacgacccgacgatgccgcccaccggagaagctccttctggatccatgttcctgcaccaaggccactttggcctggagccgccgccggcacctgctggtacagatgacactagatttgatgcatcacagtatgctttttttggaaccaatgtgctggaggaggttgaactaggtggattggaagatgataatgacagtgatgctgctttcatcggagtcattgatgtagaacacccactttcttctcaagggaatgcactagaggtagtgctattctgaatgtcagaaatttcatgtagtacaaccttaagctatttattccatgctggatagt

SEQ ID NO: 18686 - DNA, 889 bp, Setaria italica
  Peptide Sequence Number=SeqID_84660
gctttcatcggagtcattgatgtagaacacccactttcttctcaagggaatgcactagaggccgaagatagttcattctcagatgttgatgatacttgcaaatacattctcaaagctaagaagagatgtcaacctaccaaagcatattggaataaataacctgggtacttctttttcaagagaaagttctgctgctgctgactggactccggaatttgaatccccactctggcccaatcagtatgtcctagatgcaaggcaagggcaggatggcaatgactgctggcctccacatcatcattcttctcactttgctgattccagattgcagagaacatcctcatcctctcagcaacaggaacaacaaaattgtaatgagcctgttcttggaccaaggccatctcctttgcaccggacatcctcatacccacacaaggaacctcaatacaatcctgctgaagccgttcctgctccaaatgcaccatataattcacaccatccacctggtggaccacccagctcattgcctggacaagcgcatcagatgaacatgtcgtctttcaatgaatttcagatgcatatgcctgcacaaagtgacgccccattgtcccagtttcctcgtggagggacacctccagagtcattatttggtggaaacctgggtcatatggtttcaagaggcttcccaactaacagtaacagcagtggaccaaaaaatcatatgttgaataatggacagattcctggggaaattgccagtatcatgccaaatttggtgccaaaccatctacaacgtccgaatgcatcatgtacctcaaatgctgcctatgcgcaaacagcatggcatgcctccccattcagcagtctccacaacacttatcaagactca

SEQ ID NO: 18687 - DNA, 1084 bp, Setaria italica
  Peptide Sequence Number=SeqID_84661
tagaaggaagacaactaacgccaagaagaacgccgcccggctcccgcacacgcccaacctggcggtgctgagcaaggcggcggtgaagacggccggcgcgccggcggcggcgtcgcggtggtcgctgagcacggtgacgcaggtggaggagacgaagcagatgctcaagatgctccccgtgctggccatcacgttcgtgcccagcgcgatgatggcgcagatcaacaccctgttcgtgaagcagggcacgacgctggagcggcacatcggcccgcacttcgagatcccgccggcgagcctccaggggttcgtgaccatctccatgctggtgtccgtggtgctctacgaccgtgtgttcatgcccttggcgcggcgggcgacggggaacccgcgcggcatctcgctgctccagcgcatgggcgtcgggctcgtcatccacatcgccatcatgggcatcgcgtccgtgacggagcggcaccgcctggcggtggcgcacgagcacggcatcttcaccagcaaggacacgacgatcccgctcaccatcttcgtgctgctcccgcagttcgcgctgatgggcgtggccgacgcgttcctggaggtggccaagatcgagttcttctatgaccaggcgcccgaggggatgaagagcctgggcacctcgtacgccatgaccagcctcggcgtggggaacttcctcagcagcgcgctgctctcgacggtatcgcacgtcacgcggcggggcggccgggcagggtggatcctcaacaacctcaacgcctcgcgtctggacaagtactacgccttcttcgccgtgctaaactgcgccaacctcctcgtcttcttcgtcgtgtgccggctctacgtgtacaacgccgagatctcccgcgtcgtcgacgtcggcagcggcggcggcgtagccagcagcggggagaagaagcgggaggtcgcgatgcagccagcgagcgtgggcgccgtggagatcaccctgtagcctgtagggagtgttccagcagaaatgtagtttccaaccccccgtacgtgacatatggaatggatgtgatggctgacgaacgtgaaaaaaaaa

SEQ ID NO: 18688 - DNA, 241 bp, Setaria italica
  Peptide Sequence Number=SeqID_84662
gaactatgtgttaatgacaattgataaattctgaatgttttgctgtttgtggtagcattgatacttgtgttgacttgacattctccaggttgctcacactcttcttagcatcatagatcctgtcaacgggcagccatttttgagtacacaaaaaagagtttttgtgttcacaaaaatgcttcaaagtgctgttcctcagtctttgagttcaatgactcatgttcctggttctctatcatct

SEQ ID NO: 18689 - DNA, 569 bp, Setaria italica
  Peptide Sequence Number=SeqID_84663
tccctgtctcagatctgctatatagttgctaatggtttcacaatcttgttgatactaagttcaaaattgtttctgtatgcggttgccattctacatgtctttatcaagagaaggtcagtacacactagtatatctaacagtcttttttggtctcttccatcttttcgttgtttaaacatgcagatacttcagattttactggttctgatcaagagctattagtcttgaaattgctaactatctttgggatagaggtgttccatttgattggaacacttttgcttcttgtataaatggcaatcatggggggatggtgttcaatctacatttcttcgtcaattcttcactttctctttctcattgcagtcactgaagattgtgcagatgcttaagaacaatccaaatataattgtagcaattgctactttaccacttgtctgtttggttcatccagctattggccttggtctgctacttctctctcataccttccacgcccattcaaatctatgcagctttttagcagcttcttttcgtagtatcactcagaaaaaggacttgtacaaaaa

SEQ ID NO: 18690 - DNA, 2315 bp, Setaria italica
  Peptide Sequence Number=SeqID_84664
aaacttaagaaggacgtagacccgtagactacttcaattccccggcaacggaggaagctacaagcaggtccggtcgttggctgcggaatcttttaaagcgtatcagaatggtccacttgagcccacattttatcgggaagcatctagcactttcgcaggggatgaacccaaagatttttcaattccatcacgatatggtcgcatgctggattggtttgctgttgaccttgaaggagagcactctgcaatggatggtcggatacttgaggagcatactgaatatgttgtatatgccattcacaggatccttgaccaatataaagaatcacatttagagagaacaaagggtggtgctcaatcctctcataacttgccgtccaatgttatactcgttggccattcgatgggtggttttgtggctcgagcagctcttgtccacccaaacttgaggaaatcagctgtggaaactatattgacactttccagcccacaccagtaccctcccattgcacttcagccatccttgggtcatttttttctctcatgtcaatgaagaatggagaaagggatacaagactggagtatcacatgcaagcagtccaaagttatcaaatgttgttgttgtgtctatatcgggtgggattcatgattatcagattaggtcaaggttggcatcactggatggaattgtgccttctacacatggatttatggtaggaagctccagtatgaagaatgtttggttatccatggagcatcaatctatcctatggtgcaatcaattagctgtacaggttgctcacactcttcttagcatcatagatcctgtcaacgggcagccatttttgagtacacaaaaaagagtttttgtgttcacaaaaatgcttcaaagtgctgttcctcagtctttgagttcaatgactcatgttcctggttctctatcatcaaatttgcctgccagtgataactgggatgctggagaagtacagcaaaaagattcactttcttgcccaccatccactcaatggaccagtgatggccttgaaaaggacctgtacattcagtcaaattcagttaccgttttagcaatggatggcaggagaagatggttagatattaaaaagctgggatcaaatggcagaggacactttgtttttgtaacaaatcttgctccatgttctggagtaaggattcacttgtggccagaaaagcatcatttacctgtggaaaatgaactacctgccagtaaaaagatattggaagtcacgtcgaagatggtccaaattcctgcaggacctgctccaaaacaggttgaacctgggagtcaaactgagcaaccatctccttctgcatttcttcttttaagtccagaagaaatgaatggtttcagcttcatgaccatatcagtggcgcctcgaccgacaatttcaggtaggcctcccccggcagcctctatggcagtgggacagttcttcaatccagaggaaggggcaagcgcactttctattggcaggattattggctccagttttgctcctgaagaaatatttctgtcagaggatcacccgttggctcttaacttgtcattttctgcaagtctcggtcttctaccagtaacattatcactgaaaactgctggatgtggaataaaagatgctggtgaccaaatggaagccgagagaaataatctttgtaagttgcggtgcttcccacctgtagctttggcatgggattctgtatcaggcctacacatcattccaaatatatactcagagactgtagtggttgattcatcacctgctttttgggactcgcctgaagggacggacagaactacagtaatgatcctggctgacccacattgctcatataaagtcactgctcgtgcttcactaagtgctgcggcaagcagattctttttattgtactcatcagagattcttggtttcatggtggccataatgtttttcggcctgatgcgacagtcgtcagcatgggaatgcgattcttctgtgccatccattttatcagctatagagtctaatcttggactaccaaagccattcatgtttctttgcttcatgccgatacttctatttcttgccttttatttttcacgactgagcaaaaaccaccatttgggaccttcttgttggttactgtgatctgctatatagttgctaatggtttcacaatcttgttgatactaagttcaaaattgtttctgtatgcggttgccattctacatgtctttatcaagagaaggtcagtacacactagtatatctaacagtcttttttggtctcttccatctt

SEQ ID NO: 18691 - DNA, 926 bp, Setaria italica
  Peptide Sequence Number=SeqID_84665
aaaaaataaaaaataaaactttaaaagtaaaaaagttaaaagaaacgggtaagttcttaaccttcccacctgtagctttggcatgggattctgtatcaggcctacacatcattccaaatatatactcagagactgtagtggttgattcatcacctgctttttgggactcgcctgaagggacggacagaactacagtaatgatcctggctgacccacattgctcatataaagtcactgctcgtgcttcactaagtgctgcggcaagcagattctttttattgtactcatcagagattcttggtttcatggtggccataatgtttttcggcctgatgcgacagtcgtcagcatgggaatgcgattcttctgtgccatccattttatcagctatagagtctaatcttggactaccaaagccattcatgtttctttgcttcatgccgatacttctatttcttgcctttttatttttcacgactgagcaaaaaccaccatttgggaccttcttgttggttactgtgatctgctatatagttgctaatggtttcacaatcttgttgatactaagttcaaaattgtttctgtatgcggttgccattctacatgtctttatcaagagaagatggcaatcatggggggatggtgttcaatctacatttcttcgtcaattcttcactttctctttctcattgcagtcactgaagattgtgcagatgcttaagaacaatccaaatataattgtagcaattgctactttaccacttgtctgtttggttcatccagctattggccttggtctgctacttctctctcataccttccacgcccattcaaatctatgcagctttttagcagcttcttttcgtagtatcactcagaaaaaggcttgtacaaatccaagatgggtgatggtccagttctgcttt

SEQ ID NO: 18692 - DNA, 1495 bp, Setaria italica
  Peptide Sequence Number=SeqID_84666
atgggtaaggaagatggcctagtttaattcagaactaccatgattggttattatttcgtttcaagtactccaaaagttgtgttatggttattacctatgttaaaccatattttacttgtttatacaagtccgactttttatttcttgtcctgtgtgacttgataaatgatttgttatgaagcataaataattgctgtattgttgactatatggactctgcgctcaacataaaatcatactaccatttgtcttcctcaaatcttgcaacaattatttacagatggcaatcatggggggatggtgttcaatctacatttcttcgtcaattcttcactttctctttctcattgcagtcactgaagattgtgcagatgcttaagaacaatccaaatataattgtagcaattgctactttaccacttgtctgtttggttcatccagctattggccttggtctgctacttctctctcataccttccacgcccattcaaatctatgcagctttttagcagcttcttttcgtagtatcactcagaaaaaggacttgtacaaatccaagatgggtgatggtccagttctgctttccaaaagtaaatcagatgggctccagcaacttctgccaatgggtgatagcccaacggcgcctaaaagctttactgacagtcaactagaattgtttgattgtcggcatggcatcatgattttgcatcttctaaccacactcatgtttgcgccttcacttgttgcttggctacagaggattggtatggggcagaattttccctggttcatagattcagctatttgcgttggtgttatactgcatggactatttggatcccaaccgaatgtcagctgctgcatatctttcaagctacctggaaggagaaggcgcgaagttggtctgagcttcctctacctcctggctggctattattccttcgtaagctccatggctttggcgccatatagagccttgtatgccatggcaatcatcggttacatatgttttgcttccagagttattgagagaagaaatatggtgagaggtgacattagctctaggagaagtcggaagcactctcatagacactgacaccgtggaaattgtagttttgctatagtggaacagatttgtgtatgatagcagctcctggtttctggttaacggttcaaaaccgcaaaagcctgcttgggtgctgactgctgaggccagttttgggagtctaagcagggtagattcttgtttgtgcagtttttggcagaccgaggagaatgagattgcaattgcgattctgtggagattacttgtagctgaaaggtgaggtcgaaatccggctttttaacccccatcgtttgaatctgggtttcctgtaactgttttgtctggaaagatgaatcggtaaatgtacattgtttaaggctagctagtgtggcacatgaaatgattttcggcaagatgcatttgaaagaagtaacttacggtctaactta

SEQ ID NO: 18693 - DNA, 276 bp, Setaria italica
  Peptide Sequence Number=SeqID_84667
aaaagatgccgaagggggccaggcaaagcccttcacgccgaagtaacccaacggtcatattctgctcgtgctctcggctctcgccatccctgccctcccacgcgccaccgccgcatcgtctccctgcggcttcgcgtgggtcttgcttccccgaccccttctccggcgcggaaggggagcggcggctagatccctttcccgaatccgtcggaggaggcggtggcaaccagcgggtcgtcctcttctagcgcgtgtttcgtatttgcccaatatctg

SEQ ID NO: 18694 - DNA, 1374 bp, Setaria italica
  Peptide Sequence Number=SeqID_84668
ctaacctcatcactgctgcaccatcgtcgggccgccactccacctgaacaccaccaccgtgacaccactagtaatccatagtacttcgtgtcttggttcagtagaacaaataccatgaggttactaatagcaatctctgctgcgatttctgatgtcatcatccagttagtacttacagttcctccaaaccaaagcttcatacagtagcttgcccgcttgtcatctaagagtacttcagttcagaggaacaaatatatagggactgaaattagtagagcataactccacaatgaaactctaatattgaattgccaatcaagacattgcaagacaattataagatttagtgctatcaggaaatgttgccctggtacctggacatggacataaatgtgcagggaccgatagctctagcctctagccagcaatgtttcttaccactgcaccacctgcctctgatcccatagctctgaagtgcccgccaccacccctgacatctgatccctctaaacctggaggcttgaggtcttgttggagagctcagcaatgaccccaactccgaatcccaacccatcatcactctgttgctgaagttcatagatgatccccaatcaagcaccacatctgtaaggcaaggaggcaatgaagactggcacggacaggcacctggtaggtgcagggtgctgcagagcacacaagtaggggggtttttttcccttttttttggaggtaccagtaacaagagcttttttgactgttattctaattgtgatagcggcacagggaaacagttggttgacaagagattatctacttccttatgtccatttcctccaaactatagaaagattggactccgttgctcgggttgctgtcatttcctgtttgaagcagacaccacacataagtcagaaacttcccactttccttgcttcttctcataactcactgtatatgtattattgatcccaagaacaaagcaaagctcatcagctgccatggatgacctctctctcggcagcttctccctagctgccctagcagcgattctcctctccttgctcatcagatgtgctttgcccgccaggagcgaaaccagcaccaggcttccaccgggcccatggaacctccccatccatcggcagcctccaccacctcgtcggctcaccccgcaccgtgccctgctcagcctggcacgccagcatggcccactgatgctgctccggctcggtgaggtgcccaccgtcatcggctcctccccggaggctgcaatggaggtgatgaagaccaatgatcctgtcttcgccagccgaccaaggggtgcgatgctggacgtggtcagcttcggtggcaaggggatcatcctcgcaccct

SEQ ID NO: 18695 - DNA, 251 bp, Setaria italica
  Peptide Sequence Number=SeqID_84669
cgcacgccctcgccaagcctcgcagcgaagccatacgttgattcctctcgctcgccagcaggcaaggccggagccgccggacctgaggtcgcctgtgcccgcctcctctcccatagcgaagcctcctccaactctaatgccaggcaactgcgcggccgggccctcatctcctgcctacgcttctccatcgttgcgtcttgagctccgacggcaatgaagtaagaggttgtttcggggattggggaagcagg

SEQ ID NO: 18696 - DNA, 428 bp, Setaria italica
  Peptide Sequence Number=SeqID_84670
ctaccctagaactgaatactgttctccaatttgtcactgaaactttgcatttctctatctaccactgtctggtaaggaacttggtttccttgtcattcttctcaggccaaacatggttgaccactttacagatgtaatggtaatagcaaagaggactagtttacctgtctgtcttccaatactactcactcccataactatcatcatctttcctacgtctagcaggatttccaggaccaccatgcctcttctcttcaatgaaaaaaaaaatcccacaatctattctctgatctttcactgagagtttggatttctctatctttcaaatgttctgtaaggacctcgttttcatgtcactttcatcaggtccaacatggttgaccaccatcaaaacttgacagcaacaatttaccagtctaccaatttcc

SEQ ID NO: 18697 - DNA, 334 bp, Setaria italica
  misc_feature (300)..(300): n is a, c, g, or t
  Peptide Sequence Number=SeqID_84671
gtttgtgcaacaatagttgaatcagacggctttcattagattatgcttccttgcccgtgtggaacatgtgtgagcccattccaaaaatcacaagtgatccgacttttcagagattggctgcagttactaatttatgatctggcatgtacagaatgaaaacttcattctcaattctacgagaatttttatgaaagcgtttcatttgcttctcttcaatggaagtttcattttcccagaatgtatcctaattttggcctaattcttcttctgatgatcgatttaacctctgatacaaaaagntagaccttggttctatttcatctcttcaactaag

SEQ ID NO: 18698 - DNA, 548 bp, Setaria italica
  Peptide Sequence Number=SeqID_84672
gataaatttcccaagttctacgcctggataagaaaagtcaagcaagaacctttcagggtgcaattggtctggcttgaggcttgccctgaacatgaacaggagaagcgatggttggagcaggacatacccatcagctgcggcactttcagggtcgtccgaaactggaatgccatgtatgacacaatggacaccttctcccatgaagtatacgccagagacaccggcacaaggtgggaggtcacaatcaccccggaagcaggcgagatctgggccatctacatgaactgggcgcccgactgggtcccgtccagcaccggtgcctgcgagttcgcaatctgcgaggtcatcaaccgcaccgaagccagcacgagtgtcgccttcctggcccaggtcagcgggtacctatccgtgttcagacccgacaagcagaaaggcgtcctggaggtacccgctcgggagaatctgaggttctcccaccggatcccctcgttccgcctgacggaagaacagggcggcaagctccggggtttctacgagctcgaccccgc

SEQ ID NO: 18699 - DNA, 580 bp, Setaria italica
  Peptide Sequence Number=SeqID_84673
acaccacgccacccgttctctccctctctcagccccgtccacttgtcgcattgccgattcggtacacgccggccccgccagatatagagcgaagccgaaggcagccagagagccactcggagcggtccgcttggttcggcaaggcagaaggatcagtcccagcctgttcggccggccatggcggcgaaggtaaaccgcttgcgaattctttgctcgattcgaaagctcctttttcacccaaaaggctcttatcttttggattccccgtgcctgcccgattgagattcttaacgagattcttgcctgtcctgctgcagaaggtcatactgaagctggacctccacgacgacaaggataagcagagggtgctcaaagcggtctccacgctccacggtacgcacacttgcttcctttccttttcatctgctccgctccgctccgctcctcagtcatggacgccggcgtctgtatcttggagaattgcgagctggaagaaataaaaaaaaatcagtttgtaatccatgtcccaactctgaattctgatcgcaagaacactggattccgcaggtatcgactccat

SEQ ID NO: 18700 - DNA, 1052 bp, Setaria italica
  Peptide Sequence Number=SeqID_84674
cccaactataccagagcctcggttcgtttcggtgcttgcccatcgagcatcgaactcaccgccgagacagacaaagcaccacgccacccgttctctccctctctcagccccgtccacttgtcgcattgccgattcggtacacgccggccccgccagatatagagcgaagccgaaggcagccagagagccactcggagcggtccgcttggttcggcaaggcagaaggatcagtcccagcctgttcggccggccatggcggcgaagaaggtcatactgaagctggacctccacgacgacaaggataagcagagggtgctcaaagcggtctccacgctccacggtatcgactccatctctgtggagatgaaggaccagaagctgacggtgatcggcctcgccgaccccgtcgacgtcgtggccaagctgcgcaaggtcggggtagctcacatcctctccgtcggcccggccaaggaggagaagaaggacgacaagaagggcggggacaagaaagagggcgctaaggacggcgacaagaagacggaggccaagccgctgttggtttacccgccgtgggtcgcgcagtacccctacactccaccacagtacccctacactccaccgcagtacttcgtccgcagcgccgaggaggaccccaactcctgcgtcatctgctgatggcgacgccgatcgggaggtcccggttttttcgtagctggcctgcctgcctacctcgagctccagcgtcagtgatggccgatcgggcccccgggggtgttggtggttggctgctgtgctcatctctatccttgggttggttggcccgtccgcaggtcgttgtatgatgatgatggccggagcaattacttactatacacaggcgatccgagagtcgttggtggtggggtttcaggctgcagcgccattgctgatgagcgtgttgtctagtgttcatagcatatagtatctggtttttgtccttgctgaaaatataaacatggcgtgatatgatatggcacgatctcctaaattacactttaactaattaaaaaaaa

SEQ ID NO: 18701 - DNA, 252 bp, Setaria italica
  Peptide Sequence Number=SeqID_84675
ggttgttggcggatgtacgtcctcaggcatggctagcgtggccaggtcaacgcgaggcagacgcccgtcggtgcctgtgaggaccttctatcgatggcttcgctggagatggcagagagggagggggcagtggggcttacatgaagatgacccatccgccgagcaggctgtcggcgtggcaggcggtgaggcggaggcgcgggcttggcgaaggagaggaaagaggggcggcggcgggcttgtcgcagggga

SEQ ID NO: 18702 - DNA, 276 bp, Setaria italica
  Peptide Sequence Number=SeqID_84676
cgccaaccgccgccgccgcctgccggtgctgttccccctcccagttcctcgttccgacctcgacctgcatcgacgagatccgagcggcgcagctggaagccggctggcgcccccacccctcctcggcttgcatccacatgtgccacggaagaggtgcagatcagcttcgcaaaatcgtcgctagaatgccatctccgccgtcgtcttctccaaactccagccgggctccccgtcgtcgttcgcccgccatcgccccaattgcttgcagcaaccaag

SEQ ID NO: 18703 - DNA, 367 bp, Setaria italica
  Peptide Sequence Number=SeqID_84677
tttctttattttactttactttgtttcttaaagttcgttttctttcctttgttcttcttaattcttacttgcaattttgagggccaattctattggtatcagattatcagcacctgaattcacataggatggccaagcatatgaagaaccaagaaagtattggttctcgatataaataaaatgctgtgcagatctgattgcccggacatatgcagtgtggatgctcttatcaattaccaggttcttacggcacacaagattctgcagaggcattgagtagttagtaccagtaacagttttaaaacagtacacaagtgaaaggggcaaagcaacaccaacattaaaagagactaaaactttattgaac

SEQ ID NO: 18704 - DNA, 2635 bp, Setaria italica
  Peptide Sequence Number=SeqID_84678
cagaaacacaactctacaaacaccaacaccattaacacttgagctttccctgcgccaactatggatgattgcagatatggtacaaattctgcgacaatcccgccaaatttagacaattacaaagttcacaagtggatatgatcaagcttcaactctgaaaaaggtcaactttttaatgtaaatctacatggtcagcgaatcaggaagtgaagttggagctccgagaatcttgccgccaacatcaggaaagttttcttggtctggaagcgggccgatcttaccatcatcctccacattgactgggtacttgaggaggtgcccttgtaatgttctaatttcttcggctgtaaacctttgccagttctctacagctatttgattcacaaaccttacacaatccaaacttgaaggatccttgaagcgatcatcaaccattccaaggtgctctgcccagagagatgttctgtatccatatacctggccgtgaggatgtctattctttgtagaccatgcgtgatgaggctggtatgcccccattgcaatttcagtatctctagaaccggccagggatctctggttgatgtttgctgaacccagaatgacgtactcatcatccacaatcatccctttggcatgaacgtagatcatgaaccgtcgatattttgtagctaaggccgctgcacttttatctgtagacttctctgattccgggctgccgtttgatgatggttcttcccggtttccaagacaaaagaagttcaagtaatcttgagggtgcatatccttaatgtccatggccttgagttcatctgcaattattttatacatcatctccattgtctgggcctgaaagaaaaggatttcttgcacagatgctgcagtagggactccttcaggccacattggtatcactacatacactgcaaagcgttctcctgctctaatcttacttgcaattttgagggccaattctattggtatcagattatcagcacctgaattcacataggatggccaagcatatgaagaaccaagaaagtattggttctcgatataaataaaatgctgtgcagatctgattgcccggacatatgcagtgtggatgctcttatcaattaccaggttcttacggcacacaagattcagctttgatgcctctttgcaatcactaggaaatccttttaaagaaccagaatcgattgaccggaatacctgaacatgccaattttcacgatcttcttcttttgaaacccacaaactaggatgatcatttggaacattacgtgaagggcttagtatccatgagatacgctccagcttaattaaagcatcatctttccaatgagatactcttctaaaacggtcacgccattttgttgcctttcgccaccgctgttcaaaatttgtcaagacatcgtatgcagcaggaccatcaatcctgcaatgtaaatcatgccatggttgtctaggtccttttgcacctgccgaaaatgtagggttatgataatcattatgaaatactgtgtcaagatctttgaaaagcctgtgttcgggtgtgtcatagcggccatcacaaagatctaggcccccgatgaaagctgtaaccttccgcttgtttccccatgcttgtgtatcaacaagcacgcatttttgatggtgtgtaaacaaagtcccaacaacctgctgtttgaaaatgctcagcttattgctagcatatcgaggagaaagaacacagatgactgaggaatgcttgaaaaactttcgagtatcctcatcatgagttgccataactccacccgtcttgaataaaaacttgtcatgcgaagttttgtcatcccacacgagcaggcacactctgacgccctcctgcgacttgaacttgagcagctctccaagggtaaggtcgccaccctcaggcaatggccgcgacggcgaccgctcacgcacaagccgcaccttgtcatacaccgaccagccgacgatgtatatcatgtggtgtgcctctaggatggcgtggcagatgtcctcccagcacgcgttgtgctcgaacatcttgccgtcctcgagctcaatctccggcaggtccccttccctgacgtgcgcgtcctggtacagcgtcacctgaccgccgtggcggagcgggaagtaggagtccttgatgcccttgcgctcggggtcgccggggatgccgcgccggtaagccgggttctcggcgatgggctggaaccggaagcggaggcacagcgcggtgtcgggcttgtacggcttaccgttggtgccgatgatggggtaccagtcctcgacctcctcgccgctggcgacgatgtcggctgggacggtgacggtgccgatgagctgcgcgccgaaggtgtcgttgtccttgacctggaactcgagcgcggcggcgcggtgcgcgagcggcacggcgaagcgctcctcccagacggggtcctggttgttgggaatgacggcggtgcgcgccaccacggcgccggagacggagagcgtgacgtaggggtcgctggtgatgatcttccggtggtggtggtggcggccgccggagccgccgcgggggacggcggcggcgggtgggtgctggccgcaggaggtgggcggtcggcgaggcggcgaagca

SEQ ID NO: 18705 - DNA, 1125 bp, Setaria italica
  Peptide Sequence Number=SeqID_84679
gcacgcgattttggttgtgctggacgcccaggaccatcaggagctttggtgttgctgtgggcatggcgttgctgtgagaaatcaggaccttggggaaagatgtggaaacagttcctgcccaagctgcctaggaagtcctctgcctccgggaagggcgaccatgtctcaggctctagtcccggacgcaatgctgccggcaacgggagcgcgatacagcgcacgagcagctgcccgagtgccgggcctgcccgtccggcgtccagcgtgaagcgcatgtcgtccgcggtgttcccgtcgagcgtggtggctggcattgagccgcttgtgtcgttcaaggattgtccccgaacggggagaagccgaacctgtttgtcagcaaggtgagcctgtgctgtgttgtctttgatttctcggacccgaacaagaactccgcggagaaggatttcaaaaggcaggcattggtggatcttgtggattatgttgattctgctagctcccgcttcacggagccgatggttgttgcctgctgtagaatgtttgctatcaacttgttcagggtgttccctcccaattgcaggtccagttcatctggcggtggtgagggtgaagaggaggagccaatgtttgatcctgcatggccccatctgcatcttgtgtatgatctcctcctgaaatttattggctcctcatctctggatgcaaaggtagggaaaaaatattttgaccacacattcatcgtgaagttgcttgagctcttcaattctgaggacccaagagaaagggattgcttgaaaacaatattgcatcggatctatggaaaattcatggtgcaccgtccattcatccgcaaagcagtgagcaatatattctaccactttgtgtttgagactgatcgccataacggtattgctgaactgttggaggttttcggaagtgttattagtggcttcacattgcctctgaaggaggaacacaaaatctttctttggagggttctaattcctttacacaagccaaaaacacttggtgtgtatctgcagcagctaacctactgtgtgacccagtttgtagagaaggagccaaaacttgcaagttcggtgatacttggcttgcttagatactggc

SEQ ID NO: 18706 - DNA, 174 bp, Setaria italica
  Peptide Sequence Number=SeqID_84680
attttccacatcatatgcttcatactcttcctccacaccttgaattagctcttcaatagttgtagggtttctggaatcagttaaagactggagggatctgaagaaacttaggtctagtacattcatgtatagggctagatatctgattgatgcaacaaccacctaactccctag

SEQ ID NO: 18707 - DNA, 298 bp, Setaria italica
  Peptide Sequence Number=SeqID_84681
cttcctttgttgtagtctttggtaatttcccatttttactctttgcatgcaatgatgtgtaagcagcatatctttgggcatttgttagacattttcttaacctcactgtggttgttgcacacctgcaaggagtagcaagtttctttagatgcatcaaactaaaaaacaaatatatatgttgcatttatgaatctatgtctcttactccatgtttatctctattcaaatgtctgataaatatctaatgaatatgtgtcttatactcatgttgtacctgcaccttcaacgagaactgaaa

SEQ ID NO: 18708 - DNA, 1137 bp, Setaria italica
  misc_feature (1088)..(1137): n is a, c, g, or t
  Peptide Sequence Number=SeqID_84682
tgttttttgtttaattcttcggttaaaatgacatacttaatttctttatttgttttgaaagttattctgctttgcttctagggaggaaaatttggcaatcaagggttgatttaacatgtttttgtgttagcttcaaactgagtactttctaattgcaggttaaaaaacaaatactccgagtatgcaaagttgtatctgcacctttagcaggagcaacaccttgattctgagccatagcgttgccttcttcaccagccacaaccttggcgcctcctggtatgattccgccatctacctctactgatggagtagaattgaggtccaggagaagttgttgtagacctgcaaggcaataaccaattactgatggagtacttccctagatcaatgttcagtgtttcagcaaggagtaatttgaaatagaaattgttgagtttcctaggagatgataatagcatctgcttcccctagatttgtagattatcaaagtgggcaatcaagggatgctctaaatctctagttgcacatattgctactctaaatggagtatggagcttgtacctacagcttcagcgggagcatcatcttcctcgtcagataatacctcgcctccagcagatagattgaagcaagctcgggttggccgagaggatagctttaccagagattgcaagtgttggagttgcttgcttgctagagacacgtccaggagttttgcagagatctctcgtgttggagcttgcttgcttggcggaggctgcatgtccaggagcttgcttgccggaggtcacgtgtgcaggaacttgcttgccgaggagtccggccggccggctaatcgggaagcagtgatcgacaggagagtcgccgcttgcgtctgtggatcgcagcgggtggagggccgatgggttcaaaatttcaaaaattcaaattgcttgctggccagccgtggtagttgggtggtattgggtactgggcaaatgtgcatgtatagctggatggtataattgacctttgtagtttcttaatctgcctgaaactggtcggaatgacctataaaacagaacacagatggagtattcaatactttnnnnnnnnnnnnnnnnnnnnnnnnnnnnnnnnnnnnnnnnnnnnnnnnnn

SEQ ID NO: 18709 - DNA, 959 bp, Setaria italica
  Peptide Sequence Number=SeqID_84683
acgacggcctcgaggtctgcacggtggagcttatcctatcgccggcagaggaggtagtagatcacgggcccttctccatcgagcagttacaggtgccccatctcccttgctcctgacctgtggcctgtttgcacaataaaaattagcatcttttctaatgatatggtctatatacgcactataccaaatccccttctattgtttgcgattcctaggctttgcaaattttggatttggttagtgctactgcaatgtgttgctgcacacctgcaagaacaacaatgagataatacagatataaattagcaagtttctttatacacatcaaactaaaaacaaatgtatatgttgcatttatgaatctatgtctcttataatatgtttatctctattcaaatgtccgataaatctttgctagttcaagtgtttagtactccaatatctgatgaatatgtgtcttataattaagtttatgttgtacctgcaccttcagcaagagcattggcttcttcatcttgagcaggaacaatgccttcatcctgagccatagcatcaatttcctcgtcagctacatcctcaacatctctaggttaaaaaacaaatactccgagtatgcaaagttgtatctgcaccttcagcaggagcaacaccttgattctgagccatagcgttgccttcttcaccagccacaaccttggcgcctcctgatttgtagattatcaaagtgggcaatcaagggatgctctaaatctctagttgcacatattgctactctaaatggagtatggagcttgtacctacagcttcagcgggagcatcatctccctcgtcagataatacctcgcctccagcagatagattgaagcaagctcgggttggccgaagaaggaataagactttaaccaagaagaattagacaaagtagttaggaagttagactttagacttagtacttaaga

SEQ ID NO: 18710 - DNA, 3211 bp, Setaria italica
  Peptide Sequence Number=SeqID_84684
cgctactccttcccagagatcgcatcgcagcggcagccaaccccgcacacctctgtcgcccccaccttctccactactcggattcgattcaatcctcgaccgatgtcctccagcaggtagatgttcctctccttcggcatatgcttggtcgccgacagcagcgggggttcacccatgagcggtggcgaggaggagaaggtcacactagatcttgggcgtcttgacatcgtcgggcccaagacgctgctggtggacgacgacagcctcgaggtctgcacggtggagctcggcctaatgtcggcagaggaggtacttctccatcgagcaaatctcgagcccttctccatcgagcagttacagggtgacaaagaaaccaaacaaggagcaccatttgtggatcaggaaggagacagttgtgctagggtcagggagtatcagacctctttattgcacttcagttatcctcacctgacatgtgaaatatggcacttcagttatcctcacctgacatgtgaaatatattgactgaatcactgcttttgtagtcatttctctttgactatgctcttattaggaagaattagttattctgacatcgatttgtcatgtttaagaaactgatgtgttctcaaatcagtctgtggagtaggtttcaaagtggagtatatttaagtcttgttttgtgaggtgtgcttctcaaacctgaaaatggcttgaagtgcacgtttccttaaccttttatactcatgcacatctctgaataattaaccagtggttacaatctctgaagaaaacaagccttaacatgtcgatacagtaataataataatataaacacagtactccacacaagtctaaaattctattgcatctacaggaccggcgacaactatattaacttaaacacagtaatactccacaccattaacattacaacacagtaatatcacactcaaaccataatgagctagatttgctagtgcactatcatagagatctttatcacatgacaaccgatgaggtagccttccttctctttctagtctagccttctcttattcatatgtggatttctgtacctatttcctcctccaatcttcatcacctccttcatgcacatctggagacttagaaacactctatttagattttccacatcatatgcttcatactcttcctccacaccttgaattagctcttcaatagttgtagggtttctggaatcagttaaagactggagggatctgaagaaacttaggtctagtacattcatgtctagggagttaggtggttgttgcatcaatcagatatctagccctatagccgccacagcttgaaggaaggctgggtcatttggactaacatgtgttcttgcgttgtcctgttggatgtaaatagtctcatgaatagcatcctgcggccacactgatttgattgctgggataactttttcaataagatattgcctcatcacctccctgttaactatgattgattttgtttccaaggttcctctctccctatcattgaaatgcaaaactggagcctctccctcttatttctctctttcaagtgtggcttcaatgtattggagtggcgtcttatcaagcctaccttgaacttcctgtgtaatgttgaaatactgacatctagtgacttagctagtgatcttaaggtggaccttctatttagtgggattgtggccattctagagagctcaagttcagctttcttgcgactgcattggccagttcttttgttagacacatcaacttccagcccaagtacaatttgctcccttgcagtcttccaaatcttttgaataactcaaatttgtgtctgaaagaatgcagcgacttcctttgttgtagtctttagtaatttcccatttttactctttgcatgcaatgatgtgtaagcagcatatctttgggcatttgttagccatttccttaacctcatctgtggttgttgtacacctgcaaggataacaatgagataatacaattataaattagcaagtttctttatacacatcaaactaaaaaacaaatgtatatgttgcatttatgaatctatgtctcttataatatgtttatctctattcaaatgtccgataaatctttgctagttcaagtgtttagtactccaatatctgatgaatatgtgtcttataattaagtttatgttgtacctgcaccttcagcaagagcattggcttcttcatcttgagcaggaacaatgccttcatcctaagccatagcatcaatttcctcatcaactacatcctcgacttctccaggtatgatttcaccaactagttctgctgggggagtagagttgatgtccagaagaaaacctacttccagatgaacacctacaaggacaacaatggaataagacaattagattgaattagattaacaagttttgttaatctcggttaaaatgacatacttaatttctttatttgttttgaaagttattctgctttgcttctagggaggaaaatttggcaatcaagggttgatttaacatgtttttgtgttagcttcaaactgagtactttctaattgcaggttaaaaaacaaatactccgagtatgcaaagttgtatctgcacctttagcaggagcaacaccttgattctgagccatagtgttgccttcttcaccagccacaacttcagtgcctcctgattatcaaagtgggcaatcaagggatgctctaaatctctagttgcacatattgctactctaaatggagtgtggagcttgtacctacagcttcagcaggagcgtcatcttcctcatcagataatacatcgcttccagcagatagactgagccgggaggacagctttgccggagatcgcaagtgttggagctgcttgcttgctagagacacgtccaggagttttgcagagatcactcatgttggagcttgcttgcttggcggaggctgcacatcgaggagcttgcttgccggaggccggctggtcgggaagcagcgatcggcgggagagttgccgcgtgcttgcgtctatggatcacggcgggtggagggccgacgggttcaaaatttcaaaattcaaattgcttgctggctagcgtgcgtgggagatgggagggttggagggcaccgggccacatgtgcttgtacaactagatggtataattgaggggtataattgaccttttgctagtttactt

SEQ ID NO: 18711 - DNA, 820 bp, Setaria italica
  Peptide Sequence Number=SeqID_84685
atgtgccgcgcaggttacagcaattggctgccaagcacaaggttgtcctttgtatcaggcagaagtatataaggtataagccgttcatggctgaggtgaaggattatgcgtgccaccgtgctggagtgccgacttcaagtgctgcgagtgctgcttcctcctcagccattaattctgagggtaagaaggctcgggttctaaagcgagagccataccaatcaaagaggtgtggttgtgggtttcgtattcgggcaattgtaccaatagccaattataatgaaaaagacaagacttttgtgtacttggaggagggcactgcagtgttcaagctttatgcggtgcactcggggcatgagccaggtccacttgatggcaatgcacgaattgttcacaggttggttggtcataagggggctcttgagtttgatccagatatttatggtgtcagtgaggaaggggatcctaccttttcatcaaagggggatgaagatgttgatattgatgattcgcatcaggcggtcttgcagcaagtgcgggatcttagatcagaagttcaattgctagaagggaaggtggctaagatgcacccagaattgttggggtctctgtccaccgagttgtctgaggttctgcacaggattaggaagttcaccttggaaggtaatctctaccagccggaggagactctgatggtaggcaatgaagaagtcgggggatggggggctgggggatgcgccccgccatttagaccagcatgatggagcattctgcaaggatgatgagatgcttgatgatgatgatactgattttggctcgagcc

SEQ ID NO: 18712 - DNA, 496 bp, Setaria italica
  Peptide Sequence Number=SeqID_84686
catcggcagtcccatgtatgactacacagggcagtcgacgctttatttttgtcgatgttctgtaaacacatgacagttaaccagattaggatgataagtaagcactgttctggaacagaagggaaattataaattaacagattaggatgataaagtaagcactgttctggaacagaagggaaattatcaaattatggtccagacttgccttgaagatatcgaaccaaagtgtcactttcactggatagagaacccgtatgccagagagtataccgctgtgaaggacaaccccctcttaacttttccaaacgtgaggccaaatgcaatgttggtccacttccaactgattgcccatacaggattaaatcctcttcttctatcccatactcctttttcaagcactcataaacagcctctatgtcatagtatgtgttgtactctgatggttttcctgtagaagcaccatagcctgaataatcatagctcatgatgttga

SEQ ID NO: 18713 - DNA, 1156 bp, Setaria italica
  Peptide Sequence Number=SeqID_84687
tttttttggtatgaaactggcctgctccctgccaggcaggcgccaacaaattaccacccaaacgggttcctgcttggcaaggacctgctgaggtggtggtctcccgtcagctgctcacagtgcactttgttgcaaacttacaattaacaattagaacgaatccttttgcacgatgactacaatacacaggtaacaaaagtaagaaatgaaaaaaaaaaagaagctaggaacaggctaatctgtggcgcccacaagaaaaacaaaggcatctccgatccagcacactgcagccacgagtctgtctaatctgaactcacacgggatcacaagctaggggttgctgcactgcatttcctgggggcgcatgcaccagagtcaccaacaagggggagtccctgccgcttggctgacctctcctgccatctcttcaacttgcatacatgagcagcagcaacatggatggttagtgagtagtgacggctaaaagtcggcgaatgatcgaagcgggttcgtctcatctcttcccgaatctcaagcacttgttgtgtttcacttcggtcatgctcgacgaaggcagcatctggggtgccttgggcgccttgtctttcgcgagcttctccatcgcgtttatgaacttgcgcaagtgcctgatgtactcggggtaggtttccaggttgcagtgaccaccgcctttgatccataggggctcgtacttctcctttgctagctcccacaggcgcttgccgtgagtgaagtcgacgatgtcatcggcagtcccatgtatgactaacacagggcagtcgacctgctttattttgtcgatgttcttgaagatatcgaaccaaagtgtcactttcactggatagagaacccgtatgccagagagtataccgctgtgaaggacaacccctcttaacttttccaaacgtgaggccaaatgcaatgttggtccacttccaactgattgcccatacaggattaaatcctcttcttctatcccatactcctttttcaagcactcataaacagcctctatgtcatagtatgtgttgtactctgatggttttcctgtagaagcactcataaacagcctctatgtcatagtatgtgttgtcgcggaggtgcgcccggagctcgaggagaggccgagcatcgg

SEQ ID NO: 18714 - DNA, 468 bp, Setaria italica
  misc_feature (408)..(468): n is a, c, g, or t
  Peptide Sequence Number=SeqID_84688
acgcccgaccaagcccgaatgtggctggtgaccgacctgctccggcggcggcggaccgtgtcgttcgaggactcgtgcaacgaggaggaggaggagcggaaggcggccatgggcagggtgcgcgggctcgagcagtgtgtcgacgccgccgagtccggttgcgaggaggtgtaccgcgcgctcgtgaacgccagagtctccctgctcaacctgctcacgcccacattctgacgcccccttcttctttagcttcctcctcctcgtgaggatcttcttgagagatcaatgcccaggattccatttcggttcgttggcggtgtgtaaatgctgtaaatactccctcctccggattgtaaagcgaaaggagctgcaattagctgagaagactctggatttttgcgcttgccnnnnnnnnnnnnnnnnnnnnnnnnnnnnnnnnnnnnnnnnnnnnnnnnnnnnnnnnnnnnn

SEQ ID NO: 18715 - DNA, 1020 bp, Setaria italica
  Peptide Sequence Number=SeqID_84689
aaaaggtagtcaagaggtcgtttgtggaaactgatagtaagtttgcagagacattttctcatcacaagggactttcttctggaactacagcacttacagcaatgatttttggaaggtcccttctggtggctaatgctggtgactgccgagcagtcctttcccggtgtggtactgccattgaaatgtccaaagaccataggccgtgctgcatcaatgaaagaaagcgtgtagaatcacttggtggctatgtggatgatggttatttgaatggtcagctggcagtcactagagcactaggtgactggcatctcgagggcatgaaagagatgggtgagcctggagggcccttgagcgctgagccagagctgaagatgataacattgacaaaggacgacgagttcttgataataggcagtgatggcatctgggatttcttctcaaaccaaaatgctgtggatttcgcgcgacggaagctccaagaccacaatgacttgaggctgtgctgcagggagatcgtcgatgaggcaataaggcggggggccagggacaacctaacagctgtgatggtctcgttccaccaggaggcccctccccagaccagagtgaacaggacaggcagggttgcacgcagcatatcagctgaagggcttcacaacctcagagtgctcctggaaggccagtgacggcgcgcccattgccccgccagtcctgatgttgtgctacattggtgagtgttaattgtaagtagcgattttcggtatcttggtgctgttcagcaactgtctgtcgacatgccagagtaactattcttgtctgagaataaaccaacgaacccgagatctcactagctgattgtgagacgctgtaaataataaaagttggagctaggtaaggacgagttagcagtgtgcatccaggggcttttgtggctcattatgcgatgttttcccctgatcttctgtaaataaaaccttgctgggagtattaatgtaatcgaactaatgttctctcaaaaaaaaa

SEQ ID NO: 18716 - DNA, 481 bp, Setaria italica
  Peptide Sequence Number=SeqID_84690
atggccagtagactgtttgagtagcatactgtgactgcccgagccaatccatagtactcattcgtacaattcccccaatcttgacagacttgatggtgtcaacccaaccctgctcatctgcttggaatttgtcaaatgtcacctgtgaaacaataaagacgaaatcaacagcctcaaatgtgtgactactttactagattagtccttggatagaccagttatcttttttgtttaattgtctgtcttagttattcgtttgcaaaatacactatgagaaataggctaagccattaaggtagtgaaacatgaactaatgtaagaaagatgtaatgaaagaaaacgtttatcatggcataccatgaatcaaacaaatcaatttttttcataggtaaactggtggagacaaatcaaacaagctttaatgttctcatgcattgaaatttccactggactgcatttttatatcaccacgcatatcagg

SEQ ID NO: 18717 - DNA, 1091 bp, Setaria italica
  Peptide Sequence Number=SeqID_84691
ggtattgtgtgtggtgtgaatccctcctcttggatgatttttttctttattgactctacgcgatgaagaaagggaaaagacaaaaagataacgttgaacagagctgatcctacactgacgccgacgcctccagcggttcaaccggtacagtataaggcgagtaccaatccgcatcgaagacatcctgcagctgcgagacgatggaggggttgtatgttccgaagctcactcccgccgtggtgtagaagtaatcccagatgaggttgctggtaccgatgttcgccctctcgtcgctgacagcgtacttgccatggttcacccgggtgaagccagggtaacggttgcctgtcgcggcgccgtcctgcgacaatgcaggtccggtctcgttgtacccaggaaccgtgtagtatttgatctcgaccttgccgccgcagtggttgtatgttgaagatgcgcagaggatgttggagtatagaaggctcttcaagtacttttcggtgtttgggatgaagtgtgtccagtaggcaacaagaagcctcacggttgcattctttgagaacactacctctgagattgctgatgataaggatggccagtagactgtttgagtagcatactgtgactgcccgagccaatccatagtactcattcgtacaattccccaatcttgacagacttgatggtgtcaacccaaccctgctcatctgcttggaatttgtcaaatgtcacctcaggtggagcaaaaggaaaggtagctcaagtagtgctcctgagtggatttcttatacccaggaccaccgataaccttacccatggttgtcacgtcaggggtgatcccaaaagtactcttgagccccaccataagccaaaacggaaaaccggtcatcacttcatcaaaagaccaggagtgcaccattctgtttggtcaaagtcacggagggcattgagaaaaaccaggctgtggcggaatgaagccagcattgccaacaaactggctcaaaggaaaaacggcaagcaaatctccccctttgttgtcctcgaacaatttcttcactgcctcagcatcaattgtatgctgctgttaaaagtct

SEQ ID NO: 18718 - DNA, 312 bp, Setaria italica
  Peptide Sequence Number=SeqID_84692
cattcgctcgccgctcgccagccacctgctccgctcccatccgccgccccctgctcccgtagcgccgccaaccgacgccgagcggttccggagcactgggacgcacggccgcccccgtcaagcaggtttcgccgcccgtcctcgggagtggagcagagccggaggcggtggagcccggcggtggtgcgtgcagcttggccgctggggagagccggggctctagcgacgaacatgcgtcggtagtaagccggggttcaggggcattttagtcctacttagcagcggcgatggcaaaaatctaacatagtgatt

SEQ ID NO: 18719 - DNA, 252 bp, Setaria italica
  Peptide Sequence Number=SeqID_84693
agatcggcactgcaattgccaaggtgaatgtagagatcaagaatacaacaaggatcacacagattgaaataaaaaaatatagggtaacatacaggcaagaacttaatgcatttagaagtacaaagagctgaaaaatagaaagatggatacacggaaataatgtacaaccgattaatttcgtgcaaccgcaataaaataaataacatccaaataaagatgatccaaactccataaacaaggttgtaatagaaa

SEQ ID NO: 18720 - DNA, 563 bp, Setaria italica
  Peptide Sequence Number=SeqID_84694
ccgggggcaagttcagcatgaagtttacagattatcagttactattgtaaagcaaatattttgagactacttgcaaaattgtttgaacatttgaaatgcttggcactgcaagaattgatacagaatcatacaattgacccaaatcaaaggcagaagacttggaacaccaagaaattttacagcttcaggccaatgtgtacatctactagaaaaaaatgcagtctctactagagaaacaccattttgaatgagctgacactctgactgtagagtccaccattcttctggagctgttttctacaaaacacagaatggcgtagctgaaattggtatgatctttgtagtaagaatgtgcttttaacagccttcaatcttttggatggaaattctctggccttcgggatcttggcagcatctataccaccgctgcctagcgcgtttgtcatctgaagaaaactggaacgtgttcgaccattcattgcatgtccattactttcttcaaaactttgaagcttgttactttctgatatttgcatgttactctgtcatctgaatgatctgaa

SEQ ID NO: 18721 - DNA, 643 bp, Setaria italica
  Peptide Sequence Number=SeqID_84695
tttttttttttttaccaaaaaccttttaagaattgttccaagtaatgcattgcatatttcaacagtagtaattaagctattggtacaaatgattatagataataatacatgtgtttcttcctagctaccactatgtcctttcgatgatgtcttttcttttaatcctgggtttaattttctatgatctcttacagatcaccatgcacacctcgagctcgatcacttgggcacacgacgacatcagcaacggctctgtctgtcaccctagggattattcacggacgtgtacacacgtgcgtgcgagcgtgcaatacggccggcggccatgcacgcatgtagaagatgatggagttagtgcggcggcggcgcatgcatgtgaagcaactacacgttgtccatcgtcaagtccgcgtgcaacgacgacaccgaccgcgcgaggctccacaggtcgccgtcgccgacgccgacggtggtcgcgtgcacggaggaggagaaggccgcggcggcggcgctgccgggctcgtcgaagaaggagaccatggtcttggacgcgtcggagagaccgttgagttcgtacgcggccagccggtccagcgcgtcccagtcggcgatccccgacgcgtcagcggcgccgccgtagtcg

SEQ ID NO: 18722 - DNA, 1031 bp, Setaria italica
  Peptide Sequence Number=SeqID_84696
cgttggtgttctttccgatctcaatgcatttcaccgctccaccggaaattccctatgcccctaccgtactccagcttggtagtttccaccgcctgtccagggttgagccctgggatttgacggcggacttgaaaagccacctacagacgctttacgcccaatcattccggataacgcttgcatcctctgtcttaccgcggctgctggcacagagttagccgatgcttattcctcagataccgtcattgtttcttctccgagaaaagaagttgacgacccgtaggccttccacctccacgcggcattgctccgtcaggctttcgcccattgcggaaaattccccactgctgcctcccgtaggagtctgggccgtgtctcagtcccagtgtggctgatcatcctctcggaccagctactgatcatcgccttggtaagctattgcctcaccaactagctaatcagacgcgagcccctccttgggcggatttctccttttgctcctcagcctacggggtattagcaaccgtttccagttgttgttcccctcccaagggcaggttcttacgcgttactcacccgttcgccactggaaacaccacttcccgttcgacttgcatgtgttaagcatgccgccagcgttcatcctgagccaggatcgaactctccatgagattcatagttgcattacttatagcttccttattcgtagacaaagcggattcggaattgtctttccttccaaggataacttgtatccatgcgcttcagattattagcctggagttcgccaccagcagtatagccaaccctaccctatcacgtcaatcccacaagcctcttatccattcccgttcgatcgtggtggggagtaagtcaaaatagctcacattaggtttagggataatcaggctcgaactgatgacttccaccacgtcaaggtgacactctaccgctgagttatatcccttccccgtccatcgagaaagagaattaacgaatcctaaggcaaagggcgagaaactcaaggccac

SEQ ID NO: 18723 - DNA, 276 bp, Setaria italica
  Peptide Sequence Number=SeqID_84697
tggaaatcatctagttcttttttcacttatgtatattcgacagcgttcatactaagtgatgctcaacttctcaactcctgtgatgactgcggtcctgttgattttgttgctggcccaattccttgccttagcaacccagaacgcttcacgtatttgatgcatgctggtttatcaatgctcctccttccacagggctgcaaaaccatctcaaatagtgtaataccgataccccgcagatcatacggggatcgttcaacattcaaacaaagggcagaa

SEQ ID NO: 18724 - DNA, 290 bp, Setaria italica
  Peptide Sequence Number=SeqID_84698
ctcgttgttctgcacccacaccacgaagacgagccccacgaaccctcccagcgagatgcagaaggcgtaccagttgaagaagctcatcttgccgcggagctcctccgggtcgccgccgtcgaactggtcgccgcccagcgccgccgcgcacacgcgcaccgcgccctcgccgagcgggatcacgtacaggcccagggtcagaaggctcaggttccggccgctcaccgccgtgcaatcctcggggtggttggtgatgtcgcacggcggcgggtgcagcgacgggaagtgcg

SEQ ID NO: 18725 - DNA, 563 bp, Setaria italica
  Peptide Sequence Number=SeqID_84699
tttctttatgagaattcagcaaaagaagcacaaattacacttcgcggtgaactaattgcaccagtttctctgaactactatacaacaagaaacaaacaggaatcaatatgtctccgtccacaaatgggcgtgccttaggccttagcctccgctacctggcggaaggatatgaaacagtacaggaagcgttagagtaacctgaggtacctgagcttggatccaagaaaaatgttggtctcgcagcaggaggcagtgaactggtagcatcaccgttgagcatcaccatgacatccgacatcgtaggccggtccacgggattctgctgaacgcacaacagaccaatgttgacgcattttagcacctcggtctctgagtagttcctccctagggaatcatctatcatctctgcaattgttccctcagaccaatgcctccatacgatgcttataatgtcttcgttttgctcatggaagtaatgtccggtgtttctctgccccgttatgatctccataacaaggataccgaaactgaacacatccgatttcgtggagtactgtccacgc

SEQ ID NO: 18726 - DNA, 813 bp, Setaria italica
  Peptide Sequence Number=SeqID_84700
agaagaaagaagaggaggccaagcttgtgaagctggagaggaaggtaaagaaagagaagaaggagaagaaagagaagaagaaaaagaaggcagttgttgtcgaagacgggcatgtttcggaccagagtatagatgttcctgcagaggaccagcagatgggtgatggtactgatgggataacaattgatgggacattcctgtccaatctccagaagcagtttgaaaaggctgcggcagaagctggtatggtcaatagtggtggcagctcaagtgcttcacaagcaacgccagttaatggaaaagtggcaaagaagaggaagcggtcgaaatctgttgataggttgtctgaagcttctgatgctgatgatggtggcgaaggtaatcttcttacccaggacggagagaagagtggtaagaaggtgaggttctcgatgaagaataatttagtttggaaacctcacaatcctttgccaccgcagtgtctgaggctgccaccttcagctactccaagaggaagtgcactaaaaaagggagttcaaccagggcccataaaagagacccctacaccttcgaggaaggctaagctgaaggcaaaatctgcgaagaaggtcttgaagaagaaaccttcatctgctgtgaagcgcttgcggaagttgcagagcttctcagcatgagctcttcgatgtatgacgcaatgatggtcatatggctgtgtcttttttgtctgttttatcattacttaattcttgttcactttgtaggctagtcttatactgtgttgactgctgccatatcatatttgatggatttaag

SEQ ID NO: 18727 - DNA, 1707 bp, Setaria italica
  misc_feature (1643)..(1707): n is a, c, g, or t
  Peptide Sequence Number=SeqID_84701
ccccgcgcctctccgcctccgatctcctcaagctctggaagggcctcttcttctgcttctggcacgccgacaagccgctctaccagtcctccgtcgccacgcgcctcgcctccgccgtatccgccgcgccgtccccggtcgacggcgccgccttcctcgccgcctacctcaccacgctccgccgggagtgggcccacatcgacgtccaccgcctcgacaagttctacctcctcaaccgccgcttcctccaccacgccttcctgctcctcaattccaactccttcgcccccgacgtcacctcgcagatcgtgtccgtcctgtcagataaggctctgctcccggaagctgacaacgtcgctgccggcacctcccggggtcttgggtaccatgttgccgaggcgttccttgacgagctattgcctgtgcttcccgtaagcttgcagacaatggacgccctgttggctccgttcttcactgtgttggagaagtcgtccgatcgggtgatggtgagtaaggtgaaggctggcgtatttgacaggtttctggagagcggcaatcagttgcttgagaaggtgaagaaaggggaggaggtggagaagggtagcgctgaggagaagctcgggaaagctggactgttgtttggattcagcaagaggttcctggatattggggcaaaggcagagactgtgcaatcgaaccggaaggtggtctttgggctgagggatgcatttgtgaaggtggagaagggtttggagctgtctggtgttgagatttctgagcccaaatttgaggctactgaggtgccagtggtgccaaatgcggattgcggcatggacttgtgtgaggaaaaggcaggaaagaagaagaaaaaggccaagaaggctgcattggctgaaggtgagaaagaggaggccaagcttgtgaagctggagaggaaggtaaagaaagagaagaaggagaagaaagagaagaagaaaaagaaggcagttgttgtcgaagacgggcatgtttcggaccagagtatagatgttcctgcagaggaccagcagatgggtgatggtactgatgggataacaattgatgggacattcctgtccaatctccagaagcagtttgaaaaggctgcggcagaagctggtatggtcaatagtggtggcagctcaagtgcttcacaagcaacgccagttaatggaaaagtggcaaagaagaggaagcggtcgaaatctgttgataggttgtctgaagcttctgatgctgatgatggtggcgaagtgtctgaggctgccaccttcagctactccaagaggaagtgcactaaaaaagggagttcaaccagggcccataaaagagacccctacaccttcgaggaaggctaagctgaaggcaaaatctgcgaagaaggtcttgaagaagaaaccttcatctgctgtgaagcgcttgcggaagttgcagagcttctcagcatgagctcttcgatgtatgacgcaatgatggtcatatggctgtgtcttttttgttctgttttatcattacttaattcttgttcactttgtaggctagtcttatactgtgttgactgctgccatatcatatttgatggattatttaatgatttgtcttgtcattgtgtgttcataaaggtnnnnnnnnnnnnnnnnnnnnnnnnnnnnnnnnnnnnnnnnnnnnnnnnnnnnnnnnnnnnnnnnn

SEQ ID NO: 18728 - DNA, 490 bp, Setaria italica
  Peptide Sequence Number=SeqID_84702
aaggacctaaggcagtggaagacgtcgcagcaggagcaggagcaggagcaggagcaggagccgcagccgcagccccagataccgcagaagtccaagctatagtagaagaagctatagccctcggtatcgctctccaaggcgccgtagtccttcgccagctcgtggacgcagctatagcaggtcgccgtagtacaaccacgactgatatgtatctccctatgttaatggagataatgatgccagtactggtgacctgaagcccgtgcctgattatagttctgtgtgagaacttgctccttggtttggctgccaggaacaaattcagaactgtcgtcaactgcatgacttcagttcaggtttacaactttatctagcttattgtgattgtcttgattatgtcattaaaagatattaagatttggatgtattatgcaactaagacattacctttcttctgtgtgttaaaaaggcgtgttctgcttaaaaaaaa

SEQ ID NO: 18729 - DNA, 1079 bp, Setaria italica
  Peptide Sequence Number=SeqID_84703
cgcctccacaccgaaccagaagcttcgcttcactcctccctccgccgccgccgcacctgcagccgccgcgggcgggaacttgcccttggccgtgccgattccacgcgcccgctcccgtcttatctcggcgaaggaatctgttcacaatggcccgcgtctatgttggcaacttggatgcccgggtgacttctggggaacttgaagacgagtttcgtgtgtttggagttctgcgaagtgtctgggttgcgcgtaaacccccgggctttgcatttattgattttgatgacaggcgcgatgcggaggatgcgattcgtgatctagatggtaagaatggatggagagttgagctatctcgtaattccagtggtcgtggtggccgtgatcggtatggtggatctgagtcgaagtgctatgagtgtggtgagactgggcactttgcgcgtgaatgtcgtctgcgtgttggctctggaggcctaggcagtggaagacgtcgcagcaggagcaggagcaggagcaggagcaggagccgcagccgcagccccagataccgcagaagtccaagctatagtagaagaagctatagccctcggtatcgctctccaaggcgccgtagtccttcgccagctcgtggacgcagctatagcaggtcgccgtagtacaaccacgactgatatgtatctccctatgttaatggagataatgatgccagtactggtgacctgaagcccgtgcctgattatagttctgtgtgagaacttgctccttggtttggctgccaggaacaaattcagaactgtcgtcaactgcatgacttcagttcaggcgtgttctgcttaaacgactcggccctctacggctctcagttgtagtctgcatggttttgttcctccattcttcgcacgcctttgtctgcaaacgaatgccaatcttccattactccctgccttcgatgtctcatcaagtcatcatgactgattcttcaccgaagatgctacttcgtcacaaattagtaatatcccttttcttgaaatagttaataaggtttgggtgtactgagaactaacaaatgcagcttgcga

SEQ ID NO: 18730 - DNA, 451 bp, Setaria italica
  Peptide Sequence Number=SeqID_84704
gcagtacataatattaggccacaggaccctgaatttaagacggtgcacaagagattactcaaccctcggtttgctccgtatttcaacaactgtattggagctattgatgggacacacgttccagtcgtggtgccaagtgaaaaggtcatgcaatatacaaacaggatcggtccatgatatgagagtgttcagtgatgccatagaaaaatacggtgacaagtttccacatcctcctacaggcaagttttaccttgttgattcggggtatccaaaccgtcccggttacctatcaccttacaagggtacgaagtaccatctaccggagtttcgtaatggtccaatgcccagaggtatgcaagagacctttaattatgcacattcatcccttagaaatgttatcgagaggtcattcggagttttgtaagatgaagtggaggatactgatgggtat

SEQ ID NO: 18731 - DNA, 475 bp, Setaria italica
  Peptide Sequence Number=SeqID_84705
tttgttaattgttgattcatttgaagctccgctactgaacttgatgtttgtgataatctgaacattcgtattcagtagtgtgaatatctgttgactgataatcagatgtttgtatatgtcagctactcaatcctcccaagtactttacacctcttaatatgaaatgctagtgtgctggaagacttgcttggtttgtttactatacatatggtttcaacaatgaatatgcttcttcgttttactggtcatattatttgggaaatatggttacatgtggtcaggatccatacctcaattgatattgctctcctcaattgttgttgaaccttgatgtatgaatgtttcctgtacgaatgttgttgttgaaccttgatgtatgaatgtttcctgactttagtattttcttttttaactactaacttccagttaggtaaccttgttgtggatgctgaccataggaattcttactgaccat

SEQ ID NO: 18732 - DNA, 597 bp, Setaria italica
  Peptide Sequence Number=SeqID_84706
aggaaattcttactgaccatagctagttgactggtcatattatattgatctggttgtatatgtgtatatgactgtagtttgagtacaaattctttctgaccatagctagaaattcttactgaccataggtagaaattcttactgacctgactatagctacaaattcttactgaacatagcatacaacatacatattgataaatgaagtccttgtatgactctttcatatccttgtgtgtttgcactagattacctatgacaaggcatattggtcagaaccaaatacacttttgttctgtaatttggtcgttgagcaaattagagaagggaattgtcacaaagctactatgtccgcaagaggttacaagctagtgcaagaaaaatattatgctgcaactggattgagacataaaaggaggcagttcaggaataggatacatggattgaaaacattgtacaccttctggaggggcttgcagaaagaaagtggcttgggaaaggcttcaaatggtactgtcacagctacagatacctggtgggagaataacactaaggtaagccacagcttcaaatgctactgactgtggtataaaaaca

SEQ ID NO: 18733 - DNA, 1074 bp, Setaria italica
  Peptide Sequence Number=SeqID_84707
agtagactagaacaaagggtcgcggcgccggggggagcagaggatgcggcgccgcgagaagcagaggtggtggtgcaaaccgtgtcggcggcactggcggtagcagaggtcgtgggcgggcgactaggaacctattcattggttccgcgtctgctggtggtgctgccggcggcggtggacgcggcggtggacgtgtgggtggccgtcgtcgacgtggaggcagtgaccatgaagattatgtgtatgctgacgaaggatacgcgccagaggttgctgatggcgtggaagtgatatttcctggctcttcaaaggatgctagttcttcaactgagttgtcaagtgatgatgaggataatcatattatggaagaatcatctagtgaagatgaaactatggagctcatattgcactgtcgtaagaggaatcgggagttcgtccaaatgatgttaacactcggtatgtactacgaatcttacatacacaaagctccaaggagggttgcatcagtgacgggcattgaatgggtaacagaaacattatcaaatccgacctcttgttataacatgtttaggatgagttgcccattatttaatcaacttcatgatctattagttgactcatatggtttgagagccactcgagatatgtcaacagtggaggccttaggaatgttcctatggatattaggtgcaccgcagtcacttaggcaagttgaggatcgatttgtgaggtcgttggagacaataagccgtacgttcgacaaagtgttaggcactgttcttaagctagcagtacataatattaggccacaggaccctgaatttaagacggtgcacaagagattactcaaccctcggtttgctccgtatttcaacaactgtatttttctatggcatcactgaacactctcatatcatggaccgatcctggccatccactaacaacaaatgtaaacctcatgtcgaagtcacaaatagctaacacattctgtgaggtatacccgtgcctgtttgtatattgcatgaccttttcacttggcaccacgactggaacgtgtgtcccatcaatagctcc

SEQ ID NO: 18734 - DNA, 1479 bp, Setaria italica
  Peptide Sequence Number=SeqID_84708
ctgcatataaacattcatcaggttttattaggaataaggtttgtatgcaggtatattaaagggataatgaatcagcttggccttgcagttcgagaagatgctgttggtaacatatttggccgctgggagggttcagaagctggactaggagcagttggaactggttctcatgttgatgccattccattctcaggaaaatatgacggtgttgttggtgttcttggtgctcttgaggcaattagcttgctaaaaagatctggtttccagccaaaaagatctttggaggtcattatgtttacatcagaggagcctacacgatttggaattagctgcttgggaagccgcttaatggcagggattgaagaactagctcaatccctcagaatggtagttgacaatcagaatgtgtcatttttagatgctgcagaatctgctggctataagatgggcccagaagacctgcatagtgtgttcttaaagaaagacagctactctgcttttatagaattgcacatcgaacagggtcccatcttggagaaggaaggtatccccattggcattgttactgctattgctgctcctgcaagcattactgtggaatttgaagggaatggaggtcatgcaggggcagtgctcatgcctgcaagaaatgatgctggactggcagcagctgagttagcattagcaattgagaaacacgtcctggaatcaggatcaattgacactgttggcactactggtattctgcagctacatccaggagcaatcaatagcatcccaagtaaatcacacctagaaattgatgtaagagatattgatgagaagagaaggaatgatgtcattgagaagatacgccgatctgcaacagagatatcaaagaaccgtggagtcatgctttcagaattcaagatcatcaatcaggatccacctgctctatctgacaaatcagttattgacgctatggaatttgctgtgaaacagttgaacctggagtataaaaagatgattagcagagcttaccacgattcactcttcatggccagagtatcaccgatgggtatgatcttcatcccttgttacaaaggttacagccacaagcctgaggagtatgcctcgcaggaggacatggcaaatggggtcaaagttctagccttgacaatggctaagctatccctggagtgactattgagcatgcggaggaatcaattcatccggtgccaaaacaaacacctgtatacttgccaataataagctgcacggcagcagcaccatcatccctgcacaagacctgcatataaacattcatcaggttttattaggaataaggtttgtcatctggttgatctggaaaaggcggtcctccaaactgtttcacagcaaattccatagcgtcaataactgatttgtcagatagagcaggtggatcctgattgatgatcttgaattctgaaagcatgactccacggttctttgatatct

SEQ ID NO: 18735 - DNA, 2534 bp, Setaria italica
  Peptide Sequence Number=SeqID_84709
tcccacaatggcggcggagacagcagaggaggaggcgccacgagaggtggcggcgcaagtgctgacaagggtcgcggcgccggggggagcagaggatgcggcgccgcgagaagcagaggtggtggtgcaaaccgtgtcggcggcactggcggtagcagaggtcgtgggcgggcgactaggaacctattcattggttccgcgtctgctggtggtgctgccggcggcggtggacgcggcggtggacgtgtgggtggccgtcgtcgacgtggaggcagtgaccatgaagattatgtgtatgctgacgaaggatacgcgccagaggttgctgatggcgtggaagtgatatttcctggctcttcaaaggtaattatctaaacctgaagtcctggaatgttgaatgttgattcatttgaagctccgctactgaacttgatgtttgtgataatctgaacattcgtattcagtagtgtgaatatctgttgactgataatcagatgtttgtatatgtcagctactcaatcctcccaagtactttacacctcttaatatgaaatgctagtgtgctggaagacttgcttggtttgtttactatacatatggtttcaacaatgaatatgcttcttcgttttactggtcatattatttgggaaatatggttacatgtggtcaggatccatacctcatattgcactgtcgtaagaggaatcgggagttcgtccaaatgatgttaacactcggtatgtactacgaatcttacatacacaaagctccaaggagggttgcatcagtgacgggcattgaatgggtaacagaaacattatcaaatccgacctcttgttataacatgtttaggatgagttgcccattatttaatcaacttcatgatctattagttgactcatatggtttgagagccactcgagatatgtcaacagtggaggccttaggaatgttcctatggatattaggtgcaccgcagtcacttaggcaagttgaggatcgatttgtgaggtcgttggagacaataagccgtacgttcgacaaagtgttaggcactgttcttaagctagcagtacataatattaggccacaggaccctgaatttaagacggtgcacaagagattactcaaccctcggtttgctccgtatttcaacaactgtattggagctattgatgggacacacgttccagtcgtggtgccaagtgaaaaggtcatgcaatatacaaacaggcacgggtatacctcacagaatgtgttagctatttgtgacttcgacatgaggtttacatttgttgttagtggatggccaggatcggtccatgatatgaagaagtgttcagtgatgccatagaaaaatacggtgacaagtttccacatcctcctacaggcaagttttaccttgttgattcggggtatccaaaccgtcccggttacctatcaccttacaagggtacgaagtaccatctaccggagtttcgtaatggtccaatgcccagaggtatgcaagagacctttaattatgcacattcatcccttagaaatgttatcgagaggtcattcggagttttgaagatgaagtggaggatactgatgggtataccaagttttccaatgcacaagcaaagcaaaattattgtggcttgcatggcaattcacaattttatccgagagaatagtgttgccgatagggaatttgatttgtacgattgtgatgaaaatggtgtcccaatgcccggaacttcaaaccgcggaggaggtgagacaagtacccaagtagaagaagaagatagcaacatgaatgcatttcgagatgaaatagctcatgccttgtacaataggtctagataaattgatttcaatgttgtaatgataatgtatttgtagtttaattttggagttgttggacaaggcatgagctatttcatctcgaaatgcattcatgttgctatcttcttcttctacttgggtacttgtctcacatcctccgcggtttgaagttccgggcattgggacaccattttcatcacaatcgtacaaatcaaattccctatcggcaacactattctctcggataaaattgtgaattgccatgcaagccacaataattttgctttgcttgtgcattggaaaacttggtatacccatcagtatcctccacttcatcttcaaaactccgaatgacctctcgataacatttctaagggatgaatgtgcataattaaaggtctcttgcatacctctgggcattgtaccatttaccggagtttcgtaatggtccaatgcccagaggtatgcaagagaccattacgaaactccggtagatggtacttcgtacccttgtaaggtgataggtaaccgggacggtttggataccccgaatcaacaaggtaaaacttgcctgtaggaggatgtggaaacttgtcaccgtatttttctatggcatcactgaacactctcatatcatggaccgatcctggccatccactaacaacaaatgtaaacctcatgtcgaagtcacaaatagctaaaca

SEQ ID NO: 18736 - DNA, 2266 bp, Setaria italica
  Peptide Sequence Number=SeqID_84710
ccttttcctccccaccacgccgccttcctttcgtcggctcgtcgccactccgccgccgctccctctgccgcgccccctcagccgcgcctcctccgccgtccgtccctcgcgccccactccacgccgcgccccactccgccccagcttcagatctagaagcagcgcgtcgtcatggacggcaacggcgacgaccacttctcgcagccggatccggccttcccctccggcgccttcgacctgtactcccaggcggattcgtatcaaggaccacgatccgggatgcaggccttggatctgaactcccaggtcgacgagttccccgccttcagctcgtacgccgacatcctccggagtgaccacggcggagttgctcgagggggcggtgctcgcacacccgggcttcgcgtggcccacaatggcggcggagacagcagaggaggaggcgccacgagaggtggcggcgcaagtgctgacaagggtcgcggcggccggggggagcagaggatgcggcgccgcgagaagcagaggtggtggtgcaaaccgtgtcggcggcactggcggtagcagaggtcgtgggcgggcgactaggaacctattcattggttccgcgtctgctggtggtgctgccggcggcggtggacgcggcggtggacgtgtgggtggccgtcgtcgacgtggaggcagtgaccatgaagattatgtgtatgctgacgaaggatacgcgccagaggttgctgatggcgtggaagtgatatttcctggctcttcaaagattacctatgacaaggcatattggtcagaaccaaatacacttttgttctgtaatttggtcgttgagcaaattagagaagggaattgtcacaaagctactatgtccgcaagaggttacaagctagtgcaagaaaaatattatgctgcaactggattgagacataaaaggaggcagttcaggaataggatacatggattgaaaacattgtacaccttctggaggggcttgcagaaagaaagtggcttgggaaaggcttcaaatggtactgtcacagctacagatacctggtgggagaataacactaagggtcccaaatcagaatgtaagaagttcagatatggtgttccagagtacatggaccatcttgaggagatattccatgaggttgtagtagatgggtctacctccttcataccaggagaagaagatgaagaacctgaagaagaagatgaagaacctgaagaagaagatgaagagcttcctggagagcaggggttccctgctgattatgatgacagccctggtagtactaatagcagaaagaggcttagtagcaacagcactaggtccactgcctcaagtcctggaaagaagtccaagagtcctatggttcaggttatggacaagatgttgaataaatgggctgagtctgattctaggcaccagaagatactgaagaagaaggtggatgtcaaagctagcaaggagatgcaggaaagagcagagttgaagaagtgtcaacaattggccatagaatgtggtgctgcagctgatagtgtagagtactatgcttgcctgagcatttttaaagatggattgcacagggagttcttctgcaatatcccaagtcctgaagctaggctggttttcctgaagagatggtgcgaggaacacaatatgtactagtttagggcctgttgaactaagatgtttgctagtttagggcctgttgaagagacaggtctaagagatgtttgctagtgtgtttgaaatgagactgattgcactgagttggtccaactgagttgtttgaactgtgaaccatgttgtttgaatcaaattagtagttggttagaaattagagtatctgttgaactgtgaaccatgttgtttgaataaaataagtagttggttgaactgagttgtttgaactgtgtctgatatgcaaacctaaatgagtactaaccttttgcattgtttatgatttgggatgctagttcttcaactgagttgtcaagtgatgatgaggataatcatattatggaagaatcatctagtgaagatgaaactatggagctcatattgcactgtcgtaagaggaatcgggagttcgtccaaatgatgttaacactcggtatgtactacgaatcttacatacacaaagctccaaggagggttgcatcagtgacgggcattgaatgggtaacagaaacattatcaaatccgacctcttgttataacatgtttaggatgagttgcccattatttaatcaa

SEQ ID NO: 18737 - DNA, 291 bp, Setaria italica
  Peptide Sequence Number=SeqID_84711
gtacagagagagggagaaacggcgcgaaggaaccggaaccagatgagccgcgcgttcacgtacgtgatcctgggcggcggcgtggccgcgggttacgcggcgctcgagttcgtccgccgccgcggcgacgccgccctcggcgagctctgcatcatctccgaggaggccgttgctccttacgaacgtcctgcgttaagcaaaggctatctgctaccggaaggtggtgctcgcctcccagcatttcatacttgtgttggagctaacgatcagttacttacagcagaatggtac

SEQ ID NO: 18738 - DNA, 966 bp, Setaria italica
  Peptide Sequence Number=SeqID_84712
tgattatgtaataagacattaatcctccctttcgttgttgactgtctttttccccccttttgaattccaaaaacaaatcaaaatgcgctgctcctgctttaccaacaaccacacttagcctagcgtgcaatggcccacggcggatgtccaccaccaacaagaaggttcattcccgttccagtcgtcgggcgatgcatctacctgtaacgtcacagtcatatatcgcaagaaaaagctatattgctggttacctctccatgatcacacaattctctgtaaagcgagccagccatagacgccgggcctgacgtcgtctatctgccgcgagagagagagggaaggggtaagctggttggagaaggccagagcagaattattgaagaggaggaggaagaagatgcaggactgggcgccggtgttcatctcgttggtgctcttcatcctgctgtcgccggggctcatcttccagatgcccgccaagtcgcgcctcttcgccctgggcaacttccagaccagcgtcgcctccatcatcgtccacaccatcctcttcttcgccctggacgccatcttcctcatcgccatcggcgtccagatccagctcggcagctagctacccaggcatgcaagctacggtatccatctctgatgatcatccgtcatcgatcgatccatcagatgatcgatcgagctaggtgcatcgtcgtcgttcctccgatgattcgtgcggtgtatatgtatgtatgggcatagatatatgctggcctttaatcaaggtcaattcaaattgctgctttgttttcaaggtcatctgagattactcataaggcctttgtgtgcgtacagtatgggtatatacgttggtgtcgcttttttgaaagggcaattggtgatgctgctttaatttagtcgttcctggccattttttaggttcagttacttgctatatgtagacttgtatacatgtaa

SEQ ID NO: 18739 - DNA, 547 bp, Setaria italica
  Peptide Sequence Number=SeqID_84713
cgtggcgcgcgacagcggcgggtccctcgggttccccgccgggatctgccccacggtctgcgtcgggggacacgtcagcggcggcgggttcgggcccatgatgcggaagcacggcctcgccgccgacaacgtggtggacgccgaggtggtggacgccgagggtaggctcctggaccgcgcggccatgggcgagggcctcttctgggcgctccgcggcggcggcggcgggagcttcggcgtcgtggtctcctggacggtgcggctcgtccccgtgccgcccgtcgtgtccaccttcaacgtccgccgcctcctccggcgcggagaccggcggcaagccgaatccaccgtgcgcctcctgaccaaatggcagcgcgtggcgcacgcgctccccgacgacctgttcgtgaaggcggcgattgaacccaagctcgacgcccccggcgagcggcgcccactggtgaccttcaagtcgctgttcctcggcaactgcagcagcatggtcgccgagatgagcacccatctccccgagctcggcgtaacgcccagc

SEQ ID NO: 18740 - DNA, 565 bp, Setaria italica
  Peptide Sequence Number=SeqID_84714
caattgaacgatttacagcagctgcaaagatacaagcaagaagaaaaataacattacggaagatttacactcgccagtcaccagaatcttccaccagcacggactggttgggcatatgtttgaaggagaccgtctataatctgtagaatgtgacggacgaccggcaagagccaacataacgagggcgccagcttgcaaacaatgccacagtggagttccagcctgattttagtcccatcagagcaaaggaggatgtcagaacttatgggtcatcgtgtctggctgtgttataagatgaacctagagtccttgcattgcatcccttcgcaggtacatcttcctagaactttgccttctcccaagcatgctcagacaagaacaccagagttccatcggttaaccacaccggttcagagatattcattcggatcactgttagcatcctcttcttcgtcgctgctgtaagtttgtaaataggcctcctccccttcatcctctacatcatcatcatccgatgacaggtcagcttcaactgtttgaagtagcttcacatacctacctttta

SEQ ID NO: 18741 - DNA, 709 bp, Setaria italica
  Peptide Sequence Number=SeqID_84715
attccgtgctgttagttatggcgatggagtcccaagcagaggcacttggtcagttagcaaccgatgatctagaaggaaagtttgcattgctggagacttcatctgttgatgatgatcttgcgcaaatgaaaagagaactatccggaagttcatcggtacgtatttttattggatgctcagattatcagtcggtaacaaaatttcaagctaatgatatatttcccattgatttttgtctgttttgtcttgcgcatgataatgaaatgtgatctactttgatgtatatgagacataggacatacaaaagttgttgttcagcatacttatgggcccctctaaaaagtattgatgttttctcatttcatttctataatctcaattaatcttcagctttaaaagttgttttctgccgtgttcatcatactgacataaatttgtacctagtatatcatgccatactgttgaacaaaacctgcaacttgacattatgtctgttgattttcatcctcggaacaagctaagtgaataattcattaccatagagcaccaacttctttctgtgtgtttttggttttcctttttccttcttacaaacatttatttgtgtcaactacagaaaggggagcttcctccgggtagaacagcagtgagcaactcaggtgcggctcgccctttccccgacctagagatcgagagtgagctaaatgag

SEQ ID NO: 18742 - DNA, 1621 bp, Setaria italica
  Peptide Sequence Number=SeqID_84716
tagggttagtacgaggggtgcgatgagcattttggaccgtgccaatgagttgagttattttattatgatatggccggcgggtgggggggcttaactgcaaaataatcccaccactaaccctatccattggattagcatcttgtggccttgattcatagtttccaaggttgcacggggtagatggtttgcactagatacgttcccatttaatataacccaactgatgagacaataatcctgttattgctaaaaggtataaataatgctatagatgtgaagatctatcatctatatctagctcagtttatgatagcatggtgcttatgcaataaaaaaaaaaaatacccccgcttcgttctcggctaaccccccgcccgaatcgatggagattagggctccgccgacgagcctgaggctcgcgccgccgccggcctccgccagcttccgccggaccggcctcaagacctcctttctcaacggccgcgtttcacttagagttgtgcacatacgacaatcaaacgtcagcagatttaagtgcaatgccaacctctttgatagactatctagggttgtcaagtcctatgcaaatgctgttttaagcacatttgaagaccctgagaagatactagatcaggcggttctcgagatgaatgatgatttaacaaagatgcgtcaagccactgctcaggtcttggcatctcaaaagcggcttgagaacaaatacaaagctgctgaacaagcttccaatgattggtatcggagggctcaacttgctcttcaaaagggggatgaggatcttgcccgtgaagcccttaagcggcgtaaatcatatgctgataatgcaagctccttaagggcccagcttgatcagcagaagggtgttgttgaaaatttgatttcaaataccaagcttcttgagagcaagatagcagaggccaagcagaaaaaggataccctaaaggcccgtgctcaatcagccaagacggcaacaaaagtgagtgaaatgttgggtaatgtaaatacaagcagtgccctttcagcatttgagaaaatggaggaaaaagttatggcgatggagtcccaagcagaggcacttggtcagttagcaaccgatgatctagaaggaaagtttgcattgctggagacttcatctgttgatgatgatcttgcgcaaatgaaaagagaactatccggaagttcatcgaaaggggagcttcctccgggtagaacagcagtgagcaactcaggtgcggctcgccctttccccgacctagagatcgagagtgagctaaatgagctgcggaggaaggccaaagagtactagattccaccactcgtgtcgattcagcaggcctgacaaaaatctcgccccccagaatattgtatagccgcagatttctccaatgcgccattgaaactccagtgcaccttgtttgttaacgagtacggaatgttgcaaaattctcggcattaccccctacccctgcgagtgacatttgtacagttatccataaattgttgtaaatcactgctcgccctagagccttttttgcacacacaatatataaattcgaaagtctgaagtttccaaaaaaaaaaaaaaaaaaaactaagagacacg

SEQ ID NO: 18743 - DNA, 396 bp, Setaria italica
  Peptide Sequence Number=SeqID_84717
tcgtacttggctggttaatctgaagtctgatcatcaaagtattcacctgagtggaagtactatgtttagatattggatgtgctttgaacctctcatctctctgcacaccctatctagcaaaccaagaaaatctctcatgatgataaatatgtggagaaggttggactcattcttgccaatgtctccatgataatactctgtgagttctctgacctgctgtaggacctcggcttcagcaactttgagctcctgcattgtattctctgcatgagtttggaatgatctcatgcaatgcaggaagttctggttcctgtcattgcaggtggggtcggttccttcaagccttcttagttgagccagtccttgtgaaagatttgagattgagtctttttaagg

SEQ ID NO: 18744 - DNA, 349 bp, Setaria italica
  Peptide Sequence Number=SeqID_84718
cggtgatcgtgacgacggcgagggtggcgaggcctccgacgacgacgagggcggcgccgcgtcgcggggcggctccggccggccggtggttgaggtggtggactgcgccgagcgcgggtacacgctggtcaacgtgcgctgccgcgaccggcccaagctgctgttcgacacggtgtgcaccctcaccgacatgcagtacgtggtcttccacggcaccgtcatcgccgagggctccgaggcctaccaggtgctctgcctttgcctctgtctctgtacttggcatctctctcgtcgcttgcatcatgaaactgtttgcatcgcgtcgtgctggtacttggctccagcagaa

SEQ ID NO: 18745 - DNA, 457 bp, Setaria italica
  Peptide Sequence Number=SeqID_84719
gttttgaagcagctcgctcgagagcggcaaaaggtctctgctctgctgctgtgctctggttgcggtagttacggacttgtgactttacgtttttgcgactcgcaaggcgtgtgcgccttcgccagccgccgaagatggggctcggggcgtttttaacttgagcaggcgtatcgaaactgcgtgccccccggactcttcttccacgattccatttgacctctaccgcgcgctcctcagccagtcctcgcccccctaccaggtcgtccgtcgacgcccccccgacaatctctcacgtcctttttttctctgccgctaccctactgcccacttggatcggtcctttgcttgtatgagattctagccgccgccctgtagaaaagagaaccccaatctttgttgttcctggcctgacgcagtgccggcgagatccggtcccggaatcgccaaggctgggaag

SEQ ID NO: 18746 - DNA, 1108 bp, Setaria italica
  Peptide Sequence Number=SeqID_84720
acggacctactactctttcctagcggtgatcacagggcacccggcggcgcccttggccaggccagatcttcgtcgggcgcttcgacggcgacgagcatccgacaccgccagattgcagagtgaaggttttcttatttctgttcctgtattttggagtttaactctacaagcttcggaacatgttcaagaatacatttcagtctgggttcctttccattctttatagccttgggaccaaaccattgcagatatgggacaaggaagttgtggatgggcacattaaacggcctcaggatgaggatatccagtctaatgtacttgaaatcattggaacaaatgtgcagtcaacttacatcacatgcccagctgatccttctgccactcttggaatcaagcttccgtttctggccattattgtgaaaaatcttaagaaatacttcacgtttgagatccaagttctggatgataagaatgtccgtcggcgatttcgggcatcaaattttcaatctgttacaagggtgaagccatatatctgcacaatgccgttgaagcttgacgatggctggaacaacattcagttgaacctcgctgatctgacaaaaagagcgtatggcacaaactacgttgagacgctccgggtgcaagttcatgcaaactgtcggctccgcagaatttatttctcggatcgcctctactcagaggaggagctgccacctgaattcaagctctaccttccaatccaaaaatcataggaatcggagcaagcatggtgagactttggtcaccagaaggcagaagccggaccacatatcgtttcgacgctcgctagtgcacagctgcgcattttgccttcctgagaccaagaaaagtgtcggaatgtttttgttggtttgctgattggtgtccactgaacgactaggctcctgtgctcagagcaaggtgactggctgtggtcttacccaatgacctttgtgtatgtgacgacttgaaatgttaatgggaaccctttatgtactggtccttctggtccagagcaaaaaccaacgcttactggccgctgccttggtcctaattttaaacgttagtactttactttactaaaaaaaaa

SEQ ID NO: 18747 - DNA, 541 bp, Setaria italica
  Peptide Sequence Number=SeqID_84721
caagctgctcaagccgcacatgcggtacacgctcaagatcaacgcgctggcgcggcagatcctcatcgccggcgatggcgtcatcgagtccggcttcacccccggccgctactgcatggagatgagcgccttcgcgtaccgggagctctggcggctcgaccaggagggcctccccgccgatctcatcagaaggggcatggccgtggaggacccgacgaagccgcacggtctccggctgctcatcgaggactacccgtacgccaccgacgggctgctgctgtggtcggccatcgagcggtggtgcgacgcttacgtcgccacgtactacccgtccgacgagtcggtgcggggcgacgccgaactgcaggcgtggtacgacgaggccgtgcgggtggggcacgccgacaagcgcgacgcgccgtggtggccgcgcctgtcgacgccggcggacctggcgtcgctgctcacgacgctgctgtggctgacctcggcgcagcacgcggcgctcaactttcgggcagttacccgtcttgggtcggtc

SEQ ID NO: 18748 - DNA, 1006 bp, Setaria italica
  Peptide Sequence Number=SeqID_84722
caattgctattgaacttagtcttcctccaagccagccaggcgagcctcggctaagcaaggtcctcacccctccctctgatgctaccaccaactggctctggatgcttgccaaagctcatgtcagctccaacgacgctggtgttcatcagctcgtaaatcactggctgaggacacatgctatgatggagccattcatcttggcagcgcaccggcgaatgagcgctatgcacccgatcttcaagctcctgcacccccacatgcggtacacgctggagatcaatgcgcttgcacggcagagcctgatcagcgcggacggcgtcatcgagtcctgcttcacccctggccctgtctcaggcgagatcagcgccgcgtactaccgcaaccactggcggttcgaccttgagggcctcccttccgacctcgtccgcaggggagtggccgtggaggacgcgtcgcagcctcacggcatcaggctcctcatcgaggactacccttatgccaacgacgggcttctgctgtggtcggccatccgcaactgggtcgagtcgtacgtgcagctctactacccggacgccggcacggtgcagaacgacgacgagctccaggggtggtaccacgagacggtccacgtcggccacgccgacatccgggacgcgccgtggtggccgtcgctctcgacgccgagcgacctcgcgtccatcctcacgacgctcatctggctggcgtcggcgcagcacgcggcgctcaacttcgggcagtacccgctgggcggctacgtcccgaaccgcccgccgctgatgcggcggctggtgcccgccgagggcgacccggagcacgcgcacctggtggcggacccgcaccgcttcttcctgtcggcgctgcccagcctcacgcagaccaccaccttcatgaccgtcatcgacacgctctccacgcactccgccgacgagcagtacctcggcgagccgccccgacgaggcgtggacggccgacccggccgcgctgg

SEQ ID NO: 18749 - DNA, 1672 bp, Setaria italica
  misc_feature (1)..(52): n is a, c, g, or t
  Peptide Sequence Number=SeqID_84723
nnnnnnnnnnnnnnnnnnnnnnnnnnnnnnnnnnnnnnnnnnnnnnnnnnnnttttttcaaagagcaaggatagatgtcatagctgtccaacacagctcaacaaattacataacagtaagaacataacatctgactccccgaaaataaacatttgtatggaaggtatactgctactgcgaatatcttaagcatcacgatggttagtgatggacaaaaaacacaagacgccatagacatctcgagataagcccccagatgggtttgaaccccacacatgatgaggcgttatcatctaatatgggcagttctttgggaggttcctgatcacattgctcttcataccaatcttggttcgcatcgtctcgaccccgctcttgttcattgctcggagaaccttcagtctcaccatttgctccttagactgaactgtcaccaagcccatgctcttgtagctggaagccagtgaaagtgcaagagcacgatctgtagcaacagaaggccgcggcttctggcggtagtagcggataaattccctagaaccaagagttgtcacacgagttcctttctcactcttgtttgttattactagctcagacccaccgcttccaagctcaaagttgctgttagcatcatcagcagcaatcaactgcttgccttccacatcaacataactgctgctgtaatcatagaaatcctcgaggtcagcatcttcatcatctccaccatctccataccgcaatttgcaatgaccctttgcatccatgtgtttcctgacagcctctagacttatgaagggctggcatctgtcattacagtagaggcagataaaatcacgcttcaccttcagtccgacataagtaagaagaccactgggatccttcaagtattcactgtcaggtatgaaaaacccgtgcttcttgtgcatatggaccatgcagtcttctatggtgtcatgcttgagatcacacatgaaacacaacgagatatccaactcttcaagatcatccatgtcatcatatgatttggatgaccgctcatctatttgcatgcttgaagtagaatcatcagccaactccatctcatttgggtcaacttcaacccactcttcctcctcatcttcatcttcatcttcatcctctactgcagatggagctctacgtggaactcgctcaggaagaggtttgactatcgtgattccagcaatggaggcattgggctcctgagaggctctcataagatgtgatcttgagttaagatgctgttcatgagcttttgagctcctgtactcctttccacagagagcacaactgtaaagcattggggtgcttgcaggcttgctcccctctgctaaagcagcttgtctagccaaaaacagagcctcagtcacaccaggaactccagccaccttgcgcttgaggttgtagcggtgccactcggagcggtagtggagccgctgctgctcctcgtcgtcgaaccccgcgttgcacgcgttgcaggtcaccgtcggcatcctcgcgccgctctctcttcccttccctcgcttccggggttcggcttggcacgggcggggaaggggctcgcttcgcttcttcttccggtgccgcttcgccttcttcgcggcggcggcggcgcgttggtgaagagttgtgggagaagtggcggcggggcggg

SEQ ID NO: 18750 - DNA, 306 bp, Setaria italica
  misc_feature (278)..(278): n is a, c, g, or t
  Peptide Sequence Number=SeqID_84724
cacctcggcgtcgtcgtcctccccttcgatctctcctcccatttccacgcggaggagaggcgtcggcgcaataaaggcggcgcctttgctcttgcccctccccggcatgcggagctagcctcgtggctgtggcccacgccatgcagactaccgggcccgcatcgccggagcagccgccggccgtggagccggccaaggccgaggtgaaggtggaggagggggcgggggtgaaggatgaggaggtggtgaaagcggatggcgcgggtgaggagggggancaggatgaggagaaggggagggagggga

SEQ ID NO: 18751 - DNA, 356 bp, Setaria italica
  Peptide Sequence Number=SeqID_84725
ttcctccaccagcctgggaaacgagtcgcagaaggttctggcatcaactgcagcaggcctaactgctggaagatcagtgcccacacctggtgtgagaaagaaaacacagcccaccaacaggtggtgtatggtttcctcatcctgatcacaaaaggtgcaggtctcaggatgagcgagccccctcttagccaactgatcagccatccacaattgattcatgtggaaaatgggatccataggtgaaatgttattcttagaaagtggcatcgaaattcttgtaatagcatttagattcaggagggggcacgttcagttcgaaatggagagaatgatcaaatatgatctttagaagctca

SEQ ID NO: 18752 - DNA, 1207 bp, Setaria italica
  Peptide Sequence Number=SeqID_84726
caaaaaaattgaaactatgcacatccatagtgtgtctacagaatttactttgttgcaaaagttcggtttggagttgattactcacaagcaaataagggaggatttcatttcaccccaaaaatgtcctttgtaaatcaactcagtgttctcactatcagatgtcgacatttatatcccccacactagttcgtaacttgaccatacaaattctctcccccacactagttcgtaacttgaccatacaaattctatccggttgtcccgaacagtatctgcatcgccacctattggttgcaaactaaaagaaaactggaaacgagaggcgctcaagagaggacagccatcacgtccgacgctctcaacacgatgtagcccgtgccgtcagctcccttgaactcgctacctgcgtacttggagtacagaacggtgctgccagccggcactgacagtggctgcctcttgccttcgtcgtcaagagagcccggcccaacagctacaactgttccaatggatggcttctctttagttgtttcagtaaggataaggcccccaggagttgtctcttcagcttctgcaaccttgatgaggacacgatcattgagaggcttcatatccttcacatcatcggtctcaagaataccgatgatatcgtcctcttttagaatgagatgcttcgagtcattgaattcaacctcggttccagcatacttcgagtacacaacttctgccccagtctttatgctgacctctattttcttatccccaatggtccttcccgctccaacagcaacaacctcacctccttgcggtttagtctgcgcggtcgatggaagcaaaatgccaccaaccgtcttctcctcggcagcgccaagcttcacgagcaccctgtctcccagaggcttcagtgaagtgtactttggggcgacaacggtggcagcccggacgacaaggctacgggccgagcgcctcgacgagcagaccctgagagtcgccaggctcttgttcgtgaaggccacggcggcgactccggcgccagagagctgcaccgacgacattctcgtgtgctcgcggaacgacggctagcttgtcttcggagctggggcctgaggctgcgctttggaatccggctgccgtgcgcgagaagcgagttgggggcagacgaggaggtgaggagataaaccctatgcgagagagcagagcagcagca

SEQ ID NO: 18753 - DNA, 670 bp, Setaria italica
  Peptide Sequence Number=SeqID_84727
gaaaacaaagaccaattactgtagtttctagactttcagctgtaaaagaaagatattcccgatacgaatttgacctatcctctcccactcttcacgagaatgatcacatcttattatctacttgtatggctttggtatctctgaactaggcactttggaatttgtttgcaactgttcttatccagaccctatctttctcagtatatgcataatttgcattggaggccaacaggatgacaccttcagtttttgtttcaccattagctagatcaggactcctaagaactggttgagctaacaaagaaagaatcccatctggcagaatcttcgcaagctgagaatccgaggaattagggaagtacaaggcattcctcaaatcattaagtcctacttgctggatctgacttttgaaccactcaatcatggcatactttgaagtatttgcaggtggatcccagtatcctcgtacgcacaacacatccccaattgctatgagcacagaagtggtgtttgtattccgcagcaggacatacgatgcccacgccaagtcctccttctgcgccgctgacaggttctcagacatgacgaacacctgcctgctcctgtcgggcaacggcacacggttggcagcatcagcgccctccaggaacctcccgaggaacggcagcgt

SEQ ID NO: 18754 - DNA, 493 bp, Setaria italica
  Peptide Sequence Number=SeqID_84728
tgaaggacactgaagagacctcggggaaatccggtgccaataggctcgggaagtcttgtgccaattagcctttgccacttgaacgtagagttcccaatgttctatggaagaaaacagccaattctgtagtttcagactttcagctgtaaaagaagatattcccgatacgaatttgacctatcctctcccactcttcacgagaatgatcacatcttattatccgcctgcatggctgcatgaagaaaatagaatcatgtgaggaagtgctatttcacactgacaagatatgagtgccaataatgagctccctccaaaccaggcaataactgaataggactacagcgacacatgatagagatggagattcctattactactcttaaagatatgtctttacatcaagatacatcacaagattcaacaaacattgtttgtgtccccaaagaacttctatagtaacatcattgttagtatttgcatttttagagcagtt

SEQ ID NO: 18755 - DNA, 610 bp, Setaria italica
  Peptide Sequence Number=SeqID_84729
ttttttttttgtttttctagcatttaaacaactatattcagctattgcgtgcatacaaggacgtacgtgcattttggcaatagcgtgtcacatggaaggctttgtatgcaccttaggctcaaaggccaggggaaagtgatttcaagcagctcgacatgatgggctcacaagaatacaaagatagctcgggtcagggcgagacggctcttgcttctgtagcgattagcgaatgaatggctagtgagctgttcctgttcatgatgaaggacactgaagagcctcggggaaatccggtgccaataggctcggggaagtcttgtgccaatagcctttgccacttgaacgtagagttcccaatgttctatggaagaaaacagccaattctgtagtttcagactttcagctgtaaaagaagatattcccgatacgaatttgacctatcctctcccactcttcacgagaatgatcacatcttattatccgcctgcatggccgagcaccattccacagcaccaatgtttgacatgtggatccacgttcagacttcagagtgtaaatccttggtccatttcagtacaagaagcagctggcattaccatttgtactggtt

SEQ ID NO: 18756 - DNA, 549 bp, Setaria italica
  Peptide Sequence Number=SeqID_84730
agaaaaggcttaaactctctaatcattctgggggcctcgaccatttggaagcaccgcaatgactgtgttttcaacggtgctaccccaaacatcacaacagccctgatgttggctaaggatgaagccaacttgtggagcatagcaggagctaaagggatcaccttgctcactgagtgggttaattccctggttttaatggtcaggtccttcttaaggtttttaaggcaattaggtgttttcagtggccttccaatgtgtgtgtgtgtgtgagagtgagtgcctctgtgggtgtgagtcgatgtatgactccttcttctacttatatacaatgatacacagttcccctgcatgttcgagataaaacagtcatagttgaaaagaagttcaaagagacccaaccaacactgaacagaatatgtgctgtttaagccttaatgtatatctcggtgtcgcacatatcgcaaacaagaggttactcaatagtagctatccatgcattttctaaaagcatgaggtgcgttcagaagagaaaaggggccatcctatgcc

SEQ ID NO: 18757 - DNA, 1269 bp, Setaria italica
  Peptide Sequence Number=SeqID_84731
aaagagtttcctgctcctgctctggcattagtagatgttcttctttcagtagacccagcagatcgtggaactgcgttttctgcattgcaaagtgagttttttacaacaaaaccatatgcttgcaatccttcaagcttgccaaggtatcccccaagcaaagagtttgatgcaaaacgtagggaggaggaagctcgaaggcaaggtgtcgctggaggaaagcaacataaacatgatcctgaaagaagaactagagaatcaagagcagtccctgcccctgatgcaaatgcagaattagtgtcatcattgcagaaaaggcaagcccaggctaataccaggagcaggagtgagatgtttaatccctgcaaagaagactccgcatctggatttcgaattgaaccacccaggccaactcctgttactgagtcttctgaagactcacagcgtgcctacccaaccagaatctttcattctgggcctttagttaatcagaatcacccatcaaagggtggaggtgtcaaaaatggtgaacttcaggtccctggtgttgcaaaccatcctgtggttgtgtcaacaagatcgagtctccgaacggacgatagcagccggacaatggctgctcaagctgaggcatttgctcatgggcggaggctgtctgagtccatcaacgagcatttcagtaacagtgggaagtacgatcaagtgttcccaaagaaggatgaccggagcagcagggttgatggagctattggctatggatcgaagggcaacaagatccaccattctgggcccctgacctgcccttcaggcaacgtcgacgagatgctgaaggagaatgaccggcagatacaagaagtgttccggagaacgcgggtggagaagtctagagcgaggagggaccatggacatcaccatggcggcataagacctggcgatttcggtgccatcccggtgttcccttccagccgctccagttaccaggctgtgcagcagtgagaacaggtaaagatgaaggtgtgttgggacttggaatcgccggtgatttccgattccctccattcccctgctgttttcaggggggatatggataaatagcacgctacgctatgtacagggaggaaggactagctgtgtagtgcctgctcgtattggagaaactttgaaggagagaacgggggaggtgatttgtttattggcggcaactcgagcgtctttatgacgaagtcgtgtatcatcagggtggggtctccttttgaatgtgctggaatggta

SEQ ID NO: 18758 - DNA, 1293 bp, Setaria italica
  Peptide Sequence Number=SeqID_84732
gcgaggacggggagcgggagggaggaggctctggagaggaggcgggcgatgatggcgatggcggcggcgtgccaggtcaggagtccggtgcccagggcggtggagggggagcaggtggctgcggggtggccgccgtggctcgtcgcagtcgccccggaggccgtgcgcggatgggtgccgcgccgcgccgagtcgttcgagaagctcgacaagattggtcagggtacatacagtaatgtttacagagctcgtgatctcgaaaaagagaagattgttgctttgaagaaagtacgctttgataatttggaacctgagagcgtgaaatttatggcgagggaaatcctcattttgcgtcggcttgatcatccaaatgttatcaagctagagggtcttgtaacatcaaggatgtcctgcagcttatatcttgtttttgagtacatggagcatgatctagctgggctagcttctttccctggagtaaaatttaccgagtcccaggtgaagtgttacatgcaacagctcctccgtggtcttgagcattgccacagtcgacacattctgcaccgtgacattaagggttccaatctcttgattgacaaccgaggcatattgaagatagcagattttggattagcgagtttctttgatcctgaacaacggcaccctttgactagtcgtgttgtcactctatggtataggccaccagagcttttgcttggtgccacaaattatggtgtttctgtagatctctggagtgctggctgcattcttgccgagctatatgcaggcaagcctatcatgcctggtagaacagaggttgagcagttgcataaaatatttaaactctgtggttcaccgtcagaagactattggaggaaatctaaacttccccatgccaccattttcaaaccacaacacccgtatgcgaggcgtgtatcagaaacatttaaagagtttcctgctcctgctctggcattagtagatgttcttctttcagtagacccagcagatcgtggaactgcgttttctgcattgcaaagtgagttttttacaacaaaaccatatgcttgcaatccttcaagcttgccaaggtatcccccaagcaaagagtttgatgcaaaacgtagggaggaggaagctcgaaggcaaggtgtcgctggaggaaagcaacataaacatgatcctgaaagaagaactagagaatcaagagcagtccctgcccctgatgcaaatgcgacatgaaattaagtagtacaatacaattagacaagaaaaaggacaaagacccaagga

SEQ ID NO: 18759 - DNA, 430 bp, Setaria italica
  misc_feature (365)..(365): n is a, c, g, or t
  Peptide Sequence Number=SeqID_84733
gaaaatgaagagaaataaataagctttagttaatgtaataaaagatacctatttaccatttccaaaaattcccattattttattcatttggaaaaatccaaaaaaaggatatatagggaatagataaattccacccgcctaagtatagaacagttacaaataaagaggaaactaataaatttaggtaagaaacaagataaaataaaccatatttaataccagaatattcggtttgataacctgctactaattcttcttccgcttctggtaaatcaaagggtaatctttcacattctgccaaagaagaaattagaaaaactagaaaacctataggctgacgccaaagattccaccccaaaaaaccntatttggactgtgcttcaactatatcaactgtacttaaactgttagatagtagagatattgctag

SEQ ID NO: 18760 - DNA, 365 bp, Setaria italica
  Peptide Sequence Number=SeqID_84734
ttctttgagggacccatatgctcccgacttccatccagttctttctgatgggtccttttacctttggctgtgcaggtaaaagacaccggctgtggaattagcccacaagatatgcctcacaccttcacaaaatttgcacacccgcaaaatgctacaaacaaattgcgtagtggcaatgggttggggctggccctttccagaagatttgtcactcttatgcaagggaacatctggctcgaaagtgaaggtgcaggaaagggctgtaccgcaacattctttgtgaagctaggtctatctgataataaaccaaatgcaaatctccgaagaattgcacctcctgtcctgctaaaacaaggagctgcagg

SEQ ID NO: 18761 - DNA, 238 bp, Setaria italica
  Peptide Sequence Number=SeqID_84735
tccccgttaaaaattaatgacgatactgaatgctggatcaaagtgggatttcatatcccatctgcattaacagtctctttcgtgccatgtgatttatcacaataacagaaaacaactatagttcacatgcaagataaccaaggaattgaactcactaactggtctcctttttcttgagctggtttttctttgagggaaatgattcatacactattaccgtgtaatcgaatagcaaaat

SEQ ID NO: 18762 - DNA, 344 bp, Setaria italica
  Peptide Sequence Number=SeqID_84736
cccctccctcacctccacaacagcaccactagcttcgccccctcctcctctccctcccagtgccctccgtgtggtcggcggcgaccgggaacgcctccctggggcgctccggcgagccccgcggcggcgcacatggcggccgtggtggcgcctcccagcaccggcgcgccccagccgcgccgtcctgcctccgtcggccgccgtcacccccctctctacataagcctgacgcgtgggcccatctgtccaacgccgtccgaccctccgttcccctacaccttcacccctacacccagtccacaaacgccgcttgcagaagccaccacccggtccacgaaccgtgg

SEQ ID NO: 18763 - DNA, 282 bp, Setaria italica
  Peptide Sequence Number=SeqID_84737
ctgaagctggcctgctcgccttcccctgcatcgggtagcctagaggctggtggcaaccagtcggcttcatcagcgaccaacggcggcggcggcgtcctcctcgaccccgctaccgaccagtctcggattggcgtgaagcggagatccatccgggaaattgccgaattgggatcgatctcttctgttggttcgtcttcttccccagtgccgatggagcacgctaagtccggccccagcagttggccggagctggccgacgtggtgccagtgccgcaggacgag

SEQ ID NO: 18764 - DNA, 391 bp, Setaria italica
  Peptide Sequence Number=SeqID_84738
catgccggacacgagcatggccttgcgcgacgcgttcacggcgccgacgccgatcatgagggaggccacggagacgaggccgtcgttggcgccgaggaccgccgcgcggagccactgcgcgcgggccatgtagtcgacgccgccgtccccgccgtcgctcggatcggccggcgccgccgcggccgcgttagcctcgacgtcgaggatgacgaccgccgccggtggaagcacgccgcctcccgcattcttgccacccgccgccgcggtggcgtggacgtgggagctgagctgagggtccatgggatgggatggatccgagcaggcgagcggaggcggctggaggccgaggagtgtgcagaggactgcgtgcggctgtggagatcgatggaga

SEQ ID NO: 18765 - DNA, 1523 bp, Setaria italica
  Peptide Sequence Number=SeqID_84739
tccggccgtccccggcccgcctcgccccgcccgaacccctccgccgagcgcgcgcctccgtccgccgaatcccagcgcggcgcccggtcgccggaggggttttcctcctctcgccgccgtcgcagccgccctcgcctcctccccgcgctctgctggtgctgggccggcgtcgagcggagcgggaattcagtcgtgctctggtcgatttcgtcttcgaccttctcgtttatgtgcagatgccagaagctgagtggaacgatgaacgcactaggattgtttgtgagctctttgttgaacaagttcaggcagggaacaggccaaacacccatctaaacaatattggttaccgtaatgttgcggccaagtttcagcagagaacacagctactctatacaaagttgcagcttaagaacaaatgggataagtttaagagtgattacatcacttggaagaagctgcttgtagtgggggcgggtttaccctgggatgcggcaaggggaacatttgctgctgacgatgaatggtggaagaagacaaataaggagctgccaggtgcaaggcgataccgcaatcttggtctgcaacatgaggataagttgaaaataatgtttgactacatcaccagtaatggtgtggatccttcgctacatgctccagaaagcccaaagaatggtgtggatcattcgccacctggtgcaagtggtttgccatctgctgctgacagccccatgaatggagtggatcattctcctgtgaccgcaaacggtttgccatctgctccacacagccccatgaatggcatggatcatttgcccctggccactaatggtttgccatacgctcaagaaatccccatgaatggtatgaacctggatggatcagacaacaatgctgaagataatgatgatgctcatcaagagccagtgtttcagtatacctcaaacaggaggaagaagagacctattaatgtcatctctacgaagaagaacaagaaaagtaaggccgaaaccgctctgctcatgcagtctcacttgagtcgcatagcggagctggctcagaaagcacaggacactttcgaaaagttcagctcccaagctgacacacaaccatggcctagcatccaggatgtcatgacactggtccgtgagtgtggagtgcggtctggaagcaacgaacatttcatcgcaaccgagcttttcgtcagcagagaacagagggagatgttcctgaccatggaaacggctgaggaacggttccagtggcttcgaagaaaatatattgtcaagtatctatcaagtacaagtctgggtcctagataaatgaatgatcctagaacctttgtttcaggttgtggtaaatgcttaggctttatttgacatgacccattttgtgttggaatcctaactagtatgcattacattttaagatagagtatgcagtatatcctgacaagtatggttgtaaagtctcatctatgaacgtgtagttgttctgtggtgtcacttgttttcgatctagcatta

SEQ ID NO: 18766 - DNA, 307 bp, Setaria italica
  Peptide Sequence Number=SeqID_84740
ggtaggtacacgtgtcgggcctcatgcagctgtggtgcagaatgtctgagcagagcgggcctccgcaccgcatgggctcgtacgacgccgactcggccggcacgaacagcgggtctggctgcgcgaggcagttggcgcacggcgcgcactgcgtccagatgaggtcgctgccggtgtcgagcagcgccgagacgcgctgcggcggcgtgccgatggcgaggtcgacgacgtactcgaggtccccgagggcgcaccggcgtggcgccgggcgcctgctgctgatcgctccgcggagaagcgggcgctt

SEQ ID NO: 18767 - DNA, 252 bp, Setaria italica
  Peptide Sequence Number=SeqID_84741
aaaagaaatacatatatgtagtaaagcagcatattctgcatgttagacatgcatctaaaaaactggagacgcacatgcaactcatattccaaaaatcaagtcacgaaaggagcaagaagaatagaaactataaatacatgaaactaaatagctggtgtattcacaaaagacagttatcaaacaagcaaactacaatatcttcatgttccctaataaacagtagtaaacaaatcaaacacgtcactacaagag

SEQ ID NO: 18768 - DNA, 713 bp, Setaria italica
  Peptide Sequence Number=SeqID_84742
cttgagactgttgtgaggcccaacatagcattcctgcagcagtgtggcctgactgactatgatattggcaagcactttttgatgcgctcgaggatcctcctgacggagccacagcgtgtgaaggaaattgcagcgcgtgttgaggagctcggtgtgtcacgcaactctttgatgttcaagcataccctgctcaccctctacggtttaaatgctgggaggctcagtgcaaagctcagtttcctgaagaaggttatcggatgctctgaggctgagctgggctatgcggtgcgcaagatgccagcaattctaacatattcagagagtaagataggccgcactgtggagtttctgaaggtggaggttggattggaaccttcgtacgtcttgcacagaccagcaatgttcggttatagcattgaaaggcggctaatgccccggcattgtgtcttaaggattctgaaggcaaaggggtttctgagcaaagagattgactttttcagcacaatttgtacaacagaagaggtttttgttgaaaagttccttctcccttataacaagagtgttccagggctcatagaagcttacgcctctgcttgtagaggccatgtagccactgaactatgactgagattttgaactagaaatgttggatatcagttatgtcttgcaagttgatatctgttgatgtgatatctgccttttcgctttagaca

SEQ ID NO: 18769 - DNA, 353 bp, Setaria italica
  Peptide Sequence Number=SeqID_84743
cttcaaggagcgcaaagagttctggtacgtgaagcgcgactcgtgttcggagagcgagaacgaggagaggtctgacgagaagtggtggatcccgatcgtgaaggtgccccccgccgggctgtccaagacctccagaggctggctcctgcaccagaaggagctggtgaaccaggtgctcaaggcggccatggccatcaacgccaactgcctcatggagatgaacatcccggacacgtacatagacacgctccccaagaacgggagggccagcctcggggacgcgctgtaccggatcatcacggacgtggagttcgacccggacgacttcctgtcgacggtggacctgacgtcgg

SEQ ID NO: 18770 - DNA, 365 bp, Setaria italica
  Peptide Sequence Number=SeqID_84744
cagggattatataggctctaatttcttagcatggttatcctaaaaacgcttcatgttacacctgcacagaaccctgattcactttccatgtgattccttggctccagaacaaacatgtaaaagcagcaagataactgcttgaaatttccattgttcatacccattctcaacatattcgcattttatatatgttttgtaactctgctagtgtgggatcgacactgatttcatttctttttaatgtgtgtattatcaggaagttctggttctgagtcattaaacaggcctattcctggaccaagaatgccagatggaacaaggggctttacaatggggcgtggtagacctcttccactacagaagtc

SEQ ID NO: 18771 - DNA, 775 bp, Setaria italica
  Peptide Sequence Number=SeqID_84745
cccgtctccccaatctccatgcacccgaaaccccagatttttaattagagagaaaaaacccagattttaaaatggcgaaaaaataaggggaaaagttgaaaaatatttaaggcgcatcctccgatttcccaactccccagtagccaagcgcaagcgggcgctcgcatttccgcggtctcacgctgccacgcagatcaaatctcaaatctcagcagcagtacaataatcgggaggtcgccaccgacccctaagctagaatcgcgctccactccagtgctcactcccgcaccgtacgcttcgcttttgcccgcctacgccagcgccaccggccgacggttgcgggggctcgccggagggcggaggaggcagacgagcaggagggtggtggtagggcggggggacggcgctgggtggccgacgccgcgggagatgaaggccaaggccctccccttcatcgccttcgagcacaagcgggacgcttatggctttgctgtgcggccacagcacctgcagcggtacagagagtatgcaaacatctacaaggaggaggaagaggagaggtcagagagatggaagaattttctgcatcggcaggccgaggacggagagtcatctggagaggatgtcaaggttgcaccttccaacgaggatgacggacctgctggcaagaatgctgatgatgcaaggtcagacgagaaaacactgaggcagccaagaccacataagatccagatatggtccgaaatcaggccctctttgggccacatcgaggaga

SEQ ID NO: 18772 - DNA, 1086 bp, Setaria italica
  Peptide Sequence Number=SeqID_84746
tgtttttttttttttttttttgtaccatgaaaccactgataacacaatatgaattgcaccgtagggccagggcccagcagggttagatctacaaacttcctaactaaattagcagcactaccacatctcccaactaataagaaggcctccattttccatcgcctgaaccctgaatgcaatcatctcaccaatcaccaaccacatggaatctgtacacacaactctgatcaagcgcattcgcttccgagattcgagtgctagtcgaagctcgacgaccggctccagtagccatcggccgaggtgtccacggtgctgctgcagcgagagagcgtgtcgtcctcctccactccgagcagcgcaaggttcagatgcgactgcatgttcgcgtcaggggttgcagtctcctcatccgaaccgtcgaaactggcggtgacttgcaaccttgcccagccgattgtttcgtcgtcaccttggagcaatttcagaaccagtgacatttctggtcgagaatgagaagatgtccttgtgcacaacgaagcggcaagcgtcatcctctccatttcatcacaatcataatcgtttcccaaaaatggatcgaccaactgtttaatttctccactggacagtaaaggctttgcccaaccaaccaggctttcctggccctttgggcttcctggtgtgatgggtctccttcctgaaataatttctaggagtacaactccaaaagcatagacatcaatcttctcattcaccttcccgtacgaaaaatattcgggagccaagtacccgaaagttccagtgatgtcagtacatgttaggtggggacttgaagctgacacttgctttgctaacccaaaatcacacagccgtgccccaaaatcctctgaaagaaggacatttgaagacttaacatctccatgaataacagattgggtcacaccaccaagatggagaaattcaagtgctcttgcaatgtcgattgctatcttatttctcctctcccagataagaaaattcttgtcatcattatttccatgaagagctttgtccaagcttccttggggcatgtgatcatatacaacacaa

SEQ ID NO: 18773 - DNA, 495 bp, Setaria italica
  Peptide Sequence Number=SeqID_84747
cgttgccttgttgggggaacatcagcaggtcttttgacaggtcatttagatggagttacatttatcgatagccgtggtgatgggcgttatttcatctccaattgcaaggatcagagaatcaaactttgggacatcaggaaaatgtcttctgctgtgagagcgcgcccagtcaaaatggtggactgggactataggtggatgccattcccatcagaagcccatcattttaagcatccagatgaccagtctctggctacatacagaggtcattcagtttggaaaacacttatccgttgctacttctcccctatgcacagcacgggccagaggtacatatactcaggatccagtgacaagtctgtatatatttacgacatggtaactgggaaaactattgagaggctttcgtggcatggctcgatcatcagagactgcacctggcatccgtatcatccaacgctcgtcacctcctcctgggacggctatcttgcccgg

SEQ ID NO: 18774 - DNA, 553 bp, Setaria italica
  Peptide Sequence Number=SeqID_84748
cagcagccatgtgaaaagcctgtttgatgcatgtaaagtatttagtccagctgatctcaaaaaaaaaagtatttagtccagccatctcttgatttgtagcaagcttggttgctgtagtctgtaggggggtttgtttctgcctttctgaaataacgcgagtgcaaaataaaaaaggtaaaggatgttcttaatttccctattgcgttttgattatcataggtggtgcctagaacattgccaagtctatattcatttttcttttcaaatgctgtgcttcttgttgcagcacgggccagaggtacatatactcaggatccagtgacaagtctgtatatatttacgacatggtaactgggaaaactattgagaggctttcgtggcatggctcgatcatcagagactgcacctggcatccgtatcatccaacgctcgtcacctcctcctgggacggctatcttgcccggtgggaggcctcggggaacaacgacgacctttcaatgccaaagattatgagaacgaggtggcccgtgcggttgggcgcggcagcacccac

SEQ ID NO: 18775 - DNA, 610 bp, Setaria italica
  Peptide Sequence Number=SeqID_84749
tacgacctaccaacctccgaactgcccgccggagaggaacatgatgccggggacggagggcgggatgcggcggtggaggagcttcagggtgtactcggcgacctgctccggcgtggcccggtccttagcctcggcgcccggcgtcaccatggatggcttgagcaggatgccctcgaacatgacgttgttctccgccatggcgtagaaggtctcggcccacaccttctgcgccacctcgaaggtccgctcgatgccgtgctcgccgtccagcaggatctccggctctacgatcggcacaagtccgttgtcctgcgagatggcggcgtagcgggcgagcccccatgcggcctccttgacggcgagctcggatggcccgttggggatgctgacgacggtgcgccacttggcgaatcgggcgccctgctggtagtaggcggcctcgcgggcggcgaggccgtcgaggccctggcaccaggactcgtcgttggagccggcgagcgggacgaggcccttgtcgaccttgatcccgggcacgatgccctgctcggtgaggatgtcgacgatccggcggccgtcgacggcggactggtagagcgtctcctcgaaaagg

SEQ ID NO: 18776 - DNA, 278 bp, Setaria italica
  Peptide Sequence Number=SeqID_84750
caaagcatctttcgtctcatggggctcttcgagtcagtcctgttcaaagtcaacggcagacagcgaggagcaacttggaatccggcgagcggcgggcgttagcactccgtcgcagcattagctcgatgcggcgacaagcggcgggcagcctgatcaggcgaagagcggcggcgtgattggagagcaggcgcgaccggaacagacccatggaggttgtgacgggggcactgctgagcctcctccctaagctcggcgatttgctcgttggcgagtacaag

SEQ ID NO: 18777 - DNA, 762 bp, Setaria italica
  Peptide Sequence Number=SeqID_84751
ctcatgcttaagacacctgaacgggttccatttcggctgacaagggacattatagatggcatgggtgttactggtgttgaaggtgtgtttagaagatgttgtgagaaaactctgtctgtcatgagggcaaataaagaagcattgctcacgatcatcgaagttttcgttcatgatcctctatataaatgggcactctcaccactgaaagctttacagcgtcaaaaggaaatagaagatactgactcgtgtttggatgactctcaagaagcttatgagggcaacaaggatgcagctcgtgctatactccgtgttaaacagaagttggatgggtacgaagacggtgagatgagaagtgtgcagggccaggtccaacaactcatacaggatgcggtagatgttgatcgattgtgccaaatgtttcctggttggggaccttggttgtaagctccatggaaatggatgtaaattttgatcaaaggcaagagcaattttgttacttgtgaagctttactcgtatggggtgtttctccacttaccccattagatcctccgtcagcttcctacggggcatgatttgctgccttcagtacctgagcacaagggaagcatggcatctggatgaaggtcaaggggttgtacagttatacataccactgccgatagctgttagaattttgaaggtctgcggtcaagagacactggcatctggcagttatccaaacggtggggttgtttgtaaatcagttcgacaagcctaggagg

SEQ ID NO: 18778 - DNA, 718 bp, Setaria italica
  Peptide Sequence Number=SeqID_84752
tttttgttatgcataactaggatgctggttgatgttgttttcactattatttgcaatagattttacccccattgaaatcatgttctttatctgcaaaaaaactatgtctctttattagatacctcattgaaagataagtcaaggtactctgctaggctcagtcccgatgtcgacttaatctggccttgagcaggtgtttccttcttttccctcagcgattttggaagccacgactccgagtcgcccttgggtatcagtatgttgccaacaataggttgcaagcccagccaagggtcatcaaccatggacttaatgaagtagctgcggtcttgccaaccaaatccgcaccttccccctcttccccttgaacctgagctaccatagttattggggcccctgcctcgtccataagatgagtttaggctacctcttggtccataattcatcgggctgccccctcggccaggattagggtgcctgaacccaaacctaggtgaatttggataagatcctctagctggaggaccagaatgtggaccccaaggaggtggagcaccaggaggtgctccttggtatcctgacataggatcctggaactgcataggacttctccatggacagctccctggtacacctcgtggaatgaggggtggggagtggattggcgatggagccaaatgatgctggtgtggaggattgttgtcaccatagttcccac

SEQ ID NO: 18779 - DNA, 326 bp, Setaria italica
  Peptide Sequence Number=SeqID_84753
gactgcccgggggcagattcaatacagttttctgggatccagatgcacccccaaaaattttcccgggaaatttttgctatccagcgatccgcgcagcaaacaaacagagtggagcatccaccccagaaagaaataatcggaattcgatttctctctgcctccaagaaacaaagaaagggaatagcaggacacgaacggatccagagcacgcgaattttgcacggcttgccgttgggaactaactaggcacagatggcttatcaggctaaaatacctagacacgtacgcacagagtgcagactgcaactccacaagcgatcccagca

SEQ ID NO: 18780 - DNA, 765 bp, Setaria italica
  Peptide Sequence Number=SeqID_84754
gctctttgcatagggagatttgttccccagtattgccgtcagtagcacacatgacaggtaggataactatatgtgattttaattcaagtgcagtctttgtagagtcagctcttatctcttcccctaggtcaccgtttgtatcttctgaggaatcaaagtttattgacaccttttgatctactagcttttctgttgaagtctttttatcaggaagaactccttcatcaatgcagacatccttgataaaatggccaccgtaattagaagaaagaattgtgtccggcagtttgatctctacaacatccttgtcatacgagtaatcctcaatgcatgtctgtccggttttacctccattctgatgctcacccttcagaaaactatgttcagattgattggtttgttcaaccattttatccgccaaaaatttgtgcttactttgtctttcagtctcgaagtctaatttaggattgccattggatggaagctcttgaaaaatatgactttggtaaggcctttcatcatctatcttcatgatctgcacatacagtaccctcaaggcctcaagtcctagccatgcatgcctcagcagctgcctctgataaatatgctgattatttcctttgagcggggaagacgccgccgccgcaattctctttcactcctctgctgcgtcggccaaaagggaagctccgggagaaccgccgggagcagcggggggccggcgaggcgaggatgggatcgcggcggagcccgagaacccaaaaa

SEQ ID NO: 18781 - DNA, 1782 bp, Setaria italica
  misc_feature (1)..(6): n is a, c, g, or t
  Peptide Sequence Number=SeqID_84755
nnnnnncttgtttttagttttttttttgacagcaaatgctatatcaaagctataccttcattcctcactcatcatagtgtcgtaaattacaagccactaccgaatccgacaagccattagcctgctagagataaataagaacagcagggcaagaggaggggcagacagcaagaggagggagaaaggagagaaatatttgaatgaatttaacatggactaccgagggctgggctcaagcgtgacagacactaagggctcaactgatcaacaggcaaaaaagaatacaggggcaagcacacttcagaatttacagcaaaggattctgtaaccccagcctcggtcttccctcagacgcctgcggtcggccttcgccatctttacagggctgctgttccactcgttctgtagtactggaaatgcaaatgaccgagtgcttgtcgtgctactttctgatcgaagagaaatgttaccagaataaggtatgtgaccagagggtgttagtggacctgacgtaatgctaggaccagagaagcttgattcaaagggattacgaataacagtttgtgcagtcacttttgcactatcaggtccattttgttgaaccacagattctgtttgcacaagaggtgaactcttactatccgtgatgtcctcacttctttttgtgccaacctccacatctcttgggttaaaatcatttatatcctgggcattatcaatctcacattttttaccattctcacttttgacatcactagactctccattgctagtggacagagacgtagttacagctgctatacccgtttcttgtgttacatcagttttcacatcatcagtgggactttctctcttatcattacattgttcagatgcttggacatccagtgtacttgtacttgcttcaacagaatctgacctattctcttcaattatggcttcatctatttcaataggatcaaatccttccagtgctctgttgacaagatcactaaaactatctgtcttttcaacaggacagatgggtgctacagaagcggcatccacaatagtagggagagagtaattaggttcccatgtctcgtctaatgatccataggcaataaaagggttatagtgattaacttggttggatgctcccttatccaatgcagtactgtcaggtattgccaccgcgaaatcagctgcagccgattctgctggtaaatcactgtgaatgatgttactggtctccgatgcaataccaattccagtttcatgacaaccattaaatgaatcctgatgagctgcttctccattgaagaatggctccagattttcattgctctctgaaatgacactgccaacctgctggccaccttgtgcatcttcatgcagtgattgcttgggatttgatttctcatcatttgaatcggttgatataggtgcagtattgttgccttcaagatcgtgctctttgcatagggagatttgttccccagtattgccgtcagtagcacacatgacaggtaggataactatatgtgattttaattcaagtgcagtctttgtagagtcagctcttatctcttcccctaggtcaccgtttgtatcttctgaggaatcaaagtttattgacaccttttgatctactagcttttctgttgaagtctttttatcaggaagaactccttcatcaatgcagacatccttgataaaatggccaccgtaattagaagaaagaattgtgtcaataaactttgattcctcagaagatacaaacggtgacctagagtcagctct

SEQ ID NO: 18782 - DNA, 636 bp, Setaria italica
  Peptide Sequence Number=SeqID_84756
ccttggtgaagaggccgtagcagaaccaggcgacggcgctgagggtgaggcagaaggagaggctgatgggcaggaactccacgctcttggtcttcaccaccttgacgatgatgctgagcggcgccacgaagacggccatggagaaggccaggcacacgctgccgaggaacttcacctggaggtgcttgcggacgccgaagagggtgacgacgacgatgagcccgaacgcccccacgtccatcaggaagaagtaggccagggtcctcagcctcgccttccggggcgcgtacgcgaggtagaagacgatgtaggccagctccacgccgcacccgaaggcgttgatggtcagcagcggcctcgagttggtcttcaccagcgcgtagaagatccacagcaccgagctgaagagcgccaccacgtacggcaccgagctgaacccgcccgtcgtcttcttccggtacacctgcaggaacgtcgtcactggtgcgaggaacaccaggaaggagatgatgttccctgcgacgccggagagggtgatcgccgggtgagccatgtggaggagccctcctgccattgcagacgacggacggggagaggagggaggaagaagagtgaggtctagctcgacggcggcgg

SEQ ID NO: 18783 - DNA, 714 bp, Setaria italica
  Peptide Sequence Number=SeqID_84757
gggagggagtgggagagggagatgggcttggaggagcggcgtgatgggcttccggtagcagcagtagagcaccatctggacgcacccgaagaagaagccgcccacgttcgggagcgtgacgtagaggtccttggtgaagaggccgtagaagaaccaggcgacggcgctgagggtgaggaagaaggagagggagaagggcatgaactcggcgctcttggtcctgatcacaacaaagatgacgctcatgggggcgacgaagacggccatggagaacgcgaggcagatgctgccgagcaccttcacgcggtgcggcccggcgacgagctcgagggtgacgacggcgatgagcgagaaggcggcgacgtcgaggaggaggaaggaggcgagtgccctgatcctggcggcgcgcggcgcgtagaggaggtagaggaggatgtagacggactcgacgacgcagccgaaggcgttgatggtcagtagcgggctggagttggtcttcaccagcgcgtagaagatccacagcatgcagctgaagagcgccaccacgtacggcacgcagctgaacccctccgtcgacttcttccggtacacgcgcaggaacgtcggcctgcacacatcgatcaatgcatcgaatcgatcgaatatgttttaccttcagattcttcagacgctatatatatgtttactgaatggattgcaagcattgctggtcaa

SEQ ID NO: 18784 - DNA, 1131 bp, Setaria italica
  Peptide Sequence Number=SeqID_84758
cgccttgtttaatttggtcgatggatcgaccgaccgaagtcgtcatgcggcggggacgatctcgatgacctgcggcggcgggccctcggggttggcggcggccatcctgcaggcctcggcggcgacggcggcgtccttgtgctggccgtccacgacctcgatcttgtgcacgcccacgatggggatggggctcacggacaggatggcgatggtgttgggggccagctcgatcacctgcccctgcacctgcaccgacggagccgccgctccgccgtcgccggtcgtcggcagcacggcgttcgtgggccgggtcttgctgtaccagaagtagagacccatctgcacgcagctgaagaagaagccgcccacgttcgggtacatgacgaaggggtccttggtgaagaggccgtagcagaaccaggcgacggcgctgagggtgaggcagaaggagaggctgatgggcaggaactccacgctcttggtcttcaccaccttgacgatgatgctgagcggcgccacgaagacggccatggagaaggcgaggcagatgctgccgagcaccttcacgcggtgcggcccggcgacgagctcgagggtgacgacggcgatgagcgagaaggcggcgacgtcgaggaggaggaaggaggcgagtgccctgatcctggcggcgcgcggcgcgtagaggaggtagaggaggatgtagacggactcgacgacgcagccgaaggcgttgatggtcagtagcgggctggagttggtcttcaccagcgcgtagaagatccacagcatgcagctgaagagcgccaccacgtacggcacgcagctgaacccctccgtcgacttcttccggtacacgcgcaggaacgtcggcgttggcgcgaggaacaccaggaaggagacgatgttgcctaggatgccaaaagcagaggcccacgggtgctccatggagaagagccctcctgccatcgcgacaggatcaagcaagctagctaaagccctagtcgctagggtgacgagacaggggccgatatctgtccttctctttcgttccaagagaaagatcagaggggtcaactgagctcctgcccactacactactcccttcctaactcgtgtgcctctgcgatggat

SEQ ID NO: 18785 - DNA, 1012 bp, Setaria italica
  Peptide Sequence Number=SeqID_84759
ttgtgccgccaccgccgccgcgggtggctcgaccggcaggatgtcgatggggtgcacctcggcgccgcagctggccctgccctcgtgagccaccggcgccgcggcgacctccttgacgtgctccggcagcttcacctcctccaccatcaccaccgcagccgcgggcttcctgttccggtacgccatgtacagcgccatctgcgcgaggccgaacacgaagcccagcacgttggggaacgccacgaacacgtccttcttgagcgcgccgtacgcgaaccagatcaccgcgctcagcaccaggaagaaggacagcgagaagggcatgaactccacgctcttggtccggatcacctggcgcatgatgctgagcggcgcggcgaagacgctgagcgcgacgctgacgcagatccatccgagcacgtgcacgcggaggttgccattggagagcaccatggtcacgagcgagacgaggccgaagacgccgacgttgaggcccagcagcatcttcgccgtcagcacccgggcggccctgggcgcgtacacgaggtacatggcgatgtacaccgtctcgatgacgcagccgacgccgttgatggtgacgagcagcatggcgccggtcttgagcagcgcgtagaagatccacagcatgcagctgaagagcgtcaccacgtacggcgtcgactggaacccctccgtcgacttcttgcggtacacgcggtagaacgtcggcagcggtgacagaaagaccatcagtgagattatgttacctaggataccaaaggtgaaggcccaggtctgctgctccatgttcaggaaagccatctcgatctttctcttctcctcacaagatacgtacgaccccttcccctcttgctcggtggagagatctagtgcaccgagcagtcagtggagaagcggcggcggcggttgtgctggagaggagaggagaagagaaggtagcagaagggcagaggagctcgctcgctatcagaggaggaggctcccagctgcc

SEQ ID NO: 18786 - DNA, 379 bp, Setaria italica
  Peptide Sequence Number=SeqID_84760
cacttggaggctacgccataaacgtagggctaatgatgtatgcatttgagagtcggacactgtctaggctcaggctcgagaaccccacatctctgatgttttctccagttttcctggtgagatggcatccgtcagcaacgaattgctgcaacggatcgaaggcaccttgtacgaatcggagcaaggaaccatctggtgcagcaacatgctcaacgaacagatacagaccgccaggcttcaagactctatatatttctctcagtgccatgtcaatgttatttacagaacacaataccagtgtgccgatcaccacatccatggaactgttctcagctggcaaagcttcagcaacccctctttttgaaagttgtaagtcttt

SEQ ID NO: 18787 - DNA, 973 bp, Setaria italica
  Peptide Sequence Number=SeqID_84761
tttcttaggggttcttgtgttcaggaagagatccgcttcatgataaacccagaactgattgtgggtatgctcttcatggcttcaatggaagataatgaggccatagaaattgttggtgcagaaaggttctcgcagtatatggggtatggctcctcatttcgctttgtcggtgactatttagatagcaagcccattgattccatgggtagacgaagaactaggatagtagcaattgatgctttggactgtccaactaggttacactatgaatctagtggtctcctaagggaagtaaacaaggctctttgtggatttcttgatcaatcaaaacttcagctttatgtgaagcttttccaggattctaataacaaggataactgtccaagtatcagctccgatgaatatataggggtttcaactggaaactggggttgcggtgcttttggtggaaatcctgaaatcaagagcatgattcagtggattgctgcttcacaggcactccggccttttgttaattactacacttttggggatgcgtctctggaaagattaggggaggtgatccagtggatactacgtcatggttggacagtcggcgaattgtggcacatgctgatcgagtactcatcccagaggttaagaggagaaacgttgaagggctttttcgcctggctacttcccaacggtggccccaaaaatgaagtggattacatgtctgaatagccccggttctgaggtcaggatctgtcagcttcctaagagtgctgcgtgttacttgtgtagatttgtgtgtgcgtataaacagataaaaaaaactggttaactgcatcattgcccagtttcccgttagcactctggacgctttgcttaaaattgccacgaatgtaaccggcaacgactaactgcagagaacgctgttccatggccgaggcacatgattcagtatacaggaaaattggtttcttttgtttta

SEQ ID NO: 18788 - DNA, 796 bp, Setaria italica
  Peptide Sequence Number=SeqID_84762
gctggaaggtgtaatgctcgcagtgaagtgtactttgatatatcaaggggttgaccataacctgtgataaacaacgtatggagcattgcagtttgtttcttcaatagatgatctagtagacttgtaacctgttctttccagaaagtagtactagcatcatctattgataagaagacgtggcgggtcgtatttagcatcagcttgttgatgctcggcttaccaactatagtgacacattctttcccgagaacagatagagcaatgtcatgcatgagatcatgtatcttgcatatggttgacttacgaagtgacgaccttccaaaatagccaaattgaagtgtttgcctgacctcttgaaagaatgacctccgagttagctcctcaaaaatatattttcctacggtttctggattgtcatcctcctgcacaggtatgaagtcatgtgccatccacagtcgaatcaagaggtccacatcaatctcataatctttaggaaataaagcacaaaatgcaaagcactgcttcatatctgaggataggtcatcaaaactgagcttgaggatcggtaaaattccggttttctcactacaaatgtcacttttagctaatacatccttccattcagttatactagtcctgttactcaacatagagccaaaggctttggcagccaagggagatccaacacatcgacgaacaaatccactgagaatgccatcttgctcttccatatttggattttgcaagctgaatgctctgctctggacaatttcctttaaatgctcgtcacttagta

SEQ ID NO: 18789 - DNA, 407 bp, Setaria italica
  Peptide Sequence Number=SeqID_84763
agcaggcctccatggaagtggaagaagcgggaggccaactggagaacgccggcaaggacgaggcggaggcggagtaccattcacacgacttcgagtgggaggacctcaaggcggaggtggaatcggaccctgcctcctcctaccacctctccccatttcgcgtccctgccgcaagcactacctcgcagccgcagccttcgtcggaggcctggagaagtttccaccgtcgccacgcgtccggcaagttcttcaaggaaaggagatatttgcttaaggaatttcctgaactgcctaacagtaaagattattccaagattttagaagtgggatgtgggaatggaagcaccgctgtttccctactacgatgcaagtcatcataaaatgagaaaagagcacccaggcttcct

SEQ ID NO: 18790 - DNA, 771 bp, Setaria italica
  Peptide Sequence Number=SeqID_84764
cacaaccctagtgtctagtgagcaacagcggccgccggcgagacacctgcgcgcggcggggagtgggaaggcaggcgccgggcacctgaaaccagcggtggcaggttcgtgtcagtgcggcaccattaagcagctgccgcaggcagtcggcgccaccgcagcaccgggcaggtcgaggcgaggactgagcaggttccttatgcatatcctgaatttgagtcctgcgtacgctgtctataccacccctgccacaccactcaagcacagagaaccacacaaacagcaggccatggcatcactggcgggaaggagcagcatccgccactccaagattccagagttcttggtgggccctagtgggcaaccgatgccagcagtagggcttggcacggtgtcgcacccattcgtggaggacgaagttagggccgctgtgctcaccacgctggagctcggctaccgtcacatcgataccgcagcgctgtatgcctctgagcgggttgtcggcgaggccatggctgaggcattgcagtctgggattgtggcatctagggaggagctgtttgtgacgagcaaggtgtggtgcacacagtgccaccctgagctcgtgctcccatcccttaaggagagcttgcagaaccttcaaatggaatatgttgatttgtacctgattcattggcccatggctgtaaagcctagcaagcctcatttcccaatgaaaagggaggacattctaggctttacagccatgggccaatggctcgggtacaaatc

SEQ ID NO: 18791 - DNA, 264 bp, Setaria italica
  Peptide Sequence Number=SeqID_84765
ctgccgtccttgtcctcgtcgtacgcgtcgatcatgcgctggcactccgcggcggcccggaacccgagcgacccgagcacgctccggagctccgcggcgtcgatgaagccgtcgccgtcgcggtcgaagacggcgaacgcggcgcgggcctcctccacggtcgccgcctcctcctcgaacagcgccgcggcttcctcgaaccccacggacaccgcggcgccgccggcgcccatccaccccgagcaccacgtccatgtcgatggc

SEQ ID NO: 18792 - DNA, 266 bp, Setaria italica
  Peptide Sequence Number=SeqID_84766
tgagaagtatttttccccaggatgttgtcatctacactgctgataaccgtaatgtccattgtgtaactgaggtcactgaaggggaaaggctcaccctgactctttggttcactagagaccaagcttttgatgaggatccaaaactccttagttttctctctcagacatcattgagctgtggaccaactgagcaaaaatcttatattcctatgccagcctctgataacatgtattggttttccctcagttggtccacagctcaatgg

SEQ ID NO: 18793 - DNA, 2653 bp, Setaria italica
  Peptide Sequence Number=SeqID_84767
ttgcccctcgtctctccgtcccccaatttcttcctctctttgccctccgcgctgccaccaccccctgcccctgcacggccttcaaagccgcccgctgtttcccttcgcgcgcagctccctcaccacgccgcgccggcgcggcggggcgccgttcggtgggcgggtcacgcttcttggatctcgcggggtgtctgcctgcctggttgccttggtctcggcgtctcctggcgattcgggctgcttgctggggggtgatgactgtggctagtcccgagctgatggctgcgtaaaaggttggattggttttcccggcagaggggattggatcttggcggagttgcaggaggccggattgcgacgccgctgtgtccgccgggactggatagtcgccgccgctgcgatttccgctttgtcaggaatcactcaaaagctgcgtctttgctggcgcgttgatcggcgatggcgaaccacgagctcgtcctcgggcacgggcagaacgcggagcttgcgctggggcagaaccaccacgacttcggccaggaccatgggctgggcctcggccatggccacgagctcgatctcggcagccaccaccacgaccacgaccttgtcttgggccagtcccatgaacacgaccatgaacttgtacttggccagtcgcacgaccatgacctggggttggggcaccatgacgacgatcaccagctggtactcgggcacgaccaccaccaccatggtggggagctggctctgaggcagggccatgagggggactccggagcactggatgtgcagggccaccaccacgatgagcttgagttgtcggacagccacgagttgactcttgctgagacgcaccaccttggcgtcgatcagaatctggatgaccagctcacacttgagcaggctcatgaactcgcactgcatccacatgacctctcccaggctcctctcgcagttgctcctgttgtccagtcacggaccatggttgtgagccccgagtttcagcttgcagtggggcaggagtttccggaagttatgagctgccgcagggccatccgcaacactgccatcgcctgccactttgagatacagacagtgaagtctgacaagacaaggttcactgctaagtgtgctgctgagggctgcccgtggcgcatacatgctgcaaagctccctggtgtgcctaccttctccatcagaaccatacatgacaaccacagctgcgtggggatcaaccatcttggccatcaacaggcatctgttcagtgggttgcaaacactgttgaagaaaggctacgtgagaacccacaatgcaagcccaaggaaattctggaagaaatacacaaggcccatgggatcacactatcctacaagcaagcttggagagggaaggagcgcatcatggctgcagttcgagggtcttttgaggaaggctatcgtctcctgcctgagtactgtaagcaggtggaaagaacaaatccaggaagtattgctcgagtctatggaaacccagatgacaattgcttcaggaggctcttcatatcattcaatgcttcaatatttggttttgtgaatgcatgtcgtccactcattgggcttgacagggtccttctgaaaaacaagtatcttggtaccttgcttcttgcaactggctttgatggcgatggtgctctctttcctttggcatttggcgtggttgatgaggaaactgatgagaactgggtatggttcttgtctgagctgcatgagttgctggagaagaacacagagaacatgccaaggctcaccatcttatcagatagacggaagggtattattgatggggttgaattcaactttccaactgcattccatgggttctgtatgcgccatgttagtgaaaccttcaaaaaggagttcagcaatccgcagcttgtcaaccttctctgggaagctgctcatgcactgactgtgatagagtttgaaactaagctgctggagatagaggacacctcaccagaagctgttgtttggataaggcatcttccacctcgtctttgggccacagcttactttgaggggacaaggtacggacacctaacagcaaacatcaccgagtcactaaattcctggatactggatgcatctagccttcctataattcagatgatggaatgcatccgtcgccagctaatgacgtggttcaacgaacggcgtgaagcaagcatgcagtggacaacaatccttgtgcccctggctgagcgccgtgtccaagaggccattgagcgtgcgcggggctaccaggtggcccgagccaatgaggcggaattcgaggtcatctcggctcacgagggaacaaatatcgtggacatccgcaacagatgctgcttgtgccggggatggcagctctacggggtaccctgtgctcatggtgtggcggcgctcctctcctgcagacagaacgtccaccgctacactgagagctgcttcaccgtagcaacataccgcaagacatactcgcagaccatacacccaatcccagacaagaccctctggaatgaaaccgcaggccaaggccaggctgaagagaacaagttggagataatcatcaacccaccaaagtcattgaggcccctagggaagccaaggaagaagagggtccgcgcggagg

SEQ ID NO: 18794 - DNA, 469 bp, Setaria italica
  Peptide Sequence Number=SeqID_84768
tgctcgtgcttggaacaggcagtgggatgtactagcctcgatgttgctgctggacagtggaagtggaaggtcagcgattgccatcctgggggcgtgacagctgtagcatactccaagcatgggcggagtgtgtacacagcaggcgctgatggcatggtctgtaggattgatgcctcagatgggtcggtcctggggaaatttagatcttcttcgaaagcaatatctgcattagctgtgtcatcagatggaaatattttagcaacagcagctggccagttgaggacctttgatacttctggcaacaaaaagattcaaaaattctctgggcatccggttgctgtgaggagcatggtttttagcaatgatagccaatatgttctgtcatctggtattggggaacggtatattgccatttggaagttgggtagtgataaaactcagagctcaaacttgttattacttgttcgta

SEQ ID NO: 18795 - DNA, 267 bp, Setaria italica
  Peptide Sequence Number=SeqID_84769
atatatcgatcgataatgtgtagctggatagcaatatatagtcaccaacggaaaaaaaataataagaagaaggttggcacacgttgacattttggttcgttgttaattttgaggtgcgcgcgatcagccagtgacggcgatatctgggtttatttttgcagagttcccgcccgttttgtcgtggtcaacgcggctcaacatcgcggtcggcgccgccaagggcctcgccttccttcacgacgccgagaagcccgtcatctaccgaga

SEQ ID NO: 18796 - DNA, 1494 bp, Setaria italica
  Peptide Sequence Number=SeqID_84770
ggatcgattggagagcgaggagctcggatttgcatggtgtggtagacaagaagaataagataggcaggcagatcatggcgaagtcgtcgtcgtccaagaagaagcagcagcagcagctgtcggcgtggcggttcctgttcggcgggtgccttggcggtgccggcggcgcgggcgggagcggcgggaacaaggtccgtcccggcccgcggacgacaaccacggcgacggcgaggcacgcgctttccccggcgccgtcgtcgtccccggcggcggcggggctgcagcagcggctgtcggtgacggacgtgatgagcacgtgctcggaccaggacctgtcggtgtcgctggtgggttcgaacctgcacgtgttcacggtgggggatctgaaggcggcgacgcagggtttcgtggacagcaacttcctgggagagggcgggttcggccccgtgtacaagggcgccgtggcggagggcgccaagccggggctccgcgcgcagcagatcgccgtcaagctctgggaccccgagggcacgcagggccacaaggagtggctctccgaggtcatcttcctcggccagctgcggcaccccaacctggtgaagctcgtcgggtactgcagcgaggaggagcaccggctgctcgtctacgagtacatgcccaagggcagcctcgagaaccacctcttcaagaagttcccgcccgttttgtcgtggtcaacgcggctcaacatcgcggtcggcgccgccaagggcctcgccttccttcacgacgccgagaagcccgtcatctaccgagacttcaagacgtccaacatcctgctcaacccggactatgaggcaaagctgtcagactttggtctcgccaaggacggcccggagggagacgacacccacgtctccacccgcgtcatgggcacccacggctacgccgcgcccgagtacatcctcacgggccacctcaccgcgaagagcgacgtgtacagcttcggcgtggtgctgctcgagatcctctcggggcggcgggcggtggacaagacccggcccagccgggagcagcacctggtggagtacatgcggtcgtggctcaaggacccgcagaagctgggccgggtgatggacccggacctggagggcaagtactccaccgtcgcggcccacaaggcggctctcgtggcgtaccagtgcctgagcggcagccccaaaaacagacccgacatgtccaaggtcgtcgaggacctagagccgcttctcactgtcaccgacgacgcacctggcgagctgccggcggcagcaccggaggacgtgaagaaggagagggcgaggaggagagacggcgaccggagagagaagggacggcaggataaagccgccaggtccccgaagagggctgtccccaggaggcgggcgccggggcggagccaggagttctgggaaataggaaaagacgttaagttaagtactaacggttaaacgtactaattaaggttttttttaa

SEQ ID NO: 18797 - DNA, 907 bp, Setaria italica
  Peptide Sequence Number=SeqID_84771
atctttccacatgaagcacaagaataactcccatcgagatgtataatttgctccagatcaaagcagcctacccttttgtgtcggaaagcacattcaatatggcaagaagagccacagcaattcttgctgtcattttcagatgaacaaactaaccatagactaggatccttgttgtcatcaaacttgtgacaaatacaacatgagcacctcttgcagaaggaatcttctgatggtctagcagctttacatgctagatttttgcagatccaagtgctagtgcgtttcacatccttgatagggcgttctccattgaccactcccttcgtactagcatgtccatttgtcactgctaagtttggtgcagattgtttctgcaattcaatgttcttgcttgcttcaactggaggtgttttgggcatgtcttcacttgggtaaagcaagaaagatctctgccttccttttaccgactagcatgaataattctcttcgaagtaagaactccacagccacgtacagcttgtagtcaaatgattgccctcttaattactggttcatcattaaaccacagagtgctttcaatcagcgaaatgacatccacctccggtaccggctgcccgcagtccaagctccctccggcggcggcggcggagtcggcggctagggtttggtccccggggcaggcgtcggcggctccaaacaaaccagccgcgagatccccaatgctcgacgcggcaggaggagccgcgggaggagcggggcagcgtcgacggcggtggtctacgtcgacgcgacgcggcccgaggtgctctccccgacgacgacgaggaggaggggcgcgggtcaagtcaagcgcaggcggcgggggaagagggggaggggggcgacggggaggccaagtagaaacgct

SEQ ID NO: 18798 - DNA, 335 bp, Setaria italica
  Peptide Sequence Number=SeqID_84772
cgcggcccctcccgccgccgccggcgccgtcccttcctcctcctccaccgatcgtggggccgcgccgcggtagcgcttggcgcagaggaagaggtagaagcagaggacgaaggtgatgaagatggccgccgccgccgccagcatcgtggccgcggccgccaccgaggtccccgtcaccgccatcggcccgtcgcctccagatccccctttctcctcctctttcgcccaagaaggatcctcttccccagctttcttggccggccggatgtacccgccgagagcccgagattggggagtaggggagtaggggagtgggggaatttgtgtgtttgtgg

SEQ ID NO: 18799 - DNA, 245 bp, Setaria italica
  Peptide Sequence Number=SeqID_84773
atcgatgaaacatcttctgtgtttgaaagttcaggctcaaagatcagccattgataatgtaaagattgtctgacagaaccttgctttatttgcaacacagccttaggtattgacaaagacccgtagagtttggtgaatggccggccagtcatacaaaagcaggacgtcaggagcagttggacgactccatcgatgctccttactcggggatcacacaatctctgacgaggtgcatctgcaggccg

SEQ ID NO: 18800 - DNA, 244 bp, Setaria italica
  Peptide Sequence Number=SeqID_84774
ctttccctctctcgctgcccttccaagctccaacccaaaaggatggagtcgtcgctagcacggctgcttctgctggtggccgtggtggccgcggcggccaggtgcgccctggccgggacgccccaccccaagggcctgcgcgtgcgcctgacgcacgtcgacgcccacggcaactactcccggctgcagctgctgcagcgggcggcgcgccggagccaccaccgcatgtcgaggctcgtcgcga

SEQ ID NO: 18801 - DNA, 258 bp, Setaria italica
  Peptide Sequence Number=SeqID_84775
gggggtaaggggaagcgcgtggccgggagaggaggtgcggtggcggtggaggtggaggtgggaagggaagaggagctgctgaggaggtggaggttattggaagaaaagcagcatatggatcaggaaaaacagcaagttgaggtttcaaaatcagagcttgaaaggatcaaatccagacttgaagctgaaaaggaaagaatattagaagcgcagaataatctgaaactcacagaggaagagaggcaggagcatagcgtg

SEQ ID NO: 18802 - DNA, 958 bp, Setaria italica
  Peptide Sequence Number=SeqID_84776
cattcttgttagctctctcctctcgatcatttatagacctctgcaaatcacaagtctgttctgactttccttcagctttttctcccattcctgcagtgattcctcctgctccttaagttgtttttctcgtgccttccgctcagtctcaaaatacaatttctccttctctaatctacgttgacgagcttcaacctcttccaagtcccggtcaacttgtgccttcttacggtttgcctctgcaagtttagcatctgcagcatgaagttttccctcaatctccaaggatttttcctccaaactagcctcaagagactgagcgtccgttatctttttctcagacgtaaatttgacctcagctatctctgcacgtatttcacgcaacgctttttccagatcaattacacattgtttctcaacacccaatgcttttcgcatgctctcctcccgtctttcatattctgatatagcattcaagtgcgcagcttgttcccgcttcaatatctcctctttttgtttcagcctttgactgatttcctcgagtttttctgcccattctttcttctcaagcaagagcagccccatattgtactgatattcatgtaactcgtgctcaagctcggtgacccttcctttcccctttccaagaggcgccgacgcggccggagcaccaccaccactccgctggttcgctggagtcggtgtcgaccacccggtccatcctttgccctgcggagtaaacatcacgccttcctgttgcccccggtcccttcacagctcatccaagaaccaaagcgcctctccctcccgggaggtgcccggcccgctcccggcggccggacgcggcgcagaggcgaggggggcgagcgcgcggggtgtacgggacctggcgctcgggtcgggttggggagggttcggttggtgggtggtggctggctggtgcgtcgtgcggccagatttg

SEQ ID NO: 18803 - DNA, 3284 bp, Setaria italica
  Peptide Sequence Number=SeqID_84777
aaacttgcagaggcaaaccgtaagaaggcacaagttgaccgggacttggaagaggttgaagctcgtcaacgtagattagagaaggagaaattgtattttgagactgagcggaaggcacgagaaaaacaacttaaggagcaggaggaatcactgcaggaatgggagaaaaagctgaaggaaagtcagaacagacttgttgatttgcagaggtctataaatgatcgagaggagagagctaacaagaatgaccagcttttcaagatcaaacatgatgaattggaggaagcaagaaagtcagtggaggcaactaaacttactctaaaagctaaagagaatgatattaacaaaaaactaaatgaattacattcaaaggaaaaggatgctgactcaaagcgcaaggagctggaagaacgagaaaagaaactgattgagagagaggagaaggctagtattagggaaaaagaggggcttcagaagcttcttgaggatcatcaggtcgagcttaaatccaaaagacgggattttgaattagaactagagagcgagaggaaatcctttgatgaaaagatgacacagaagcaagcggatttagtgaaaagggagaaagatgtcaaatctttggagtctaagctttctaaaactgagcaggcattgaatgacaaaaagaaaacagtggaaggttggcagaatgatcttgatgccaaatccaaagctctgaagaggtgggaggaatcattgaaaaatgatgagaagaggttattggaagaaaagcagcatatggatcaggaaaaacagcaagttgaggtttcaaaatcagagcttgaaaggatcaaatccagacttgaagctgaaaaggaaagaatattagaagcgcagaataatctgaaactcacagaggaagagaggcaggagcatagcgtgctgacagaaagacttaagaaggagattgaggaatacagaatgcgaaacaactccctctctgaagaaattgaagatttgaggaagcagcggcagaagttcgaagaagagtgggaacaactagatgaaaaaagggctcacctagcagaggaagacaaaaaggtgaagattgagaggatgaatttggaacggtggcgtgacagtgaagaaaagaggttaaatgatgcaaagtttgaaatggaagaaaaatacaaggaacagctggagaatcttgaacgcaaggaaagggttttgaatgatgatataaagcacaagcaaatggagaatgatgaacttctgaagggagaacgtgctgatcttcagcgtcagttgcagctccatcggcatgaactggagatggagatggagcaaaaacaagcaagtaaagagaaggaactggaagacaaggcaaatgagttaaacaagaaaagggactttgtggataatcaactcagacatgcaattgagttaaatgagtccaagattcagaagataatatcagagaaaaagctgctggaggcggaaagaaaaattctacttgaggaaaggcagaaactggaaactgatcaggcagatattaaaagggacattgatagtcttcacgggctgagccagagtttgaaagtacgccgagaagcatataacagggacatgaaaaacctcattgatttatttgaaaagtacaaggtgtgcaaaaactgtggtattactctctttgagggattagattccctggcgctaaaagacagcgctgaaattgagcaccccagtttggctgttgagagagatcatcgttccttgaatgctgacacatcagctccagatacaggaacacttgttaattcaggtggccgcttgtctttgttacaaaagtgttcgaggctgttcaagttctctcctataaaaaagggtgagcagccaacagagaacataccttttggtgcaagactggaggaagcgtcacaaagcgatggagattatgagccaactcctgtctatgagatagcacatgattcttttggtgcagaggatgatctcccttctgaaagtggagcaagggacaatgatgagtccgaaaggcatgacccagctgatgatgtccagatggagtcttcagttggtgtagcagataatagtattgatattcttggagctcaatcgtttgatggtactaacgataaagcagttgatgcaactattgcctctactgatcaaaatgggaaggaccctgcagctcctgctgaagcagatttacagcctgaaacatcaaagcaaggacgccgccaacaaaacaggaagggtagaggaaaaggtggtgtgaagaggacacgatctgtccgtgctgtagttgaagatgctaaagcaattcttggcgagacttttgaggagaagaatgatggccagggagatccagttgcggcggtgggtggtacacgtaagcggcgttttgctggagctacaataagtgagcaagatgaagaaggcagcgaagcccattcagaaagtgtttcacttggagggcagcgtcgcaagaggcggcaaactgctggagcagtcacagagaccccaggagaaaagcgttacaatttgagacgcagcacagttgcaaacgccaccgctgcaaccgcccaaactgacaaaaagaaagctgcgaagacaggaagtaaacatatggtacaggctactgctgatgatactgaaggaacctcaaaggctgatgaggaacctgcccctgagagcaaaagggcatcagaatctgcagactatggtgcatcccagttgcatgagttttcccaggctgaaattggtgatgcccacgcccctgcagagggtactggtgaggaagacggtgatgtcgtggacggtaaagatgcattgcctgatgtgcccatgactccatctggaagtgagcttggagcagagcaggatgatgaggatgatgatgactcggagagacgaaaccagtcaatcagcaaaaaactatggtcgttcttcaccacatgacggttgagaagaggctgctgaatagattgtttctagcttttgtgcttcagattcatgatttctcattcttggaactgtatggcgtgtgcttttggtgatgatgtacggctagatcttccactcatttgtgcttctctcccgtgtaattgaaatatatttgtagtagacagtttgatggcgctcacagaagtagctcatgagatgtacaatggcgatgatgactgtaaccccagtagcttggtttgtaattgctgttccttttcccaggttcggattacttagttgaccttacaaaaaaaaaaaacattgcatgtttgtgtgtt

SEQ ID NO: 18804 - DNA, 431 bp, Setaria italica
  Peptide Sequence Number=SeqID_84778
cggaggttctcggcccactcggggcacgtggcggtgccgcgcagcacgatggcgatgtcgcggcggcccatccgccggacctcccgctcgttgtcgcagacggccacgtagccgacgaagctggtgcgctgcgtgagccaggcgggcgccgaccgccgccgcgcccacggcgggatggccagcgacgacgaggcgaacaggctccgcgtcgggcggtaggaccggtccgggagcacgagcgtgcggtgctggccgtgcgagctggccgccgcctgatcggccgccgacggcatggagtggaacgccgtgtacgcggcctgcacgaagtctccgtaccggaggagctcgcggcggaggttgtggtcgagcgggtccagggaggccctcccacccgcccttgccgtggtacctccgccactcgccggcgatgg

SEQ ID NO: 18805 - DNA, 236 bp, Setaria italica
  Peptide Sequence Number=SeqID_84779
gagagaaactgggtccgtttagcgccgatttggtggtgggagatccggcgagtgcggaggtcgatttggtggtggaagagctcgattcggcggcaaaggagctcgatttggtgctggagaacttcgatttggtgagcaaactttgccctgcgtaggctgtttccaaacacgcccgcgtgtgtgtgtgcgcgcgtgagagagcgagagagcgctggtggggagggggaggactgaag

SEQ ID NO: 18806 - DNA, 836 bp, Setaria italica
  Peptide Sequence Number=SeqID_84780
taccgtagacccaccaagctcgccaaaacctacggaacctggcctaaaagaacaaacatatccacgcacctttacatttcaagcacaataaagtctgaatcggttttgacccactttgcgccatcgtcatcgaggtcacttagcgcatcctcgaggcattcgttgatttctttctcatctagcttccagtccaaatgcctcctagttgccactgtggaggaattttgtgggtgtattttcttctgcagtattgccttgagcagcttctccattcttgtttgagggaaagagttccttggttccagaactggggccgtaaaacctcccttgcacacgaataatctgaggagcgaagcgattgatcttggcttgattgcaccccctttcttccctactatttctcttgctttgctgatgatgatctccttgttcatcaactgctcctggtgcttcgcgctgtcatgctcgccaacacgtttttgtgaagctacctgttcatcagcatgtgatccctgaacctctgcttgatcattgccttcgagcagtacttcgaattcttcccggatgttgtctacttcctcctctgtaaacttcactgaatcttgtacggtctgcacattcccggacgaactttgtgcttcttcctcaatctgcttgttcccaaatgtcccaattgcaagcaatgattggggccaatcactgaactcatcgttgcgacattccgacacattgccacctgcccattagaagtaaattagttagctaaattagtatagaaataaaaacgtatggtcctacgtccatatattagcataaattggttgtttgaagcatgg

SEQ ID NO: 18807 - DNA, 418 bp, Setaria italica
  Peptide Sequence Number=SeqID_84781
gacgtgggtcggtacggacaggaaagggaaaggaggtttgcgtctacgactacgacgtcgatgactccgacgaggaagacggcggcgcgctgaagagatcggtggcgagagggtctggtcgttggccgctcccagggattctcggcaaggggacccctgcaccgggagccatcaggatcaagtgatagcacatagcagggtaggatcgtgcatattgctggaatggaggttttggaattcaatcactgcacttctggttttttgcaattcttatagatgtagctgtaccattcattttagctgccgtattgatttacggccagcttgcttgtccaaaaaaattttgaccgtgaaaatgcggtactaacgaaatgtgaatatccagcattacgaatctaaaaaaaaaaaaaaaaaaaaa

SEQ ID NO: 18808 - DNA, 609 bp, Setaria italica
  misc_feature (6)..(6): n is a, c, g, or t
  Peptide Sequence Number=SeqID_84782
tttttnttttttttcatcatcaaaaagccgaatgggcgacttgtgaacagaatacagttgccgaatatatatttcttgctgtcaggattattttatgtgctcaaacattatacccttttggcaaacataatagcaagaacggaaggaaatataggtacatggcacacttgtcaatctgaagacccagtcagctcttatccaatggggactctcaatgcaatcaaaatttgctgtctgaaaactcatcttttcatccctggagggatgcagctcatttgctctccacgtcatatagttccgatatgaggtaggcaccatgggcgaatgctccggcgaggacgccgtagaagaggcggtccctcaccacggggttgtgccgcagcccgatcctgatgagggggagcacgggggctagacgagcgggagcagcagcatatacggcggcttccgctcacgctgcgggggacgcctcgccgccgccggatcgtcgaactgcgaggaggagcgggacgccatgaccggggccggcgccggagacggcggagaagagatcgaatcgaatggaatctgaacgagtaagagaggggtttggctttggcgttgcgtgct

SEQ ID NO: 18809 - DNA, 946 bp, Setaria italica
  Peptide Sequence Number=SeqID_84783
cctatgatatgatccttgggctggattggttagaaagttacagtcctatgaaggtacattggcaacaaaagtggatggccattccttaccagaattccacagctcttttgtatggatccttgccggacatgcctgttggttcagttattcagttatgcacaatggagatgtctatccaagattcttcttaggtatccatacctgaggcagtgcaagctcttattgatgaatttgccactctgtttgaggtccctactgaactacctctagaaaggtcatgtgatcactccattcccctagtggagggtgcttccccagtgcatatgaggccttataggtatgctccagtgctcaaagacgaaatagagaagcaaataaacgaaatgttgaaaagtggtttgattcaacctagtaacaacccattttcctcctttgtctggttggtgaagaagaaggacaacacttggaggttctgtgtggattatatgttcttgaatgccattacagctaagggcaaatatccagtaccaattattgatgagttcttggatgagttgtctaatgctagctggttcactagtcttgacttgagagcaggatcagaatgaagcttggtgaggaatataagacaactttccaaattcatttcggacagtttgaatttcgagtaatggcctctgggttgactggtgaccctgaaacatttcaagcagccatgaatactacattggctccttatcttaggaaatttttcttggtgttctttgacgacatcctaatctacagcaagaaccttgaggagcgcataatgcacatcaaactggtgcttcagttgctatctaaagaccaatggaagatcaaattgtctaagtgttctttgcatagaggcagattgcttatttgggccatactattagtgagaaaggtgttggaactgatccctaga

SEQ ID NO: 18810 - DNA, 433 bp, Setaria italica
  Peptide Sequence Number=SeqID_84784
gctatcttcacatttgtctcctctcacctgaaagtaccagatctggagaaaatggctcctaaattagtctttgttctgccaattgtgctcctcggctgggcattccaggcgattctccggccacctcccacaaaactgtgtggcttcccaggtggccctcctctgacatctccgaggatcaagctcagggacggaaggtaccttgcatacagggaagatggaatacagaaagacaaggccaggtacaagatcatcacagtacatgcatttgatagcaccaaggacatccccctgcctgtttccaaggtgttgctgacagaactgggaatttacttccttgcttttgatagagctgggtatggggaaagtgacccaaatcccaagcgggatgtaaagagcgaggcactggatatcgaggagctcgctgaccagc

SEQ ID NO: 18811 - DNA, 361 bp, Setaria italica
  Peptide Sequence Number=SeqID_84785
taaccgtaaccaaattaacaaggttagacgcacaggaagctggtgattgatgggagcgtcgacggtgcaatcgccggggaggtgtacgagacaggggttgcagatggcgccggttttgcggatgcagaggcggccaaggcctttttccacaggctggaccagcagttgaacaaggtgaacaggttctatgagaggaaggagggggagttcatggagcgcggcgagtcgctccggcggcagctgcagatcctcgtcgagctcaaggccgccatcacccagcagcagcaggcacggcggcatggcgggtcctacgaaagggagtgccgacatggatgatctctccatttcttgctccatccag

SEQ ID NO: 18812 - DNA, 561 bp, Setaria italica
  Peptide Sequence Number=SeqID_84786
cttgaaagctgagatgcatgtggtggtgattgtagctctcacaacgaacaggctgcattggaacagagcccttgcatctttttaatggcaaacccaatcccagcctgtttcgttgtgagagctgcaagcgtagccgaaagcaactcttgaaagctgagatgcatgtggtggtgattgtactagtaacattgcctggtgtagagctttgacaagactatcactttcactctctccatgctttgcttccttctttttctgacctgattggattggtgagatgtcaacaaaaacaacactttcagatttctcttcgagagttggtgttcctctgtatctgcaaatatgatttagaaataagtatccttttctcttttttttcctggcagtattgttctctttttgggccatttgatacagtcaagtgggccgttccaacttctaaaggctaagatgcactgggcctgttggtgcacatgaatgatagatcagggtataaagatggctatgattcatgtcgaactttcatagtctgataagattcagaaatggttagaacattgc

SEQ ID NO: 18813 - DNA, 250 bp, Setaria italica
  misc_feature (182)..(182): n is a, c, g, or t
  Peptide Sequence Number=SeqID_84787
aatgcaatgttataagttgctgaatacgcatgttctatctccagatagaagttgggcactcgaagatgactgcgctagttttcaggttagccttttgaattcaagtacgcagtcttatcagaatccctaaataacctgtttaatggactgcagacatctattcgatcctgagttctttttancctgtttaacaagttttattgatcttatatgcaccgtgaacgaaaaatcaagcagcaagaaaacgcag

SEQ ID NO: 18814 - DNA, 1646 bp, Setaria italica
  Peptide Sequence Number=SeqID_84788
agatgaggagtggaggtggaagggggaggactctgaggtggggcctggatcagatttgcaggttgtcaatattctggattttgagataaaggatgaaatggaggaagaagatgagttgagtgccccagtcaagggaataacagagtcacagccattgaacagggaagcaagctcaagcaagggacatgcagccatacctcgcaatgctttggaacttcaaggcgttatatggcccccacatatcactgagaggccaaattcagatttcaaaaagaagttgatgcagattctcatgaaaccatataaacaggaagaatatgataggtacttttccatggctactaatcgaactccagttgtcaaggagcgaaggacccgtcatagtgtggtgtactacccctggaagcatgagttgggcaagtcatactttgatagttacccagatcttgctgagcagttcaaactccaagacaataactatcccaatcgcttggctcttttgcgtgggtttttcttctggttagagaatgttgggcgagaagaccaattcaggccatggagagatgacttcaaaagataccgagttgtctcattcacatgagagggctgctatcccctctggttcagaatggaagtcgtttctcgatttagcgtggtcgccagtgtgcaacttttggctggtaatactcgtggagtcatcggtaacatctaccagtattagctctagaaactatggaaaaactatggcgttctggaaaccagtatccaatcacagtgccctacaaacagagttggcgtttagacaggcgtgtatccttattttgccccagcctctattaacgtgggtataactgcaaaagtatacatattgctcagcgactgaatggagaaaccattctctctcagtgttgggttcattctattttgcttcggggatctggctgctgttgaacttgatccgaggcttgcccatgctgaagttgaggactctggacctcatgttgtacttgagcaacccgtcgtacagcagcttgcggatgtagtgctcaaggtcagacccaatcagccgaagcgtgtactctgacagctcggccccctccgtagtgatcgacgaggtcctggaactcgttgaagaccatctggcaggtctcgtcggtccaggcgaactcgtcctgggggtcgagcatgagcgtgagcttgtccatctgcgtctggtcgaacgcgttggtctccgggtcgatgtaggccgcgtagatgcggacgtgccgcgtcgtgctgctcagccactgcccgccgtactcccggctcatgttcttgctctccgccagcggctgccgcggcagcgattgcgcgtcccccttccgcgccttcgccggctcgtccgacccctgcgccggcggcacgcccgccgcctcggcctcgacctccttcacctgttgctccggctgggcgcgcgccggagggaacctgacgcgccccgccgtcttggcgcccgcgaaccggcgcccttgcgcttgcggggctagcttggcaggggacaggaacgccgtggtcgccatgctgtggcctctctggtctctgcttcttcgcgcctgcttggcttcttttgttttctttggtctgtgcgtgcagcagctgccgtgcgt

SEQ ID NO: 18815 - DNA, 2298 bp, Setaria italica
  misc_feature (2249)..(2298): n is a, c, g, or t
  Peptide Sequence Number=SeqID_84789
tactacactcctgctgatattcttccatttcgtttattctacagtccgtgcctgaaagatcatcaggaacccttcagctactcgggcagaaagatcgtcaggcccttgttctttaagctctctagtgttttatctcattttctctcccaccattgtgtgtcttaactgtgatggataacagttttatgaacatcccccacctgcctccgatgaatgacccctttgtgttgggatgctcaacaccaagctccaccatggagaacatggaccaaagcacattctgtatggacggtctgagcccagcaatggctaactgtagccacttcaatggaaatatgcagataatgaatgacataacagcgagagatgatggcagcaggttagtccttggactgggtccaacacccaatttttattctgcagattgtcagtccactgggtcaaaacaagctgagaggttgtccggccagagttccactttcactgatccagggacgctgaggcttggccttcagatggatggtggagaaccaattcaatatctgcaaacaccaaatggaacagtccattcttttggtgttgttgacgaggcttcaacatctgctactgtaaggaacatgggtggttacatgccatctctactctttgctccccgctccaattgtactgtcaatgaggcacaagtagaaaccccagattctctagacctcacacataacaccaataacagtcagcatcatcgtcagctcagccctgaaccttctgcaatgactgattcttcatttggtgtgagttctgatgttgtcactgcaacaactacatcagaacaacgcagccatccgcgacatcctaagaaatgcaggttcaagggttgctccaaaggtgcaagaggtgcgtcaggattgtgtattgctcacggaggtgggcagagatgtcataaacctggatgccataaaggcgctgaaagcagctctgcctactgcaaagcccatggtggaggtcgtcggtgtgaggagcttggttgcaccaaaagtgcagaaggaaaaacagattattgcattgctcatggtggaggccaccgctgtgaacatcctggctgtcctaaagctgcacggggtaagtcagggcggtgcatcaagcatggtggtgggaagagatgctctgttaaaggctgcattcggagtgctgaggggaaagctggattgtgcatttctcatggtggtggccgacgatgccagtacccggactgtggcaagggtgctcagggcagcacattgtactgcaaggggcatggtggtggtaagaggtgcatctttgatggttgcagcaaaggcgcagagggtagcacacctctgtgcaaagctcacggtggtgggaagcgatgcatgtttgaaggaggtggcgtctgtgcaaagagcgtgcacggggctactgaatactgtgtggcacatggaggagggaagcgctgttccgtgcctggctgcaccaagagcgcccgtgggcgcactgactgctgcgtgaagcacggtggcggcaagcggtgcaaggttgacaactgcggcaaaagcgcccaggggagcaccgacttctgtaaagcccatggtggaggcaaacggtgcacatggagcacaggctgtgagaagttctcccgtggcaagagtggcttctgcgccgcgcatggtaccatgatggctaggcagcgagaacaagatgcagtgaagaatgtaggaagcatgattggaccaggtctcttcagcggcatcgtgatgtcatcagccactgtgggaagcagcatgacgaatgagcactcgtcctcaggcatcagcaccgcgtcagattgtgatggcactgttaggagccaatccatgattcctccgcaggtgctggttcctcgctccatgatgcccccttggtcgtctgagcctgtggatgggggcagagagggaggtcatgttgttcctgaggggagggtgcatggtggtggcctcctgtcacttctcggtggcagcttcaggaacgctgatgtggaaaagctttgaagctagtgcttttccatctgcaaattcggtcagtttgtttgtatataaacggaggcgctttgccgcctattgaattcgtattgtactttttcttgtctagataaacgttttgattcggttagtccattgtaaagtggtgactggcaattgttatgaactctgttggcttgttggttcagtcatagccagtacttgcaaataatttgtgtnnnnnnnnnnnnnnnnnnnnnnnnnnnnnnnnnnnnnnnnnnnnnnnnnn

SEQ ID NO: 18816 - DNA, 593 bp, Setaria italica
  Peptide Sequence Number=SeqID_84790
aggacgaggaggacgcgctgttccccggcattttcacgaggaggggcgccgggccgaggaagatccctaggtcaccctacaaggtgctggatgcgcccgcattgcaggatgacttctacctcaacctcgttgattggtcttcacataacgtccttgctgtcgggttgggcaattgtgtttacttgtggaatgcatgcagcagcaaggtcaccaagctatgtgatttggggttggatgacaatgtttgttctgtggggtgggcgcagcgtggcacccacctagctgtagggacaaatcaaggaaaagttcagatatgggatgcaacccgctgtaaaagaataagaacgatggaaagccatcgcatgcgtgtaggtgctcttgcgtggagttcctcattgctttcttctggaagtcgcgacaagagcatcctccaccatgatatccgtgctcaagaagattacgttagcaagcttaccgggcataaatctgaggtttgtgggctcaagtggtcttacgacaatcgccagcttgcatctggtggcaatgacaacagactttttgtttggaatccacattcagtacaacctgtactg

SEQ ID NO: 18817 - DNA, 309 bp, Setaria italica
  Peptide Sequence Number=SeqID_84791
tcttacaatcacttgtgcctaataacaccctacattatcatcttcacggattaaaattgctgccggtgctgctcgtggaattgcttacttgcatgaagattgccatccaaggataattcatcgagacatcaagtcctcaaacattttgttggataacaactttgaggcaaaggtggctgattttggtcttgcgaggttggcattggatgctgtaacacatgtaacaacccgtgttatgggcacatttgggtacatggctccggagtatgcatcaagcggcaaattgaccgagagatcggatgtattctc

SEQ ID NO: 18818 - DNA, 262 bp, Setaria italica
  Peptide Sequence Number=SeqID_84792
tcaatggctcctggtaaggtgacggtgaagttgccgccgtcaggacggaagtcccccacccatgtccggccgtcgacgtcggtgctggaatccgagccgcagttgatcagaaacggcttggattgtgctcgggcgctatccaggatcaagaacaccgcaagaatcagcagcagataccgaaacgatctcatctttgtccgtaattttgagggttaaaccctagcagaatcaccaggatcctcccccaatgccaagaatccga

SEQ ID NO: 18819 - DNA, 1226 bp, Setaria italica
  Peptide Sequence Number=SeqID_84793
ggctggtggcggggtggtggggatgcgccttgcctttccgccgcctcggcgtgtcgtgattccgaagcgttgcctgagattgtattggtcgccgcctttctggtagatagataaatcgcatcttttggttcgctcagctgacgcgaaggttcctcccggacaatgccgagcatcagagctccggcgtccaagcagacggccacgctacaggtggctgtcaagtgcaggccattgaccgacaccgagcagcggcgctcgcggcatatcatccaggtcattgatgataagactgtggttgtgctcgaccccgatctgtcaaaggattacctggacctcatacagaaccggaccaaggagaggagatacaccttcgatcatgtgtacgcgcctggatgctccaattcggacgtgtataagaatatatcctctacaattgctggtgtagtccaaggccttaatgcgacagtctttgcttatggttctactggaagtggcaagacttacactatggttggaacccatagtgatcctggtcttatggttcttagctttcgtacaatttttgagctgataaaaatggatgcaagtccggatacatttgaagtctcatgttcatatctggaagtctacaatgaggttatctacgatttgcttgagagatcctccggacacctggagcttcgagaagatcctcagcatggcataatggttgctggattgagaagcattaaggttcactctgcagatagaattcttgagctgttgaacataggtaacagtaggcgcaagacagagagcacagaagcaaatgctacttcttcacgatcacatgctgtacttgagattactgtaaagcgaaagcagaaaggtcaatacgggaaccaagttcttcgtggaaagcttgccttggttgatcttgcgggcagtgagagggcctctgaaacaaacaattttgggcaaaaacttagagatggagccaacatcaatcggtcactcctagcattagcaaactgcatcaatgccctaggcaagcaaaataagaaaggtcttgcctatgttccctatcgcaacagccaattaactcgaattctaaaggatggtctgtctggtaattctcgaactgttatggttgcgacaatatcaccagccgatgatcagtatcatcacacaaccaatacactcaagtatgcagaccgtgctaaaaggtagtattaaaaactaactta

SEQ ID NO: 18820 - DNA, 466 bp, Setaria italica
  misc_feature (445)..(445): n is a, c, g, or t
  Peptide Sequence Number=SeqID_84794
ttctgtggtactgatagaagaaggatgagcaagacaaccacagccaattgccattgttaatggcccagtcagagtcaatcagtagcctttcaaagacatcacgacctttctcccagtggataaacagatcaccacgcgtcaggaaacaagcaactgaatggcgtgcaaggtgatgcatccagccccacttcctcagctgaatcatgatagcatcaatccatggataccctgtccggctgtctctccatgcaacaaatagctcctcattctcactccatggaatctgcttgcatattttgtttcctttcatctgatcaaaattaggagtcccaaaagacactgtgtagaagaagtctcgccacagcaactggcctgtcaatgaaacaggtggttttgtataatttctgacactcctgtagacatcctgaatgcagacataaaaatntctggacgacaggcagccaaa

SEQ ID NO: 18821 - DNA, 233 bp, Setaria italica
  Peptide Sequence Number=SeqID_84795
aactgaagtccattaacttgtcatccatcctataattctatgaccacagatgtataaaggccatccacttactcatgcatgccaaattcaaggaagcaagttctgattcagaatttcagatatcgttgttgtgccactaaacggtgcacccgaccaataccaacaagaaaacagacagtgtcctcgagttcaagctcaaactgatcacagtggcttccttatccttctgccat

SEQ ID NO: 18822 - DNA, 1294 bp, Setaria italica
  Peptide Sequence Number=SeqID_84796
accccactatccgcgttgccaaggcccaaggggaaccaccaccgtaccggagagttgagatgagcggcggcggagcgatggcggcggcgggagaggaggtgccgaacaagatggtgatcctgaagcgctacgtgacggggttcccgtcggaggacgacatggaggtggtcaccggcacggcgcacctggccgtgccgccggggtcggcggccatggtcgtcaagaacctctacgtctcctgcgacccctacatgcgtggccgcatgaccaagcacgaccgccccagctacgtcccggacttcgtccccggggaggttttggttaactttggtgtcggcaaagtgatggcatctgggcatccggatttcaaggttggggatcttgtgtggggcatgactggatgggaggagtacactctcgtccctaaaccggaaacgtttttcaagatcaaccaccctgaactgcctctgtcgtactacacaggtgttcttggcatgcccggccttactgcttgggctggatttttcgatgtcggcaagcctaagaaaggcgactatgtctttgtctcggctgcatcaggtgccgttggtcagcttgttgggcagcttgctaagctcacgggctgttatgtggttggcagtgctggttctgacgagaaggttaaccttctgaaaaccaagtttggcttcgatgaggcattcaactacaagaaagagcaggacctcggtgccgccttgaggaggtacttccctgagggcatcgacatctacttcgagaatgtgggtggccaaacactagaggccgtgctggacaacatgcgcgtgcacgggcggatccccgtgtgcggtatgatctcgcagtacaaccttgagcagccggagggcgtgcacaacctcttccaggtcgtcgccaagcgcctgcgcatggagggcttcatggtcttcgactacttcaaccagtactacaagttcgaggaggagatggcagggtacctcaaggaggggaagatcagctacgtcgaggacgtcgctgacgggctggagaaggcgccggcggcgctcattgggctcttcaccgggcgcaacgtcggcaagcaactggttgccgtcgcacgggagtgagtgctgggcatccttctgaataatgcctgagcgttcagagagaggcgtgctgggaactgatggtttgtggtgcttatggtcgcatctgcttatgttagaagtttgtgtgggttcaggttgtatattgctttttgtagaagatgaaacattggtttctacaattgaaaataatt

SEQ ID NO: 18823 - DNA, 318 bp, Setaria italica
  Peptide Sequence Number=SeqID_84797
cggccaagggcggcgcggcgggggccgggctgggcgacgacgtgctgggcctgatcgtgttcaaggccgacgtgtcggacccggagggccgcctcgcgacgtggagcgaggatgacgagcgggcctgcgcctgggacggcgtcacctgcgagccccgcaccggccgcgtctcggcgctctccctcgccggcttcggcctctccggcaagctcggccggggcctcctccgcctcgaggcgctccagtcgctcaacctcgcccacaacaacctctccggcgacgtccccgccgagctcgcccgcctcccggcgctccaga

SEQ ID NO: 18824 - DNA, 594 bp, Setaria italica
  Peptide Sequence Number=SeqID_84798
cctcttgcaccatgaccatggcctctagtctctgtcacaacagctggaactgaccctaagggtgccaccaaattgcttccactgcgaggtgttggcctatggattaggggatgatgatgtgcatatgatctggatctctgttggctgctggtgtcatatctcggtagtctgtcatgatttcttgactcagtcgcatggaaaacttgagcattactcaaatccggagttgcatgaccttccaagccagttgaatgccgatgaaatgaagtgctttcagcaccagaatttgaagtagacggtacatgcacaggatgaagaaaaccacgcaaggcaagatatgggcaaacaagtgaactgcttgcagcagcgcttgggtgatctccaattgtgtgatcttcataaaagggaaatatcaatgcagtaaaaaagaaagaagtttaagtggttgaagtttaggttggatgcttacaagaagttggctcagcttcacgctcctcaaacacagatgctagttgagtgaatccactaaaggggcaccattgaaatccaaatggaaggtcggtggcgatatcatagttttcactagtcgtccag

SEQ ID NO: 18825 - DNA, 393 bp, Setaria italica
  misc_feature (32)..(32): n is a, c, g, or t
  Peptide Sequence Number=SeqID_84799
cctcctagtggtaggagggaatgggctgctcngcatagaggagtgcattgattgttggtattattggcctcttgcaccatgaccatggcctctagtctctgtcacaacagctggaactgaccctaagggtgccaccaaattgcttccactgcgaggtgttggcctgtagtatttaaacattgtaagagatacaaaagatatgattcaacaaagtgaaagaaaatctgaaaagatttgtagcactcaatattgtaatgagctttcaaactagccaatggaaccaacaagcagatcaaattttcaggtttcaggggttgcaactgaacgtcaggataattttaggttgcagcagcccttctttttttttttcttcgtaacgtctactaggtagta

SEQ ID NO: 18826 - DNA, 668 bp, Setaria italica
  Peptide Sequence Number=SeqID_84800
acaccagcagccaacagagatccagatcatatgcacatcatcgctggtgtcatatctcggtagtcctatgccaaatggagtcatagaatgatcaggaattcctgatacaggaagattactcaaatgtctgtgctcactgtcatgatttcttgactcagtcgcatggaaaacttgagcattactcaaatccggagttgcatgaccttccaagccagttgaatgccgatgaaatgaagtgctttcagcaccagaatttgaagtagacggtacatgcacaggatgaagaaaaccacgcaaggcaagatatgggcaaacaagtgaactgcttgcagcagcgcttgggtgatctccaattgtgtgatcttcataaaagggaaatatcaatgcagtaaaaaagaaagaagtttaagtggttgaagtttaggttggatgcttacaagaagttggctcagcttcacgctccttgcaaaagaagatataagttaaattaagaacttgaacaagtgaaacattttttttaagaacctgaggtttcatatatgatatcactaggaataaataagaattttacaaaaacatagtaatccagtattaacagctaagtgtcatacattaaacaaattggtaattggtaaattgttctacttaaagttccttaggttaggtta

SEQ ID NO: 18827 - DNA, 1779 bp, Setaria italica
  misc_feature (1)..(57): n is a, c, g, or t
  Peptide Sequence Number=SeqID_84801
nnnnnnnnnnnnnnnnnnnnnnnnnnnnnnnnnnnnnnnnnnnnnnnnnnnnnnnnntttttcatccagaaatacacagatttgtgataaacaactgcacaaatgagtaccactctcttgttcattgctgcactcactgtttctgagccctagcgaccatagatgcagtttagctcatgtttccaaatagttgtgaccaatgcaacaacatatcagttaggacaaactacagcgctcaatgaagcctgagtgctgctggaccgaaaacgttaaaataccagcacgcataaacatcatacaggtccttaaccgaacagttttgacactgcagcgcagctgatcttcttccctcggcttctctcaagtctagaatcaaataatttttatacacaacaattgtagaacagccttcagctaatcacaagaacggtggcatcctctggggtggaggcacaggctgatagccattctccggatgattctgcggcatccgctcgccagcaggccttctggtaaaacttccatgtgcatggttctgcataggattgaaggtgccccaccagtgagcctcgccttcagcagggatccatgggaacggcgcaaagccctcccgcccccatgcatacggccggtcgatgggtctagagatgccctcagcatcaggaacgctcctgttcacagctccaggggctgaaaatccatggggtcctccaacctcagctgaggatgacgctgcaatgaaagatgtaattgtcaaggccctcggcctaaccctcctagtggtaggagggaatgggctgctctgcatagaggagtgcattgattgttggtacatatggcctcttgcaccatgaccatggcctctagtctctgtcacaacagctggaactgaccctaagggtgccaccaaattgcttccactgcgaggtgttggcctatggattaggggatgatgatgtgcatatgatctggatctctgttggctgctggtgtcatatctcggtagtcctataccaaatggagtcatagaatgatcaggaattcctgatacaggaagattactcaaatgtctgtgctcactgtcatgatttcttgactcagtcgcatggaaaacttgagcattactcaaatccggagttgcatgaccttccaagccagttgaatgccgatgaaatgaagtgctttcagcaccagaatttgaagtagacggtacatgcacaggatgaagaaaaccacgcaaggcaagatatgggcaaacaagtgaactgcttgcagcagcgcttgggtgatctccaattgtgtgataagaagttggctcagcttcacgctcctcaaacacagatgctagttgagtgaatccactaaaggggcaccattgaaatccaaatggaaggtcggtggcgatatcatagttttcactagtcgtccagccacccatatcaatatcagcagaagggcggtgcccccttgcataaagccagcgacctttctcaatcttccgacagttagggcattgcattgctccttttgcattgaatgcagatccaatacagtctaggtggaactcgtggccgcattgcagcttggcgacggagcggcccccaccgcgtgcgagcaccggatccaggcatatggagcacgccgcgcccccgcccccgcccccgcccccgccaccggctgcctccgccggcgaggccggcggcgacctctccagatccatcgacgcgtcccccaggcgctgcctctctcgcgacggaggcgctcgtggggtggggccgt

SEQ ID NO: 18828 - DNA, 318 bp, Setaria italica
  Peptide Sequence Number=SeqID_84802
tttatttttaggttggtggtttcctcactggacaattttaacacatgatttttgcactttttgggaactattcatcgagtaggctgaagaataagatccaggtagagcatgctttatgcctgtatagaaatttttggtgaactagttaacactttaggctagccattctactgtctatatgcaatttttgctggagacatcaatcttgtcttgaaccattcatattggctggaaatggactggatatgatggatattacataccgctgatcttacattgttgtggctttggcccttctgtcgcaggcctggcttttgg

SEQ ID NO: 18829 - DNA, 940 bp, Setaria italica
  misc_feature (1)..(39): n is a, c, g, or t
  Peptide Sequence Number=SeqID_84803
nnnnnnnnnnnnnnnnnnnnnnnnnnnnnnnnnnnnnnnaccttttcttcaacccattactgagacacacagcaccacacaacgtttttctttttaaccccgagttttacttttacttttactttagtttctttaccttacttactaacgtttgtacacccacaaaatcagcctcaaatcttttagcccttccattcttccccaaaccaaatctatacattctaacattcttctaaacatcctgagtgcaatgtcgatccatgtgagaggcggcgacaatatagatagacctactgagagcctttacctctttacactactatatcatctgttaacctttgtgctagtttcatgcaacttctacaaccagacatgccatgcactgggcagagattagcttagttgtcacttttctccttggttggcgcaagaggttatctcagactttagggatagggcgcgaagaaactccatgcaatagttttatgaatccgaggaaactgagttttccatcgggatgtctgatccaatcttggagaacaatatgaagtggaactgaagggccaagtccaagttccgatacaagttcttcgatcacaattggtctgttgccctccttgtcaaataattcatacgcttgccgagcatgttgttcccacgtctctaggccttccatttgataaacgctaatagccgaagcagagaactcctcgaaatcaaactttccatatgggatattgcatattgagttaacaaagtcaacaaccctagaatcattcattgcacctgaggaattcttcatcaaggccgtcttcatattttgcaaggagatatggccactcttgtttggacctaacagtgtaaactgctctctcaggtagaagagttgatctatcgtcagtgtctttgcaagagccctcaatgcagacctcccgtgagt

SEQ ID NO: 18830 - DNA, 914 bp, Setaria italica
  Peptide Sequence Number=SeqID_84804
ccgtgccgccgcgcgaggagcgcgcggatgtgcttcgcgggcgacggcggcgggaacgggcgcttgaaccctccgcgagccggcgtggacgcgacgctcgagttcgccggcgagcccttgtagctggacggcgggagcgggctcggcaggtagaacgggaacttaggctgcttcggcgtgcccggcttcgccgcgggcggcgccgccgacggcgaggacgcgccgtccgcggcgtcaccggcgccggaggttacatggggatcttcctccgcgtcgggctccgggatttgcgtcggcttgccgtggcagagacccatggaccggatcaagagctggatggctctagctcaacgaccccgaattgaagcgaaatttcctcggaattcctccaagaaacgaggcggcggtgggtcagagcggcatcctgatttcaacgacccgggaaatcaaccagaatcggtcgcaaggggccctcatggcctccaaattcttgccttggaattgcagtgaacaccaagaaccgccagtaccaggaaagcaaggaaccttgaggcgaagatctcgcccgaaatttgggcccccaagaacagaaaaaacaggccagaatccttcccttgcagtggccacgcacagagccccagcgcagcaaaatgccagggaaagaggatggacggatggatcagactatctatcacgcacagagcaagaacatattccttgattcctgaagtgaccaaacaattggaaaagctggaagctttgagcgaaaggctcggatcagcgcggaatgggggcggcactagaggaaacaactggcgggcgagtgaatcctgtgtgaattgggaggggatcgagaaaaggggcggaggaggcggccttgcctctgcctgcctgcgcttgcttgcttttgagct

SEQ ID NO: 18831 - DNA, 2162 bp, Setaria italica
  Peptide Sequence Number=SeqID_84805
gttttttttttttttctttaagctagaattgcaggcattggcattgacaaacagcagtcacaaatctttcagagcccttgcatcatattcatttctcctatcctcatctgtacactcgactacacagcttacttcagtacaacaacatcatcaatacacgtggcatggggaggagggggtacaagtattaggcataagcatcagcttttttttttacctcgtacacaagactatcaagcatttccgttcgtgtcattgcagtttcaggcaatatcctccagccacaccttcaacacaacacaacacacaccagccagagattggcttagccatcggtcatctccttggttgatggatgcagggatggtgtatactaggcttttggaatagatcgtgaagaaaccccgtgcaaaagttttatgaaaccgaggaagctcagcttcccgtccgcgtgtctgatccagtcttggagaacaacgtgaagaggaaccgatgggccaagtccaagttccgatgcgagttcttctatcacaataggccggttgccttccttatcaaacagttcgtatgcacgcctagcatgctgttcccaggtctccaaggcttccatctggtaaacgctgatggcagaagcagcaaactcttcgaaatccaattttctgtactgaagagtgcacaccgtgttaacaaaatcgacaaccctagagtctttcattgcatctgtggagttcttcaccaaggccgatttcaaattttgcaacgagatataaccattcttgtttggacccaacaattcaaactgctctcttacataaaacagttgatttgttgtcaatgtcttggctagagccctcaaagcagacttccgcagtgaagacgaacttatgtaagctctcattagcttgtagattatcatatctaaaggaactttcacttgttgagcattacggatccatggatgactgagagcttgtgaagctgtcattctcttgcggtaatccttattaagaagcctttttacaaagtctttagcttcggatgtgagagtgggccatggggcctcatcaaaacttggctctgcctttaagacagctcgaaagattcctgactccgtgcgagcccagaaaggccgactcccgcaaagcaagatataggcaatcactccaatgctccacatatctgcctcagtgccataagatcggtggagcacctctggagcaacatagtatgcacttccaacaatgtcattaagtctttcatctggcttcacgaagtcagacaaaccaaaatctataaccttcaagggagagttttcatcctttgatgagaaaaggaaattctctggtttcagatcacgatgaacaacaccttgaagatggcaaaacgatacaacactcaaaatttgtaccataacaacctttgcatcctcttcggagtactttccacctcttgctaatattctatccagcagttcaccccctttacataattccataactatatacacattatcttcatcttcaaaagcatcatagaattgcactaggttattgtggcctgtcagagaactcaatattctcacttctcttctcacatcttcaatggcaatagcagtagtcatcttggccttgggaatgaccttgacggcgacgtcctcgcccttgagctcgcccttcttggccttggcggcgcaggtgtagccgaagtggccgcggcccacctcctcgccgaggtcgtacttggcgaagaagtgcttggagaagccgaagctcttgtctagaccgagctccggctcgccgccctccgggatggacgcctcgttgggcttgacagagccgtgccgccgcgcgaggagcgcgcggatgtgcttcgcgggcgacggcggcgggaacgggcgcttgaaccctccgcgagccggcgtggacgcgacgctcgagttcgccggcgagcccttgtagctggacggcgggagcgggctcggcaggtagaacgggaacttaggctgcttcggcgtgcccggcttcgccgcgggggcgaattcgccggcgacgcggccccatcatcgcgggccaccgctggaggtgccgcgcctattctactaattaggtccggtttgtcctttcctttattcttaaacttagttttcgttttatttgttcttt

SEQ ID NO: 18832 - DNA, 607 bp, Setaria italica
  Peptide Sequence Number=SeqID_84806
agaactagttagtttactcaaatatggtcaacagatcctagatctgttgctagctgaggtttgtatattcctatgggtttgctttttcgattgctggtttcattaattgtgtttgcgctactctgaagtaacttaatttgctttcgggttattttgcagacacaaccagcgaagatctgttctcaggttggtctgtgcacttttgatggcacccatggtgttagtgccggaattcggagcgttgtggatgatgaagctgggaaatctaatggtggtcttcggagtgatccaatgtgcaatgcctgtgagatggctgtcgtatggatgcagaaccaacttgcacagaacaagacccaggagctcatcctgaactacattaatcagctctgtgaccgtctccctagtcccatgggagaatcatccgtggactgtgccagtcttaagtccatgcccaacattgcgttcactattggaggcaaaaagttctcgctgaaacctgagcagtacattctgaaggttggtgaaggatctgctgctcagtgcatcagtggattcactgctataaatatccttgccatattaaaacagacggtcgtcatctcgagtc

SEQ ID NO: 18833 - DNA, 502 bp, Setaria italica
  Peptide Sequence Number=SeqID_84807
gcttgatcatgaatggagagagggaatgagccaggaggaggcagagaaattttgtggtgaaggttgttcccttgcaatggcccgtgatggtgctagtggaggggttgttcgcacagttacagtaagttcttgtctgatgcaattgtcatgcttcctttattttgtttcagaaattttgaaatgtcagaaatacctaaactaggtgatattatgggttttctattatgatggaactttctgcaaatctacatactgggtcttgttatatctttcttctaaagtaaaaatcaagcagttgtaattgaaaaccataagtatttattcaactgagtattctgtgctagctttgttttcattgtcttgagctctttcccttgtgggaaataatgcttgatttgcaagaacatggtgactttgcaaggtatgttttaagtgtatgcatgcatattccattcaccctcattttttcattcgactctatttgccagttgtttcttgttgt

SEQ ID NO: 18834 - DNA, 1563 bp, Setaria italica
  Peptide Sequence Number=SeqID_84808
cctgcatccggaattctgggttgatccgtgcgctccccctccaattgctgcagatcgcgaccatgggaacccgcagcgtcgccctggtgctcctcgcggccgttctgctccaaaccctcctccccgcctcggcggcggagggtttggtgcggatcgcgctgaagaagcgggccatcgaccagaacagccgcgtcgccgagcgcctttccgccgaggagaagcagcgccttctccgcggcgccaactccctgggctcgggcggtgagggcgatatcatcgcgcttaagaactacatgaacgcccagtactttggggagatcggcgtcggcacgccagcgcagaagttcaccgtcatcttcgacactggcagctccaatctctgggtgccgtcctcaaagtgctatttctcgattgcttgctacttccactcgcgctacaagtcagggcagtcaagcacttacaaggagaacggaaaacctgctgccattcactatggaactggtgcaattgctgggtttttcagtgaggatagtgttaccttaggtggtctggttgtgaaagatcaggaatttattgaagccacaaaggagccaggccttactttcatggttgccaaatttgatggtattcttggtctaggctttcaggaaatatctgttggaaatgcagtaccagtgtggtataacatgataaaacaaggtctcatcagcgatcctgttttctctttctggttcaaccgacatgctggtgaaggagaaggtggtgaaattgtgtttggtggaatggatcctaaccactacaagggcaatcacacatatgtcccagtcactcagaagggatattggcagtttaacatgggtgatgtcctggttgatgggaagtccactgggttttgtaaaggcggctgtgcagcaattgcagattctggaacttccttgcttgctggccccacagccataattactgaaatcaacgaaaagattggtgctgctggtgtagtgagccaggagtgcaagactgttgtttctcaatatggtcaacagatcctagatctgttgctagctgagacacaaccagcgaagatctgttctcaggttggtctgtgctacttttgatggccacccatggtgttagtgccggaattcggagcgttgtggatgatgaagctgggaaatctaatggtggttgtgtctcagctagcaacagatctaggatctgttgaccatattgagaaacaacagtcttgcactcctggctcactacaccagcagcaccaatcttttcgttgatttcagtaattatggctgtggggccagcaagcaaggaagttccagaatctgcaattgctgcacagccgcctttacaaaaccctgataattacagatgcagaattcagtaacattctcattaacatgaaattagaataaacatgaagagaaacattggagtaccagtggacttcccatcaaccaggacatcacccatgttaaactgccaatatcccttctgagtgactgggacatatgtgtgattgcccttgtagtggttaggatccattccacc

SEQ ID NO: 18835 - DNA, 1062 bp, Setaria italica
  Peptide Sequence Number=SeqID_84809
atcgaagcagagtaccagaccaccaccgctctcgcccggctccgctcacctcgccggcttagggttttggccgccgccgctgatctcgcccgctccgccatggccgcctctcatgagtgctcctccgccgccgtcggcgaggccccgaccaccggggagcaccggatggggaccaccattgtcggggtctgctacgatggcggtgtcatcctcggcgccgactccaggaccagcactggaatgtatgtggcaaaccgtgcttcagacaagattactcaactgactgacaatgtgtatgtctgccgctctggatcggctgccgatacacaagtcatttctgattatgtacgttatttccttcaccagcacacaatccagcttgggcaaccagctactgttaaagttgcagccaacttgattaggttgctagcctatcagaacaagaacatgttgcaagctggcatgattattggaggatgggacaagtatgaaggaggccaaattttctccgttccccttggtggaacaattctgaggcagccatttgcaataggaggttcaggttcgagttacctgtatgctctgcttgatcatgaatggagagagggaatgagccaggaggaggcagagaaatttgtggtgaaggttgtttcccttgcaatggcccgtgatggtgctagtggaggggttgttcgcacagttacaataaatgccgatggtgtgaagaggaacttttaccctggcgacaagctgccactgtggcacgaagagatggagccccacaactcgttgcttgatattctcgcagctgggaacccagatccgatggtgcagtgaatttgcaaaccagccgtgcccctttttatgaactctcctgtatctgacatgtagatttcaactgaagaactggaaacgatttcagcagaattatgccacaccgacttatttacattttcttgttatatcattgttcctgtttagcagaatgatatgagttttgaggaaatgcttaggaacaggaagtcgttgttttagataatgaattagtttgtttacttgttt

SEQ ID NO: 18836 - DNA, 1241 bp, Setaria italica
  Peptide Sequence Number=SeqID_84810
cgggcgatggactggaaggaggaggtgcaggaacggctcatccacgagccggcgcggcggcggaagaagccgccgaagcgatcatggagggaggagctcaacctcgacctcctcgccgagctggggcctcagtggtggctcgtgcgcgtctccatggcgcccggcaccgactacgtcgacctcctcaccaaggccatctcacggcgctaccccgaagtcccattcaagttttataatccatccatccaagtcaagaggagattgaaaagtggcgcaatcagtgtcaaatcaaagcctttacatcctgggttggtctttttgcattgcgccttaaacaaggagctacatgacttcatcagagacactgaaggttgttatggctttattggagctacagttggttctatcaagaggcagattaaaaagccaaaacctattccaattgaagaagttgaatcaattattagagaagaaaaggaggaacaagcgaaagttgacagagaatttgaagaaatggagaacatgggaaatgttgagtcattcagtaaacctgttgaagaatctgaacttatgttaatgaataagatcaagaagcagtttaagaaatcaccctcaaaaggtggcaccagccagcgaactttttcacctggtgctactgttcatgttctctctgggccttttgaagacttcactgcttctatcctggaagtgaatcgcaaaaacaagaaggccactgtccagttgacacttttttgggaaagagagctttgtggatctagattttgatcaaattgaggcggttgaagtggacagcaatgatagcaaactatgaggcaacttgtgtttctgtatgacagtaccaatagcttttatcaacactccatgtctccagctggagcctgggtgaatgaagcggaactttagtgggtggacagtggagtgttgaagatcgagcgaattaccagcaagactaacaagttagcacatgagatgccgtcaaaattaaccagagttactgaaatgcaagttcttaaataatgaggatgcaggatttgagaaatcattgacttccactaggttgctcacattttgcctaaatgtagaaagcaatatttcaattttgtcagttgcgcaggttatttatttcatttttatcactatgattcatttataaataattgaaatcgaaatagaactctgaatattttttaaataagtctctgaatgttttcagtaaaaaa

SEQ ID NO: 18837 - DNA, 679 bp, Setaria italica
  Peptide Sequence Number=SeqID_84811
ggtgtatactatatattactttacttatggtaaaaaaagtaccattgatattacaatttgaatattgcaataatttataaaaaaaagaatgatacccaatttattggctaattcgaattagtatgtagaattcatataattatgactgttgaaatcttaaattcaagtctcttggttcttttcacgctttctcacaaacggattaagaaatatattattatttgttaaagtttggataaaccattgcttcgtctggtgtctacaatacatctaatttatatagtactaatttcatttttaccagatcgaaaatttttatgttgaaaaggaaaatttagagatccaatgtcacattctgtaaaaatttatgatacatgtataggatgcactcaatgtgtacgagcttgtccaacagatgtattagaaatgataccttgggatggatgtaaagccaagcaaattgcttccgcgccgagaaccgaagattgtgtgggttgtaagagatgcgaatccgcctgcccaacagattttttaagtgtccgcgtttatttagggcctgaaacaacccgcagcatggctctatcttattgatacgttacaaaaaactccacttgaatcgtctgattcctctttaccgaagaagcctgtgctcgaaataattgagcatgggcttttctgg

SEQ ID NO: 18838 - DNA, 864 bp, Setaria italica
  misc_feature (71)..(71): n is a, c, g, or t
  misc_feature (185)..(185): n is a, c, g, or t
  Peptide Sequence Number=SeqID_84812
gtaaaatggaaaagtactcacatattcagcacaggatggtatctataaggtctttgacttgaagaactacncctttctatattcaataccagatgaaaatgtgcaagagataaagatcaggtttgtgctctctttcctttagttttgtctataatcctgtattctgaaggcaaatgatgacttgnggtttttttatctacttcagtccaggaatcatgctcttgatatatgataggacaccaagttatgttccattgaagatattatcaattgaagatggaaagccactgaaattttttaagcacttgttgcaccgcaacaagaaaattgatttcattgagcagttcaatgagaagctccttgtcaagcaagaggatgaaaacttccagatacttgatgtgtgtcaatactcatgagagttattttaatcttttttagcttatctcttatttcatgaaggactaatgattagatcgtctttgtgtttcaaaggtgcggacttccgagctaattgaagtcggtgtctccaaatttatgaccccttcagcattcatttttctttacgagaacaatctcttcttgacattccgaaacagaacaattgctgtatggaactttcggggagagcttgtgacttcatttgaagatcatttgctttggcatcatgattgtagcaccaacaatatttacatcactagcgaccaggatctaattatctcttattgcaaatcagaggcagtggcggaggatggtacagttactccaattggatctatcaacatgagcgagattatgacaggcaagtgcattgccaagattgctgccggtgaccctgccctcaatgtcaccctagcagaaacagta

SEQ ID NO: 18839 - DNA, 1594 bp, Setaria italica
  Peptide Sequence Number=SeqID_84813
tggaagagttttgatacatatgatgccaatgctcacctatttgtgaagctgcaatttcttagaagacgatccaaaatcattgagattgttgctgcaaaggatatcatatttgcgctggctcattccggtctttgtgctgctttcaaccgagtaacaaacaagcgcatagccttcttgaatttaagcccagatgaagtgattcggagcttgttctacaacaagaacaatgattcacttattactgtgtcagtttatgcatctgacaatttcagtacattgaagtgcagaacaaccccaattgagtatattagaaggaatcaattagatgccgggtttcctctgtttgaatcagaatctctgaagtggcctggatttgtggagtttgatgatgtaaatggaaaagtactcacatattcagcacaggatggtatctataaggtctttgacttgaagaactactcctttctatattcaataccagatgaaaatgtgcaagagataaagatcagtccaggaatcatgctcttgatatatgataggacaccaagttatgttccattgaagatattatcaattgaagatggaaagccactgaaattttttaagcacttgttgcaccgcaacaagaaaattgatttcattgagcagttcaatgagaagctccttgtcaagcaagaggatgaaaacttccagatacttgatgtgcggacttccgagctaattgaagtcggtgtctccaaatttatgaccccttcagcattcatttttctttacgagaacaatctcttcttgacattccgaaacagaacaattgctgtatggaactttcggggagagcttgtgacttcatttgaagatcatttgctttggcatcatgattgtagcaccaacaatatttacatcactagcgaccaggatctaattatctcttattgcaaatcagaggcagtggcggaggatggtacagttactccaattggatctatcaacatgagcgagattatgacaggcaagtgcattgccaagattgctgccggtgaccctgccctcaatgtcacccctagcagaaacagtagcaagaagcggtcctctgtctggagcacagttccagaagctctggaggatgtcacagcgctgttctatgatgaggacaggaatgagatctacactggcaacagccaaggccttgtccatgtgtggtctaactagatagtaacatgcacatagttccacccttttgattagttttactgcattctgtataatctctggccctggggctggggctcacctagcttttgtatttgccaataggatgtgtttccttgagcaaccatgagaacgcaaagtgttcttgtaaatattattttgtatcgtcatggcctttaccatgttcttgttcttctggtaacatagaaattagcctctgaatcaaacttagctggatactgcctgcggcctacccaagtttctggctgtgagacagtagaggtctgaagttctaagatcaaatgtaatagtagtggttggtgaaatgatgtgttctgtaatatattgttgccgtcacgcttttacaaaaactaaaaaaaaaaaa

SEQ ID NO: 18840 - DNA, 560 bp, Setaria italica
  Peptide Sequence Number=SeqID_84814
cgcggcgctgctgggagcccacgtggtcctcaccgacctccccgaccgcctcaagctgctcaggaagaacgttagcctcaacgtcgacgacccccacgtcccgggctccgctcgggtcacagagcttgtatggggcgatgatcctcaccatgaattggttcgggagccactgcctgatttcgtgctcggctccgacgtcatctacaacgaggaagcggtggatgatctgctggtcaccctcaaccaactctcaggacaacacaccacgatactactagctggagaacttcgcaacgatgctgtgctggagtgcttcttggaggcagcaatggaggacttcctcattgcctgcatcgagcaggaccaatggcaccccgaattctgcagcaaccgggtagccttgtttatcttggtcaagaaaccagagagagctagcacagactagtcatctactctccttgccgtagaagaaaccaagaaggataggaggcatctgcgtttgtcttgtcctatgattttgtgatagacaaggttgtagccttggcctaagacacatcatt

SEQ ID NO: 18841 - DNA, 543 bp, Setaria italica
  Peptide Sequence Number=SeqID_84815
aagagagcgccgcggcgagcggcgggtggcggcggcgcggccatgaggatgagctcgctacccggtggattggagtgaaataaggtctgtgcacgcttgtgtttgtggtatgcgataggaaaaataaatgtaataccttctcgccaagagcatcctgaaccacgagggtatcactggacatcctggaaactgcttggcctgttgtcaactctgtatcgaagaatgcaatatcttgtctcaggactgcattaaggtataaagaacggatgcgggctgactgcctttctccggccatcgtccagcaagacacctctgggacaagtgaaaagtgagccttgtattagcatttgaaccgtaccgtacgagtagaactaaattctctaacaaagaaatggctatgtgaatgattcgtagctacttcctttgagaatactaaatggttatatgtattgggtggttttggtttggtttgtacagtactaacaattttccctgtataacttcttcacatccataatttcagtgacagagctatcattgatt

SEQ ID NO: 18842 - DNA, 336 bp, Setaria italica
  Peptide Sequence Number=SeqID_84816
ggaggacaggcactacgaccttgcctccagttcgtcccaagccggcctcacaggagctgtccgcgccggtcgagatctctcgccggaagcgacggtgccgcccctgggcggcgtcggagcacgccacgttcgatcaagaaaccggcggcgggggcgacggcgaagaagacggttccaccgacgacgcgaagcagagaagcgcgaaaggtttgacgatcgttgtgccgccgcacgttcttcttgctcggaggaggctgctgggaggccggacggcggcgtactccatgtgcgccgggaaagggaggacgctcaaaggggcgggacctccgcgatgtc

SEQ ID NO: 18843 - DNA, 481 bp, Setaria italica
  Peptide Sequence Number=SeqID_84817
aacagcaagctgatcacacactggtaacagtaataatgaagtagacaggcgatcgagctagcacgccggccggactgacgtatcagctcagaagcatcagaatgacgtcgccggcggccgcgccttcttcgccagcggctgcggcgagatctccggcaccgcgaacacgtcgctgtcgctgtcgcagctccagtgcctctccctcacgcgcccctgctgcttcgccgccgtcgggactgcaatggacgcagcagacaccttctcgaggcccagcgcgccgccgccgtaccacgcgccgccgccgtaccacgcgccgcgtttccccggccggccggcgaccacgtcgaagagatcggcgtccagggaggggacctgctcgtgctcgtcgcacccggcgttcgaggcggcggagaacgcggcgtcgtcgaagaggaggtcgtcgacgcgccagccggggcagatgtttgtgagatagtcggag

SEQ ID NO: 18844 - DNA, 695 bp, Setaria italica
  misc_feature (549)..(549): n is a, c, g, or t
  Peptide Sequence Number=SeqID_84818
ctccatcgggcagatcattgtttaaatcgggggggaaggcagcgtccaaactccatcgtaaagatagcaatccgttttctcaagcagcacaggcagcttcgcgcgtcttttctaagggataacaatggcgccaggaggagagaagaagatcctggtggcgaggaagggccggctgcggcagcgctacgacggcgagtaccgcctcgtcgccggctgcgtcccgtaccgcgtgggcgccgacggccagcccgagctgctcatggtctccacgcccaaccgggacgacctcgtcttccccaagggcgggtgggaggacgacgaggacgtgcacgaggcggcctgccgcgaggcgctggaggaggccggggtcaagggcgccatcaacagaaccgcgctggggatgtgggtgttcaggagcaagagcagcccggtgagcggcgacagcccccggggccctgcaagggctacatcttcgcgctggaggtcgccgaggagctcgagcagtggccggagcaggacacccacggcaggcggtgggtgtcccccggnggacgcgtaccgcctgtgccggtacgactggatgcgcgaggcgctgtcggcgctgctgggccgccttgcggcgaagcccgccgcgcaggagatgagcgacggccacggcggcgtgtacttgatggtcaaggcggccgccgccgcgg

SEQ ID NO: 18845 - DNA, 411 bp, Setaria italica
  Peptide Sequence Number=SeqID_84819
atgaagtggactcgatgccattattgaaacttacatcttttggctcataagagaagtgcctccattctctgaggaacgttattgaggaggcaagccgctcgacttccgcttcagtgaagtctggttcgggctccaagtcggcgagctccgagatggcgcgcaccgctcttgagaacccatctgctgattcgtcaaacaggcacacctcaacgccatccttagtagtcccctctctatattccggcgggggcggcgcctccgtcgtctccggaggcacggccatcgccggcgagggggggagctgggactgggaggctcggggtggtagccgcagaggcggtggcaggcgcggccgaagaggctccggatgctagctgcggaggcggcggcgccgccgaataagctaggggt

SEQ ID NO: 18846 - DNA, 440 bp, Setaria italica
  Peptide Sequence Number=SeqID_84820
ttctgacaatgcaaattactgcacaaagttaaccatctgcagagcacagagtgaagattctaaaggtggtggaggattcctgaccggctttcttattgggggagcaatctttggaacactgggctatgtctttgcccctcaggtattaccaaactttattctgcactgtgcaggtacaggaaatcccagtaaaagaatatataatcgcttttgcttagcatttctccaaatagcttaaagaaacccccatcaagcaatatcttcctgaaggtagaaaccatttctgatctaggcaagctcaaatatccccttctaatttgccaccgtagatttcaaaccaaaatatttcgcatatgagctacccaccagtagttgatggctgattaaagaaacatttttgtgttggtctatactaattttgctctagatgctattatttt

SEQ ID NO: 18847 - DNA, 359 bp, Setaria italica
  Peptide Sequence Number=SeqID_84821
ttctatgaagaactgttatttatgtaaactcaactccctgaaatatagtatgtgagctatgccttttattctcgagtctcaactatgcatgataatgtacaagttcttcatttggttaactgaaaacatctaattagaaattctgcagtacatctgttgaaatatgtgcttgtgagattcagtcacaaactgattcattgtaaatggatgcatattcgtttctgtataactttgttatttaaactaactgtgtatccattgaaatgaacttgcagattgggatgccctcattgaatgataacgagcatgtggtagaaaaacttgaatgaacatggttttgtgcaaggtgaaaagtgcaa

SEQ ID NO: 18848 - DNA, 1141 bp, Setaria italica
  Peptide Sequence Number=SeqID_84822
gatccagccacgtgggcgtggccgcgcacgcagctagaagccggcgggcagcaggataggcggccgatttcatcgtctctcccccacgggaaagcttccccttcccttacgccgcaccccacggcagccatggccgctccctccgccgccctatccgtctccggtggggcgcatacaaatacatttggctgcaggagtaacaagctgaagtccaacagaaatcgtttgcagcttgcagttccttcaagttctgacaatgcaaattactgcacaagttaaccatctgcagagcacagagtgaagattctaaaggtggtggaggattcctgaccggctttcttattgggggagcaatctttggaacactgggctatgtctttgcccctcagatcagcagaacattagattctttgttggatgaaaatggacaagatagtgaatctgatgaaactggcctccaaagggtgccaagaccacggcgtggtcaatattatgatgaaggtttggagaaaacgcgtcaaacactgggcgacaagataagccaactgaacttggcaattgacaaagctgcctcacggctgaaacgtgtcactggcaatgtcgaaaatgaggccttgacagatgaaacagaaattgggatgccatcattgaatgataacgagcatgtggtagaaaacttgaatgaacatggttttgtgcaaggtgaaagtgcaacataatcatcatccagggaggaaaaaaaagggtgcaacctgatggtttctagtttcatcagcaggaatacatcaatgtctacatgcaatctttttttcgacgaacgtctacatgcaatctggattctggagaggtgaaattgtcggcctgtttaccaattgacagcaaggatcacgctcgcagctaaaatcttttgtactcttgcaattctctcagacatttttgcctcatgtgagttggtagttctgtgataagtagaagagtccaaggatttgtctgacttagcttggtgcagtcaatgtactgcgtaatgtttttagctgattgattcttccagctaggagatgtccgtaacattccaacttttgaagttttagggacgccctagttcgggttttacccgggggggtccttacccgttagttgg

SEQ ID NO: 18849 - DNA, 439 bp, Setaria italica
  Peptide Sequence Number=SeqID_84823
accaagaaactactactacggaatgatgtaattttgcttgttcttacgtattttaaaaggcagttcccacttctgtttatccttgggggctggggcttctgaaacaaaaaggaattctcttttgaaaacatacaggggctatgcatatacggtgcatctcttgttaaaatgggcaaatgatcgaaaacggtgaaaaattatcatctaataacatacattagagtttcagaaaattttgaaacttggcacatccatagttcatatcttgatatacttacaaaagttgaggttcaagctattctagtttaattcatatgaaatgaacaaaaaatcaggtgaatacgcactagatggcacagtttatcctctagtgcatattcacctgaaaaatgtaaaagggaaataacaaaaagaaataaagaataaattctattttaga

SEQ ID NO: 18850 - DNA, 411 bp, Setaria italica
  Peptide Sequence Number=SeqID_84824
cgcctcaatctcaaccgccatccacgagagagtgacaggagcatggagcatggcctgcccacgcggaccagaggtgcatgaggcggccaacgccgccagccccgccaccacggcgctgctggcacgccttcgcttgaccacagccaaccacgccaccacggcatcgctggagtgcagccgagcaagccgctgccggccacgccacctcgacgccacctacgcacctccgcacggactcggctgacgacagcgccgcggccatcgcctccgtcgcagcccctggtgccgcccgtcgctggctcacagtcaagggcttcgtgtgccgtccctgccacccccggctgcgagacaccccgttgggtcgcgagccgccagatgggcaggaaggggcggcggcgcaccgcttcgtcg

SEQ ID NO: 18851 - DNA, 416 bp, Setaria italica
  Peptide Sequence Number=SeqID_84825
tggtagctggcgacgaagggcgccttggaccagtcggccttgacgcggccgccctgcgtggcccagtcctccgccgcccagatgctggagtaggcgtacatgggctggctcgtcgggaacgccacgccgtggctcgcctcgtagttgcggaacgcacggatggggacgccgtcgatgtaccaaacgatcatgcagggagtccaggagatggtgtagttgtggtagccggtggtggggtcgaaccagggcttgaactgcatctccttgttgccgacgccgtcggcgtagacgttggtgtggatggtgtagggctgcccggtcacgttgcccaggaactcgaagtcgatctcgtcgtggttgtcgccgacggaggatgcgtagtatgtcgtgacagtgccggccgagtcgccagggac

SEQ ID NO: 18852 - DNA, 226 bp, Setaria italica
  Peptide Sequence Number=SeqID_84826
ctgcgaatgcacatgagagggcatggtgatgagtacaagagccctgccgcactagccaagccacctagagacgcaagcgcagagcacgaactggtgaggaggtactcttgcccatttgtaggctgcaagcggaacaagctgcacaagaacttccagcccctcttgtagtgattcttcacgcacagaatcgtcttgaggggctggaagttcttgtgcagcttgttcc

SEQ ID NO: 18853 - DNA, 1693 bp, Setaria italica
  Peptide Sequence Number=SeqID_84827
ttttttttggaagttgatcgtagatggatcacagtcagaaccacatccatggccaatctgctgcgaacttctgctaccagttcggttcagacaatccgttccttggcatgggagttcagcaaccatttgcgtcattcacctcgccatttggtgccactccatccaccaacattccccacatggattggaacccggctaccatgctagacaaccttaccttcattgaggagaagatacggcaagtgaaggatgtaatccgtacaatggtggacgatggtggccaacgcccaggggagctcgctcagcagcagcaggtggtcaatgcagacctgacatgcctcattgttcagctcatctctactgccggtagccttctcccatcactaaagaactcgacctttctgagtcacccccaagctggacatatgggcatcgttaaccatgttgggtcgagctcgagcttcgttcctaatgtgacaaccatttctgaagagaacaaggaggaaatgtgtggccctgaggactacgaagaacttttcaagggtttcactgatggcgcactggaaggaggcattgaaattggcaatgttcttgtcgaggagcaggatgcaaaggatggcgatgaaggtggtgatgttggcatggatggagagagcttaccgccgggctcttatgagttactgcagctggagaaggatgagatattggccccacacacgcacttctgctccatctgcggaaagggtttcaagagggatgcgaatctgcgaatgcacatgagagggcatggtgatgagtacaagagccctgccgcactagccaagccacctagagacgcaagcgcagagcacgaactggtgaggaggtactcttgcccatttgtaggctgcaagcggaacaagctgcacaagaacttccagcccctcaagacgattctgtgcgtgaagaatcactacaagaggagccactgtgagaagagctacacctgcagccggtgccacacaaagaagttctcggtcatggccgacctcaagacgcacgagaagcactgcggccgggacaagtggctgtgctcgtgtggaacaagttttacaaggaaggacaagcttttcgcacacgtagctctgttccaaggacacaccccggcgttgccaacagaggagccaaagacttcttcagaccagatcagtcgcgtagggagccaccaggaaccagcgaaactcccaagctccatgggcagcagcttcgtgtggggtacctcctcaggtaatgaaaatgccctggatatcaaaggggtcgatggctgcagcgatgacttcctctcgacagcgaactttggttccttcaatttcagtttcgggccagctgatggatttacaggagagccttctggcagctcattctcaatgctgccttctgagcacttccagagtgctcaaaagaaggggaagaactagacatagataatctcgggaagcttcagatagaattgatggtcagcttcagatggaccataatcattgctcttgttttgcatcattttccactgtagtataacatcaccttttcttccatggcattgtacttggcttcgaagttctcgcggtcatgttcctagcttcttgtaatcctgtagaaactaactacttaattaattacctaagtactaattagaagacttaccaatactaaa

SEQ ID NO: 18854 - DNA, 860 bp, Setaria italica
  Peptide Sequence Number=SeqID_84828
gatccagagcatattattgggactgtccagtactcaaggcctcgtttctacctgatggctctgaagtcatcctttcaggcaggagaaagttcttctactcatttgatctggtaaatgcttctgttagcaagattggacctttgacagggcgtgaggagaaaagcttggagagctttgagatatcacctgactcaagaaccattgctttcgttggtaatgaaggatacatcctccttatttctgccaagacaaagcagctcattggaaccctcaagatgaatggaagtgtgcgttcgttggcatttgcagatggtggaaaccagctactgagcagtggtggagatgggcatgtttatcactgggatcttggaacaaggaagtgtatccacaaggcgatggacgacggttccctgtctggcgtttcactttgcacctcacaggacagctctttgtttgccacaggctccactagtggtattgtgaacgtgtacaagagggatgattttcttggtgggaagaggaagccactgaagacaattgaaaacctaaccaccgatgttggcgagatgaagttcaatcatgatgcccagattttggcgatcacctcgagaaaggagaggaatggaatgaggctcgtgcacgtcccatccttcagtgtgttccagaactggccagggcctcgttcagccttcattatccacggtgcctggatttcagtccaggcagcggttttctatctgttggacacgctggtgggaaagttctactatacaagctgcatcactatcaaaatgcctgagccttgaaagtgtattgggaaaatccagttttgacactttctagtttctgagaattcctgt

SEQ ID NO: 18855 - DNA, 643 bp, Setaria italica
  Peptide Sequence Number=SeqID_84829
cggcggcggccacctcacctctccctgatccctcatcgtcttctctttcggcggcgcatttccatgaggccgaccggagcgagggcggcagcacatcaaagcttaggtgttccacgacagcggcggcatccaggagtgtggtaacagctgccgccccataatggatagcaatggtgaagttggacatgaggaattggactttcatcttgaggccactgaagatttcagttcagaagatgataacacgctgtcgaatcggaatccatcatcagagtccagggcctcgtttcagccttcattacccgcggtgcataattatcctagtccaggcagcggttttctgtctgttggacacgctggtgggaaagttgtactatacaagctgcaccactatcaaaatgcctgagccttgaaagtgttttggaaaatccagttttgacagtttctagtttttgagaattcacgtgctatctgtacgccgattccggtttagtcacttattgttgtgttgtactgtcacaagtgatagtgcttatcgcaatctggcaatatgcaattgtgtttcggtaatgattgttaattgcagagttccaggaacttttgttggtgaaactagctaatatgatgagataatctggagcaa

SEQ ID NO: 18856 - DNA, 1324 bp, Setaria italica
  Peptide Sequence Number=SeqID_84830
caagcagccgccgcgcgctgctccctccgaccctccccctccgttgccgccgccgctcctctccgccgggctcgacggcggtccgcggcccctcctctcccctcccgcccccggcctcccctttattgccggtcgccgcggtcgccggcatcaccgcgcggccaccagcactgagcaggcgacgagcacccaccaggccaattctcgaggcaagatgagcttgatatcccagaacgcccagaagcgtcgccttgagaaaagtggagctgatgatggaaatgagggaatcggctctcctgttgctatcgatggagaggttgggaagggagccaagttgaagaatcacaataaagaaaggaagaagaggactaagatgccggaggcccagcagaacaaggaggaagaggagatgcggcagctggagagctcgctgtttggtgccctttacgcaccactggattttggcactgaggtaggggctgcagtggcagctcctgacaggggtgcgcctttgttcttcacggatagatctgctgctgatggtgcggatgtcttgcctatttatgaggaggacttggctcatgatgatgaggaagatggggtgataatcaaggggagaaagcctgtgtgggtagatgaggaagaggagaggacagaggtggacattgtgaaggttgcaaggttgaggaagctcaggaaagaggctgatgagcatttaatatcagggaaagaatatgaggctcggttgcgtggtcagcatgccaaattgaaccccttcactgcttgggctgatatggaccggaagactcctcttcctggagcatcagatggtgagtctgatgatgaggggggtgttgatgatatccttcagaataacgatgagcttgttgtcaaggatactgttaagcttttacctgggatgctggagttctcaaggcttgtagatgccaatatccaggatccttcaagtggccctattaattcagtgcagtttcataggaacgggcagctgatgcttgctgctgggttggataagcatttgaggtttttccaaattgatggaaagagaaaccccaagatccagagcatatttattggggactgtccagtactcaaggcctcgtttctacctgatggctctgaagtcatcctttcaggcaggagaaagttcttctactcatttgatctggtaaatgcttctgttagcaagattggacctttgacagggcgtgagggaagtagaaatagttttttcttgtttagtctaagtatttggtaccttttgtactagggtcgttgttaggttagttaaaagttactttta

SEQ ID NO: 18857 - DNA, 334 bp, Setaria italica
  Peptide Sequence Number=SeqID_84831
agacagtaatacgtagcttgttaggtgtggatgacagctcatgctctattctcggaagattggccaaacttgaataacttgtagctgcacttgccaaattaaaaccaggctgtctagtggatttgatttgctgtgcattctctgaagtataactgtgccgcaaattgctgtcactttgaaagactttaacactgtttattgacttggaattcactggcatggccactatgtgaggattcaggccactgcaactttcattggaagtgaaaccattaaagaatgcagggagtgattacttgaagcaatcgaaaagttcttgagagaatctacagtt

SEQ ID NO: 18858 - DNA, 849 bp, Setaria italica
  Peptide Sequence Number=SeqID_84832
gggaacacagggcaggaccaaattgcgttgttgcagccggggagaagagtaggaagaagaaatggctgcgataccagcagcgatctccggctgctgctcttcgtctcggctgtcccagcctgctggcctcctgccatcctcgagccgacggcgcttcaaggtgacggccatggcgcccaagaagaaggtgaaccggtacgacgagaactggtcgaagcagtggttcggcgcgggcatcttcgcggaggggagcgaggaggtgtcggtggacgtgttcaagaagctggagcggcgcaaggtgctgagcacggtggagaaggccggcctgctgtccaaggccgaggagctgggcgtcacgctctcctcgctggagcagctgggcctgctctccaaggccgaggacctgggcctgctcagcctcgtcgagaccgcggcgggcacgtccccctccgtgctcgcgtccatctcgctgccgcttctcgtcgccgccgtcgccgaggtggtcgtcgtgcccgacgactccgtcgcgctcgtcgccgtccaggccgtcgtcgccgccgtgctcgcggccggggccgccgggctgttcgtggggtccgtcgtgctcgccggcctgcaggagtcggattgatcagcggctgctcgctcgccgatagcttcgcggagctgggtaaaccatgctgcgtacgccgtcgtcagcgctaccgcatccgagtaattaagccttgtagcataggatcgttattgttaacaattaatggaattatgtgatgcaatgtaatagccttttggtatttactccatgcaatgcaagtgtgaaatgctgaagaaagtacggtgaaaaaaaaa

SEQ ID NO: 18859 - DNA, 620 bp, Setaria italica
  Peptide Sequence Number=SeqID_84833
caaatgaagagtgaacaagcaccaattgtcgctctgcagcagcctttgcagcaaatgaagagtcaacaaacacctcacacaaatcaaacgaatggtgcaactacagcagcaaaagccccagttgttacatttcacatgttacttccgattttgagacgctacattgacaaagacaaggatatgcaagttcagtccatttttgccaagttgcggaaaaatgaagtcagcaaggaacactttttaaaagttgtaaggaatattgttggcgataaggtgcttaagctagctctttcggaatatcaaatgcaggcacagcgaaatactcagacaaatccaggcaactattctttattaagtcaagtttctggtcagcagactgttcctagtggttctatgacagatgagcaggaggcatatccaggggctcacaccatccctatgaaacaagctattgacaacctaagaccacctcaattccggccttccttgtctagccaagtgcagagtattaggggttattcaccttcacaaagcaatgcacataaggctaatgaaacaggaaacatgtcagatgggaaaggagctcatatgcgacaactaaacccgttcctaccctaatt

SEQ ID NO: 18860 - DNA, 441 bp, Setaria italica
  Peptide Sequence Number=SeqID_84834
atagttacagagacatcagattcaaacatcttttgaactgcattgatttgagcttgactgcaaagacaccagatatcatccataagaataccacatcttcatcctcaataatccccaatatcatgactggatgccttattgtggtatgattatttgtagatggaagagttgacactgcctctgaaaggtatggttccaaatcaatgaccttgtgaagaacccaacttgtagcacctcagtattggtttccatgacccaaagccacaggaagaacccttcaaagcaatcagtccaagccccccatccactgtcttcattacgtacgcggacatttctcctgcagatatcatgtgtttcgggtggacactcgatgtgatataactcatgtgtgcagaaatcaaatacgaggatatgctttggcttcagaagccaataataaga

SEQ ID NO: 18861 - DNA, 663 bp, Setaria italica
  Peptide Sequence Number=SeqID_84835
tactacttcgtattgttgtattattaactatataactcatgtgtgcagaaatcaaatacgaggatatgctttggcttcagaagccaatataagacgttcctgataaggacacttggcctgggataaaccatagatccatatggaacagaagaaatctccaagaagtcccagtccccctctctgatgagtattcatgggcataagcagcgccattccataggtatatacccaaactatgaagaaggggcaagagtggtcattgtggccaactttgcaaaacactgcagcttggctcccaggctcgatagttaactctagcatgggcacaaagcgtttttcattcgtaatgggatcccacgctagcattcttgtccatgttgagttaacaaggataacacgactgtggcggtaactgaggacctgccagtacggatcaggcagggagaaggctttggctatgacgcgattaggagcatcgccgtagggaagaaatcaagggattcgagtggagttggtgaaaacaccaagcaggggaggcgcgtgatgaaattcatgaaagcagcgaaggaacatagggctagtgatcaggtggcgccagtgcttacagacaagtgaggcattaagaatacaagaagggtgtgaagagaggcgaaggaaaaatct

SEQ ID NO: 18862 - DNA, 294 bp, Setaria italica
  Peptide Sequence Number=SeqID_84836
ctccacagtacggaaggctactgcaggcaagcagctccggcgccgaatccgaaccctaaccctagccgattcggttccgggccacggcgcgcgcggactccgaggggagcggcggcgatggaggagcaggtgcctcgaggcggcggggggaggcccccgatcccggcgggggggaggaggccggcgctcgcgaggcacgcctcctttgtgaggagtcctgcaaacagtacaaggcctgaaactgagagaacttttgaaagcatggacactgaatttattccagttatacggtcg

SEQ ID NO: 18863 - DNA, 1350 bp, Setaria italica
  misc_feature (1280)..(1350): n is a, c, g, or t
  Peptide Sequence Number=SeqID_84837
cagaatctccagaggctttacagtactactagagcagctaagcatttccagcgaaacattgtacgaggcgtggagtttaccattgccgttagcaccaaacagatggagatagtgagaaaactagctgaggattgttgcaaatatggaaacgacaatcatcattttggtttgctcttgctaaggcatctgaggagtttggtaaatctcataaacaaatagagaaagagcgggaggatcttcttaaaattcttggagagcaggtttttgagcctctccgagaaatgataatgagtgctcctcttgaagatgctcgcttgcttacttaccgttatcaacggatcagacaagacatggagtctcagatagctgatgtgatgagaaagcaacttaagtccaaggaaagtagtgggaatgcagataactctatgaaactgcaacatgcagaatcgaaattatcagagcttcgaactacactggcagcattgggaagagaagcaactgcagctatggaggctgtagaggctcagcaacagcaagttacatatgaacgtctccttgcaatggttgatgctgagagaacatatcatcaaaacgctgctgatattctgagtaaacttcatgatgagatgctccttgcaaagcatcataatgaatcaacaaaccattacgatgaacagtcatctgagcctgaatcagaaacagctccagcacaactgcactcagatagcacatctgatgatccagtactaactaaacctagcgaacccacggggaatggtcaggaggtacaatttcttggggaggttattcatccattcgatgctcaggctgatggtgagctcagtctatccgtgggtgaatatgttgtgatccgccaggtggcggcgaacggttggtcggaaggggaatgcaagggaaaggctggctggttcccatctgcctatgtagagcggagggacaaagccccggcaagcaaggtgatagagcctggacttctgactacttgatccatggcgtacttatggttgctgacttgctgtcatcgtcctttttcttcattattgtacatgacatgttggatgagcgactagtgtttcgtagagcttttacctttctgtgcagatttgttcttctaggcttcttcccttgcttgataactgtatgtaaagtatagttttgggccctaggatttccttttggtatatgacaatgtacagagctattggtgatgagaagctgtcaacttgccctttatattcggacagcatgcttcctagaannnnnnnnnnnnnnnnnnnnnnnnnnnnnnnnnnnnnnnnnnnnnnnnnnnnnnnnnnnnnnnnnnnnnnn

SEQ ID NO: 18864 - DNA, 388 bp, Setaria italica
  Peptide Sequence Number=SeqID_84838
cacgccagcacgcgggggcgacactcgcatgcctcgcagacgcgcacacgctcatggcgcgaggccacgcggttagcagcgtgcacccgcgtgtcgcaggacgcgcagaggtatgcagcgtcggcgcgacagtacaccacgctcggcgccgcgcggcacccatcgcacggcctggcccatggccgactcccttcaccacctccaacctcctcctccagaacgctgccgccaaaattataattcatgaaaggagagatcttagcttggcacttgcaccacgttggcaatttaggagccttagtgcaagcaagtagtaggatcgatcagtgattgtgagtgggttgggaagtcaccaatgccagaagttcagtgtagagtactaatagca

SEQ ID NO: 18865 - DNA, 405 bp, Setaria italica
  Peptide Sequence Number=SeqID_84839
caaatccaggtactgcaactgaaccaatgaactgatccctgaaggtaattcgctgatagaagtatgggacaaatctaacactctgagagatggcatgaactggaagaagccatcgcatatcttgtccaacccagggttgccttgtagcatcaaagtcttcagtaaagggcaattaggcttctcatacagctcaagaatgttgttccgcatgaaagaaatccgctcagcgtcgctccacttctctgcgcctggcgcctccttcagcccaactccagcacggacaagccatttggtctccttcgtgccaaaatccgatgctatccatagagccatggcacggaccatgggatgcattttgatattattgtattccttctattcttcacctttctccaggagagaggc

SEQ ID NO: 18866 - DNA, 258 bp, Setaria italica
  Peptide Sequence Number=SeqID_84840
gtgtccggccgcgctggggacctccgcctcgcctcgggcctcctcctcgagatgcgggacaggggcgtggcccccgacgcgttctcatactccacgctcctcgccgcgctcacccgcgcgggccacctcgaccacgcgctcactttcctgccgctcatggaggacgacgccgtggccccggactcatcctcttctccaacctcatccacctcgccctccgcggcggcgacgcgcccaaggcgctcgcgctcttctccg

SEQ ID NO: 18867 - DNA, 329 bp, Setaria italica
  Peptide Sequence Number=SeqID_84841
ttattttcgggaatgctgcagcggtgtttgaggaatgtgtgattaagactgtgccgcgggcagagggagttcggaagactgcacgaaatgtggtggcagcgaatgggcggattgatccggggcagacgacagggtttgtgtttcagaactgcaccgtggatgggaacaaagagtttctggaattgttccgaacaaagccacagtcatacagactgtatttggggcggccatggaaagagtatgccaggacattgtatgtcagctgttatctggggacggttatcaggccagagggatggcttccctggcgaggggattttgcattcagg

SEQ ID NO: 18868 - DNA, 580 bp, Setaria italica
  Peptide Sequence Number=SeqID_84842
aaacaatgaagttttcacagcaagaagttgatttagccttcaagaaactaggcgacgaagctccattggaacagctcgtgaactgcattgtcaatgctcaattaggaggatcctctggaggactggaaaatggtgacactacaaatgagggaaaggctgaagcactgtttggtatcatggagaaaacacttagcttgcttcagaagggttataccgaggaagaggtgtcatcagctattgacagttttggccacagagcaacagtgcaggtgctggaggactcaattttggcaaggcgaatagccaatagcatcgagcagaaagagataaaggttgaatctgactttctaggcgaagcagaaactgattattcgacataccagacctcatactctgcagtgaggtgttatgatgatgatgtcaacaacacacgggttaaaagggctaagcatatatttatgaatgacagaggggcctccagtagtaaccctgccaatccatggtctatggggcgctgtgcagggaccagtgatatgcctgttaaggtagaacttgaggcagtaacaccaggctgtcgtgc

SEQ ID NO: 18869 - DNA, 1846 bp, Setaria italica
  Peptide Sequence Number=SeqID_84843
cgaaaatggttaaaatcgaagatcttactgaggacagcagcgcagatgctgatgccagggttcccagggaagcgggctgtgggtctgctgcctggctcggtgcatgccagcttgaaggaggaagatcaaccaagttcttcttccagtagtttaagattacaatttattggaatggggttctcaccaaagctcgtagacaaggtgctcaaaagacatggtgatgatgactctaacaccagtcaggaatctcttctgtcctattctgaccttcagcagtcaggttctgaatcgtcaggttctttgggaagtctctttgattctgataatgaagaaaacaattctcctttagagtctatgaaaggaatcggtcaaaacatcaagccggagcctgattctttctcagaaaagtggtcatatttactccaaacaatgaagttttcacagcaagaagttgatttagccttcaagaaactaggcgacgaagctccattggaacagctcgtgaactgcattgtcaatgctcaattaggaggatcctctggaggactggaaaatggtgacactacaaatgagggaaaggctgaagcactgtttggtatcatggagaaaacacttagcttgcttcagaagggttataccgaggaagaggtgtcatcagctattgacagttttgtggcacatgcatgttcatttcaggccacagagcaacagtgcaggtgctggaggactcaattttggcaaggcgaatagccaatagcatcgagcagaaagagataaaggttgaatctgactttctaggcgaagcagaaactgattattcgacataccagacctcatactctgcagtgaggtgttatgatgatgatgtcaacaacacacgggttaaaagggctaagcatatatttatgaatgacagaggggcctccagtagtaaccctgccaatccatggtctatggggcgctgtgcagggaccagtgatatgcctgttaaggtagaacttgaggcagtaacaccaggctgtcgtgcaaaagtacaaggcgaccttgctaagcccccatatttcttgtatggaaatgtcgttgagatcccaaaagacacatggcatcaactcaaacagttcttatacaatgtggaacctgagtttgttagcagtcagttcttctcagctctaactcgaaaggaaggttatattcataaccttccagtggagggaaggcatgttgtggttccaaagtcaccaatgaccattgaagaagcgcttccattcacaagacaatggtggccctcatgggatacaaggaagcatatcagtgttgttaccatagaggctgccgggattgatcagacatgtgagagactggggaggatggttagagagtcaagaggagtgctttcacaagaaaggcagatgcagattatgcaccaatgcacggtttcaaaccttatttgggttggccgggacaagttaagtcctttggaacctcgtcaattggaaaggatactgggttacccacataaccacacaaatttgtttgaactaaatcaatcagatagatttgctgcgatgagatatgcatttcagactgacactttgtcatactttttgtcagtcctaaaagaccaatttccacacgggatcagagtactatccatctatagtggaattggaggtgctgaagtaacgctccatcggctaggtattcctctgaagtgtgtggtatctgttgaggaatctgaggtaaataggaaaattctgaaaaggtggtggctgaaaacagaacagactggggagctgaggcagttgcctggaatctggaagttgaaaatacaagtgattgaagactt

SEQ ID NO: 18870 - DNA, 734 bp, Setaria italica
  misc_feature (723)..(734): n is a, c, g, or t
  Peptide Sequence Number=SeqID_84844
ttcagactgacactttgtcatactgaaatgcatatctcatcgcagcaaatctatctgattgatttgctgcgatgagatatgcatttcagactgacactttgtcatactttttgtcagtcctaaaagaccaatttccacacgggatcagagtactatccatctatagtggaattggaggtgctgaagtaacgctccatcggctaggtattcctctgaagtgtgtggtatctgttgaggaatctgaggtaaataggaaaattctgaaaaggtggtggctgaaaacagaacagactggggagctgaggcagttgcctggaatctggaagttgaaaatacaagtgattgaagactttatcaccgagtttggtggttttgacctgattattggtgggaattatacttcttgtaaaggtggtacaacagtaaatacaacaatgggcatggattccaaccgtttctatgaatatgcccgtgttgttaaaagagtaagggctgcagtgggggtcaattgacgactgacatgatccatctttagtgagttctcgccttggcaaattgccatgaacttccttgtagcatcatgtgatctgtaaatgtaggatggtagaagtaaactatgacagattccttagctcttacattgtgcactagtgtagaattttaaatgcagtgggttaatatttcttccgcctgtttgtttctcctctagttgattctgtgtannnnnnnnnnnn

SEQ ID NO: 18871 - DNA, 3764 bp, Setaria italica
  misc_feature (3597)..(3764): n is a, c, g, or t
  Peptide Sequence Number=SeqID_84845
ccttgtcgaaaggtatgtcgccgcacgcgggaccgccgcctccttccgttgcgactgagtacacgtattcaggtggagcccattaccatggtggtttcccggattcggtggggttcaccagtgccgtcaccatgtcggctccggccatgggcatcccagcgcaaaatcctatcctagttaggacggagccatcaacgatgcagcctcatcatgttgctgctgctgcttatgcgacatcgcagcagccacctcaagtcaccagctatgtgcagcagcagcagccgcctcaagtcgcccaatatgtgccgcaccagcagcctcagtctgcttcgtatcagcagcagatgccgcagtcgtatatagaaccgcagcaagtccactacatcaatgcgcaacaatttggtgttcatggtgtgccgcaatctgtcaattttgtgcctgtgcagatgagccagttcatgcctagcattccagtgacgagttctatggcgaccgctgctgctcaacaagtcggtacgttcaggcctgtttctgctggtgtagaacctgttcaggagaacatgcagttcacaaggacagtgcaagctccagttgatcagagttaccgggtgctgcagacgccactgtcgcagcttcctcctttgccttctgtgcatttgcagacaagtgatacgcagagatacggtgttcaaccggcgatgacaagcgcaataagcacaccggtggtgacaagctcagggacgattcctgtggtgcttagctcggccactgttccatcagtgaggtatgatgattgcacaatgtgccagaaatctttgccgcacgcccattcggataacattatccaggagcggggaaatcctcgtgcactgagcaaccctgaggcagctccggtattttacagcctgcatcaagatagtgggtccaacaaatccagtccagatgcgaactcaggaactcctgctaattatatggtagaaccgagagctgggaacgcagtagggatgagtcaatttgagtccgtactccctgccagaatgcctggagtccaggcaactgcatctccagatgcaggtgtgccggttcaacccaccatggttgccttaccagtttctagtccacctgctccaaatggagcatttgtgggtcatcctattcaggccggggttgaagatcctgccaggtaccagcagcaaccatactcttatagcttgcaaccacaacaagttccagttaatggcccgcaagtcattgatgccggtgcatacaagaatgcaaactatccagcagcagaaccgcttagagaatatgctcgtgatcttcctcatgattataccagagctatcgatgcccgtatgcaaggagttcatttgggtcctattgcccctccagaatctagtgttcaaggaaagccttcttttcctcatggtaccattgaccatgcaaaagctgagaagccacctgtaaatattgacggtagttctatgtacaaatctcaagctggagggtatcatatggggattaccaatgccttcactgctcctgctttgacccaagaggacaacattgcaaggcatagtgaacaaccaccacctgcttttgatgttggtgcacaaagtgttcatcctgacataatccagaatccactcaatgtgccagtccagaacaaccttagagcgcccattgagccacctgtttccaatgaaaaggttcctgtccgaccaccttactctggtgttcaggttcctgctgggacacctccacagcttcctagggaaatgcttggtcacttggtctctgctccccctgatggcagcagtaacttcccattgcaggctactgctggtattgatcgtgttgaagctacacgggaactagcttacacagattcacttttctcaaaccaggatccttggaaagcagtgggaaatgtctctttagttcctccaaggccaagcaagctagctaaagagcctcttgcttctggagatcaatacatggatggtcatgttcctgatatcaacgcaaatggtcccatactcttagaagaagggaatcttccacacattcaggacccagggtttaaggatatccacacgattaaagtgaacaaaggatttggtgaggaaaatattaagcgacaattacaagctgttgctgaaggggtggcagcatcagttcttcagtcaccctttccagaaaaaccagctgcattatctggtgatcacatagattcacatggagcagtagttgatgcaaaagttaaggatgagggtaacaatcagtcagacaaaacaagccagggagttcaagttttagatgacatcgacaaccttcagataatcaagaacagtgatcttgaagaattgcgtgaactgggttctgggacctttggtacagtttatcatgggaaatggagaggttctgatgttgctattaagagaatcaatgatcgatgctttgctgggaaggcttctgagcaagagcgcatgagaactgatttctggaatgaagctggcaagcttgcatctctgcaccatccaaatgttgtagccttttatggtgttgttctagatgggcctggtggatccgttgcaactgtaactgagtacatggctaatggttcactacgacaagcattgcaaagacatgaaaagatattcgatcggcgtaggcgtctactaattgcaatggatgttgcatttggaatggagtatttgcatgggaagaatattgtgcattttgacttaaagagtgataatctgctcgtcaacctaagagatcctcaacgccctatatgcaaggttggtgatttgggcttatcgaaggttaaatgccagacgctgatctctggtggagtgcgaggaacgcttccttggatggcccctgagctgttgaatggcagcagcagccttgtttctgaaaaggtcgatgttttctcgttcggaatcgtgatgtgggaactacttactggtgaagagccttacgctgagctgcactatggtgccatcataggtgggatagttaacaacacgctgcgtcctcgggtgcctgagtcctgcgatccccagtggagggcgttgatggagcagtgctgggcagccgagccgtcagagaggccgagcttcacggaggtcggcaatagcctgcgcgccatggcggcttctcctaccaaggcccaaccacagaaatagatgccgcagctcgcgccataacgttccgcggcctttcacctctgcaacatggggaggttccatgacttttgtacatgaaaataaggtgaggatagataaagagaacgtggcgtccttatagagtcggtggatgattgatgcttcctgtgtcgtgcttttactgggccatggaaacatgtaatggcgtaatgtaagagtggaccgtgagcatgtacatgaggtgttgtagcagggttagttcgcgaatctctgtactcgtagtcgtgggtccgtctttcgatcctgtgcgttttaatgtggcagcgccgttcaggagaagtgctgtttgagcagccttgaggatttcaactgaactagtgcgactgagaagcagaaagaatacagtatattctgcaaaacaaannnnnnnnnnnnnnnnnnnnnnnnnnnnnnnnnnnnnnnnnnnnnnnnnnnnnnnnnnnnnnnnnnnnnnnnnnnnnnnnnnnnnnnnnnnnnnnnnnnnnnnnnnnnnnnnnnnnnnnnnnnnnnnnnnnnnnnnnnnnnnnnnnnnnnnnnnnnnnnnnnnnnnnn

SEQ ID NO: 18872 - DNA, 451 bp, Setaria italica
  Peptide Sequence Number=SeqID_84846
ggaagggggacgaaaggtgcggcgggcggcggcggcggcgtgtttccctaggctgcctagatgaagtaatctgccggacatggcgatcgacgaggtcgcgctgcgctggccgccggcggccgtcaacaccatcgccatgcctccctcgcacagccagccgctgcaccttgggcaccgatccgccggcttcgacggagcctgcaaggctgcaacctccgccggccgcgacgccaccaatcatgcaccatggctgttcggtagtgggccgacctgcgtgctgctttaatcgccatggccgccgtcttcggctccatctctagggctctcccgagtagccgagcccaatcaagctggccttcaatgccgtgagacagaggtccttcaccagcagcatccgccaactgaaaagttccaacttgtcataactgacacaaggacgtctcttggtcca

SEQ ID NO: 18873 - DNA, 384 bp, Setaria italica
  Peptide Sequence Number=SeqID_84847
ctatatcgacagcttatagaaccaattcctttcctcctcaggaataaaatctctaaatggttcccatgcatctgggaaaatggctgctgcaccgccctcatagaaccaatcaagctccttatcagggtgtgtctgactgtaagcaagggccaaggtgcttccccatgaaccaccaaacacctgccattccgggatgtcaagatgttccctgagcttctcaatgtcagctaccaagtcccaagtagtgttctgctctaaacaagcatggggagtgcttctgcctgcgcccctctggtcaaacagaacgatcctgtagaactccgggtcaaagaacctcctgttgccaggcgacgtgccggcgccgggacactactcacatactaa

SEQ ID NO: 18874 - DNA, 505 bp, Setaria italica
  Peptide Sequence Number=SeqID_84848
aggctctgctaaccgctacagccatgggttttattctgcgcctctgaattcgatcatcagacgggcggcacgccggcacatgcctttcgccggctcattttcgcaacatgtccctcagcttctctgtggctgacctcagttcggcggcaatacctacttcattggctgagtgccctgcatctgggaccaccttgaattctgcttccggccaagctttgtgaagatcccaagcggacatcatagggcaacaaacatcataacgcccctgtacaataaaagctttaatatgccgaatcttgtcaacattgtctaataggtatgagtctgagggtaaaaatcccttattaacaaaatagtgattttcaatccttgcaaatgcctgaaaaattgaaccatgtatcaacaaatataaaataacatgttattcgaccctgtaaaccatagaaacatcaactaaaacatgccttataaacatatgttgcaattttgtaaattttaaattcag

SEQ ID NO: 18875 - DNA, 419 bp, Setaria italica
  Peptide Sequence Number=SeqID_84849
gtgcagtcatcatctcccacatcgtccatcgcttagcagcttcaatctgaacagtaggatcggatgaagttagccttttgctatatgcagctatgaaacaattcctttcctcctcaggaataaaatctctaaatggttcccatgctgcaaatttgaaactaaagttatttactcaaacaaagtggcacgagcacataggttgttttttctttcataaaatcggaaagtaaaatagttacagagaacactagaaccaattgcattgacatttagtattgtcatttaacttctggtatagtcactgagaaggtatgccataattaataaaagttgccgatattattctgcaacagtgaaaatgattggttaatgtttatcgaagcattttttctctatgacacaaaaccgagaatacaaac

SEQ ID NO: 18876 - DNA, 585 bp, Setaria italica
  Peptide Sequence Number=SeqID_84850
ttgcttagcaaacatcttggaggagtgattagtcatatggcaaatcgcaaatttgaagtacaaaagtaaatatttagtactacactctataaaaagtaaagacacagcatgtcttccaggcttccagcttcagtttagtggccaatatactatcagaaaagcttatgacttcaaaagatcgcaatcacataatttaaccactggttcattcaggaaccaaactcttggaaaaactattttttgtgcttcaatattaacagtccaattaatcccagttccaacatgaatatcatatctgatatttttggaagaatgatgcaagcataatttaccttgaattctgcttccggccaagctttgtgaagatcccaagcggacatcatagggcaacaaacatcataacgcccctgtacaataaaagctttaatatgccgaatcttgtcaacattgtctaataggtatgagtctgagggtaaaaatcccttattaacaaaatagtgattttcaatccttgcaaatgcctgaaaaattgaaccatgtatcaacaaataataaaattaaacaattagtttaattacgaaccca

SEQ ID NO: 18877 - DNA, 1343 bp, Setaria italica
  misc_feature (1251)..(1251): n is a, c, g, or t
  Peptide Sequence Number=SeqID_84851
tttccactaatgatttattaatgcaccattgtagtcctggcttaagaatattccagatatgtgaaaaaacaaaatgagaaaattcacaaagccattggtacttgttgctgtaacacaaatcaaaagttttaaactttctttcacaaaaccactagtacttagatccatataatgcaaaagccacaactttgcttctcttgtctatatgcaaatgcaaaaaataaaaagaaagctgtcttgggccttggcttcttctcattaacaaagaatggactgtgaacatgtgttttgctaccgttgatggtataccatttatttatattctgaaaaagatgggcatggatatcctttgccatttaaatttggttgacctgattgcctctcttgggtgttcctcatctgattacatgtacggatgtaccacagtaagaaagatagttggggttggagagaatagtgttgatagaaggtgatgagcacgttactgggatgccgaggtattatgaagcatcataattttaacttgtatgctgaagaatgggagtgaaagcacgaatggcgtacccctcagaggtcaatggcaaaatattactggcccttaatgatgtgcgtcatactgagctatctgtagggaaaaagtatgtcttcaggctcaagctgcaaggggaaggcaaaataactggagcagttgatgtctttttttttaattttggtggcatccagatgaggaaaagaagcgaaagttatggttgtgtgttatataggctaagtatctatggttctgtgaaacaaagtttaaagctgtggtgttgtgttacactcacaactacctgcggatatgtgaaaattccaaataatatctgctagtccccctttctttgtttctaaaggatgtatagacatatttggcacttcctaaatgcttgggaaataaaagttctattagcccctttttatgtatactaagaaatttatatggttctgccagtatagtcctgaaagtagtgctaggctgctagatgcttgtttactttctgttgtttgtttagtcgacaccaggatcagctataagcattcttctttaaaacattaaaaaagtgtatggctggtgtatggagcagagtctgcagttctagggatatttcaaccatttgtccacatatatctccacgaatttatgttttcgtttaaggatagcaaatagaggaaagtttgacaagcttcagttacacatggtcctaattgcaaagntagttttactggtgtgctcttttagttccatcttccatgtaatgtggtcgaccatggttcactacatcagttctcatatctatctgttcagc

SEQ ID NO: 18878 - DNA, 650 bp, Setaria italica
  Peptide Sequence Number=SeqID_84852
ccctcccgatcggcacgctcgtcaccgcaccttcggttctcaaacaccccggcgttctccaggagaactcaaccgaggtgccgccgagcccggcgtcgtggtgcagcagcccgcctgacgagatgagcaggggaggctacccgagtcctgtctcgccgttggaggccgccttcagcgggcaccgatcgcccttgaggacggcaacaaaggacatgatctcaagtggttgtgaaccaggaatcttgtcagaacaagttcagacgactgaagaacgagctgagacaagtcctgtcctggacgaccaggacgacgacatggacgagttggatcaccctatcaaatccttcatcagagacgttctcgttgtcgccggcatgtacagatcgaggcagaatcccgtcaacttgttatcagactgcgaagctaagccgatccccaagcgggtgttggaggaagtcgagtcctcgtcctcaaccgtggcagcttcatccaatgtcggtgcggcagccatcgaccaccggctcctcttcgacctgatcaacgaggcgctcccaggagctgtccggtcctcgacgacgctctgcacattcgacaagttctatgccgcagcaccaagaagagcccccggcggcaagaagcttctagaggca

SEQ ID NO: 18879 - DNA, 275 bp, Setaria italica
  Peptide Sequence Number=SeqID_84853
gctcgactccatccgcatcgtgccgcccccgttccagtacatcgcgccgcccccgttcgagtaccgagcgccgccggggaagggctcgcgctgcccccgttcgagtccgcagcgccgcccaccgcacgactacaggagcgccgcccaccgttagagtacaggaagttgaggcgcccacccaggaggtcaagttcttcggccgctggtccttcgaggacgtccagacgtggcgagtattctgagacacgcaacttgctgaaacctgacaaagtcag

SEQ ID NO: 18880 - DNA, 2165 bp, Setaria italica
  Peptide Sequence Number=SeqID_84854
taatttgcttacattctgttctttaccagtaagccatatatatgcttcctatctatcatccaagtatttatatcgtatatttcatcaaaattttgagaaaatggcaatgaaatgaatgcaactctagaaatatcttctctccgatactccagcttaaggagttatccattccacctccagaatcccccaccacggggtggctggtcgctgcctgcagctgctttgttgggcccagagtctatttcaccacgaagcaattcaaactccttttgtaggacatccatcttctgtagccgttcttgaatatctgaaacttcattctcaagtttggaagccctcatttgttcagcagaaagttgatctagaactaggtggatttcctcagtaagctctgcatttctgttctccacggtagctagttcctgcttcaggtggagactctgcaactgctcttggttaagtctgtcctctatttggtttctttcacccttaactacttgtgccgaggttttgctggtatctgccctattgccaggcttatctttaagttcctcaatttcaaatatgactttcctgctagaattttctggcatagatatgggggtagtgccatttatatccgtttcagttttttgttgaatcgggacacttgatttgagacttgtcttgagggcataaacctgattactataacggccactgtatcctccaaatgacaccagaaaattttctccatcaatcgtgtgcattactaaacttgagccctcacttgtagggggtgcacgggcctcaaggccagtgacaactgaccattcataagtagacatgttaagtacaagagtatctgtgacacctttcctactatttccaccaccggtaataaaccaatattctccaatagttacacctgcatgccctgctcttggttctggagtaacgccttgctgctctggtcttgaccattccattgtctgtgtgtcaaggagatgtaggtcactgaaacatgtagaatgagacctacatctccttgacacacagacaatggaatggtcaagaccagagcagacaagcaaggcgttactccagaaccaatattctccaatagttacacctgcatgccctgaggttactaggaagttaacgccttgctgctctggtcttgaccattccattgtctgtgtgtcaaggagatgtaggtcactgaaacatgtagaatgagaccccccaccaaatatcagaagatatcgctctgcaaagcaagcagcagcatgctctgatcttggagaagggggagtgcctgtggtctcaaattcatcccaagtcatggtctcaagatcaagaatgtgcagatcattcagaagtgatctcccatgaccttccccgccaaacacaaccaaagtgtcgccaacaagagtcactgattgaccaccacgtgagctcggtgagcttccataagtacgcagggaagaccaagtgcaggtttgtggatcaaactctttaacactgagactttctgtaggttccctgctatgtcctgcaagacataggatcttatttccccatggaatcagtgaatgaccagcacatgcagcaaatgagactgcttcagctgattctgatttagcttccagcattgaccatgacaaacttttcaaatccagaacctgagtgtcgccaaggtagcggccattgtgattgccaccaaagacgtacatcttctgctgaatcacaacagctccatgcttgtagcgcggcctcggaagctgtccggagacagagagcggcgtccactgatcgtaggcacttatggagcagaagccttccatgctaatttcattctcctgaacatcgacagccttcccgttctccaccacgacaactttaggctcctcaggggcgatgccattgtggctagctgacccaatggccattggtccttgtacagtcgccatctcgccgcccggcgccgcgcccaccaggtgtcgtcgagatccggacggaggggaggaggaggacgttgcgcagggttctagaaggttctggatccggcggagccaagccggagggccggggcggaaggcccgagatctggaagcgggggctcgctcgtgcagcgcgccggcgacccgcgaaatgggaggcgacttcgagcggcgtgcgtggag

SEQ ID NO: 18881 - DNA, 694 bp, Setaria italica
  Peptide Sequence Number=SeqID_84855
agcaaggcaaatttagtcaaaatattagaggcaatataaatctttgtttctcagatagatcatgctcatcaaattcattctcacttttaatcccaatataagcttcaggatcaaacataccatcatataacggaaaagtgttgaatgacatcctgaatatgagggtctagtttcaatggctcaaaaatctccgtatcacctgtcatgattagtagaaaacaagaaacacaaaacaatatgtatttatcctcatgtcaactactaggatttctcgattgtaatttctctcaaactcatctttctaaaacaagcccttacaagttcttaccaagccaaacaggaggtgacggcaaccaacaagtctacaaccatggagcgaagtgtatcggtgccgcagcaacaaaaacctgttaagctgtagtcgaatatgtggagctgtaggtgggcttaagcaaggaaatatactagcaccatgttagtcacaaaagcaagctgaataatagttcaacggtggtactgtgctggtcctagcctagaccgtggtagagacgtgagcctggacacaaagaaagtcacatcacaccaccggaaaacaatagggaagcacaacgaacagctccttttcttccctgtttttttgtctttcttttcttctttttgttctgttttttcttctttttttcaggggatcctc

SEQ ID NO: 18882 - DNA, 340 bp, Setaria italica
  Peptide Sequence Number=SeqID_84856
cgaaccttgagtacagccagagaaagcaagcatatccatctcgtaacgtaaatggagactaaaaaggggccattttggcggagtattctaattactctcctgcctaactcttcaatttgggtgtaaatttcagtgcagcgtaattcacccggcaacgcaatctctgaatctccagaggcagaccattatttgccaacctagcatcagttctattcagatggaggaccttgtacttccgaatcaaaggaagaatctgcttatggtaataagatatatctgaccaactgataggaggcatggagtggaatttccctaattccactcctctctttatctcggt

SEQ ID NO: 18883 - DNA, 1531 bp, Setaria italica
  Peptide Sequence Number=SeqID_84857
tgtaatctggaaggtgtcgacccatttatctctccaggtggtctttccatcaacttgtcaaataatatttctccatgaagtgtagtctatgcacagctcattcctgcttctgctggtactgtcaatgtaaggaggggatcggcttccctcgtctatgcaccgggcagtcccagggttcctgcggcgagcccatgcaatcaggagctaccccccagtgctgcgtctttcctctcaggcttgttgcttgaatagctcagataatgaggagcccggacggaattctgcttacattgactatagaagccagtgtctccttccctccatcacgctagcagtgcggactgcgaactgggatgctgccagaaatataagcttcagggagtgtgtgaggttatacgggctatctcaatcaattggtttgtttgcattgcttgtgcagctattcttaccgcggagaatcagagagatccagtgcttgattcagagcattgttgattactgtgaaaatgctggccaggagttgtttgagttggctcctattttggtcagcagattgggtgggtcaatgacgttgttgcaagtttatgctgcagttatccggattttggtagagttgtcaatgtttgaggacgctcttctcacttacattgaggccaggaaggttggtgctgagctgcgtttgtgcaacttcttgctgaagtgtttagtcaaggggaatcagattgtgtatgcaaggagtttatttgatgacatgaagagctccggtccttcaccaaatgtctactcttattcagttttgatgagtatgtatacgcatggagagaggttgtgcttagaggaagcttttgagcttcttcgtgaaatggaaatgaatggtgtgagaccgaatgctgcaacctatggaacttacctctatgggctttgccgttccagacagttaacgtctgcatgggactttcttcaaaatctttgtcagagagggtgcccttgcaacacttattgttttaatgcagtgattcatggtttctgtagtgagggtcaggtccacaaagccatagaagtgtttaatgggatgaagaaatgtgggtttctcccagatgtccacagctatagcatattagttgatgggttatgcaaacaaggggaactattgaaaggttatgacatgcttgatgaaatggcaagaaatggaatcagtcctaaccatgtaagttatagttcacttttgcatggtctttgcaagactggaaatgttgaatttgcgtttgagattttcaagaggcttaaagaccaaggtttcaagcatgaccagataatgtacagcatccttttccatggctgctgccaacatttacatctagatattgtcaatggcctttgggatgacatgattcatcatgattttgttctagatgtttatgattataccaatcggatctatgcattatgtagacatcgatgccttatagaagcattggaagtatttgaactcatgcttgagaatgggataactcccaacattgtgacatgc

SEQ ID NO: 18884 - DNA, 288 bp, Setaria italica
  Peptide Sequence Number=SeqID_84858
aaaaaaaacaacctccatcctacctacctcctaatggagctttcaccgtcgccggcctcattcctcgccgtcgtgctcgccgccgctctgttcctcgtggccattctccgccagcgccgccccacgcgcaagtacaacctcccaccgggcccccggccgtggccggtgatcggcaacctgaacctgatcggcccgctcccgcaccactccatccacgacctctcggcgcggtacggcccgctcatgtccctccggttcggctcctccccgtcgtcgtcggctcgtcgg

SEQ ID NO: 18885 - DNA, 291 bp, Setaria italica
  Peptide Sequence Number=SeqID_84859
atccctggaatagctgtatgcatcggggcacatccttacgaacaccaatgagtaggtggtcggttcgcaagtgttggtgccgttcccgatgcagcaatacttggctttgtcctcgaacaccgtgcacgcgctgttgcaaccccctggtgccttcaaatcttttgggcactgggatgttatgttggctgcgcatcgaggccccctgctacaaccctgcgctcccagtctgttcgccggcaccggcaggaagtccatgggcacattgaagccgtcaaccagggagatgtcgaa

SEQ ID NO: 18886 - DNA, 417 bp, Setaria italica
  misc_feature (26)..(26): n is a, c, g, or t
  Peptide Sequence Number=SeqID_84860
tatatttgttaatcagtcctcttttntcttgtttcttgagcaagaaaggtaccattccttgtgagcttggtggatcttctcttgcctcccgctttcctgtttgtgggacactcttttcatccggttttcgcactgtgataagtatccccgtattcttctcttcctcatattcctgtgtgtacatcaggacaagaagttaggtgatgatatttcccagttgtttggcttctctcattactgattcatttagaaatacatcaatggttttgcacatttatatagttatatttggtattgtaagttactacgtacagttacgtgtatggttcccaaaacatgcctttggcattttggcaagactttggttatggtataaaattgaaggtacttttcaagataaatctgcatacatcattt

SEQ ID NO: 18887 - DNA, 385 bp, Setaria italica
  Peptide Sequence Number=SeqID_84861
tttgatactatgttagctaataaggtgccaatgtatgaaaggattgattagtattccaaagagagcacacctgatcttcgagcatgatcgcagcgaaaccagcattgatataccctttgatggttctcttgatgttcatagagtttccgtaaccattgtctccatcaccaatcaccgggatcgacacagcttcgttgatgagacgcccttggtctaccatttccccgtaggagatgaggccaacgtccggcaggccaagtcgcgcggcagagacacagaaacctggaaaagacacgtacgtgaaaagaatccaatgctttgacacacctgcttgaacatttgcgctgtagctgaagaaatgatatgcaccctagctacattccaa

SEQ ID NO: 18888 - DNA, 531 bp, Setaria italica
  Peptide Sequence Number=SeqID_84862
ttaccctaattagtaccttattttttatttgtaaatttggtaattctactaaatttctaggtatttatttgtacaccgcaacagggtagccaacaaaaacgagcaaaagaaaagactacaagcctcccagatattaaacctgccacatatgttgcactatgcagctatggttacagcttcaacacaaatacaatgggcctgcatcaatttccggtggtacttaagccatgggcaccttggtagcacatccagcagaatccacaaccaccaaactgtggtagattattgtcgatttgcgcctctagagttgtggcatccttcacttgtccagttggtattgtttctcttctttgtagtagcggttgaaccctagtgtatccttgatctcctggaaagatggcaagatactaggcggaggtacaccaccatcttttattgcaactagagcatccttcatttgctacgtctatttgtccttacgttccttaacttttaaggttataaaggatagaccacaaggctgaaaccaat

SEQ ID NO: 18889 - DNA, 476 bp, Setaria italica
  misc_feature (1)..(7): n is a, c, g, or t
  Peptide Sequence Number=SeqID_84863
nnnnnnnttgtttttttttttttttttttattccgtgaacgaaaatattcagatttattcaaattggcaccataatattcatatttattgatacattctaatcggaaacataatattcagaactacgaatccgcaacagagcagcaaacggaaaacgggcaaaacaaaagaatacaatccaacccaatatcttgatattaaagctcccacacttatggtacttaagccatgggcaccttggcagcataaatccatcagaatccacaatggccaaactatggtagattcatgtcgatttgtggctcaggagttgcgtcgtccttcattccagttggtattgtttgtcttctttgtagtagcggtcgaaccctagagtatccttgatcttcttaaaagatggcatgatggtaggcggaggtacaccgccatctttgattgcatctaaagcatcctccattgcacggatcgaggcgccc

SEQ ID NO: 18890 - DNA, 1017 bp, Setaria italica
  Peptide Sequence Number=SeqID_84864
tggccatcaaactgctagaatcgcacaccctccgcaagggcatctaggtacttaattgttaaaagttgcaatcgggagaatctggaaatatcagttcagcagggaatttgggctacccagaggagtaacgaggctaaacttaatgaagcttttgaatccactgagaatgttattttaatattctcaattaatagaactcgccatttccaggggtgtgcaaagatgacttctaggattggtggctacattggtggtggaaattggaaatctgctcatggaacagcacattatggtcgaaacttctctatgcagtggcttaagctttgtgaactgtcatttcagaaaactcaccatctccgcaatccatacaatgataatctccctgttaagatcagcagagattgccaggaactagaacctttcattggtgaacagttggcttcgctgctttatctggagccagacagcgaacttacggctatgctgattgcagcagaggctaagagagaagaggaaaaggcaaagggagtcagtgctgatgaggcagctgataatcaagatatcgtgctgtttgatgataacgaagaagaggaggaagaggaaagtgaggaggaagaagaaagcaacggccaagagtcacaaggtaggggaagagggagggggatgatgtggccccctcaaatgccaatgatgcgtgggccaatgatgggagggcgtttccctcccaacatgatcggcgacggctttggtttcggcggtggcttcggcatgcctgatccgttcggcatgccgcgcggtttcccaccctttggtggcccaaggtttcccggtgactttcctagaggccctatgcccggtatggccttcccgggcaggcctccgcagcctttccctctgggccttgacatgatgatgggccccggccgtggcccgatgatgggaggcatgggaatgggcgggcctggacggcctaaccgtcccatgggtatggcacccttcatgcccccgccacctccg

SEQ ID NO: 18891 - DNA, 315 bp, Setaria italica
  Peptide Sequence Number=SeqID_84865
aggattccctaattctcaatttctcatcactcatgagtggagactgaacctttctcaaagggggaaacagcgaaaactggacaggaggcgagattaaggcaaatccgtattcgtccactctcaaattatccttcactgattcgttgctccatgagcaccggacttatgattctgagaggggagcttggtaggtgaatcaggattctgcagctgctagggatgcgaattggtaaccctaagatcagctttagttcaattaatattactacttagcaaaatgtgatacaatttgggaaactagtaatatcataattg

SEQ ID NO: 18892 - DNA, 343 bp, Setaria italica
  Peptide Sequence Number=SeqID_84866
ccggttgaacagagcaagcgcttcatccaccttccccacattcccataagctgtcatcacggtgttatatgtgaatgtgtttggtaataaccccttgccggtcattgtatccaggcacttggccgcctcctcgtagaacccagctctggcatatgttccggcgagctcattgtacgtcacagcatccggctgacacccgttctgctccatctccttgagcacgcgcagcgcctccgtgtagtttccagccttgccaaacacctgcagcagcgcattgtaggtgacgacgcacggattgtgaccacgggccttgaggtcctcgaagaacgccactgcctcgtcc

SEQ ID NO: 18893 - DNA, 288 bp, Setaria italica
  Peptide Sequence Number=SeqID_84867
ttttagtttacttttaggttttacctttaacctgctggtccacgaaagcccggttcttggaggccggcgcggagcacgagatcggcgtcgtgctgctggacggcgacgccgaggcgtgggtcaccgtggacggacgcaaggtggtgcagctccgccggctgcggtggaacttccgcggcagccacaccatcttcctcgacggcggcgcgccggtggacatgacgtgggacctgcacggctggctgttccacgccggcgccgggccgccccacgcgtcctcctcctcct

SEQ ID NO: 18894 - DNA, 470 bp, Setaria italica
  Peptide Sequence Number=SeqID_84868
caccattgcagtacagctcctgacacaccacacaaggccacagcccacaggctctccctcccctctctgagcatgcttggattcctgacagtgcaagcaaagcaagcaccaggagctagtagctctagtagtatttctcttgctgcctcctctcatttcatcttgtttattacacaccctactacatcagaggcaacaagccttcctcccattggccatctctagctcacagcctaccatctctaacccttgacattttcctctattttccctaccactttgcagtagtagtttgtagtaggcagcaaggttggtttcttgtagcaatggaggccaaggcttgagaaggcatgagcttgctccctctttgcccaactgattagccccttggcagtcactacaagatttgcagcggagcaggagctagctgaggcggaggaagggagcaaagcatggatctttccggggcg

SEQ ID NO: 18895 - DNA, 555 bp, Setaria italica
  Peptide Sequence Number=SeqID_84869
tggtcagataccaaactcgtctggcacaccttttgtacttctgttttgtaatttcacaacagaagggttttgatcttgcagaatgatatcatcagtgctgatatttacttcagggaaagcctccataccctcaagcaagtaccgcactttcttatttgaggtcattatttccccatatttcttcctcattgtttgctcatgtcgacagctgaggaatatctaaattgaacacacattttacaggtttgtgatcactgtctgttgcttccatgcaagagtcatacagtgatattgaaccaaccacaggacattccaaagagcactcagtttccgaactagctcggctgtctcgatataggattctgtcgcaccaggctggaatgcgctttttctcactactatcataacctataagaaaaataaaagtgaagatccttacaaccagtgcttcagaagatctaggaatattatcaactaattttgcaagtagggactccctacttagactattgcaatgtatagttatgctaatgcaattaatcctgaacaataact

SEQ ID NO: 18896 - DNA, 2099 bp, Setaria italica
  Peptide Sequence Number=SeqID_84870
tttaacaatacaaagaaaaccctttttttagctgtcactctcacaataagatttttttccctacaacattcaatttctatgcacacttagatgaaaagaaaaaccggctatgcgtcatcacacgcccagtagttccaacctctctgatccacaaactaaattagcttcacaaccatgcctcaaccaaagaatcgatccgcaaagttgtaacctcttgccggaaatgcgtccctgccgttctggtgctgtacatgtatcttgtgatctctcctggctgtcgagtacactccagtgaccgtcaccagcagcgttgcagccttttcttggtcagctccagaactattccctgaggttccagaaagatagtcctgacttcgtagttgtccatgttgcaatgtcacttccactgattgtcctggagaaatcataccaactgctggagaaaccttcagccaagaagggaaacctgaaaaaggtgtgccagacgagtttggtatctgaccaatgatctcaaaacaagccaactcttttgtacttctgttttgtaatttcacaacagaagggttttgatcttgcagaatgatatcatcagtgctgatatttacttcagggaaagcctccataccctcaagcaagtaccgcactttcttatttgaggtcattatttccccatatttcttcctcattgtttgcttgtcgacatgagcaatatctaaattgaacacacattttacaggtttgtgatcactgtctgttgcttccatgcaagagtcatacagtgatattgaaccaaccacaggacattccaaagagcactcagtttccgaactagctcggctgtctcgatataggattctgtcgcaccaggctggaatgcgctttttctcactactatcataacctgataagcctgctatgtgtttctcaaatttgtaagtaggggggaacttgaattctccttcacgtaacccctggaagactcttccagatctcatttctgctcgtagctggtcattgtctctcagccaatcaaagcatctacgggaaaccaagcccattgcctcatcataagaaatattagaaagccggtagttgaggtcaccaagaaacacaatcatgtctgtatctgacaactcgggcagtcctgatccatttgctcctcgaagaagctgagtaccagaaccagaaactgatgtcgtcaataatccattggaaggggaagaaaatgtcattgatctaaatacatggtcaaagtcttcattccttctgctcacagcttccatatgtgcagcaaaatgacaatttacaaagcaaatgcttctatcatgtattctcattctcaatcctactgctcccttgttgccgattgctcgccctaatccacatgccactgctgcattgtcaatatccccaataaactgcttaagatttattctgacccatatagcaatgattaatccagccatctgccttgaaccaacacgcacaaaggagtggcccttcaaaatctggccaatgacatccaaccaccactctccatttggacttccctctagccctaccgtttctttggcagcagacattgcaagaaaaccagcacccatgtctacctcctgcaatccaactacaataactccaacttctggtgtcgggagttttagccaagctcttaaagattcgtaggatgccttttcttgcccaacattccacgaacctactaatactttcatatattcaaaatttttgtatgatgcatctttctcaatcaactctgaacgcaaaatgctgtcaagaggccctggggatgacaagttccatccgcggattcctccatgaccagccagtgtaaagatatatgaacctccaacagccatactcagaattggactactatgtgcagcccattggcctaacaagtttccttcaaggtccaacagctggatgctgccatccatgtaacccacccataatcttgttccaaaactgcaaatgcattgaacagatgatgaatgatgcaggaactcttgcaagcggttaccactaccatcccattgggcaagagagccatttgcagatcctgtccagatcatcccatccgt

SEQ ID NO: 18897 - DNA, 256 bp, Setaria italica
  Peptide Sequence Number=SeqID_84871
ttgttcagcaacatcatcagtagccacgattttagttctttcagtgattgtggctgctgcattatatctcaccctaaaatcaaagtatgacgaagagatacactcgaaagttgaaatgttcctaaacacttatagcgcatcaaaaccaacaagatacacgttctctgaagtgaagaagataacaagacgattcaataataaacttggacaagttggatttggaagcgtatacaaaggtgacctatccaacggagta

SEQ ID NO: 18898 - DNA, 1167 bp, Setaria italica
  Peptide Sequence Number=SeqID_84872
cgcagataggtgggccctcgacaagcacatcgcctcccttccccacttcgccctcgccctcgccgttctcccctcgccctgcctccaccgatccaccccgcgccggcacgaaaccctagtccctagacctgtgcggctgtcctcctctccgcgagagaaagagagagagggagagagagagatgtattcggaccagatctccaccagccgcaagcgctctatccacgagcgcctcgacggcgacctccccgccggcgcgggagccggcggccgtgcccgtcacacggcgtccaagaggcaacggcagatagatgaaaaatggaagcatgatctgtaccgggaagatgatgaaccagcttcaaaatcaattgatccaagggatttacgattgaagcttcagaggagaagttctcaactaggctttaccagcacaaagagttctggtgtgcgtgatctacgtgagaagctatctggaacaatgcacccacagccatcgaatgctgaccctccaaagccaaagccagtatcagaagttgtcaaaatctcaaggcgtgaagctgctgatgaaatgccagcacgccaaagtaagaaagcatcaaaacagacttcatcgaagaagacatctcagccaaaggctgaaagtccactagacattttcctgagttcacttggacttgagaagtattcaattaccttccaggcagaggaggttgacatggcagccctaaggcatatgactgacagtgatctgaaggctttgggcattccaatgggtcctcggaagaagattatccttgccttggaatccagagcatagggccgcagcaaaggagcacaatgtagaaaggtgggggagattcgctaggcatgctcatatgcaagtttgccaaacctttgtattcatatgtctggtaaagggtgcaacaacatgggctccttgtaagttgcaacgcatgttctgtcctgttgggcatgcccaaccaagtttaggatgtttagaaggcaggctgttgcggctaatgatgtaacttataagtctcccattaattaaatggtgcggtatacatgttgaggctattctgttggtcttggaatgctgtattatgttacggcattgcattgtgaattcttccatgagggatatatttgaaatcaggttggtctggg

SEQ ID NO: 18899 - DNA, 1810 bp, Setaria italica
  Peptide Sequence Number=SeqID_84873
tgataatttcaggaaatatattagattgattgatggtcagcaacgcttttgcagagcagaggtaccgtccaacaaggcaaaacctctcgttaagcagttaagaaataatcaccgacactgtcaacaacactagacacggttaatcatacaaagactacaaaagggcagctgggtgttggaataagcctgtgctcaaatcatttatcagaaccaatgacagtagagaacccagcacaacatatatcactctttgcttcgcatgtcccaggctgtcaacaccagaaaaccctggcaatgatgaatttattgccaaaccaaagccgaaagggtagagtgggtcatagtgcggatctcccacgttcatgggtagctggtcgacggacttgaaccaggtacgggggagctttccagtgaacccatagtccccaaaaagtacatcggcgacaccctgaccttcggttccaggaagccaagcagcaacaagagcttccatcagtggaacatatggttcaatcacaacgggacgttcagagacgataaccaccacacattttactgcagaacacacagttctgatcgtgtctggaccagggtctagtatagtgaggtcagtgctgtcgcctactgtttcagaataaggtggctcgccaacaacaacaatagcgaatgagaagtcattatgcttcatgaaactctcgtcaggattctcagagtagacaacaggcgttgagtcagcaacagtggactttatggcatcaagaatcgtcgtcccagttgtgatatcaccgctgctccccatccattgaattgaccatcctccacattggtagcccaaattgctagcatggctcccagctacaaggatccttctagctttctttgggagaggtaagaattgctgattgggaggattcccattttttaaaagaacaagtgatttcctgacagcttctctagctaattccctgtgctccttctttccaagctgatctgcaaagctaagatcagctaacgggttctcaaacaggcccatcgtaaatttgactcgaaggatacgcctcacagcatcatcaattctgttcatattgacgatgcccttgtggacaagagatgttagatcatcaatgtaatcagtgtaattgtatggcaccatgaccatgtcaatccctgcatttattccagcttgcacagaataagtatagttttcaccaggaggtgaggtgatgcggtctattcctagccagtctgatatcacactaactctaaaatggagtttggatttcagatagccagttactagatcatggttggcatgcatttttacaccgttcaagcttgagtatgacaccataatagttgcaacaccctttatgatagagtcataatatggtggcatgtgaatgcttagcagcccatgttcatcaatgatagtgttattctcattgattccattatgagttccaccatcaccaacaaagtgtttagcacaagcagcaactttatccctgcaaaaaccataggctgaggtatagacagaaaattctttcacactgcaagatattaataacagcttgcttcccaaaactaatttcaatcgactagtacataatgtactgataggatgctgtcaaggcatattagattattagtttcacttagataaagatgcaggtgccttaagtattggcttacatctaccataccatttttatcatcactgagaaaagaatatcttacttccagctacatatggaactctttggtatgattgactgggatctctcctgtaaccaaggatgatatctgtcat

SEQ ID NO: 18900 - DNA, 905 bp, Setaria italica
  Peptide Sequence Number=SeqID_84874
tccttaggtagtaagcaatgtggtagctgcagattttggtgtcttccaacagagaagattaatgattttctccatcccaccactaccaacaaaataaaagcaactctccttcgaagagcatagtaggagaaccaaactcaaagacagcaccaaccatttgttctgagaagggcactgcagatcaagtaaggaaatattcttgtaatatggaaaacatcggttaaacagctcaactaggatcttggtcgtaggcaactcttcatctactccaatggcaaagtcattatcattgctgtcagcaacagcatggacatttttccaaatttcagagagctcattgctagcgtcagtaagaattttgtcaatttcctgagaatcagaatcactcttggtgaaggcatttgtcaagtcctgattccaagtacgtagaatgtagtttgtactagcagtaacatattttgaaatagctgagataactgcacttcttaggttaggaataagattttccacagcagacatttggtacattttaagagtcaaatgtaaaactttctttgcttcaattgataggtcaacatcggtggcttgaaaatggaatggtttcaatgaagataatgattcttcaaacgacaatttggatgaatatagtgcaggtgggaggtcctcaagcttcccctctgatggagagctgacaatgttcgcaagagaatggtccagacccagttctatgttgaattgaccaagatcttcagcggtattaccataaattacaagagtgaggctgcgataagttccacgcagcactaaatggttcgtcacaatagcctcaacttctagcacattggatgaagaatgtgaatataagaaaggctggcaaagacgccttaaagttacgttcctttaaa

SEQ ID NO: 18901 - DNA, 457 bp, Setaria italica
  misc_feature (419)..(419): n is a, c, g, or t
  Peptide Sequence Number=SeqID_84875
gagcggctggaaggcgaaccgtccgaggaagccggcggcgcagttggagttgtgcttggggcagtcgttgacgtacatggtgacgaggaagagggacgaacgacgaaggcgacggtggcggccgacacgagccacggcgaccaccgccggtagtagggccgcgccctgataagttgttgcccctgcctgggaacgggatggtgatcgggggggcggcggttctcgtgggagtaggggcgctccaccagcacctgcacgtcctcctcgccggcgccaggcttcatcatcggattaattggtcggctggttgatcggttggatcggaggaggagaggcggcggcggccggaggaaggagggagagggattggaagcaggggacggagggaagcggtgggtggcgagcgtgaggaggaaggngaagaaggagaggagaggagagcaggggagttggcgtg

SEQ ID NO: 18902 - DNA, 384 bp, Setaria italica
  Peptide Sequence Number=SeqID_84876
ttccccccgggcggcgccacggaggcgtcgggccccgtcttcttctgggcgcacgtgttctacctgtccaaggtgtacgagctcggcgacacgctgctcatcctgctcggccgccgcccgctcacgctgctgcacgtctaccaccacgccgtcgtcatcgccatgtgctacctctggctcgccacgcgccagtccctgatgcccatcgcgctcgtcaccaacgccggcgtgcacgtcgtcatgtactcctactacctctcctgcagcgtcggcctgcgctggccgaggcggctgaagcgcgccgtcacggagctgcagatcgtgcagttcctcttcagcttcgccgcctccgtcgtgatgttgtggctccacttcgccgccggc

SEQ ID NO: 18903 - DNA, 684 bp, Setaria italica
  Peptide Sequence Number=SeqID_84877
tccttcttggtcttacgtcctaacgtcgtccttgttcccctggatgcccatcgcgctcgtcaccaacgccggcgtgcacgtcgtcatgtactcctactacctctcctgcagcgtcggcctgcgctggccgaggcggctgaagcgcgccgtcacggagctgcagatcgtgcagttcctcttcagcttcgccgcctccgtcgtgatgttgtggctccacttcgccgccggcgggtgcgaggggatggccgggtgggtgttcaacgccgtcttcaacgcgtcgctactggcgctcttcctcgacttccacggcgtcgcctacaaagccgccaagggtggcagcaaggggaaagcggaatgacgaggccaccgacaagggcttaatttgccggatcaacaagggcggcagcaattgctcgtgagaattccgggttctagcattatgcctctgtaatggctcatgcatcatttctgatttcagttttgtgcttttgcgttcccaaattacaatcatgttacaacaaccttcttgtgggaattggtgtaggtgaatcagttatctgaacatcgtgaaagggaaaagtagaaccatttatctgaagactggaaaaatgtcatttagtaattgcagcatggaagtgttctcaggtaccgaagctgtaacgttgattcaacttcgacatctta

SEQ ID NO: 18904 - DNA, 453 bp, Setaria italica
  Peptide Sequence Number=SeqID_84878
ctgcggctgcggctgcgagaggccgcaggaacggtgatggttggatggctggctggcaatggagggcccgtgcattgagttatggtggtggcgacggtgcagtggtgggcttgtggattgaagtgacacacgggagcgggggaggaagccggggtgccgggaggggagggcgagcctgccaatgccaaatcagaggcggcatgcgccatcaatgcgcaacctccctggcgtcctactctgcatcttcgctctagcactcctgtcgtgcaaatgccagagcttcaccgccatccacaggttgtttccatgaatccctcggcctaatctctttgacaagtaggtgtggaactaatgtgcttacacaggatgttatgaacaaagagccagggaagagagcttttaggaatttagggtacaatataccaccttgtactactgctgtttgaaaaggac

SEQ ID NO: 18905 - DNA, 476 bp, Setaria italica
  Peptide Sequence Number=SeqID_84879
ggcgtggtctttggacgcgacgccggtgccggcgtcggttgaggccggggtggggtcggagccgcagtagcgctcgacgcgcccgctcttgaaaatgcggatgcggtgcgcggccttgaagacgacctcgttgtccgaggcaccggagccggccatggacgcctcggggtgaggtcccgccggtcgcgtgtcctgcgcctgcggtgggtgcggtgtggtaatcggggaagggcgaaggcgtcgagtcgtcgacggatgagcgattttgatttgctttacgttttctgtgagggagcagtttggttttgtttggttggcgcgtagcccgcgtgagtgcggacatcactatatttattgatttagatgggaaacgtgggtttctttttcaaatgtactgaaagaatttattcattaacaagtttgtgctgatatatagtgcatcaacggagttggtggattcagcaggcacacgcata

SEQ ID NO: 18906 - DNA, 280 bp, Setaria italica
  Peptide Sequence Number=SeqID_84880
ggggtgggggcggaggcggggcgcgcggtggggcagccggacggcgagctgggatctgggagggcgccgctggggaaccaggatgcggaggcgaaggggtggccgggatccgggacgcggagcggagatttaactggaggaacgcgcgaatccgcttggcgggacgacttgcgcgcggcagcgggaaggaaaaagcgcgcgcgcgcatccgatccgccgtcgccgtcgacgaccggaagctggtcctccagcgcgcttcggagccgtctccttgcatcgg

SEQ ID NO: 18907 - DNA, 280 bp, Setaria italica
  Peptide Sequence Number=SeqID_84881
tgacaagtgacagcggggtagttatgttaacctggctctgataccaagttgtcacggccatgcggcagtgagtggatcggatagctgtgggaggttgccggccgctgggctgccggtttcctgcccgtgaagcacgtggaggttgctgcggtggcgtcgagcagcaaggagatgagaaacagagaacgggagacgaggaagtagattaattctggcttgattattctgttgggcggcttcatataaatagccaggattacaactcaactaactcagctag

SEQ ID NO: 18908 - DNA, 614 bp, Setaria italica
  Peptide Sequence Number=SeqID_84882
taaaggaaagaactggcccactgtagtgcatcatgcaaaacaatgttttgaagctctcatagaccggcagcttgttatgccggttgatcttagtgctgcaggaaagatcaagagctgcatggtaggtggccaagtccatgagtttatcaccaaaatcgccaacaaagagcacattttggacacacgcctgtcacaactccaggcccgtcatttctccacctccagcggtcttcgacttcgtgcctctgataacattaacacggttgtggagaagctccggcctaaatacttgcataaactgtggctgctcaagctgctagatctggaaggctgtgatcgtcgcttgaacaagaaacacatcaaggacatctgcagcacaatattacgtcttaagtatctaagcataaggggaacagatgttgatgatctgtctagtgaaatcaacaacctccatgagctggaggtattggatatccggcaaaccaaggtgcctgagcgtgcaacaagaggtatcgtgctcctaaagctgaggcgcctactggctggtcaaagagttgatccaagtacaagtcaagaaatgggaacgctcccaggggccaataagcggttaccct

SEQ ID NO: 18909 - DNA, 561 bp, Setaria italica
  Peptide Sequence Number=SeqID_84883
cgcggccctcgccaccgccggcgaggccgcggcgggcaccaccctcaccgcgtccccagcgaggctttccccctcagaccgccagatcaagatccgctgggcgggcctcccgtcccccgacggcctcgactacgtcgccatctactcgccgccgtcctcccgcgaccgcgacttcctcggctacctcttcctcaacggctccgcctcctggcgcgacggccacggggagctctccctcccgcgcctccccaccctccgcgcgccctaccagttccgcctcttccgctggcccgccaatgagtactcctaccaccacatcgaccacgaccggaacccgctcccccacgccaagcaccgggtcgccgtctccggcgacgtcgcggtcggcgaccccgcgcgacccgagcaggtgcacctcgctttcgccgacgccgtcgacgagatgcgggtcatgttcctgtgcggcgacgccgggaagagggtcgtcaggtacggattggaggaggaggagaagaattggacggaggtgggcacagaggtgaggacgtacgagcagaagca

SEQ ID NO: 18910 - DNA, 234 bp, Setaria italica
  Peptide Sequence Number=SeqID_84884
cctgcatattgagcgtttcctcttttttctatctggtccgcactcacctatgcagcgttgatctttgtttcaccttccatcttactttgattataatatgagatgcatcgagaagaggtgtaatatggcgaagggagggaacctctggaccagccggcgctagttttaaattgcaatatctatgtcacgatgttctggatctgcctagtgtatatcggtccccttttcccgaat

SEQ ID NO: 18911 - DNA, 273 bp, Setaria italica
  Peptide Sequence Number=SeqID_84885
tagttactaaccgtcgttccgcgtccgtccagtgtgtccacccctcgcgttagaaacacaagcggtacgcgcgagacagagatggcgtcttcgggtgctgaggcggcgccggcgccggcgccgccaccggtgggaccggcggagggctctgtgattgcgatccacagcctggacgagtggagcatccagatcgaggaggccatcagcaaaaccagctggccattgctgagcaatttagtgttgaggccatgccaaccttcctgttcatgaagg

SEQ ID NO: 18912 - DNA, 493 bp, Setaria italica
  Peptide Sequence Number=SeqID_84886
tttcttaccgtctaatttgtaattgttttatactcatatcataacgtgttcaagttgtatagtaaaaccgagcatgttaaagtcttaagaacactaaaccatgatatcggaggagacttgtatactgtttaatcaagaatttggccagattgctcattttgcctcattacgtaacaaataatctcagtttgtaatgcaaaatcaggtaggcctttcttaatgttgaatagcaatggtgttatcacttctcaaaccatattaacacgctttagttaaatgcatgctaatatacttttcttaacaataggtagtgatcgactttaccgcatcatggtgcccgccatgccgcaccatcgctccaattttcgctgacatggccaagaagaactcaaatgttgttttcctgaaggtcgatgttgatgaaatgaaggccattgctgagcaattcggtctagtatttaactattaataaccttcctgttcatgaaggagg

SEQ ID NO: 18913 - DNA, 875 bp, Setaria italica
  Peptide Sequence Number=SeqID_84887
aggaggagaatctagtggggagacagtacaaccgcgtccgtccagtgtgtccacccctcgcgttagaaacacaagcggtacgcgcgagacagagatggcgtcttcgggtgctgaggcggcgccggcgccggcgccgccaccggtgggaccggcggaggggctctgtgattgcgatccacagcctggacgagtggagcatccagatcgaggaggccatcagcaaaaacaagctggtagtgatcgactttaccgcatcatggtgcccgccatgccgcaccatcgctccaattttcgctgacatggccaagaagaactcaaatgttgttttcctgaaggtcgatgttgatgaaatgaaggccattgctgagcaatttagtgttgaggccatgccaaccttcctgttcatgaaggagggagaagtcaaggacagggttgtcggtgcagcaaaggatgagctggccgtgaagcttgagctccatatggcccagtagaccagtgatgttataatgaagtatttgcctaaataagaagacgcttcaactcagagagaactagtgcctctatgatgtactcgtatgtagtattgactcctatcctactctttatgcagcttgatccaagcttgtgctttgcctatcatgtctcgtctttcagctgtctcgtctttcagctgagatgctagaatggtaaatcagcgtcagaatcttggaaattgtttgactattgtagtcatctagtttttgaggtatttgcctatcagccactgaagtttttgtttagccacaacgcgctggttattatgggctttcagatttctgaaaatgcgatggtaattgcagtcatgtcttctcatgccagtacagtatgcttgctct

SEQ ID NO: 18914 - DNA, 317 bp, Setaria italica
  Peptide Sequence Number=SeqID_84888
acatttgtcccatccggtccccaccagaatactgctcatcagttcaaatttagaactatcttggtatccaatgggaaccagttatcagtggaaactgaaaacatggggcagactaccacatagaccaatataacatttaaaacttgaaaatgatcactataaaatccatcacatacaagcatgaaaatttctgtgctctgttgtgaacttaaaattcctaggtgaaatatccatccagaaaagcacaaaaagtatatgcaccacagaatttacccaaacacatacagacctgaaggagggtgatgacatttgcgacg

SEQ ID NO: 18915 - DNA, 551 bp, Setaria italica
  Peptide Sequence Number=SeqID_84889
cgcaatgccgcccctccccgcctccaccacggccacccgcttcgcctcccagtgggtcgccgacgccctcgccggcgacgaggccctcgatttctccgtcctcaaggcgcttagttacgcttacgtacagttactcgcgggcgccccggaggccacgcgggagcgggtcgcactccggtgcctggaggaggtgtcggccgtgatagctgctgggggtgatgccgcggcgacggcgaaggtgcttagggctgatggcgcacggacctgcgaggatttgctgcttcatcttatcggagaggttggaagttctggtaacttggagaaggatttgcttgtgccttttcagtcaagaaatccagaacattattcgcatcaagaaacctacattaccagaaacttcttttgagttgctaaaagaagttgacccagagatcacgtctatggccccaccatcccaactgaagcagaatggcaccacccaacttgacaatgatcaatccctgtgcagcagccatgatcatgtaaatataagagaaaaactaagctcccta

SEQ ID NO: 18916 - DNA, 130 bp, Setaria italica
  Peptide Sequence Number=SeqID_84890
gcctcgacttcctcgacctcgatcaccgcaactgtcaactcgcccgtacgtctaagcaacaattcctccacgtccgccctccatgaggctccttgcctcatcccggtgtcttcagcgtggttgactccac

SEQ ID NO: 18917 - DNA, 164 bp, Setaria italica
  misc_feature (3)..(3): n is a, c, g, or t
  Peptide Sequence Number=SeqID_84891
cgnctagcatcactggagtgatgaggactgcgtgaagatcctcgccaattgcaagaaggcaatagcttcacgagaagagggaggaaaagttttgattggagatatagttctcaaccctgctttgatgaagatgtcacgccagtcatttaagtcgcgttgccggc

SEQ ID NO: 18918 - DNA, 481 bp, Setaria italica
  Peptide Sequence Number=SeqID_84892
atgttgggcctgacgatggcgggagcgggaaggtcccaaacaatggcgggacgttggtggtgatgttggtagagtaatagcacaagcatttgtggtgctggtgcctgggatgaccggcgcaaggaagggccccaacagaaaggatgccgcgtctaaggaactgcttcacccctagaataaacgcggtggagttggagaagccgggagggcaaggactctggggatggtgccggagcaggagtcggagccggagttggtgctggagccggagtgggcgcaggctgggatggtgccggagctggagtcggagccggagttggtgctggagccggcgtgggcgcaggcgtcggagcctgggcgcgcacggaagcggccaccatgagtgctgccacggcaaggaacacgagcgcaggggaagcggctatggacttgtcggatgccatcgctagctactacctgcggaactagtgcgactgagtcg

SEQ ID NO: 18919 - DNA, 196 bp, Setaria italica
  Peptide Sequence Number=SeqID_84893
cagcctccagaacttcatgtatgaggggaaagcatgaggctgttaaccaacatcagcggtatacaccaactaccacgatgaacactggactcttgtttcagctgctacaagacctacccacagatgtcctaatgctacaaccatttaccaacgacccacaaccacagcatgggccgtgctgactatcgcttcgatg

SEQ ID NO: 18920 - DNA, 512 bp, Setaria italica
  Peptide Sequence Number=SeqID_84894
aagaaaacgggtccatttggccttgcaacaaaggtctgagccctatatctcatctcatctaggggataggcaaaagctcgctcctcttcttcgctcactgggtgccaggggtggtgctgatgatgtccgagtcacctgaagcataagagtgttaaagtttgttcggctacagttaggaacagcagatgtggcagttactgaaacaaacctgggtcaatgatactgaggcagcacactctgtagtacttgccacaggcagtgccaagatcaacattgaccagtgactcggacatcatcagcaccacccctggcacccagtgagcgaagaagaggagcgagctttgcctatccctagatgagatgagatatagggctcagacctttgttgcaaggccaatggccgtttcttgtttgtctttagtctttgatgagttgttcttgcatacagattatacctcatatggttgctatgtaaggcatatctatggttttaattatgacgatctcatcaa

SEQ ID NO: 18921 - DNA, 449 bp, Setaria italica
  Peptide Sequence Number=SeqID_84895
gcccttccttgcgccggtcatcccaggcaccagcagaaggatgccgcgtctaaggaactgcttcacccctagaataaacgcggtggagttggagaagccgggagggcaaggactctgggatggtgccggagcaggagtcggagccggagttggtgctggagccggcgtgggcgcaggcgtcggagcctgggcgcgcacggaagcggccaccatgagtgctgctgctttcagtaatctggatggggtttgtcatgctcaagcaactgcttggagggccctctcgaagtttgcttctgacgatgccgcgttcttaactagcacatgatcaggatgtgatagcttcagttggctgaggaatcgtgatgatggtttaccaaggtggagattacatacaatgagattggcaagagtttcagggtcttttgtcgttcctttgtttctaattgtct

SEQ ID NO: 18922 - DNA, 723 bp, Setaria italica
  Peptide Sequence Number=SeqID_84896
tgccttcacagaatcctcaacgtcatcggcatcatcttcttcgtcaatctcatcctcggcagcttcaccgttttcttctggctcgaagtcactagagtgctcttcatcttcagctcgaccaaggggctggaccagatactcagttcccagttcctcctgcaaaaatttcaaccagtgtgagccccatagtccagatctcacaaggacaagaaagcaagcagcttcatcttttttaaagatttttttgtgaagttttaaagatatagtccaatcaaaatccttattgtcaaataagttaagggatcagactgacgtgcaatttttcatcacatacataaatccataaaaggatatctgaaatgaattgttcatcatttcccaaaagcagcatagtataagtttggcccacatcgaacttcccaaggaaaaaccaaccagaaaacttaatatgtctagattcaacaaaagatgcgcgcatatgtatattaagctcagatctaaagagtatgggatcagactgacgtgcaatttttcatcatatacataaatccatagaaggatatctgaaataaaaatgaattgttcatcacttcccaaatacagcacaatataaagtaagtttagcccacatcaaacctcaaggaaaaagcaaccagaaaaactttttttttgaagaaagcagccagaaacttagaaacatgtctagattcaacaaaagatgtg

SEQ ID NO: 18923 - DNA, 596 bp, Setaria italica
  Peptide Sequence Number=SeqID_84897
aggtccttcgaaaggccaagtgcagtgcagccaccatggcagccggtctggtacaacatgaagcgcttggtggatggcttaagcccaagaagcctggcgagttcacagtctgcaccgggcatgcagccactgctagacgtgctggcgacgagatgggtgatgtcggaggcctgcttgccccaatcacttatggctaagcgtgctgccttggcgccgagctcggggacaccgacatcagcgagctcctgtcggagggtgagggagggggaggctgtatgccgtgatggacgggctgtccctcaacatttcattggacatgtaaaagtgtcgcttctcgatcatggtcttctcacaaatgttcgcaaacttggcctttaaatccaccatgtgattgctactggtaatctcaaaatagtaatcagagaatgacttctgttgaaactcatgcgatgggacagccgtgcctatacccataatggttgctctcctaccttcatgaggacagcctattggatgactcgcatcgggtgccatcaaagaacccatcaactactatattcatggactggaaggaaatgaggcaatcatctagctac

SEQ ID NO: 18924 - DNA, 679 bp, Setaria italica
  Peptide Sequence Number=SeqID_84898
cgatggtaacggggtgacattgtcaactcaactcatctcctcctgtagtatcgcagcgtactgtgacgtgcgaattagtctcatccgcatgcatgcgtcgtgtcagcatgcatgcacacacataaaggatgagctcgttattcgtagtattatatatttatatataatatccgagtaattagttagaagttaatggtggccggtccacgcacgcatgcgatgggcccagtgatgttgggcctgacgatgggcgggagcgggaaggtcccaaacaatggcgggacgttggtggtgatgttggtagagtaatagcacaagcattttgtggtgctggtgcctgggatgaccggcgcaaggaagggccccaacagaaggatgccgcgtctaaggaactgcttcacccctagaataaacgcggtggagttggagaagccgggagggcaaggactctgggatggtgccggagcaggagtcggagccggagttggtgctggagccggcgtgggcgcaggctggggatgggtgccggagctggagtcggagccggggcgcgcacggaagcggccaacatgagtgctgccacggcaaggaacacgagcgcaggggaagcggctatggacttgtcggatgccatcgctagctactacctgccggatggatattgtatgttcccaaccgt

SEQ ID NO: 18925 - DNA, 823 bp, Setaria italica
  Peptide Sequence Number=SeqID_84899
ttttttttttcctagtaagagagaaatttttatcatgacaagattcagaacaaagcatccagacttgaattagaagctacacaagcataaaccaagcctcatgttttgccctcatacacgaagttctggaggccgttaaccaacatcagcggtatacactaactaccacgatgaacactggactctcaaagtataagacctaatgctacaaccatttaccaaacgaccagccagggattgttattttccttctttctcatcaccctgcgcaaggtcacaactccacagcacgggccaggctgactatcgcttcgatggtggcctcccatcatcgtcgtcgtcgtcaccatcatcatctccatcatcttcgtcgtcacctgacctcttcctcttcacagaggactgtgccttcacagaatccttgccgtcatcagcatcatcttcttcctcaatctcctcatcatcagcagcttcaccgttttcttctggctcgaagtcactagagtgctcttcgtcttcagctcgaccaaggggctggaccagatactcagttcccagttcctcctcctgctcgtcttcaccatcgacctcgtcgtcgtcgtcgtcgtcgatggtgaagacgagcaggaggaggaactgggaactgagtatctggtccagccccttggtcgagctgaagatgaagagcactctagtgacttcgagccagaagaaaacggtgaagctgccgaggatgagattgacgaagaagatgatgccgatgacgttgaggattctgtgaaggcacagtcctctgcgaagaggaagagatcaggtgacgacg

SEQ ID NO: 18926 - DNA, 1299 bp, Setaria italica
  misc_feature (1289)..(1289): n is a, c, g, or t
  Peptide Sequence Number=SeqID_84900
tttgactccactgaggctacctactccctcaccccacttgtcatacctcctggttgacggcattgaagccgatgaccatatcaaccatgcacctttcctgctcactgtaaccgcgacacactacattgacctagcaatggggctagctcactggttcaagcaggatgccaagaaaccaccctttgatcatgtgcacggagcatcgctgtttgaggagagcatggagcgcaagcatcctgagttccacaagatggcaatgcaaggtttaattgtccatgacaatttcggaacgaacattgcgctgcgggagttgagtgacatataccaggggataaattcattgactgactgttgctaccagtggggacggaatgacggcaaaggccattgtcaaggcctttccacacatgaaggtcactgtgctagaccttccacaagagattcgaaaaataaccaactgatggtgttgttaactatgttggaggtgacatgttcaagtccatcccacgtgctcaagtggtgctgcttaagatggtgctgcatcactggagtgatgaggactgcgtgaagatcctcgccaattgcaagaaggcaatagcttcacgagaagagggaggaaaagttttgattggagatatagttctcgaccctgcttcagaacctgtaatgtttgagacccatctcttgatggacgtctgcatgatgcttatgaaaggaggccggcaacgcgacttaaatgactggcgtgacatcttcatcaaagcagggttcagcgacttcaagcttgtcaggaaatttggagctcgaggtgtcttggaggcctacccgtaagatttctcctggacattcttatattgcggttgggcaccataaacctatagtgaataaataaaaagagtgccataattttcgaactatcgtttcatggaacatgatcaagcagcttgctgaggttacaaagctggtttgcttcatgatctgtatactttcatttcgaaaagtatatctacaatctacaacttgctcatatattgtatgtctatggtattgatatccaccaactggagttggatgtgtgtaatgcccctgtttgcccctgtttctcagaaaagcaaccattgtacactacgggaaatataatatgcataatggttgctctcccaccttcatgaggacagcctattggatgactcgcatcgggtgccatcaaagaacccatcaactactatattcatggactggaaggaaatgaggcaatcatctagaactaaaaaaaaaaaaaaaaaaanaaaaaaaaaa

SEQ ID NO: 18927 - DNA, 758 bp, Setaria italica
  Peptide Sequence Number=SeqID_84901
ttgcaaaaccaaaccaggcgatcaacgaatcataccaagcttaacgagcaacgcaaccccagccaaccagcattgcccagcagatcatcacatatactgacctgatttgatgtgatgtgacccacaccaacgagacagcagaaataattatgacgatctcatcaaacaaaaccatagatatgccttacatagcaaccatatgaggtataatctgtatgcaagaacaactcatcaaagactaaagacaaacaagaaacggccattggccttgcaacaaaggtctgagccctatatctcatctcatctagggataggcaaagctcgctcctcttcttcgctcactgggtgccagggggtggtgctgatgatgtccgagtcacctgggtcaatgatactgaggcagcacactctgtagtacttgccacaggcagtgccaagatcaacattgtttccatggaaatgatgcacgctgactttggcaagcatggcatagtactcaatctcagacttcctaagcggagggcagttgtttgcaaggatgatcagcttccccttggagttgcgcagcgtcttgaggacggtcttgtagccgagcgtgtacttgccgctcttcatcaccagctgcagcttgttgttgatgctctccgtgctcttcttcgacttcttcgtgggagccatcggatcgagcggccgcaggcggcgatgagcaagggcggcggcgcgaagggtggcggcgagcagcagaggcggcgcgaatg

SEQ ID NO: 18928 - DNA, 874 bp, Setaria italica
  Peptide Sequence Number=SeqID_84902
gaaacggagggagtaacacttttataatggcagtaatgtttttaaaacaatatagatccacttaatattattatcaatgatgattagagtggtctgccaaactgatagccatattacagcacaacacgaacaatgtcaccccgttacatcgtcaactcaactcatctcctcctgtagtatcgcagcgtactgtgacgtgcgaattagtctcatccgcatgcatgctgacacgacgcatgcatgcacacacataaaggatgagctcgttattcgtagtattatatatttatatataatatccgagtaattagttagaagttaatggtggccggtccacgcacgcatgcgatgggcccagtgatgttgggcctgacgatggggcgggaggcgggaaggtcccaaacaatggcgggacgttggtggtgatgttggtagagtaatagcacaagcattttgtggtgctggtgcctgggatgaccggcgcaaggaagggccccaacagaaggatgccgcgtctaaggaactgcttcacccctagaataaacgcggtggagttggagaagccgggagggcaaggactctgggatggtgccggagcaggagtccggagccggagttggtgctggagccggcgtgggcgcaggctgggatggtgccggagctggagtcggagccggagttggtgctggagccggcgtgggcgcaggcgtcggagccgtgggcgcgcacggaagcggccaccatgagtgctgccacggcaaggaacacgagcgcaggggaagcggctatggacttgtcggatgccatcgctagctactacctgcggatggatattgtatgttcccaaccgtgtgtgtttcactagtgcgactga

SEQ ID NO: 18929 - DNA, 1294 bp, Setaria italica
  Peptide Sequence Number=SeqID_84903
ggtccagaaagacgcacaagcaagttgttcatatcgccgcctacaagggttgacagttttgctaatctggaagaacataacaaaatgctgatgttgacgacaaaatgtaacatatcgatattctacatatccgtttatacggcgttgttccggtacaggtacaagattggccaagtaactttaccattactatcgaggaaattagacaaacagaaccaccacactccactgttcaaatggaaaacgggatcgatgtgctgctgctttcagtaatctggatggggtttgtcatgctcaagcaactgcttggagggccctctcgaagtttgcttctgacgatgccgcgttcttaactagcacatgatcaggatgtgatagcttcagttggctgaggaatcgtgatgatggtttaccaaggtggagattacatacaatgagattggcaagagtttcagggtcttttgcgtccttgttcaatgcttcaagcaatagagtctcggcctcctcaaagcttcccatgtgcatacagcaaactgctttcccattcagaaccatccccgtcattgggtacttttcagcaaagtcttggaatatgagataagcttcacggatcttagagccaccaacagcaatgtccaaccatgcgtttgctagttgtgtcagtgtatggtcttcatcaatttgttgcattgtattcttcagttgcttctcagcatagtctgaacgatgcatcttaatgaagatctggacattcaatgcatgcaaatccaaggttcctccagagtgcgtgtgcttgagagcctcattgtagtcctgctcatgcataaatataattccagcaatcaatcgcagaacaggattgctcccaattgctgaatcactcaaccattctttgaggctggagattgcaccttccttgtccccggtaaggtacagcgcgagcagcttcacggcctgcagcgacgtcgcggcggacgagtcgatctcgctgatcaccagctggtaggagccgagggcgatgtaggagcggaagacgatggcgtcgcgctcggcggcggcgtcggcgtcgaggcccgggacgtcgctgttgttgatggccgcctggtaggcgcccaggtagaagaggttccgcaggttgaagagcaggtccggggtggccatagttgcggcggtcggcggcggcgacgcggcgcggcggaggcggttctgcggcgagtgggaagagatccggggaggtgagggtgttcgtcgactccgcctgtttgatctctccggtttgactactcaacaacta

SEQ ID NO: 18930 - DNA, 947 bp, Setaria italica
  Peptide Sequence Number=SeqID_84904
cacaggccgacctatggcgccacagcctctactacctcaaatccatggcactgaagtgtgccgtggagctcggcatacctacagccatctaccgcctaggcggtagtgcctcgattcctgacctgatcaccgcactgtcactgcccgtagctaagcaacaattcctcagtcgcctcatgaggctccttgcctcatccggtgtcttcagcgttgttgactccactgaggctacctactccctcaccccattgtcatacctcctggttgacggcattgaagccgatgaccatatcaaccatgcacctttcctgctcactgtaaccgcgacacactacattgacctagcaatggggctagctcactggttcaagcaggatgccaagaaaccaccctttgatcatgtgcacggagcatcgctgtttgaggagagcatggagcgcaagcatcctgagttccacaagatggcaatgcaaggtttaattgtccatgacaatttcggaacgaacattgcgctgcgggagttgagtgacatataccaggggataaattcattgactgactgttgctaccatggggacggaatgacggcaaaggccattgtcaaggcctttccacacatgaaggtcactgtgctagaccttccacaagagattcgaaaaataccaactgatggtgttgttaactatgttggaggtgacatgttcaagtccatcccacgtgctcaagtggtgctgcttaagatggtgctgcatcactggagtgatgaggactgcgtgaagatcctcgccaattgcaagaaggcaatagcttcacgagaagagggaggaaaagttttgattggagatatagttctcgaccctgcttcagaacctgtaatgtttgagacccatctcttgatggacgtctgcatgatgcttatgaaaggaggccggcaacgcgacttaaat

SEQ ID NO: 18931 - DNA, 1556 bp, Setaria italica
  misc_feature (1485)..(1485): n is a, c, g, or t
  misc_feature (1503)..(1503): n is a, c, g, or t
  Peptide Sequence Number=SeqID_84905
cacaaaacaacagataggattgaacaacaatggcaactcaggccacgcccattgtagtgcccaccgatgctgaactgctgcaggcacaggccgacctatggcgccacagcctctactacctcaaatccatggcactgaagtgtgccgtggagctcggcatacctacagccatctaccgcctaggcggtagtgcctcgattcctgacctgatcaccgcactgtcactgcccgtagctaagcaacaattcctcagtcgcctcatgaggctccttgcctcatccggtgtcttcagcgtggttgactccactgaggctacctactccctcaccccattgtcatacctcctggtggacggcattgaagccgatgaccatatcaaccatgcacctttcctgctcactgtaaccgcgacacactacattgacctagcaatggggctagctcactggttcaagcaggatgccaagaaaccaccctttgatcatgtgcacggagcatcgctgtttgaggagagcatggaggcgcaagcatcctgagttccacaagatggcaatgcaaggtttaattgtccatgacaatttcggaacgaacattgcgctgcgggagttcagtgacatattccaggggataaattcattgactgactgttgctaccatggggacggaatgacggcaaaggccattgccaaggcctttccacacatgaaggtcactgtgctagaccttccacaagagattcgaaaaataccaactgatggtgttgttaactatgttggaggtgacatgttcaagtccatcccacgtgctcaagtggtgatgcttaagatggtgctgcatcactggagtgatgaggactgcgtgaagatcctcgccaattgcaagaaggcaatagcttcacgagaagagggaggaaaagttttgattggagatatagttctcgaccctgcttcagaacctgtaatgtttgagacccaactcttgatggacgtctgcatgatgcttatgaaaggaggccggcaacgcgacttaaatgactggcgtgacatcttcatcaaagcagggttcagcgacttcaaacttgtcaagaaatttggagctcgaggtgtcttggaggcctacccgtaagatttctcctggacattcttatattgcggtaaggcaccataaacctatagtgaataaataaaaaaagtgccataattttcgaattatcgtttcatggaacatgatcaagcagcttgctgaggttacaaagctggtgtgcttcatgatctgtatactttcatttcgaaacgtatatctacaatctacaacttgctcatatattgtatgtgtatggtattgatatccaccaactggagttggatgtgtgtaatgcccctgtttctcagaaaagcaaccattgtactgccactaaatatatcaataaatgttccagagagactctggactaatttttatagtaaaaaaaaaaaaaaaaaaaanaaaaaaaaaaaaaaaaanaaaaaaaaaaaaaactaaagagaacaacgacaacagggagtaggacgaaggac

SEQ ID NO: 18932 - DNA, 377 bp, Setaria italica
  Peptide Sequence Number=SeqID_84906
tggtggatccaatggaaattcagccattttcctccccagtttggttagaaggccctcttcatcaagagcgccaaggctgtacaactgttccatggcagaaatcagtgcttgaggtgctgggggatccataaaatcaaaggataataggtcatttattcccatcgccttcatattaagaactgtagaccccaagttgatcctctgaatttctggaatagtcgtgggggacatttcattacggtaggcactttcagtgtatagacgataacacttgccaggtccagtacgcccagcacgccctgctctctgtttcgcagatgcttgcgagatgggagtgataaccaatgagtcaagaccttgcctttaattgtgtaatt

SEQ ID NO: 18933 - DNA, 511 bp, Setaria italica
  misc_feature (1)..(73): n is a, c, g, or t
  Peptide Sequence Number=SeqID_84907
nnnnnnnnnnnnnnnnnnnnnnnnnnnnnnnnnnnnnnnnnnnnnnnnnnnnnnnnnnnnnnnnnnnnnnnnnttttctcgacaaagacaacaaaactgaattgcttaatatcagttgatcgttagtaaagactgcatacctaactcttggtacattacataagcatcatttgccctaacaagcagcaccaggaaaaaatatttacagtttcaacaaaattgtcatcttgaatttgatcaaccagcaacgaagaacatacagtacgccgttacagttacagtcaagctcggcgcttgctaagacgccaggagttgggctcatggtatctatcatacagaggctcgattctctcctgcctcttccttttgctcatcttggtggggtctgcacccttgtaaaaccttggcgcaagctcaaccagccattttggatcgatcacagtaacctccctcatgtactccttggtcgtcatcacaagctcgtgatagatgacccagtctggctgccgct

SEQ ID NO: 18934 - DNA, 997 bp, Setaria italica
  Peptide Sequence Number=SeqID_84908
ggttagaaggccctcttcatcaagagcgccaaggctgtacaactgttccatggcagaagaatttgggtgccggttgggtgaggaagttgggtatgccatccgttttgaggactgtactgggccagacacagtgataaagtacatgactgatggtatgcttctgcgtgagatccttgttgatgagaacctttcccaatattcagttatcatgcttgatgaacgcccatgaaaggaccatccacacagatgtgctctttggtttgctgaaacaacttattaagcgcagatctgacatgaggcttattgttacttcagccacccttgatgccgagaagttctcaggatatttctttaattgtaacatcttcacaattcctggaagaacattcccggtggagattctctacacaaaacaacctgagagtgattacttggatgcagcgttgattacagttctgcagattcacttgacagagccagaaggagacatccttgttttcttgacaggacaagaggaaattgaccacgcctgccagtgtctgtatgagaggatgaagggattaggaaaggatgttccagagctcataattttgcctgtgtatagtgcccttcctagtgagatgcaatcaaagatctttgacccagctccgcctggcaagaggaaagttgttgtggccaccaatattgctgaagcttctttgacaatcgatggcatatactatgttgtggatcctggttttgccaagatcaatgtctacaattcaaaacaaggtcttgactcattggttatcactcccatctcgcaagcatctgcgaaacagagagcagggcgtgctgggcgtactggacctggcaagtgttatcgtctatacactgaaagtgcctaccgtaatgaaatgtccccacgactattccagaaattcagaggatcaacttggggtctacagttcttaatatgaaggcgatgggaataaatgacctattatcctttgatttt

SEQ ID NO: 18935 - DNA, 1055 bp, Setaria italica
  Peptide Sequence Number=SeqID_84909
agtacaatacttagaaatttagatacaaccagcaacgaagaataacttaaaagtagacacagttacagtcaagctcggcgcttgctaagacgccaggagttgggctcatggtatctatcatacagaggctcgattctctcctgcctcttccttttgctcatcttggtggggtctgcacccttgtaaaaccttggcgcaagctcaaccagccattttggatcgatcacagtaacctccctcatgtactccttggtcgtcatcacaagctcgtgatagatgacccagtctggctgccgctggaacaaagcgctgctggggtggatgtacactggctggttttcaaccaaggttctgtatccctcctggggatccttccttgcagcatggaaaaagaagccagcagtaatcgctttccttatctttgtgaagtttttcccagcagaaacaacatcaagtttatatctgtccatgatagtgagaagttgcttcctcacatcttgtgctctcctcaatgatcttgattgaacaaagttctcaaagcaccagggacctgaaaagttctttgccttccaagcctcgtatacagcaagcagagtaagatgatccccctctggctggaaaaatttggcccttttttgatcagcttgagcctgtttttctcgtggcctgtagaatatgttccctgtttgaatcattgctatgatagtcagtatctcatcactacacccaaggtcgacactggctagtagcatctttgaaagtggtggatccaatggaaattcagccattttcctccccagtttggttagaaggccctcttcatcaagagcgccaaggctgtacaactgttccatggcagaaatcagtgcttgaggtgctgggggatccataaaatcaaaggataataggtcatttattcccatcgccttcatattaagaactgtagaccccaagttgatcctctgaatttctggaatagtcgtgggggacatttcattacggttaggtcacttttctagttgttattagtacgtatttaacttactttgttcctt

SEQ ID NO: 18936 - DNA, 744 bp, Setaria italica
  Peptide Sequence Number=SeqID_84910
tgttgactctttacttttgatttacattaattgcaaggcagccaacttcataattttatgggaaatagatgcaaccggttctccatttttcctgttttgaaagtgctaaatctgagcctttgctagtttgacaaaaaaaaatgctttggtatattttgtatcagattcaaatttttgaaattaagatttttttttctttttctgaaatgaaatacagaatatggaaagataaatgttgtaatatgaactaaatttgatgctgtaaatgttggtgcatttttctataaacttggtcaaagaaagagaaattgacttagacaaaattaaaacgccttgcattttggaatggagggagtatatatcatcctgtgtgttatcgtgtttgtggtaaattattttctccacattttaatcattcacaatttgtttcttagttttaatgacttgtgtatttaagcattttctttagttgtccgtacatccttcagtcagtctcattgaaatcaaatgactagtgctgttttctttatgcagaatatatgatttgtgcatgtgtgcaaatgcccccattttcacgggcattgaacaattgccacaattttcacatatacaagaactaattggtctagcagctgctgattctgttgaacttggtcacatcgtggaccctcctgttattcggactgccacttctattcttcctcttggatgggatggactccctggtggtaaaaatgctgagcc

SEQ ID NO: 18937 - DNA, 547 bp, Setaria italica
  Peptide Sequence Number=SeqID_84911
caaatcttatcgagaaacatcaaagaagttgagaaaatcaaaacctgcagtgcaccgaggtttcatggctcgtgctaaggggattccagcactggagttatacaacctcgcaaagaaaaggaacaggaaacttgttctttgtggacactcacttggtggagcggtagctgcattggctacacttgcaatcttgagagctattgcatcctctccatctaaggaggataacaggcttcatgtgaagtgtatcaccttctctcagccacctgttgggaatgccgctttgagagagtatgtttctttagatatagctataatgctacacttgactgagcataagattattagtttattacaaatactattaactaatcctacttgatttgtctggagagggtgtgttggtttaacaaggttgatactatcaaaattgcttctttatccctttgtttgccttttgctagttatgttcacacaagaggatggcaggactacttcaaatcctactgtattctagaagacttagtgccacgcattctatctccag

SEQ ID NO: 18938 - DNA, 1618 bp, Setaria italica
  Peptide Sequence Number=SeqID_84912
ttcttaagggttttgttagttggtatttccttctattattattggtaactaaatgccacttctattcttcctcttggatgggatggactccctggtggtaatgctgagccgctgaaagttgatataattgggcatggcctgcagttgtgcactcatttccaggcacagataaatggaaactggtattccacggtagtagagactctaccatcagccacttcgtactcaccaaatgaagaaatgcaacctacattgcaaaaaatgcggatccttgttggccatccactaaagcagcctcccaattacattagcgaggatttcctggttcctctgatcaaaggtgctgattcaaccccggattttggatttgagtcattgtttgaagataaagattgctgcaagggtttgagtggattcctcatatatggaacaaatgattttgtaaccgtgcgtaaaaaggtctatgtcaggacaaggagggtgcgattgcttggattagagggggcaggtaaaacttccctgcttaaagcaatgttaggacaagttaaagaaagaaacagcgtagttcttgaatgcatacatgtagatttgcatggcaaaggaatatcaagcggattgtgctacatagattcgacaacagtgaacttgcaggagctaccttcggaggttaggcggttcaaagaagaattgctcttaggagtacatgatgtcagcaagaggactgacctcgttattgccgtgcataacctagcacatcgaattccacagtatcaacagtccaatacttctcggcctcagcctgctctttcacttctcttggatgaagccaaggctcttggcattccttggattcttgcaataaccaacaaattctctgtcagcgcacatgagcagaacacgttgatcagcttggctatggaagcatatcaggcttctcctgagatgacaaaagttgttaactctaccccatttctaatgccaagtgctagaaatagtttgatgccgattggttcatctgctgggaatttggggaacaaggatcctgctaacagatctacttatcttcctgtaaactttgtattatcaccatttcagagaaaggacattgttatgcatgtggagggtgttactgcccttcgccaacttgtacatcaagtagtcctcaataatgaagaaccagcatttgaggagcttgctcatgagagattgtcgctggacctggcacgagagaaggcggcgtctctgcaagcaaaacagaagccaccgaaaagagatggctctgttacagctgcagctgtaggcgcatcgcttggtgcgggactggggattgtgatggccgtaataatgggagcagcgtcagctctccgaaagccatgactcttcatgtcttgttttgatttatttgttgtttataatttcttttattactgttgtatatatagtttaattactcattttccaggtatggaagaatctctcgggaaaaaagggcactaggatagggggaaagtagatcggaataggtagcggatagtgcagtgccacatttggctgtatatagaatgaaatttactcctcatcaatcgactgatttcttgacttttaaaaaaaaaaaaaa

SEQ ID NO: 18939 - DNA, 1492 bp, Setaria italica
  Peptide Sequence Number=SeqID_84913
ctgattttggtggaaccattgtgtccctggagcgtgttcaaccatccttggatcatgtaccacatcggtatctgttggcggaggctggtgacaccctgtttgctacatttattggcacaaaagattacaaagatattattgctgatgcgaatatactccaaggaaccatgtttcatgaggagactgctcagggtttcgctcctgatgttgactctgcacaaaatgatgctcaaaagggtgaggaaaaccttggcaaatcttatcgagaaacatcaaagaagttgagaaaatcaaaacctgcagtgcaccgaggtttcatggctcgtgctaaggggattccagcactggagttatacaacctcgcaaagaaaaggaacaggaaacttgttctttgtggacactcacttggtggagcggtagctgcattggctacacttgcaatcttgagagctattgcatcctctccatctaaggaggataacaggcttcatgtgaagtgtatcaccttctctcagccacctgttgggaatgccgctttgagagattatgttcacacaagaggatggcaggactacttcaaatcctactgtattctagaagacttagtgccacgcattctatctccagcatactttcaccactacaatgctcaaacacttgaagcatcttttataaataaaactgatgtgaaatctgaagaaaatatggagacaagtgctgaaagggccaaagggaacaatggggagcagctcgttctaggtgttggtccagtgcaaaagtcactgtggagactttcaaaacttgttcctttggaaggggtgcgtaaaagcttaagtgtaattcaaaaacaagcaaatgtttttagaaaggcaccatcacaattagatagttatttacaatcaaagattgatgaatcagaagaagaaccacaatctctagagattcaggaaggttcgcaaggaattgttcttacccctttatctgataaagatggagagcacaatgaagatactaacaggactgagaaaataaatgcatctgaaacggggcgatctaaacgctggacgagggtaccttctttgccttcatatgtgccatttggtgagctttacctattgggagattcttcagtcaatacactatcagattcagaatactccaagatgacatcggtgcagtctgttatatcagagttaagagagtgtttgcaatcacactcgatgaagtcctacagggcacggttccaaaataatatatgatttgtgcatgtgtgcaaatgcccccattttcacgggcattgaacaattgccacaattttcacatatacaagaactaattggtctagcagctgctgattctgttgaacttggtcacatcgtggaccctcctgttattcggactgccacttctattcttcctcttggatgggatggactccctggctgagccgtttgatatggcctgcaatttgtccactaattttctactatta

SEQ ID NO: 18940 - DNA, 577 bp, Setaria italica
  misc_feature (3)..(3): n is a, c, g, or t
  misc_feature (6)..(6): n is a, c, g, or t
  misc_feature (38)..(38): n is a, c, g, or t
  Peptide Sequence Number=SeqID_84914
gtntcntgtttttttttttaactaccgaacagcagcancttttattgccgctacttgcgaaattactactactgctacaacaactgtcactgttactgccgctaatcacgctgttacagcgagacgagctactaccgctgccagagctcgcgtcggcgtcagcgtcgccgtgaaccgctgagctgccttgatggtggccatgtgacgaggcgtcgccgcggggcgcgtccacgcgcatgtgctcgccgccgccgccgccgccgccactgccaatttgttcctcggacactcccgtgatgctgcttccagcgcccgcctcgaatcgtggtgatgctgccgtgtcgtcgttgttgccgaagatgccggcgtgggcgcagacggtgatccagtgctcgccgctccaggtccagtcggccgcgacgtcgtacgccaatgcgcggacgcggtcggccggcgtgagagacaccgtcgtgtcagagtcggaatcctcccagaaagcctgatcgaggacgctcttgggcgacaccctcagctcgatcggcgcagctttttacggaggcgggtattcgtattgggt

SEQ ID NO: 18941 - DNA, 481 bp, Setaria italica
  Peptide Sequence Number=SeqID_84915
ggcaggccgggggaggtcctactccgtgcagtccccgccgtgtccggaacgagcgcgagagcgggaggcggacgaagccaagacgagtcggcgcctccgctccgcttcagtttccccttcttccgcctgaccgcctctcgccgccgcgccgagcgcccgagccccgcagcacagcgggctcagacttcttgggtgacaacgagatgagcggcgcagatcaatgctcatcccagccacaatttatgactagcgttgggaggagcaatcgctcgaacggccccggcactcctcttatcgaaagcatagatgttgatcagattgttattccagagaaaaacagttggaagaacttattctcatacataggtcctggatttctcgtctcaattgcatatattgatcctggcaactttgagacagatctacaggctggagcgcagtacaaatatgagcttctttggatcatactggtcgcgtcctg

SEQ ID NO: 18942 - DNA, 456 bp, Setaria italica
  Peptide Sequence Number=SeqID_84916
aatgagacagctgtaggcccaattggaaaagacttgtttgagagggagcaagatgacctcctctgtgacctgaaagatattccgaagaaggcttgtgaccgccaggtcaatgagtttgtcaagcgcgctagagctgccaagatccatgcttacataattggccatctgaagaaggagatgcctgcaatgatgggaaaagctaaggctcaacagcgactcatagacaacttagaagacgagtttgcaaaggtgcagagggagtaccatctccccgccggcgacttcccagacgttgagcacttcaagcaggtgctgggtgggtacaacatcgacaagttcgagaagctcaagcccaagttggtgcaggcggtggacgacatgctcgcgtacgacatcccggagctcctcaagaacttcaagaacccctacgagtgaactgagctgacctctcgtcgg

SEQ ID NO: 18943 - DNA, 353 bp, Setaria italica
  Peptide Sequence Number=SeqID_84917
ctcagtcgcactagtcgggggctcggggcaacctgccaaacacagtccgcgatccatccaaaccccggcagctccttaatccccctcccccggagccgtcgagatgctcctttcctccattggctcagctcccgccgctcctccgtctcgcgctcgccggtcgccgctccaaggaccatgccctgctcgctgcttccagctccatcgcctcgcccttgtctaatcgcctcgctgcgtcggccgccgcactgcaaagccggttcttgctgccccggacccggaggcggccaaggctgcggcttgggtacgtgcgcatggccgagatgggccagggtcgggagcggcgaggtgtc

SEQ ID NO: 18944 - DNA, 484 bp, Setaria italica
  Peptide Sequence Number=SeqID_84918
ggtagggtaggaggtcatgatggcgccctgcgccgcccagaggaagcccgcgccggcgccgaggatggcgccggcgggcgacggggaaggcctgggaggcgtggtggttgtagtagaggaaggagccggcgtagagcgggtaggtgatggcgccgagcaggagcgtcacgcgcgggccgaggaggttgtgggcggcgccgccgaggacaccgaagacggcgaagcaggcgtagagggccgtgttggcgttgtcggcggtggtgttgtcgacctggccgccgccgcccaggccggagagcgcgttgaacatgcccgggcagcagaagcagatgaggcccagcagggacacctgcgccagcggcgagttgtaacggaggaggccgcgcctcgccggaacctccgacggcggcggcggcggcggcgggccctccacctccgtcacggccattgtattgtatgtgaatcccctccctgacaataattg

SEQ ID NO: 18945 - DNA, 1085 bp, Setaria italica
  Peptide Sequence Number=SeqID_84919
tgacaaagagcacaagtaaagtacagaacaattgcatggctaattagttttgggttagggatagggtaatccaatggctaaggcaagatcctacaattggagcttcgcctttgaagaacaagttggaggagaagtacttgatcaagctatcatattggattgtatacaatggcaggcagttagcacttgatgagattttgggcaagcgggaggatataggtttgactatgcatttgcattcaaagcagagatagagagaaagtctcctagaattatagtagaaatagactatgagaaggttgggtccaagatgagattcagcatgatgtttattgctttgaagccatgtattgatggattcaaaaatgggtccaggccctatttgggcattgactccactactcttactggaaggtggaaggggcagctagcttcagttataggcattgatggacataactggatgttccttgtggcatatggagtatttgggtccgagacatgggacaattgcggctggttcatgagcaagcttgcaatggcaattggatccctacctagacttgtcatttcaactgatgctgggaaaggcattgacatagctgtgaccaaagtcattaccaatggagtagagcatagggaatgcatgaggcatctatacgatagaactgatggacaaaattaggcaaaaaatcatggagaagttgtttcaaagaagaagtctagccatgaagttgaactctaaagtactgccacacataattagggctctcaatgcaaagagtagaggactagttggttgttcaatccacgaaggtgttgtccacatggcagagattagtggtgtttacaaggacttgacaccttggggacatactgttaatcaggaacatagaacttgcagttgcaagagatggcagctcattggactaccatgtaatcatgctatcagtttgatatgctcttacagaggtctagagttggaggattatgttaacagttgttactttgtgtctaagtttaaatcaagatacgaaggttggattgaaccaataccagataagacacaatggcctcaagacacg

SEQ ID NO: 18946 - DNA, 194 bp, Setaria italica
  Peptide Sequence Number=SeqID_84920
tgaggatgtcaatctcagaaagctgcatgtgcgaaccatatctactagcaagattacaagaacggaagctgatgatcttgtaatcttgctagtagatatggttcgcacatgcagccttctttgttgttcatagacccatggtggtgaggatgtcaatctcagaaagccttgttttattcttcacaactatgaac

SEQ ID NO: 18947 - DNA, 2415 bp, Setaria italica
  misc_feature (2347)..(2415): n is a, c, g, or t
  Peptide Sequence Number=SeqID_84921
ccgcgctctgggccgccggcgccctcggcatccgccactccttcctcttcctcctcgccttcctctacctctacatggtaaatgctcgctgtgccatgagactacgaaagaggatccaacatgaggagatgaaatctgcctaccaacgaagactcctttctgatgcagaatcagtacggtggttaaaccatgcaataaacaagatgtggcctatctgtatggagaagatcgtttcacaacttttacggcccatcataccgtggttcttggacaagttcaaaccttggacagttagcaaagcaagtgtccaggagctttacatgggtagaaacccaccaatgtttacctccatgagagttctacctgagacatcagatgatgaccatttggttcttgagctgggaatgaatttcctttctgctgaagatatgagtgccatacttgctatgcagctgcataagagtgtgggacttggaatgactgcaaacatgcatttaactagcatgcatgttgagggaaagattttagttggtgtgaagtttgttaggagctggccgtttcttggccgtgtaagactttgctttgtggagccaccttattttcagatgactgtgaaaccactcattaatcacgggcttgatgtcactgagtttccaggaatttcaggatggctagacaagttaatggatactgcatttgggcagacattagtcgagcccaatatgattgttatcaatgtggaaaaatttgcatctactccttcagaaaataactggttcagcattgaggagaggcctcctattgcgtatgtgaagcttgagattttggaaggaactgacatgaagccatctgatataaatggactagcggacccttatgtgaaaggtcgtctgggtcctttcaaatttcaaacagagatacagaggaaaacgctatcccctaagtggtttgaagaattcaaaataccaatcacatcatgggaggcatcaaatgaacttgtcatggaagttcgtgataaggaccccatgtttgatgactcacttggaggatgtaccatcgatttacatgagctgagaggtggacaaagacatgacaagtggatatcactgaataatgtcaagaaaggaaggattcacttggcggtaacagttgaagatatatctgaggacaaaaatgtatcatgttcggacgaaccattgaagaaagctgatgctgaactaccagtattaacctctgcagacagcacaacggatgctggtgaactgcctgaagaaaagaaagtcttaatggatgaagtggagcacataaacattgatggacaagaacaacctggagggttatatgttcatcgccctggcgctggggttccaaagacatgggaatcccggaagggacgagcacgcgccccggacacacagatttaccaagaggttgacaagtcaaaggaaatccccgcaccaaaaagcagtggacatgggggtctgtttaacctaggctcctttttccgaaagaactcaaggaaggagagcttcaaaggtgatcccagccttcctactactccgggttctcagagtgtgacagagcttgatccaaagctccccaaaacaccacatcccaacctgaaggagcttggtgagaagcggacatcaataaagcttgtagtgaatgaagaagcaagcccagcaagcaaggtgggagacacggataactcaacagaagatgtagcaaaggtgatccaaaaaaatgcaggtgaaccaggcagatcactgacgagcacactgagcaggaatatttctaggaagagagaggaggacaggttatcagatatccaggagcagattgaagctcatggatctgagtcggtgactgtgagtgaagagcatattcccgttgaaggtgaaccaatagaaaaggagggccatcagacaacggaacatgagaatggtgatggtgctgaagaagattcagtgggagcagagattgctactcaggcctcataagattgcaactttgcaagatcatcagcttccgttcttgtaatcttgctagtagatatggttcgcacatgcagccttctttgttgttcatagacccatggtggtgaggatgtcaatctcagaaagccttgttttgttgttcatagttgtgaagaataacagtttagaaatggctgtatggctgtacactaacaaagagcagcgtgctgtgcagtttagacgctcatgttgtaagatcaacgtagctctgtttgatggaacttttgtaaagaaacatatattccttgacaatactattgtaaatcataacttttctgtttctttccttcatgaaatatttttgccaaatnnnnnnnnnnnnnnnnnnnnnnnnnnnnnnnnnnnnnnnnnnnnnnnnnnnnnnnnnnnnnnnnnnnnn

SEQ ID NO: 18948 - DNA, 430 bp, Setaria italica
  Peptide Sequence Number=SeqID_84922
aaagcaagcagtaacttcacttcgggtttttatgctaatatcaataggctggccaacatggaaaaacgcatgggaaacagtaaagcagcttctaagatatacgagacagccattgaggacgcaatgcagaagcagaacatagagttacttcaggacctgtacagcaattttgctcaattcatatatgcggcaagtcatagcattgtggaggctaaagaagtctttgtcaagggaatcaatcgtgtaccctgtaaaccactgattaagggactcatacagttcatgagcacacatggaggacctacagaaatacctcttcttgattctgttatttctaatgccgtgactcctggatctgatgtatcaacagctttaagccctgaggaccgtgaagatatctcattgttgtttttggagtttgttgaccttt

SEQ ID NO: 18949 - DNA, 373 bp, Setaria italica
  Peptide Sequence Number=SeqID_84923
tatctaaaggttctaccgttctattcgtattgtaacttcttggtattctattctttcgtatttcatctgaactgggaatatcatcgtcgccaccatcatcgctgctgttactgagatcgtcagaatctgattccccttccagaacaggctcaagcagaacaccatcatctgagttgtcatcatcatcgtcatcttcatcatcggtgtcacctgcatcctctggatctgaatcatcatcggttattcgcttcctgccaacttcaaacaagcgagcagaagagaacagctcctcgtgatcgtccatagcaaccaccccgataagagaatcattgggctcggtggcaagatcaagaacacagcggtcaatttggac

SEQ ID NO: 18950 - DNA, 1396 bp, Setaria italica
  Peptide Sequence Number=SeqID_84924
aaaaaaacagagtaaatttaatcgatggccttgtctgagatgaaaagcttatacttacatcatctagcgcctcagcagttcattatgttccgcactccctaacagctgagctaaacccctcaaggccacaagaacaaaggaaataattataattacagtcataatgtgagcataagatttcaacttgtacaggactggccaaacggccattccgcaaggcacaaaaccttacaatatccaaccatcctcatctccgctgctgaaggaaccaatcatatcactctcgtcgtcctccccttcgccatcacccatgatatccagcaagccccctccgccatcaaggtcaccgtcatcgatgaactctggatcatcttcgatttcatctgaactgggaatatcatcgtcgccaccatcatcgctgctgttactgagatcgtcagaatctgattccccttccagaacaggctcaagcagaacaccatcatctgagttgtcatcatcatcgtcatcttcatcatcggtgtcacctgcatcctctggatctgaatcatcatcggttattcgcttcctgccaacttcaaacaagcgagcagaagagaacagctcctcgtgatcgtccatagcaaccaccccgataagagaatcattgggctcggtggcaagatcaagaacacagcggtcaatttggacagttgcaatatccgagtaagtcacggcatcaatcgtgcggaatgcagggaaaagaggatgtctgaccctacgagcattgatggatgacgttacatcgtcaagattacgcctcaggatggcatagataacatcaccagtgccattaaactttatgactgtctggtccagggaagggacactcctcaaaagcttaaacttcctcagatcccacacctccgagtttaagatcacctcgtttcctgctggatggaagccacccccgcaataatctgtgaactggtcaaactgatgaacaggatttgcctcccgtgtatcccacaggactccattccaaagcaacattgtgtctgaaggactaaaatgtataataggttggacgtatccgcggcctgaacttgaattgctagtattatcaggaaggcgctgaaaaatagtgtatgtctgtgcatcgtacaatagaatctcccgttgagctgtatcagtagaaagggcagcaaatgaagttccggagtggctaaacctagcagctttgcaatcctcaaatgtgtgcaaaggccccccagataccgagaaggcatcccagatcttaacctcatttaggctggatgtgagaatcagctcatttccaccagaatatgtagactccatcattgtaacaagatgttggtggcacgtttgggtctctaagagatttgccgtgttgcag

SEQ ID NO: 18951 - DNA, 2615 bp, Setaria italica
  misc_feature (1516)..(1516): n is a, c, g, or t
  Peptide Sequence Number=SeqID_84925
gtcaagcaatgtacataagcaggttaagagaggacagttgacaagtgattaggcgtccaggacatcgaagcaaacgataaagtagagttaacttaaaacgtgttaagcacttaaggtcttcagtgccgataccacgaacaaggttcactacgagacactccggtgtcactagctattcacacgaggagggtaacctggcctagctaattcttgcttagcgccttgcgcagctcggctggataatcaccaaactgggtcacggagggaggatgcatgttgaagatgtaggtgactggtgctgagacttgcatccctcttggatgcctggatatgtccgagaaccatcccagagttgcttcatcaaacataaatgattcgctgagggaaaagaagcattccctcgccaacctttccacctgcaactgtatgtatcttgtgtttttcatgatcaagatgaccttcaggtcagacagcctttctgacaagatcttgatggccatattctcaaataatttctgcaagagagcctgctcactggctgattcttcgttatcaaaatcagcaaaccagaaaactcgcttcagttttgtccaaggaactggtaatttatggtcacgtccagtgattagactagatggatcagccacattttggagtatcttgaggccctttggaactgaatgagactcaacaggctgcagaccaggtgtaccagcaacaatcttacaggcatcataatacaggctaagcttactagtgaactgcaggtttttatcattcaggataagaatatgcccatctccatcagcaggaaacaaccttgtacaacatagtgaagtggctctgccttcttgagagcatattccagatgtgataggcgtagaaatcaagaagccagtatcatgtgagtacggacaagagttaccatgacgacagccctgtaatgtgagaaagaacttgcatgctggtttaggagcaaaggatgaatgagaaaagcgacatgcagccccttgattgcatgatccattaacaaagaacacacacgcctcagttcccaaggttggcttcatataaggaccaagcggtcccttataagaaactttcttttcctcgacatgttgtaccttaatctccttgacaagtgtcttcagcatttcaacaatgatagtggtcccaaaatcagtttgcgaaacatatggagttgcagcacaccgcttaggtaaatcgcagtgagaattctcagcctctaatgagagtgaattcatatcctcctccagctccagtgtttcatgatggagacacgtgtggttgaatttagaaggctgaagatgcttcggaggatttattttgacaagaaaactaggtcgaaaacggtgcagttgctgcataacatcatcataaatttcagatatgttcttaaacgctgcagggacaagattatgaattgcacaccactcctcttcaggtttagcaaggaaggtatgtgattcttctgattcttcagtgttcgccacancttttagataatccagacgatgcttgtccttcaatacacgctcccaaaattggaatgcacaaagatttccaacagtagtagcttcctttttgccaatttgtacactgccattttccttgaagtaattgtctctatacttctggcacagtgcttgatagccaaaaggttgcaggataggaagcggctggatgtccaacaaaatgcttatcagaattccttcatggacagcaccaagctcacaaaattttagggtaagaacagaagaatcaaatgacaatggcaaactattgagcaaacagccataaaaagtgggctgatagcgtccagggcctgtcttctccaatgcatgaatttgaacaagtgattctaacgcatcttcaatagcatctgaatctggtgggttaagaactttttgcagaagtgcgctagggtcattcatagatctgggctctgcacaacaaaccatgagcacttgctcccttaaggataatcttaaaatggcaggatattcatgatcatttaaactgctataaaacgttccagtcaccagacgataaatctgaccatcacaggttcgtcctgtcctgcctttacgctgctcagcctgagactttgaaatccaaacaagcccagctgcgtctgttttcctaattgggtcccagtagacttgcaatgatctacaagaatcaataacatatgcaactcctgggatagtaacagatgattcagcaatgtttgtagccagtatcacctttcggcaagactttgatatcttcatagtttgaagagcttcatccgtgtcaatactccgatgaagaatatgtaccttaaaggttgaactataaggtagcagacggatccattgctgctccaatgcgtagtatgtagggaggaaaaccagaatactcttgctaatgtctggttcactttggtgtatatgcaacaataacttgtggataagttcataaacatcatagttaatttcagcatcagcagaagcatccaggccagagcaattattttgttgaaagcgattgagaatttatcttgagaatatcagcaatctgctccaggtataggactttcctctagaaaaatg

SEQ ID NO: 18952 - DNA, 393 bp, Setaria italica
  Peptide Sequence Number=SeqID_84926
taagaacaatagaccaaacaaactacaagaaatttaaggacaacttagttctcttctgcttcttccggcgacgccggctggtcctgaagaccgccggcggccgacggcgagagcttcattcttcccccaccactcgccgaccgatccgaaacgcgttccaggagcgcgcgaaatggagaggggaagggagagaaccgaagcaagggcccttctctctacgccaaatcacgcgccttcgcggttcggattgagaagcctggcagcgccacctcctcctccgccgaaccggccaaacctcctcgctccgtccgcgccgccggccggcgcaaaggcgcaatcttttcgatccgagagctcaaatttacatcacgacgcgagcctctttgtcccaaa

SEQ ID NO: 18953 - DNA, 296 bp, Setaria italica
  Peptide Sequence Number=SeqID_84927
actaccaaataccgcctcccgcgtcaacactccggtcaaacctcccctcccaaagcctccaaacctttctcctcgccgcggccagcccggccaccatgccgtcgctcgccggccgcctgaccgtgccggccgccgcgctgctgttcctcttcttcgcggcgcccgcctcggccgccaacttcacctgcgccacgccaggcgccacctgccagtccgccatcggctacgcggtgcccaacgccaccacctacgcggggctcgccgcccgcttcaacaccaccaccacgctcgccgag

SEQ ID NO: 18954 - DNA, 845 bp, Setaria italica
  misc_feature (791)..(791): n is a, c, g, or t
  misc_feature (836)..(836): n is a, c, g, or t
  Peptide Sequence Number=SeqID_84928
caacaagtgtcacatttgttcttatgatgctaactttgcacgaaacattgcactggaaaaggttgttgagtcagtgaagtcctcctgctcatatgccaaatggggctgtaggaagttggtcagttattcgctcagacatgctcatgaagaatcttgccttttgctccttcaatttgtcctattcctggttgtgggtacaaaggattcactggatggtggtcaggacatttccttacaaatcataatactgatggtagcctgcggttctcatatggtcagtggttcgaagtgagtttggaaatgtcagttcctttcctagttcttctagcagaggatgatcacctattccttcttgtcaacaagaatgtgttgccctttgggcatgcgctttcagtgggttgccttaggactggcaatctgaactggaatttcacctacgaaatgagagctgctagtaaggcaaacactgaaaacaacctgcaattgaaggcttgtgtcacaaatataagggagtggcaaggtctccatcctactgaagctttccttttagttccttatgccttttgcaaatcgaacaaactaacactaaatgtctgtattcagaggtctgctgatctgagggtgaatatgtaatgttctgtgtgttgtaaaatgtaaaaaacaaacgaagtgtagcagtgtaattgtgtaaatttgtcttagaagctagtttcactaaggcatcggttacctatatggttgctaaacccttgcttgtactcatgtaactctgatacttgtacaaaaaaatnttttttgtatgtttgttcttacaaaaaaaaaaaaaaaactaaagngacacgcac

SEQ ID NO: 18955 - DNA, 426 bp, Setaria italica
  Peptide Sequence Number=SeqID_84929
tggaagacaggattatcaaggtgataggaagttgcatcaaaaacacaggccgatgtatccgcgggacatctggtgttggatcttgcgatactggatgggcacgagtcgacgccgacgccgacgccgccgtcgcccgcacaaaggaggacggcgccgcggtcccgcggaaggagcgattgtagaaggtcgctggcaaggggacggcgcggcgtccagcgaggggttcccagaccatgaggaggccccacgaggcgaactggcgaaggacgagccgaggagggcgcagccacggccgtcgccgcggcagcatccgaggaagtgccagcggccggtgttcgcgcggagggagaagcgctagggcgggacgcggtcgggggcctcgcccgagggtacgaggcagggaggggcaggaagctgcggaagaag

SEQ ID NO: 18956 - DNA, 515 bp, Setaria italica
  Peptide Sequence Number=SeqID_84930
caatttgggagtctgcggggtaaaatgttcccggcgtacttcatattgatatcagtgtgttcagcgatatctgttgcagcatttgcatacctgcatggattccttctttcggcccttatctgtaacctttcaaaccttctggtcatcacacctatgatggttgaagtaaaatactttgttcgtggccttgagctttttagtacctctcgttttgcatttgccagatgctagtgtgctagttacacagaatatcacaaaattatagtttgagtatgtgataatatcgttactaatgaatggaatcttacactttttatatgcaattttgagatttactttgctgatggtagttgacgtatgtaaagcaaaaggaagttacttttaaattattagttatatggttatattttataggtcagtgatttctgagtattagtcatagcagtgctcacaggaatatattgacttgttctttattttattttcaagaattaatacagatagcataaagcaag

SEQ ID NO: 18957 - DNA, 986 bp, Setaria italica
  Peptide Sequence Number=SeqID_84931
gcctgctcagcctcctggggctaaatatattgtccatgcctccacttcctaggttacgaagctgttctatggtgccctgtccaagagatttgtcaagcttaaggagacgaagaattccagcagtgattctccccatcgcatcagcttcagatctgcaaagcatggcgaggtgctctagttcttctttcgttgcaactgcctcgatcggttctttgacggaaaacttaacattatccattgtccacttggcaccctcaatctcatcttcgccaatgaccatggtagcttcaacatcaacaccatggtcaccaacagaacttgcattattaaatccactgctcatttgatgattgtttgacgttccttttccagcatgttgatcttttgggcgaggttttattgcctgcaaaccttcaattccagccgtaaagcgttccacaggaaatgcccttttggacgacacttttcctgcacctcccaagttaagccggtcactgctctttccggagacatgtaaattcctgaaggttgaatgccaacattttttcttctctactgatacgatcagctccacgagttggagtaaaacaatctcctacttcttccgttccttcaagtgcaaatagccaatttctaagctcaactgacacatcaagatcatctggcaccccgagatcaaattttgaactgtgatcgtcaactttggacctttcattttcctcctcggtgaggtgagaggatttgaatagttttgcaagtgggccagaagataaatcctttaattcccctcaagaggccttcccctggaccaccatcaggccccaggattccaaaccgatgcagtaaagactcggtgtaactcattccacctccaagacgaacaccagataccttagctgacacattcaagctatggcattccatatcccgcatgtcataaggcattacatgagtaatatttacatcaataaactgagcttttttat

SEQ ID NO: 18958 - DNA, 270 bp, Setaria italica
  Peptide Sequence Number=SeqID_84932
tgcaacattatttgaatctagtgttgattatatacagatttagcctttgtatgaggtattgtaggaagctggcatatatacagctgtgatgaaatctctactgctgtgggtgtgtgtagctaggtttgagtcttccacaagtagaaaataatgtactcatgcattggctttattttttaaataaaaaacttaataatgtgttcttggactcgtatcataatgctcctagtcttttcttctccttttggaaaggtaccttctatagcttga

SEQ ID NO: 18959 - DNA, 605 bp, Setaria italica
  Peptide Sequence Number=SeqID_84933
tttttagagcaacagccataactttttatatccggcacacaccacacgtacgatctgttgagaagttcatgttatgaaccaaaaatactaaaaaggtgccgcaccaaatctaagatcccgtccaagattaatgcagacataatttactcagggaaacccccaaaaaaaaagacacggtacatgacatcacttcatttacgacgacacagcaacggctcttggacgggtggtgcgacggtgatcgctttaccaaaccgttcggagagacgacgcgcccactcattgatctcccactcaaggatgaacacgttcaccatgcgagcgcatcgtaatttcacctgtggttctatggttacatgctcaagcgcgtcacccttcgccaggatgccgcacaggaactccacctgagcccagaaaccgcggaacccactcatgtagaccgacttgaggtgatcaaggccgtgcataaaggagatccccttccctgtcacctcccctttccagcaggagctgctaagcttataatagaacatatgcactttcagtgtctccagctggggtgcaaattccaaatagctagccagttgaaggagttcctactggct

SEQ ID NO: 18960 - DNA, 550 bp, Setaria italica
  Peptide Sequence Number=SeqID_84934
ggcggtgcgggaccatggggtggcccactcgacggactgcgagtccgggttgaaaaagtacgacccaccgcttggattcgacccaccccatgagcagcagctgcgtgccgaggagggagccgaaggagaagggtgcgatggcgcccgggtcggcgccggcctcgaaccaggggatgccgctccacgcctggccgacgaagatgcccagcacggcggccatcgcccaccgcccgtggatcagctccgcctcgcggtaccacttgaggaacgccgggtccttgcccaggcccagtgggtcgaagccgaagtcaccggggagtgagccatcgagccatggcgggttgatgaactcggcgtcgctcttgaaggcggggatccacgacttcttggcggcagccgccgccgccggagcgcgggccgccgcgggactgggcctcgttgacggtgatgctgcggccgtcgagctccttgccgttcatcccctcgatggcgtcgcgcatcgcctgctcgctcgcgaacgtgacgaagccgaagccgcgggacctctggg

SEQ ID NO: 18961 - DNA, 1167 bp, Setaria italica
  Peptide Sequence Number=SeqID_84935
tttttttttttttaagagatcaacgaaatgtcctcactcatcctgccttaattgattccagaaatcgatccggactatattacatggtacatacatggaaaaaaagaaactccccatttggttcacgcacaccacccaaaagaagtcacgaacacagatacatttgctgctacgcgctcttctttagcctccaatcacccaatcaatcccatgcaaggtccattgatgcatgcgtctgatctgatgcagcagtacgtcccctcaccgcgcgcgcaatcgtgaactaactcggccgattcgatcgatgagtacaagtacagacggcagggtcgcggtggcgaattataggccgagcgcgccgagcggcgtcttgccctgtccggcctcgaagtagaaggtgagcatggcgagcatggcgatgcgggcgtgcttgatctcggccagcttgagccgctcgagcttctcggtgtcggggatgtagacgccgtccttgacggtgccggcgaggccgagcgggtcgaagaacttgccgccgggggtatccctggtcgccggtgaagttggcgaagttctcggcggtgcgggaccagtgggggtggcccactcgacggactgcgagtccgggttgaaaaagtcgacccaccgcttggattcgacccaccccatgagcagcagctgcgtgccgaggagggagccgaaggagaagggtgcgatggcgcccgggtcggcgccggcctcgaacccaggggatgccgctccacgcctggccgacgaagatgcccagcacggcggccatcgcccaccgccccgtggatcagctccgcctcgcggtaccacttgaggaacgccgggtccttgcccaggcccagtgggtcgaagccgaagtcaccggggagtgagccatcgagccatggcgggttgatgaactcggcgtcgctcttgaaggcggggatccacgacttcttggcggcagccgcggcgacgacgagcgcgcggcgcggcgcggggcttggcggcggcgacggaagcggcattggcgagcgcgtgcctggccccgaggaacggggtcttgagcacggccgcggcggaggtggacgcgagcgccatggcctggtgacggggtcacggtccttcccgtggcagagtttgtggctggctgggcggcgg

SEQ ID NO: 18962 - DNA, 260 bp, Setaria italica
  Peptide Sequence Number=SeqID_84936
gcggggacgtctggtgcactcccgggataccgttcgccgccgaggcctcatcggtgaactgcgtggtggcgccgcaccagacggcgggtgcacgccgccgcgccgaggccgagaggccgcgcagagagaggcctggctcgcctccggctcggagggtcaccatgcgggagcacatgtcgtcgtctccgatgaattcaccgccacaccatggcatgccgttcattgatgccgaccgtgcaccttctgtccgaaaccgcata

SEQ ID NO: 18963 - DNA, 295 bp, Setaria italica
  Peptide Sequence Number=SeqID_84937
cgcgcggcaccgatttccctcacctctcgggtttccttttttccttcccggccttgacgggcgttcttgccgcatcgctcctctgctccctccgagctcctgctcctttgcggctggtccgcgctcgctctcccgggtcccggtggttggtttccgttgccgttgcccggcgtggcgtgccacccttccctttaatgaggcgctggtggttgcggccgtgaccgactcacctcccgggaaggcggaagcagccgaggaggggcgccgcgccgtgctgcgcaggagccggcggcgg

SEQ ID NO: 18964 - DNA, 386 bp, Setaria italica
  Peptide Sequence Number=SeqID_84938
aacgtcctcagtgagcgaagaaaagcaaactcaaccttgcgcctgtcaggtttattgttatctccactgccagaacgctggtcgtggtcagcgagcacctgccgtgcccacatatcgtcgaacaccctggatgcagcaacccagcgcagccagatggtgccggcgacgccgcacacgagcgcgtccacccggtgttgctccaccagcacctgcagctgccgctgtaggatgacctggagccccctcacgtagcgcaagcgcacccgcgccgccaaatcctcgggctggccccacgccccggcgccgggcgcgaagtcccgcggctcgctcggctccacgaagtcgtcgaacgcggcgggggcgggcttggcgtgaggggtcctcgg

SEQ ID NO: 18965 - DNA, 561 bp, Setaria italica
  Peptide Sequence Number=SeqID_84939
ccaacccaacaatcccaatctccagtcgatagcaaacatcagaaatcctaaatagggacgcaccaagaactccactacgagaatcccccaatcatttcttggtgcatttggcttggccccctccaccacccgagaaatccataggaaactcatcccaaatcgcccccaaattggtcctacaccgcaccggatcacagctcataattccagtgagaattcgaaaaggaagaagcaatgacggaggtggcgctcctccggggcccgaccaacctcgcttcccccgcaagccgcgcctccgcctcctcctcgctgcgctatttagccaatgccgacagcgacgtgctcccaggaagcggcagcccggagcaccctgcgggatctacagggagccgacgactccaagaacggcgcgggcaagaggcagcaggagggtcggaggaggaggaagaagaggagcggtggtcgttcttggcgctgctgtttgagctgctccggaagtcgctgctcgggtgcaggacggtgggcggcggcggcgaaggcgaacgcggcggctgtgggatg

SEQ ID NO: 18966 - DNA, 1089 bp, Setaria italica
  Peptide Sequence Number=SeqID_84940
cctccgacgagtgcgccaccatcgccgccatcatggcgttcaccaccatgtcccccgggatgacgtccatgacgaggtcgaggtcggcgaggaagcaggagaggttctgctcggcgtagccgatgatgagcgtgtcgatggtgcgggtgccctgcatccacccgcgcgctgggtcggcccggacactcgtgatgatgctgggccgcatgatcaccacgggcatgtcgccacggagctggcccagcagccatcctcccatggccttggtgaacacgtaggtgttggaccagccgaagtgacgggcccgctgcaggcccagctccttcatcgccttcctctcctccgtcttcttgtcgtccttgttcatcatcgtcttgagctccttcttggcttctccgaccaggcgcagctcggcgtcgatgtccaggtacgtaccctcgcgcagcgactcgccgggctggatgggcttctccaggatgaggccctccctgtcgccgcatacaaaagcagtggagacgtgcatgaacatcttgagcctgggacactgcttggcgaagtggcagaggtgcttcacccccatcacgttcacatccaaggaaacatcgtatctttcatagaagtttgtggttgccgcaatgttgacaatggcgtcgatctccttggctaattccttgagcatgggagcctccagcccgaggttctcgtagatgatgtctccggccagagcaacaactttctcttggatcaactgctggaacccgtcgctgtgcttctccctcagcaggccgaacagctcggtgtcaatcacctcttgctggactctctgctgtgcagaagctgcgtccgtccctcgtaccagcaggtacatcttgttggcatcaggctgcacccggagtatcttctccacaacaagctttccaagaaatccagttgagcctgtgatgaggatgctcttgcccttgaaatccctacgatccttgaagcgtccaagctatcgtgcatcatcttgcttgcttgttcttctcagagatcgatctagagatctagatggccgggtggggtgagtgctttgctgctgtgcttcctgct

SEQ ID NO: 18967 - DNA, 887 bp, Setaria italica
  misc_feature (44)..(44): n is a, c, g, or t
  Peptide Sequence Number=SeqID_84941
ttgttgtcctttggtctagttcttctttttagtttttttttttntttttttttttttaactttattaaacatcatttttttcattgaaatctatttaattgagcatatcacatataattcgcaaccctcatgccaccaggttcacacattactttaagttaatgtccctctagcatgtaacgaacggtttttggtgttttttgtcacattacattagagctttattttctatatgatgaagatggcgaagaagcaacagaaggatgtttcacttgcacaagtacttgagcacaccaggtatgtggattctggtgaagtaatcgtcccagtcgatggtcttggggtcgaaattgaacatttgatcttcaggggtcttcatcgccatcatgagcctcagccgctccaagttcatgtcatcgaagcatcctttgaagaaggcgaatgggccgtagacgtcaacaagatgcatcacgaacttgtacttgcggttgaggtcgttgtagagccgcgagaagaagccgcccgtctctaagagcagcagattcaccaggtgcaggatctctaatggcagcttgaaggtgagcatcatgtagaggtggaaccgtgcgatggtggtgaagaagcgcatctccctggtggggatgatctccccgttcttccccacgcgcgggttctcgtagaaatggcggcggccggactcgtacagcacggagtaggtgaccgggttgcgcagcgacgaggtggcgtggtacaccggcaccgcctgcgcgcccttctcctccgacgagtgcgccaccatcgccgccatcatggcgttcaccaccatgtcccccgggattgacgttccattgtacgtaggttcgtaggttcggtcgtaggtaagtcta

SEQ ID NO: 18968 - DNA, 2041 bp, Setaria italica
  Peptide Sequence Number=SeqID_84942
aagaattaagtattagtttgccatctcaatttcattggcattgcaaacagatattacagatccttttcatggtcactgacacgtgcatatcaatcagatattcagattacaagttcatactcatagcatgataggctgctaccacatagcacaggcacacgtacgtttgaccactactataggtatacggagcttctccaataatacaactctatcaatatgagcctttatttcttttcttgacaatcacctggtaccttcataaacaatatgagggagccttttctttttctatagcaacaaggtgatcgaagaagcagcgaattgcaacaaggcttcacttgcacaagtacttgagcacaccaggtatgtggattctggtgaagtaatcgtcccagtcgatggtcttggggtcgaaattgaacatttgatcttcaggggtcttcatcgccatcatgagcctcagccgctccaagttcatgtcatcgaagcatcctttgaagaaggcgaatgggccgtagacgtcaacaagatgcatcacgaacttgtacttgcggttgaggtcgttgtagagccgcgagaagaagccgcagagcagcagattcaccaggtgcaggatctctagtggtatcttgtatgtgaagatcatgtagaggtggaatcgcgcgatggtggggaagaagtacatctccctcgtggggatggccttgccgtccttccccacccgcgggttctcgtagaaatggcggcgccccgactggtagagcacgttgtacttggccgggttgcgcagcgaggaggtggagtggtagaccaccagcgcgcccttctcctccgagtgcgcgaccatggcggccatcatggcgttcaccaccatgtcccccgggatgacgtccatgacgaggtcgaggtcggcgaggaagcaggagaggttctgcttggcgtagccgatgatgatggtgtcgatggtgcgggtgccctgcatccacccgggcactgggtcggcccggacactcgtgatgatgctgggccgcatgatcaccaccgggatgtcgccgcggaggtggcccaggagcacctcgcccatggccttggtgaacacgtaggtgttggaccacccgaagtgacgggcccgctggaggcccagctccttcatcgccttcctctcctccgccttcttgtcgtcgctggcggcgccatcgttcatcgtcagctgcttcttgacttctctcacgaggcgaagctcggtgtcgatgtccaggtgcgtgccctcgcgcagcgactcgccgggcttgatgggcttctccaggatcaggccctcactgaaccccgacacaaaagcagtggagacctgcatgaacatcttgagcctggcacactgcttggcgaactggcagaggtgcttcacccccatcacgttcacatccaaggaaacatcatacctttcatagaagttggtggttgcagcaatgttgacgatgacgtcgatctccttggaaagcgcctccagcatgggtgcctcctgccccaggttgtggtggatgatgtctccggccaaagcaacaaccttctcctccacgaactgctggaagcccttgccatgcttctccctcaggagcccaaacagctccgtgtctatcacctcttgctggacgcgttgccttgcagtcggctcgtcgatgcctcggacaaggaggtatatcttgtggacttgaggctgcacgcgcaggatcttctccacaaggatctttccaagaaacccagttgcgccggtgatgaggatgctcttgccattgaagtaccctatgatgctcgccgcatccatcgtcatcgacgatcctctcgatctccctctctatgtcctagataataaccttgctgctaagttgcttgaggcagagatcgatcgagaaagataaggctagatattgtgtgtgctagctagctgatagagaagacaagtgagagagggaggagggctatataaggatgagcgaggctgcttctgaaaacaagtgagatggagaggacacagatcgag

SEQ ID NO: 18969 - DNA, 1012 bp, Setaria italica
  misc_feature (950)..(1012): n is a, c, g, or t
  Peptide Sequence Number=SeqID_84943
ccgccggccatcgaggttcagctttccgaggagtcgccggttgcggcagatagattggagccggtggtggtcgatgactccctgtcgatctacaaggggagagtgagtacatctgatgtttttggggtcaaagactctgatttggtcccaggaaaatatgaaggcgggttgaagctgtgggaaggttcattagacttggtgaaggccctcaattctgatatcaaagaaggtagattgcttctagaaggcaagcgtgtattagagcttggatgtggacatggcctccctggcatttttgcaggtcttaagggtgctggtctgattcatttccaagatttcaatgctgaggtgcttaagtgcctgacaataccaaatgtaaaagtcaatcttttcaaggagtcacctgaagaaacatgtacatctaggagtgttggtttctttgctggtgattggagtgaaatggataagctgcttcttaccggggatgctaagcaagacaaaacaaacagtggtgatacagaagataaaacatataatggttatgatatcatcctgatggctgagactgtttacgcattatcttctcttccaaatctctacaggcttatcaagaagtgcttgcactaccctgggggtgtggtttacatggcggggaagaagcattactttggagtaggtggtggcacaaggcagttcttacgcttgattgaagaagatggcactatgcaaactgagcggctcaatgatgttgctgatggatcatccaatgttagggaggtttggaaattctcattcaaatagattagctctgcctttgcgattgtcggaaaaactgaaaacatgtactggactccatatttggtagagggagccctggtttaggagttccctgattctgctaatgtacttctgactatatcaaaagttgatatttttgtttggaaagtttnnnnnnnnnnnnnnnnnnnnnnnnnnnnnnnnnnnnnnnnnnnnnnnnnnnnnnnnnnnnnnn

SEQ ID NO: 18970 - DNA, 315 bp, Setaria italica
  Peptide Sequence Number=SeqID_84944
tcatgattcaaatgaaaaatctttctcaatgattcctcttctactaacacgagttctactaataagagtagacatgctatatttatgtttgttcctgaagggaaaaccgttcaagctgttcctgaatagcttccttcaaaagggtttctgcttgctcggtgaatgtcttgctagaagatataatttcttggaattgaggtttagtatcttttaggtgtttacgtaactcatccagaaatttctttacctgttcaatttctaacgaatcaagatatcctctcgttccggtataaatggtagctacttgctcttcca

SEQ ID NO: 18971 - DNA, 488 bp, Setaria italica
  Peptide Sequence Number=SeqID_84945
tcagatgagatccacaaaagaaatgctgaaagatctgcatgaagaagaattgtttgattactatgcaacctctcagatagtattggttaccttagatgggacagtgaaaatgattgcccttcctgctatatacatttctcttgatccttcaccagatgggaaatatttgatccttacttctgtgcaccgaccttattcttctatagtttcatataaaaggttccccaaaaaggttgagctgtggacagttgaaggtagatttgtccgtgaagtttgtgatttgccccttgcggaagatattcctgttgcagctaatagtgtccgtaagggaaagcgtttaatcaggtggaggcctgatatgccttcaacattattttgggtggaggcacaagatggaggagacgcaaacattgaagtatcgccacgtgatatagtttacatggaacatgccgaacctttggatggtgaaaagcctcaagtctttgtct

SEQ ID NO: 18972 - DNA, 545 bp, Setaria italica
  Peptide Sequence Number=SeqID_84946
ccaaattcaccttgacaaggacccgaacttgggtagtctaggtttacacatccacacttccaaccagttagggtcagtcctccattttttttcctttcttcttttttgtccactgatcttatgtgtgtcatatttgaagtttgttttatccttactaatatgataatatccattgctttggcttgtgccttatacatcttgattattggaagcaaagctatcatgttcattgcattcgtgtggcccaaattaggtacaccagcataaacatggatggaattcatggtctgaggaaagctgaggcagaatatgaatcttattttggtgatatttggcataaaaacagaatatggactgggtaaacatacactcctagtatgcaaagaggcctaacgagccctaatatctttctcttgtcttattttagttgatataattacattctgatcatattgttccttcgtgcttctgtctttgtggagttctagaggtattctcctaatttttcttctttgatgtagtacttcaagtggcgttggtcttat

SEQ ID NO: 18973 - DNA, 671 bp, Setaria italica
  Peptide Sequence Number=SeqID_84947
tctgatttaagagagaaagttgtcaataatagaagcataatacaaagcactttttctgagattcatcataaggcaaatactgaactgctgtccgaacttcgactctttctgcgtaaaccaatagagaaatctcttcatgttgtgcacatctgcagtgaactagacccaatatcatcatgtggatcattgtcgacctatgttgccggtgtatcttgtgcggttcaaggaaagggtaacttggtggaggtgatactgcccaagtatgcaatctctttgcccttaccgaatccttggtacaataatactgctgcaggcttactagatcagctggacacctaagtttacgtgttgtaattccaatttgtcatatgaatttgaaaatttcttggggttgatttagcatcaacaatgttcaactagataacatgcttctgagattttagctgtactgcaacgtattaatactctaataagttacacgaggtaacaaatcattgcgtataaaagtaaaaacaaaattctgaaatgtagacatcaatatccagatgatgtgagtttttttctcattctatatggatttgtaagctgaacattcttctgaagatttgagttcaattagttctgatcaccatctatgattcataaccgtacctatttacacctattgagga

SEQ ID NO: 18974 - DNA, 640 bp, Setaria italica
  misc_feature (467)..(467): n is a, c, g, or t
  Peptide Sequence Number=SeqID_84948
ctcgtgttggtcaagctctgcttggcttcatcagattgtgtgtgtaaactgctttcttcttaattgaaaggtgcttagacactctagagaaaaatggcaactcatacattcttgccacatatttcgtccagtgtaatcatggagctgtgcatttactttatcatagtcaagcaacctgtttaacttgaatctccgttatcatgtttgtcgctgctatatttcatcctatgttcaatgcgggaaatctcttgatgttgtgcacatctgcagtgaactagacccaatatcatcatgtggatcattgtcgacctatgttgccagtgtatcttgtgcggttcaaggaaagggtaacttggtggaggtgatactgcccaagtacaccagcataaacatggatggaattcatggtctgaggaaagctgaggcagaatatgaatcttattttggtggtatttggcataaaaacngaatatggactgggtaaacatacactcctagtatgcaaagaggcctaacaagccctattatctttctcgtcttattttagttgatataattacattctgatcatattgttccttcatgcttctgtctttgtggagttctagaggtattctcctaatttttctcttgatgtagt

SEQ ID NO: 18975 - DNA, 1189 bp, Setaria italica
  Peptide Sequence Number=SeqID_84949
cgcgctcctccccgttcctccgcaaacctcccgctcggcttctccgatcagcgccacctccccctcgaaacctagaatcagatggtgttctctcacccggtgaatccgcgggaggtgcgccgcgcataggtaggataggaggagaggtgcgcgcgggcgcgctcgtagtaggcagggatggagacgacgcgcctcgtcgttggagcggcgatgcgagcccaaaccaccgcctccaccagctcctcaattccggcggcggcgtcgcctcccgcatccgcgcggcggggcgacattgccctctcttcgcccgcgctgctcgacccacgcttctcacccgctgctcctactccaggaaggggaacggcaatcctcgcggtacgccccgtcgcgagagctccagcaccgtgcggttggacgtcgaagagagcagtgatcagggaacagatttggctagtgaacaacgcaagggtgacattatggagctcttcagccaggctcaacggaatatcctgtccctaaacaagcagcggcttctggccatggaggagctgaagaaactgcaagatgaaaataaatcgcttcttcaggaaatagaagtgctagaaacggaagtgcaaggtgtccctctagaagcagtgcaatcatcaacattctgtgagttactcctgcgaatagatacaatggttgtttctggaatgatcagcatgcacgaagcatctgatttaagagagaaagttgtcaataatagaagcataatacaaagcactttttctgagattcatcataagctgcatatgggtatcttttggcacccagccacccacttgagtgagcttgaagatgctcgccaaaatggcaacttgttgcattcttctatcatctgcgaagtggcaagagaatcttcttccgcacctgccctcgcttcaattcgtccacctcgcccgggttgcttaggtcgtcgtcgtctggcggatgctttgccgccgtagttggttgttgctccgggcagatgctttgccatcgcggttgttctgttcgggcggatgctctgccgccacgacctttagcacccttgatgaggttgtaccttttggcaggatcaggagagtggctgcgtctaggtctgtgggttcgagtgtgcttcctctttgttgtttcgcatcgtgtggtggttgtttgtgtgtttctt

SEQ ID NO: 18976 - DNA, 293 bp, Setaria italica
  Peptide Sequence Number=SeqID_84950
gcatttggaaaactctcactggatatggtggaatctgcagccttcgattcaccaaacgtgcctctagcatcttgagctgccctttgccttggtacagaagcagggcctctaggttgcttgttggtatcttgaccacctggatacccagcttgggatggaattctgcctcaagcatctttagctgcttctagccttgatggagttgcatcatgttcttgtgtagaagggagcagtaatgcacttctctgatcagaagatgctttatcctcaacaattcctcacatcctgttcct

SEQ ID NO: 18977 - DNA, 1010 bp, Setaria italica
  Peptide Sequence Number=SeqID_84951
cctaccacgaagacgccgatcccggatggacgatagtggattgccacggcggatgcctcctactcctcaacagcgacaccgggcagatcgccgcctacaaccccctcacgtgggccctgcatctccaccccacgccgcccgacgagatctccaaaggccgccgcggcaagttcaaccgcctggatttcttcttgctcctatccgacgagaccccaggctccttccgcgtgatctgcttgtgccacgacaagtcgcgggtgcgcgcggtcgtctattcatcggggaccagggagtggcagatcctcccctggtcggtggccgcgccggcacagccgtcgggcaagaagcactggcttctcaagggcaggctggcgaacgggaacctgtactgggcacacgcgagagaggcctacatggtggtgctggacaccgcgacgcttcaattctccttcatggatctgtcggatttcatgaaggggcaaggccacctctacgccattggagagaccagggatgggaagctctgcatggtcttcacattgggattcatactgttcattttgttccggagagtagacactgatggtgttgagaagtgggtaatacatgatgggttcccgcttcaggaagagattcttcgggctaccgagggcacacgggatgatgatgatgagctcaaactcatggtgtgggcagttatgggcagcattgtgtatttgtcgcctttcatatgcggagatcctcatttaccttgttggttcctatccttctgcctggaaacaaggaagctggagaagctctttcataggacatttgacaacagtttctttccctacatcatggcctggcctccatctttggtaggcagaggtttttgtcaactgtggaataataaacttaggaggaagagggaaactagaaccggtacactttgtgtttgctttgtttatatggatgtagtcctgtttgattttttaataatatcagtataccaaggtatattttagtag

SEQ ID NO: 18978 - DNA, 351 bp, Setaria italica
  Peptide Sequence Number=SeqID_84952
gtgtttcaccaggggtgtagttcctcaaatgatctggtgggggcagaggcactaacttccgatcttcaaactctatcacaacattgttctgcatatcaacaacaacatggattccttcaacaggacgtgcataaccattctccatagggctatcactttccgttctacaaaagatcagaggtttgccaattcttcggttgggagcatcagcatcactgtagtagcctgcacaccatgcatctaccatgacaagatccatgtcatctatgcctcttatcttcattgcttcaataaaagggggataactttttacagtagcttcacattcagcatattccatagcgtccattg

SEQ ID NO: 18979 - DNA, 556 bp, Setaria italica
  Peptide Sequence Number=SeqID_84953
tttttcttagggttatttactatttagtattgtcttattgggtattttgtacaggcaggcaaaagccccatttgtgtatcaacactgtagcacaaaacgtgtgttgactatggaaagattgtacggagttccgcttactgaccttgattctataaggtctcttgttcctgatcctgagttgactttagtcactgcccttaatgtctggtttggaagcttgatttcgtgtgaatccttccatgccgatgtgcatgctgggaacctttggttgctccgtgatgggcgaattggtttcattgatttcggtattgttggtcgcatatctccaaggacttgggctgctatggaggtcttcttggcttcattcacagctgaggattatgatgctatggcctctgccctttctgaaatgggtgctacagggaatgatataaatattgatgaatttgcaaaggacttgcgaaagatattctcatcaatacaggacttggatactgaaatcatagtcgcaacagcaagaggtcctgatgctacagctgtatctgctaatgttgtt

SEQ ID NO: 18980 - DNA, 830 bp, Setaria italica
  misc_feature (10)..(10): n is a, c, g, or t
  misc_feature (29)..(29): n is a, c, g, or t
  Peptide Sequence Number=SeqID_84954
tttttttttntttttttttattttttttnttttttttatttttttttgtttttttacttttttattttttgttttctttgcctttctgaaatgggtgctaacagggaatgatataaatattgatgaatttgcaaaggactagcgaaagatattctcatcaatacaggacttggatactgaaatcatagtcgcaacagcaagaggtcctgatgctacagctgtatctgctaatgttgtccttgatgagagacagatgaatgctctgtttcttgatctggtgagagttagcgagtcttacgggctgaaatttccccgggaattcgctcttctcatgaagcagctactgtattttgatcgctacacaaggttgttagctcccagcatgaacatgcttcgagacgagagaatcaacatctccaccgatcggcaacccagaagaacggatcgatttcaatgaggccacttcattaatcgttagcaatatactagagttcttttgtgattgggtgatattagcaagctcatgtaaccaaaacactgtatatagttttgccgatagaaatggaccacacatgacacatcagaaaatcttgtacacttgttagtgtcagagaatttggcttataccatagcaactaggcagcatgttaaatatgtatgtatgtcacgatccggttgactgagttttgacatagatatgctatactagtagagcctgagtcaagttaagatgcagctgtactgcaggcaactgtcaacagagaaaatgattgtgcactgcaggtgtatcatgtgaactaaaaaaaaaaaaactaaaagagactagccaa

SEQ ID NO: 18981 - DNA, 1285 bp, Setaria italica
  Peptide Sequence Number=SeqID_84955
cttcacacttgaccacactgccgccgcagcccgacgccggcgagccgcccacccactctctcctctccactatggcggcggccgcgaggtgcgcttccgcggcgcgctcccctctcctcatccaccaacaccgccgcgtccccaaggtgccgtccggcgggggaggctcgctccgtgtgggtggggccgggattggggccggacgcggacgggaggggcggaggcgggcccaggtcggggtcagggttttcgcgcgctactcccaggcccaggacttatccacgcgcctccaagatagagttggtgagttacctaaattagtcgaggaccttctccagacatcaattagcacaggacctcgaggtgctttcaggatggcgcaagggatccaagctgtgcttggggttggtggggagtggctgaatgacctctcaaagacagctaatgcatcagcaggaattccagctcagatgcagcttggtttgctttctcccctttaccttagaagactttttgagcgcatgggtgcaacttatatcaagctaggccagttcatagcatctgcaccaactttgtttcctgcagaatatgtcgaggaattccagaactgctttgaccgagcaccagctgtcccatatgacgtgattgagtcaatattgcgtgaggagttgcagcagccattagatagtgtatatgaatacatcgatcatgtgccaatagcctctgcctcaattgcacaggttcatggggctaggttgaagagttctcagaaggatgtggtgattaaagttctaaagcctggtattgaagacactttggtcgctgatctgaattttatctatgttgttgcacgcattttggagttcttgaaccctgagctacagaggacatcactggtaggcattgtcaaggatataaaggaatcaatgcttgaagaagttgattttagaaaagaggctgcaaatattcaggcttttcagggatacatagatgctatgggatttgacaggcaggcaaaagccccatttgtgtatcaacactgtagcacaaaacgtgtgttgactatggaaagattgtacggagttccgcttactgaccttgattctataaggtctcttgttcctgatcctgagttgactttagtcactgcccttaatgtctggtttggaagcttgatttcgtgtgaatccttccatgccgatgtgcatgctgggaacctttggttgtccgtgatcaattttcattgatttcggtattaaaaaagaaaggaacttaagtaactaaa

SEQ ID NO: 18982 - DNA, 971 bp, Setaria italica
  Peptide Sequence Number=SeqID_84956
tttttttttttttactgaacttaaaaagggtacaaagggtttaaacttctagattaagcgagttgtttccaaaaatacacggtcggaaagctggtactgcagcttgatttcgaaaggcgggagcgcggaaaagatcttacgagtacaggggggttttgaacggttctcattttttggcgtaggatatagccatggggttctctggggtgatcttgaagccctggagggccagcatcgcgacattggactggctgtcgtcctcgaactccacgaaagcgatgcctggcttggcctcgatcatccggacctcccggaagccagggtactgctggaacaggatctggagcatcatgcttgtggtctggtccggcaagttctggatgaagaggatgttgttaggagggagctgctcttgtgaaaccttgcccaggcgagaggcttggtaaccagttccattgctttgggcagcagaagcattaggaccagattgttgtgcctcttctgctcgtcgttttttctcagcagctttctcctcctgcttctttcttttctccttaggagcataagtaccatcttcttttgcaatacagtcagattttgtttttgcgtattggactcgcatttttttgccgtagaaatcaaagtcttgcaatcctcggaaagcattggtagcagctgtaatttcactaaacacaacccatgcttgccccctcagtttttgagttttcaaggccaccacatccagtatccttccatactgtgagcacagggcataaagtgacctcttcaactcttctttcttgaccttctcgttaaggttgttgaggtagatggtctggttcggggggatgtcgccggacaacatctcctcctcctcctccgctgctgccgccgccgcgccgcccaagacgaaagacgggggagggcagagacgagcgcgggtggtttcggtttcgggccgggaaattctg

SEQ ID NO: 18983 - DNA, 259 bp, Setaria italica
  Peptide Sequence Number=SeqID_84957
actgcaccaaggccgctcaaattgacattctccagatgcaaatatacaaccgtagcggtagtacttcagtccatccttcatagttgagtctggtttccggctcgtgtttgtgccatggtgggtctcctgtttgtcttagggcctggttgttttcctgagggggcattttttgccgaggctgtttttttgcaggtgtcctcatgtgaggatgtctgttccttgagccttcggcagccattaccatggtgccctgccccct

SEQ ID NO: 18984 - DNA, 2125 bp, Setaria italica
  Peptide Sequence Number=SeqID_84958
cggcgcgcggcgtcactgacgccggcgtctccgcgctcgcccgcggctgcccggccctccggtccctttccctgtgggatgttccacaggtgacggacgccgggctcgccgagatcgccgccgagtgccacgcgctggagcggcttgacatcactggttgcccgctggtcacggacaaggcccttattgccgtcgctcaggggtgcccggagttgaagtcgttgaccatcgaggcgtgctctggtgttgccaacgagggtctcaaggcaattggccggagctgcacgaagctgcaggcggtgaacatcaagaactgcgctcatgttgatgatcagggtgtgtctggcctcgtctgctccgcaaccgcttcattggccaaggtccggctccagggtctgagcattactgatgcttctctcgcggtgattgggtactatgggaaggcaatcacagacctcaccctcgctcgcctcccagcagttggtgagaggggattttgggtgatggccaatgccatgggccttcagaagctcagatgtatgactgtcacctcctgcccgggactcacggatcttgctcttgcatctgttgccaagttcagcccaagtttgaagcttgttaacctcaagaagtgcagcaaggtctcagatggttgcctcaaggaattcgccgaatcagcaagggttctggagaacctgcagattgaggaatgcaacaaggttactctcatgggcattcttgctttcctcctcaactgcagtccgaagtttaaggctctctctttggtcaaatgcattgggatcaaggacatctgctctgcacctgcacagcttccagtatgcaagtcgcttcgctccctgaccatcaaggattgcccgggtttcacagatgccagcttggccatggtgggcatgatctgccctcagttggagaatgtcaatttgagcggccttggtgcagtcaccgacaatggcttccttccattgatcaagagttctgagagcgggctggtcaatgttgatttgaatggctgtgagaatctcacagatgcagctgtttctgccttggtgaaggcacatggtgcttctcttgcacaccttagccttgagggctgcagtaggattactgatgcaagcctgtttgcaatctctgagagctgcagccagcttgctgagcttgatctttcaaactgcatggtcagcgactatggtgttgcagtcttggcggcagcaaagcagctcaagcttcgcatcctctcactttctggttgcatgaaggtcacccagaagagtgttcctttcttaggcagcatgtcttcatccttggaaggactcaatctccagttcaacttcatcggcaaccacaacatcgcctcactggagaagcagctctggcggtgcgacatccttgcttagagcaacaagaaggcgattagttgctggagatgctgggtcaaccttctccagatgcaaatatacaaccgtagcggtagtacttcagtccatgcttcatagttgagtctggtttccggctcgtgtttgtgccatggtgggtctcctgtttgtcttagggcctggttgttttcctgagggggcattttttgccgaggctgtttttttgcaggtgtcctcatgtgaggatgtctgttccttgagccttcggcagccattaccatggtgccctgccccctccatcccaacctaagcccttgtgatcagagtcacctcaccatgcagtttctcaagtcgtgtttggagctcaagtattgtcaagtgtgtcttctttccagtactactctggttatagagtttgcagacatcaacgcctctttgagtttgtagccccggtatcttcaatgtctgggtgtctgcaacctcgtcgagttcagtttgttggtcacggatggttgctggttcgcagtgtcggtagggtttgcctatgtgcttggggatctggcctttgcaaggctcattctgtagagcctttgccatgacaaccctgtgcggttgtttttctcctccagatatgattttgcaggcaggtgattgtttgataactacttgttaaccttttgtctaacctttcttgtaagtattaaattaaagcttgttgttcctttcaaaaa

SEQ ID NO: 18985 - DNA, 126 bp, Setaria italica
  Peptide Sequence Number=SeqID_84959
ccgttgaggtcaccggcaacgactccggcgagctggtagaagtcagcgtaggatatggtgggcaacgactccggcgagctggtagaagtcagcgtaggatatggtggggaactgctccttgatggg

SEQ ID NO: 18986 - DNA, 1310 bp, Setaria italica
  Peptide Sequence Number=SeqID_84960
accattctgtcaatttggcacccgagactgttacgaaccagagaagagtgtggtggctgtaataaacattggttcggccttgtgaggcagaccatcttttgtgtgtttctgtggaacggttagcgtaatgtgatttctgaattttattcagctgagggtgcagtgtgtaatgtcatggttctttccttccttggtccaggcaatcaaagatagatgagcagagggcacccgcttaataaatagatggatagatgaaacgctggggccaaggaaggaaagaaccatgacattacacactgcaccctcagctgaataaaattcagaaatcacattacgctaaccgtttccacagaaacacacaaaagatggtctgcctcacaaggccgaaccaatgtttattacagccaccacactcttctctggttcgtaacagtctcgggtgccaaattgacagaatggtaaccccctttcccttgtctgtctggaagcaccttacgcctcagcaaatcccaattcagaaagcttcaggtgggcctcagcatagtcagcaaagaaggcatcctcatccgctgcgtatttctcaacaagggggcggaaggatgggtcagaaaggagggctttgtcacttggcagctgcagaaggccttccttctcaccactcaggagctccttgaagtacgagttgtcaaagatcaaagggttggaagtccaggctccctcaaagccagacctatccttgtggcatcttcccagagtgtgaccaccagaaagcgcaacaatgtcctggtcacttaaaacccaatctgtgtggagaacacctgcctaaggtggtccgaaccttgggtggcatcaggaaggcggccttctggtggaggctcaggcttgtcctgcctcccctggggtgggaaggggacatcagggccgccggtgacctcaacggcaacgactccggcgagctggtagaagtcagcgtaggatatggtggggaactgctccttgatgggctcgagcagcctgacggcgatgtcgagtccagcgttggctccgtgcgccagctcggcggggtccttcatggtgccgaaggggcccccctgtcttggtgccgacatcgaaggtgccagcggagtcgccaggcgaggcggagcatgagcggggcgcagttcttctcggcgatgaggccgcggagcttgcgcttggccttgtcgatcgccttgaggtagtcctcgctgaccgtggggtaggccttcaccatggctgacgtcacgatgcgcaggaaggagacgtacggggggtgaggaaggagacggccg

SEQ ID NO: 18987 - DNA, 425 bp, Setaria italica
  Peptide Sequence Number=SeqID_84961
agctaaacaaaacgtatcagtatatcacaaacacattacacaaagcatatgcacagagctgcaacctgcaagcctgaacgcagccgggcaagtgaccgaaaaactaggagcaggctcagactttgcccggtgaagcggcggaatgcttggccgctttgaggatcgcggccgacgcgacgtggatggcggactcgccgggcggcgcgcccgggtcccgccggctggacttgcgccaccgccgatcccacagcagtgaccagcacttgacggtctcggcgtccgggtccctctccctcttgttgcactcggaggcgacgctgggggtccggccgccggagatggagggcgtccggctgggccgcggcgcggtgaagctccgggtgagcgaccgcggcatgtagaagttgagcaggacgccgtcgctg

SEQ ID NO: 18988 - DNA, 397 bp, Setaria italica
  Peptide Sequence Number=SeqID_84962
acaaccccacacccctcggcttcccaaacaatccattccccgccggcgctctcctccgcggctccgccttttccctgtcgaggagcagcagcaagccaagccacgccggcgaggcgggcggacgaggaggcaatgccgcccaaatcggatagcgtggaaggaatcgtcctgggtttcgtcaatgagcaaaacaggccactgaattcacagaatgtagctgacgcgctacagaagtttaatctgaagaagactgcagtacaaaaggcactggatgcattggctgacagtggacaggtttccttcaaggagtatggcaaacagaaaatttacattgctcggcaagatcaattcgacattccaaatggggaagaaactcgaggagatgaagaaagcaaaa

SEQ ID NO: 18989 - DNA, 211 bp, Setaria italica
  Peptide Sequence Number=SeqID_84963
gggcgtagtgggagtagggatcaaaggatctccagaggtcggcgcagggctagctggagaaggttcgacaggaattccagaaggtggtggtgccggctgagttccaggcttccttggcggccgatgatgccgtggtggaggcggcggcactgccgtcggcggagttggatcagccggtgggttgggagctggcaaattggatggtggtggt

SEQ ID NO: 18990 - DNA, 255 bp, Setaria italica
  Peptide Sequence Number=SeqID_84964
ttttcattctgttcttgtaacaagaagctctaagccccagtagtcatacttgtatagactgttaaatatcattgatatacatctctgtagcagtgtagctgatagcttgggagttcccttctggttagactagggctatacaaagtaagcccatttgcatctctgcagcagtgtcatgcgatgctgatgttgacataaagctacaaggccaataatacgtgtttactggtaaaaatgcttttacatgtagctgtc

SEQ ID NO: 18991 - DNA, 447 bp, Setaria italica
  Peptide Sequence Number=SeqID_84965
ggggaaacgaaggataaatctacagataactacatcaacatgtgtcaatcgtcttacttcgctacatttaatagctatagtactacaggccaaataagaatggagtaaagtgtaattgaatagtatcaaaggatatctggatcataatctgtacggtactcatctctgacttgtccaccactccgtccacggccccactgcctgccttcttcaaagccccaatcaaaatcaacacggattggacgatcgtcaagcattgttccactaatatatttgacagcatcttcagcatcctccctggagtagtaccaaataaggggaagggcacgcacagcacgaagcagaagccgcagggggtcttggagttcttgtcgagccccatgatgatcttcttgatctcgccggcgcgggagaagagctcgtaggcctgctccgtccgtggtgtag

SEQ ID NO: 18992 - DNA, 1003 bp, Setaria italica
  Peptide Sequence Number=SeqID_84966
tttttttttttttaaattgtgaaaactgcctccaatccattggtctcggtattaaacagttcacatagaatcactatcatcccatggagaacctatgcaaatgctgattaacagatgacaagggcacgagacaggaacggcccaagaagaaggaatattctgaagtaactgggcactagaacaactgcatacaagcaacaatcgttccacaggtttagcgacggcgcctcttgtcgtagtcgtcgtcttcctcatcagagtcgcccttctctcggaacctaggattcttctccgctggatcagagtcaggtgctctcctggacccctctggagcagaccgatcatcattccggttgcgtttccgttggtaatctcctctgtcattcctgtatgagtctccatatcctctcttgcgttcacctctctcatatggaggtggcgcattcggttgaaaggctccaccatagtcaactaattctctttgtgcttctagctccttctgaaccatcttaccataaccacctcttcctggatcataatctgtacggtactcatctctgacttgtccaccactccgtccacggccccactgcctgccttcttcaaagccccaatcaaaatcaacacggattggacgatcgtcaagcattgttccactaatatatttgacagcatcttcagcatcctccctggagtagtacagcacgaagcagaagccgcagggggtcttggagttcttgtcgagccccatgatgatcttcttgatctcgccggcgcgggagaagagctcgtaggcctgctcctccgtggtgtagaaggacatgttcccgatgtacaccgtcgtcgacgcctgcagcgccgcctcgtactcctcctgcgtcccgttgaaccgccggtccctgtacgccgacagcttgctcgggtccttgaagagggacgccattgtggggagcggtgcggcggccgcacctgctaggtcgagctcttctctgttcaggggttt

SEQ ID NO: 18993 - DNA, 946 bp, Setaria italica
  Peptide Sequence Number=SeqID_84967
actacgacgacgtactaggaccgaacaatgggccggctaggcgtccccgtcgacagctacagctacgcgcacgggcttaaggcctgcattgcagggtcagcgtcgcacgcaccggcctctgcccgtgtacgggagatgcacgctcatgccattcgtcgcggctatggattgcacacgcatgtcgccaccactcttattgactgctatgcgaagcttgggattgtcacctatgcagagcgtgtgtttgcttggatgcccgagaggaatgttgtgtcatggagtgccatgattggatgctacgccaagaatgagcgccctggtgatgcgattgagctcttccaggagatgatagcttctgatgcagacctggtaccgaactcaatcacaattgttagcgttttgcatgcttgtgctgtggtgaatgcgcttgggcagggcaaagtgctgcatgcatatatccttcggaggggttttgactcacttgtttccgtgctcaacgcattgatggcaatgtacatgaaatgtggatgccttcaaatcgggcggtacatcttcgattggataggacgtaggagggatgttgtgtcatggaattcacttatatctggatatggaatgcatggctttgggcgtgagtcactccaagtgtttgaggagatgatcaaggagggcatttcaccaagtatcatcacatttgtcagtgtgcttggggcttgtagccatgctggatttgtggaggagggaaagaagctctttgaatcaatggtggagtacaatgtcacacctcgtgcagagcactatgcttgcatggttgaccttcttggtcgtgctgggcgtttggatgaagctgtggagttgatacagagcatgcgcattggaccaagccctcaagtttggggctcacttcttggagcttgcaggattcatggccatgttgagtatgctg

SEQ ID NO: 18994 - DNA, 584 bp, Setaria italica
  Peptide Sequence Number=SeqID_84968
gccaaccaatggaggagatcaaccacgcggcgaagctctcggaggcgatcacgttcatcaaccacctccccggccggtacgagacgcaggtcggcgagcgcgggatccagctctccggcgggcagaagcagcgcatcgccatctcgagggcgatactgaagaacccgtcggtgctgctcctcgacgaagcgaccagcgcgctggacgccgagtccgagaagagcgtccaggaggcgctggaccgcgtcatggtcggccgcaccaccgtcgtgatcgcgcaccgcctgtcgaccatccggaacgccgacacgattgccgtcgtggacggcggcaggatcgtcgagacgggcacgcacgagcagctcatggcgaacccgtgcagcgcgtactcctcgctgatccagctgcaggaggccgcccagattcagcagaagccgtccttatctgacagcgcaagcatcaccaggccactaagtttcaagtattcaagggagttgtccgggaggacgagcacgggtgccagcttccgttctgacaaggactcaatcagccggtacggcgccggtgaggcgcacgacgaggcg

SEQ ID NO: 18995 - DNA, 358 bp, Setaria italica
  Peptide Sequence Number=SeqID_84969
ggatgcatactgcatccattttcctttcttttgcattttctgaaatatgttcctttcttttgcattttctgaaatatgcttactatccctacttctgttttctcatcagaatacagcaacacagaatcttctgatgatgctggcaaacaagagattagtgaactatcagatggagatgaatttcatttctacgacacaagacaaagtttcagtgactttgctacgagtcctgacctgacagaaggcttaaacaatggaaatgaagatcataaatctagttgaatcactaactgccgacaatgccaatgagtatctgctgtcatattcaaaaaggcgcacaaagttgcctgaatcagta

SEQ ID NO: 18996 - DNA, 2141 bp, Setaria italica
  Peptide Sequence Number=SeqID_84970
ggattcgtgcatctcaagatttcgtcatttagtgaaagtaaatcagatgataaacggttctatataattactccgaccaaaacacttcaactgaggactggttgtgctaaggatcgggcgacttggattgaagcgcttgtcactgcaagaagtgaatattctttgaatggggatttatcaggtgaccagaatgatacatcattttccacagaaaagctcagaaatcgcctgcatactgaaggtgttggcgaggcaattattaaagactgcgagcagattgttcattcagaattttcgcagtaccaaacacagatgaaacagcgttgtgaagagtatttaagctttattggcagtcttccacgggaagttgaggttgttaattcagtagacacgactgtcactgagaagccacagttggagttgttcaagcatgactgctccagctctggaaaatgtagtgaatacagcaacacagaatcttctgatgatgctggcaaacaagagattagtgaactatcagatggagatgaatttcatttctacgacacaagacaaagtttcagtgactttgctacgagtcctgacctgacaaggaaaggcttaaacaatggaaatgaagatcataaatctgttgaatcactaactgccgacaatgccaatgagtatctgctgtcatattcaaaaaggcgcacaaagttgcctgaaccagtagaaaaggagaaaggtgttagcctttggtcaatgatcaaagacaatgttggaaaggatctcacaagagtctgccttcctgtttactttaatgagcctttatcttctcttcaaaagtgctttgaggagttagagtactcttatttgttggatcgtgcatatgaatgtggtttaagggggaatggtctgatgagaattctttatgttgctgcttttgcggtctccggatatgcttccacagattctcgcccctgcaaacctttcaatccattgctaggggaaacctatgaagctgattaccctgaaaaggggatccgtttcttctctgagaaggtcagtcatcaccctatggtcatggcatgccactgtgaggggaaaggttggaaattttggggagatagcaatcttaagagcaaattctggggacaatccattcaagtggatcctgatggtgtgttaacattagagtttgatgatggagaaactttccagtggagcaaggttacaacaacaattaataaccttatccttggtcgactctattgccatcaccatgggacaatgaacataagtggaaatagacaatattcatgcaagctgacgtttaaagagcagtctttccttgatcgaaatcctcgccaggttcaaggagttgtcaaggatgctgatggaaccaaggttgcaaccttgaccggaaagtgggatgaaagcgtgcattgtgtcatcagtgatgatgcctctaaggtgaaatcccatggttcacatcatagtgctggcgccactttgctgtggaagaaaaatgagccttcagcgaatcctactcggtacaatctgtcctcatttgcaataacattaaatgagctgacaccggagctcaaggagaagcttccaccaacagattcgaggctcagaccggatcagcgacacctggagaatggggagcacgagaaggccaatggtgaaaaattgcgtcttgagacaaggcaacggatggcaaggaagatgcaggagagtggctggaaaccaagatggttccaaagggacagcgaagatggaacattccgctatgttggaggttactgggaggcaagggagcagaggaaatgggatggctgcaatgacatatttggtaacttgtctagtagcccaaagctgcaatcatccactctttacgctagctcaagtatatagagattagggcatgttgttcagtaggtgttgacatcacattagtacataagcgagtggcttctctcgtctctgttgtgcaaaggtttgagctaattaacatgctctacttgtcaattgtcatattgaacccaaagacattcaagcaaaacccaaacttttgtgtacactgggatgcttgtgagaaatcttgctaacattactgagttaagaattgtcaatgataccatatttcttcttcgaaa

SEQ ID NO: 18997 - DNA, 269 bp, Setaria italica
  Peptide Sequence Number=SeqID_84971
attaagtgcataatgtaccacataaataggattacctccttgtagaagtccccacccttcctacagatggtttcaataaaatgtagcatgtagtattgatggtatacattagtaccatcatttgagatggagttttcatctactagccgaggtgcctgtgcattgctacgaatctaagtcagtttctgaataccttaaaagaaatagaaacaagtttccttgtaatatgaattccagtggaatgagatctctaataaataaaaaaaaaa

SEQ ID NO: 18998 - DNA, 641 bp, Setaria italica
  misc_feature (587)..(587): n is a, c, g, or t
  misc_feature (605)..(605): n is a, c, g, or t
  misc_feature (621)..(621): n is a, c, g, or t
  Peptide Sequence Number=SeqID_84972
cataacatcctccacaaggaccttacatttcctagtagcattccggttagtcttgcggcaaagcaattaatccatggattacttcaaagagatccctcttctcgacttggctcaagtgctggtgcaaacgatatcaagcaacatcccttttttgaagaaatatactggtcgcttattcgctgcatggagcccccagcgcttgatgttccgctgaaactaactcggaaggaacctgaacttaaagtgaagcccgagggagattctcttactcccagtattgagacattttaaggttgtatgacccgctcctggaaggaacgttattgagcatgtatagtaataagaggcttcatgagctggtagaaggaattatatatcatcttctgggttgcattagagatcttgtacatgagtgattcttttggttagattaagtgcataatgtaccacataaataggattacctccttgtagaagtccccacccttcctacagatggtttcaataaaatgtagcatgtagtattgatggtatacattagtaccatcatttgagatgaaaactccatattaaaaaaaaaaaaaaanaaaaaaaaaaaaaaaaanaaaaaaaaaaaaaaanaaaaaaaaaaaacaaaaaaa

SEQ ID NO: 18999 - DNA, 255 bp, Setaria italica
  Peptide Sequence Number=SeqID_84973
cggggagcgcgggctgaggtggtccagcagcagcgctccgggcggcgcggcggcggcggcggcctggtcggcggcggcgccgccgcagaagaacttgcggaagaagaggctgcgcgcggcgaggatgcagcggtgcgcgtgcacgaggcggccctccacgttgaacgtgacgtcgctgaaggcctgcccgttgatgagcaggttgaggtagtccatggacagcgacttgagggtgtcctccatggccggccgccg

SEQ ID NO: 19000 - DNA, 470 bp, Setaria italica
  Peptide Sequence Number=SeqID_84974
aaacaccatatatccattgttttgcatttttgtgtgatctagaaaccatcccatgaggtaaaatgcatcgtcaaagtttgcagtaagaagcctaccacaaagttcagtattatctttttatggagtaggggtagcctctgcgataaacctagaacttagaagattctttcttatagagtcaaacatctagtaaagctatctacacatacctgaaaaagtaaaggcacttctacacagtaaaatttaacttatgctttcaattgctctatatatcaaacatgttatagtgcctgcagcttactccagttgtagtttgttgaagaagcattttgcaccatcaaatgatgtaaatacatgtgttgttctgtttcagtggggtttagtgcctattccattacttgttaagcactaggtgcatctttgcttgatttgtactcattaattgttaaaagagctctctcctttctaac

SEQ ID NO: 19001 - DNA, 292 bp, Setaria italica
  Peptide Sequence Number=SeqID_84975
gggggccggcggcggcggcgcggtagaggagcagcttctggttgtagtagaaggtgatgtaggggaggtcgaaggtggcgagagcgcagcggctcttggcgggcgccacggtgcgggtgccggtcaccgtcaccgtggacgtctcgtcggcgctgctgctgctgccgttctccgcggccatcgctgctctgctctgcttggtaacccctcgatcgcaagcctagcctaggtagtgtagtgtgagcaagctgggacacgcaacagaggataggcaaggcacacaggggatagg

SEQ ID NO: 19002 - DNA, 482 bp, Setaria italica
  Peptide Sequence Number=SeqID_84976
cagcttctcgcagcaggaggaggacctcatcgtcgcgctccacgagatcctcggcaacaggtggtctcagatcgcgtcgcacctgcctgggaggacggacaacgagatcaagaacttctggaacagctgcctcaagaagaagctccggcagcgcggcatcgacccgagcacgcacaagcccatcgccagcgcggaggcgggcacggcattgccggacgctggggaccacgaccacaagcccgccgtcgcggaatccgacggcctcgcaacgaagcagccggccgtgttcgacccgttcccggtggccgacttcgccttcgacctcggcgcggccggcgtggcggcattgtacggcgccccctacgacgacgtcggcggcaaggcgtccccggacgacgccgccgggttcgtcgccgactacagcagcgtgctggacgtgtcggagaacctgggctacggggagagctccagcaacagcagca

SEQ ID NO: 19003 - DNA, 1641 bp, Setaria italica
  misc_feature (1622)..(1641): n is a, c, g, or t
  Peptide Sequence Number=SeqID_84977
cttcatcttcactttattaaattgcagctgttatcgtctctagcttaaggctcaagcatcgaactgcctgctgtcgcctgagctcagctgagctgctgagatagcggagccagccatcgcttttatatcgcccgccaggccgtctcatcatcattgttgccatcacctgccgctagctggccgggcgccagcccgcagtagtagtcgtcaagaaactgatcgatcgctcgctccgagcgcacaacggtcgggccggcggcgggggcagctagagaggacgttgcagtctcagtccaccgaccgacatggggcgtgaggcggcggcgacgaggcccaagctgcggaggggcctgtggtcgccggaggaggacgagaagctctacaaccacatcatccggtacggcgtcggctgctggagctcagtcccaaagctcgcaggcttagagagatgcggcaagagctgcaggctgagatggatcaactacctgaggcctgacctcaagaggggcagcttctcccagcaggaggaggacctcatcatcagcctccacaagatgctaggcaacaggtggtcccaaatcgcgtcgcagctgccgggccggacggacaacgagatcaagaacttctggaactcgtgcatcaagaagaagctccggcagcggggcatcgacccggcaacccacaagccgctcgacgacgacgacgcctccgccgcagccaacaacgccgccgaggcgccacgggacgactgcaaccagctcccggccgcaaccgacgaccactgcttcgccatgggcggcgcccgcagcgaccccatcgcgccgcactccccgaccgtcagcttcgacccgctgtccgtgaccaacgtcccggcaatgcagggctcctacggcgccgcgcactccttccgctcggcggacaacctctgcgactacggcggcgtggacgtggcctccgacgccgccacatacagcgcctacacgggcggcggcgccgacagctccagcaacagcaacggcacctggacctgcggcggcaatgtcgtcggcggcggcgagccgatgccgcacatggacatgttcggccgtgacgccgccgaggcggcgtaccaccagttcgacccggccaagtacagcccctggcagcagcacgaggcggcgaggctccacgacggggtcggcggcgcggcgagcttcccgatccggtcgatgtcgagggacctgccggattcctgcttcgacctcgcccgcagcgcgctggaggacgagttcagcgtcgacttcctctgacccccacgccgagaggtcgttgtctccatcggtcacccgacagacacacagatatacacacacacttcactactacctcatcacaagatcacccaacaaaagatactccagaaagcatcctgcctggcatgttcgttattttcttctcttttcatctgctggtcctacttatttggatcaagttgtttacttaacacacacgttggtataatatgtgtccataataagggatattatatatactatatacctcaattcctgggggaccgaaaattgtatgggaatccaatcgtaatatagctgcaatcgagctatttaattttggatgaaacnnnnnnnnnnnnnnnnnnnn

SEQ ID NO: 19004 - DNA, 1444 bp, Setaria italica
  Peptide Sequence Number=SeqID_84978
gcccgggcggcgacgcagcgatcaagtgggttctaagcaagccggccgaggagagagaaagagatggcgggagctgcttgcacaggcagtgacacgcacgcatcccgacggactaggtagctgctcatcagctatcaagatcgcctcggccgcccgtgtcgggcggaggcagacgcgcgatcgaggaggcggcgggaatgggacgccacgcgggctccgccgccgccggcgtgcagcacaagctgcgcaagggcctctggtcgcccgaggaggacgagaagctctacaaccacatcatccgctacggcgtcggctgctggagctccgtccccaagctcgcgggcctccagaggtgcggcaagagctgccgcctgcggtggatcaactacctccgccccgacctcaagcggggcagcttctcgcagcaggaggaggacgccatcgttggcctgcacgagatcctggggaacaggtggtcgcagatcgcgtcgcacttgccgggccgaacggacaacgagatcaagaacttctggaacagctgcctcaagaagaagctgcgacagcgcggcatcgaccccagcacccacaagcccatctccgccaacgcggctgcgacggcggcggcattggaccagcagccggcgtcgcaagaacagaagccgccggcagacgccgacagcggcttcgccctgaagcggcagcaccagcaggtgttcgacccgttcccgctgaccgacagcttcggcggcggcttcgacgcggccggcgccgcattgtacggccacctgggcggcggcaagcaggacgcgggcgggttcgtggactacagcagcgtgctggacgtgtcggagaacctgggctacggcgagagctccagcaacagcagcaactggaactgcgcgccggaggcgagcaatgcgctcgacggcggcgacgccccgctgcactgggcctcagagagcaaggccgtcgagcccttcgccggctacggcggcggcgaggagcagtcgctcgagcacaagttcatgctgccctgccacggccagcaggagcagagcctgccgcatttcgacttcgacatcagccggggcgcggtggtcggagagttcaacctcgagttcttctgaggttttcaatttgtgaatttcaccacatatatagtataaattaccgtatatactgttcttattaaaaggcatttcacacagaccaattgggagcttagagactgtactttgttaatttcctctagtcgtcctcactcctccttaacaatgttttgcctttctttcttcttacttatgttttcagtatgagtaaaataaaggcatatacatatatagtacaaatgtaaacacagtgtagttgctacatattaaggtttttgttaagaataagtttcttactttcagctgtactcacttcggtgactcttgtctaccac

SEQ ID NO: 19005 - DNA, 1293 bp, Setaria italica
  misc_feature (1)..(20): n is a, c, g, or t
  Peptide Sequence Number=SeqID_84979
nnnnnnnnnnnnnnnnnnnntttttttccagacagcatgctagttaaatagcagcacacgtataaattatgaccatattttgctggttacacaccggtaatggtagagtgacagtgggcgggagagcacattgatgcttgcctcctctaatttcccacaaatcttcaggacacacacacacacacacaccaacaatggaactgaggtgaaaaatcctcagcgcaattgccaacaacggccggccaccactaagcgagaacacttaagccgatgatggagctcatcatgcggctatctgatcgatcgacgcgagcagttagtactggacgtaggagcggtagttggtgtcggggatgtagttggccgggatgacgttcttggcgacgagttgcctgccggactcgttggtgatgcgcagcgagtaagggccctggagcgggcggttggggtcgatcctccagatggatccccaggactcgtgcatcggctcccagtagccggagttgtgctgcatgatgtccacctgcaccacgtcgccgtccttgtcctcgaactcgacgagcaccgccaggtacatggggttcgagccgtgttggacgacgaagttgatggtcaggcccgggaagttgcacggcaccctcctgaactgcatgtcgatgatcccggcgtggcggagcttgtcgttgaggcctgggttggccatggcgccgaacgccgtcccgctgaggtcgaagtggtacttggccaccgggtagtaattcatgtcggtgatgaccaccgtctgcggcgcgccggagcaggcagggtggttgctcttgaggcatcgaatctggtagcatgagccgcagcccttgccgtccttgaagatgggctcgttgccgcaggaagtcatggacgagaaggggtactggttggtgtgcttgaacccgcacgcaccgccgttgtcgtcggggccggcgccggtgggcgcgccgtaccaggtggccttggccgggagccagccaccgctgtaggacagcaaggacctgtcctgggactccgtggcgttgctcggctgctgctgagcgcgagcgccataggcgacgagcacggagaggagcgcggcaagcgccacggccttgaaggagagcccagcggccatgcctgcactagctaggaccgaatggaactactagctagctgctgcttggcactggcacctgctgtctggtttgtgtgttacttaggttttagttaagactagactagacttaggacaactaggacaaacctaagaactaagtaactaaggaa

SEQ ID NO: 19006 - DNA, 510 bp, Setaria italica
  Peptide Sequence Number=SeqID_84980
aatggtgcacttcatctagtatggggccacgcagaactgtgagaggaaccttacataaatttgataagactcatgttaactctcttgaaaataactcagtggattgtgcaactatatgttgctctagagcaaatttaattcgtccttcttttgagtataaatttaatccctccttcgtacctgaccgtccgtcttgataggaacggtgccgttaggccgaaatatgtatgctccagaagcctgaggatcacttgcgtttccatcctgccctatgtaatacttgtatttctgctcgaaatttgcttcaatcttgaaatttattaattaggttagtaggcaagattctagatcacaacacacaacaccatgcacacatgtcctgctagggaaataacctttcgagtctcaactaatgagtaataaaataagcctgtaaccatgagtgatcttacaataatgcaactccatttctgtaagatgaagctagggaaataatgaacaactgaaacg

SEQ ID NO: 19007 - DNA, 539 bp, Setaria italica
  Peptide Sequence Number=SeqID_84981
tttctttccatttccatcatctattggtatacggcccaactataaattccgtttccacatagtccttccccttgtaaactcttgtaatctgatatatccatgaattaatctgatggtgcacttcatctaggtatggggccacgcagaactgtgagaggaacctgaccgtccgtcttgataggaacggtgccgttaggccgaaatatgtatgctccagaagcctgaggatcacttccgtttccatcctgccctatgtaatacttgtatttctgctcgaaatttgcttcaatcttgaaatttattaattaggttagtaggcaagattctagatcacaacacacaacaccatgcacacatgtcctgctagggaaataacctttcgagtctcaactaatgagtaataaaataagcctgtaaccatgagtgatcttacaataatgcaactccatttctgtaagatgaagctagggaaataatgaacaactgaacataaagattgaactttggcacattaccagagtctttctatcggagtacag

SEQ ID NO: 19008 - DNA, 395 bp, Setaria italica
  Peptide Sequence Number=SeqID_84982
atcatctattggtataggcccaactataaattccgtttccacatagtccttccccttgtaaactcttgtaatctgcgttcagaattgaaaaaatagtatcaagaatatacagaataattactagttgattgaccaaaatttatataatataattaaattctacaactgatcatctcttgctttatacgataaccagaagccatctatatgagtaaatatgccatatactgataggcgaatcctacagattactcaaaataattcgattagataaaagtagtgtaagagtgtaaatatcattgctaatttggattatccttacatatctcagttatgtaaggaatgtaagctaaaagttcattaagatccttggaatggagttaagtaagtaaaaa

SEQ ID NO: 19009 - DNA, 605 bp, Setaria italica
  Peptide Sequence Number=SeqID_84983
tacaggtctacttgtgaagtaacctgtccaatacgcattagggttatctgcatatgggaagaaatcattggtcttgagaggccattgctcatttgcagcatattttgcatcagtgtaaatggaaggtgtggaataaagagcattgatgaggccatgcttattcacatagtgaattagtttgtccatatttctgaaccaactctctgcatattggtacttgaagtctgttcccattgtaaacatgatatggtttgtcctcgtgatatttgcctgtgctagagctgcagcaacaaaatcatttactcgttcttcaacattataatcaaagagaaggggatcgtcctggacaacaggggaatcatcattaacttcgaataaaagccaccaggaggtggttcatagtttttgggaaagatgccagcaaagatatcagctgatgagccaaagctcttggagcccctccatacaacctcaagttcttttgttccctttcgagtatcacgatcttggtaatcaatccggaaaaaatagaaagcatcaaatcctacttctgcaccaagaaggtatgcctgaaccgcagagtggccaaatggatcaatctgcca

SEQ ID NO: 19010 - DNA, 3471 bp, Setaria italica
  misc_feature (21)..(52): n is a, c, g, or t
  Peptide Sequence Number=SeqID_84984
cattagggttatctgcatatnnnnnnnnnnnnnnnnnnnnnnnnnnnnnnnnttttttacgtgaccaaataatgtacaccgacagttccattaaaacccagctttgtgtctgaactgagtgttcaagtcagattcagttccaacgtcgatgacttagttgctcaatgcaatgcaatcagtgcaatttctactcacatcattacttatttcctaaacagagtagatgtcatcatgtcaagctaataatacaacactgggcattggccatgatgcccatctggacctcctcggcgtcggactatcagagcagttgcttgccactgatgctgcggtcgaagctgacaatgaatgtgcggatctccattggccccagctcgacgacaagcttcgaaggatccacgggccctccacgaactaccttgtcagcaggaggtccttgaaccttccatttcaggcgcttcttttccatggctgcacgttcttggtttgcagataagcttgtctcgatgatcttgccaatcttcttgtctgggaatactctcttgaggttgacactcgccagagctgaaagatccttgtgctctccagcctcgtatagatgagcaaaccgaagaagaacagttccatcttcgagttcctgaagagtaagcaatgcaacattatcaggcaagctgtaggttggatccattgcagagaattttggaacatgtgaattcgcccagttgcctccatcctgctctgagaaagcaaggaggagaggtgagtatatttcctggccaaatgtccgacgccacctagctccttctccttgtggatcaattttgagatagtactttccttcgataattaatccttcacattgtttatcaacacagacagtttcatttaacgcctctgcgacgcctcgcccatcatcatggagtagcctcctgtgtagcattagctctatttgtccatcttttatacttgaacctccaactgacctgtctaccagtacagacaactctttgctgccatcttccacataaatgccaagattaacaggataatagttcccagcaatgggctggtgcacttcaatcttccactctgatcgataatctcttatccttttgatgaaatcgcgtccactggaatcagtgtaaaatgttttgtttgtcgccatgtttgtgacaatttcagttgctatttcttttccatttccatcatctattggtataggcccaactataaattccgtttccacatagtccttccccttgtaaactcttgtaatctgatatatccatgaattaatctgatggtgcacttcatctagtatggggccacgcagaactgtgagaggaacctgaccgtccgtcttgataggaacggtgccgttaggccgaaatatgtatgctccagaagcctgaggatcacttccgtttccatcctgccctatgtaatacttgtatttctgctcgaaatttgcttcaatcagagtctttctatcggagtacagagataatgctccagccgcattatactgaagtttcaagtttccttgcccaacttgcagattgtctttacttccttgagatgagtatagagtggacttcgaagaaacagatgctgatttcttcgtgctcgagacaaaataagtgttaaaaccaagaggcggtactgacacaggaaaagcaagccaaaacttgggctttgcacctggtgtagttcctaggtaagccttgacatgttggtcccgtatgttctgtgaggcactagctataggcagaagttgtgattcaatttcttttccttcggaatcatgaaccacaattgaatcactgaaaaccggcacacgaaggacatcttctcgtttccagccaagcgagttgtacacaagaacaaccaagctttttccttcagaaaagtccatctcggaaggagggcaaaaagtaacatttagaagaagacattgagaaaactttgtcgttggggttgaacaacgtgattttgagcccgactcagtcaagcaagcaagagaagtcgaaacaagctcctgggcttgtgtatatccaattgacaatctcttggcataatcatttgctacatgttgcttctctgttcctgtaacagcatcatggtgctgagcaagagctagagcatcacctagataatctgttgttggacctgatttgcttttccctttaaagaactccagctgccgggctgccaggtaatatccactcatcatgcggacatatcgctttaaggcaggtctacttgtgaagtaacctgtccaatacgcattagggttatctgcatatgggaagaaatcattggtcttgagaggccattgctcatttgcagcatattttgcatcagtgtaaatggaaggtgtggaataaagagcattgatgaggccatgcttatgcacagacaaaagaacaagcatggtgagtacaaccataattagagtagcttcacagtagaaaacttcacatagtgaattagtttgtccttatttctgaaccaactctctgcatattggtacttgaagtctgttcccattgtaaacatgatatggtttgtcctcgtgatatttgcctgtgctagagctgcagcaacaaaatcatttactcgttcttcaacattataatcaaagagaaggggatcgtcctggacaacaggggaatcatcattaacttcgaaataaaagccaccaggaggtggttcatagtttttgggaaagatgccagcaaagatatcagctgatgagccaaagctcttggagcccctccatacaacctcaagttcttttgttccctttcgagtatcacgatcttggtaatcaatccggaagaaatagaaagcatcaaatcctacttctgcaccaagaaggtatgcctgaaccgcagagtggccaaatggatcaatctgccagccaatccgtggaatctgaccaaactcttccttgacgaacttgtgcccgagcgtagtctgatcgatcatgtcgatgtagtgcacagtggcctcatcatgcatgcacatgcccccattgatcaattccaaccgtccagagctgatgagacccttcacagtatccttgatcatgtcgttctggttcctccaccatctctggaagaatgcctgttcgacatagacgaacttgcggttctcgtccttgagcagggccgggatgagcgaatccagaacgttctgcacgcatgccccctggatggagttgttggatccgacgtagtactggtcgacggtcttgagccacccgacgtcgtcgtgggtgtgcggcaccacgtgcacgttgagcttcccggccaccacccccgccgacgtgttgtaggggatgtacaccgcctcgcccacggccgctagcgcgacggcggcggcgaggaggagggcgagtcggacggggcccatggaggcggcggggcgcgctagaagagctgagaggggaaggggaggaggaggagg

SEQ ID NO: 19011 - DNA, 468 bp, Setaria italica
  Peptide Sequence Number=SeqID_84985
gtgagtacatgtgagctgccctttccctgtaaaagactgtccgctcaactgatacaactggctgaactgaacctgaattctgtactcccatgaaaatgaccgaggcatacatggaacccatggcattgaacaagtcctgttgattatccctttttctccctacaccccagaacattgttccaaacaacagggcaatcactgttgtatagaagtacttgacagcagtatatggaggatttctccaatatgacatgctttgcttccacaggcaagcaaaacactgtgtgatgaaggtctgcgagtattctgttggaaaggatagatcacttgaaccttcaggaggtgtgcttagctcctttattaaagttttgttcctcctgaaacgcaacaaaattacaatatcattgcagaactgaaacattgtttgacagtgtattatccttttgtggaattgaaattatcaattac

SEQ ID NO: 19012 - DNA, 669 bp, Setaria italica
  Peptide Sequence Number=SeqID_84986
ttgtggctacatcctgctaatacatttcttttcattagatggaacatataacacatttacctagtgaaaaccatgaggcaacacaaatggaaatatattccaacttatccatggagatcacacgaatgttaaacagcacattacatcctccatatacattattactattggcaactaggtgtatgttgcaggtgcactaaagttccaaaaactagttgatcgattgcccattagaatctaagaataaaaccaatgtgctggaagtccgaaaactttgcatcgaatattaatcaaccacacatcagaaactcggaatagagataattgcgcaaaagtcagcaattccaaacccctgatgcactagtacaacagaaggaaataagcggaaactaagatcaccacaactcaaacaatctccttatagttttgttcaaaaaaaaaactcactatggtagaatttagtgacaagaaatttcattatttgggtctcaatttgcaagtctttcaacatttgacaccctaactgcctaacccacatgtcatgtgagcgtcaaatcttgaaaggctcattttgagtcccaactaattgacagacaaagatcacattaaattgtcaatgtcaaaggaaggtacaagaagagcctttagccttacagctgcgctcgatgc

SEQ ID NO: 19013 - DNA, 413 bp, Setaria italica
  Peptide Sequence Number=SeqID_84987
gtcttggtgctggctattcttgattttggtaagtcaacttgttagaaaatccacagatgactctcatgtccatgtatgttattttgccactaaaaaagctatgttattttgcattgcctctaattaaactgtaagcaaatgttccatacatctacccaatatgtggtgtagatggctatgctttactattcgtacaatgacatgcattcaagcagtttctgtaactctgcattactaactaccgccgcatacactaaattaaaacatgacaagtgcaaacctcattttcggtatcatctaatagcctgtttgtattcctttttagcaagaactctgctgactgaatttaaaacataattaattgtttcattagcttttctatcagcctacttttgcttatgtttctctttcct

SEQ ID NO: 19014 - DNA, 284 bp, Setaria italica
  Peptide Sequence Number=SeqID_84988
cccggcggcttacgacgacgcgtggacggcgctggcgtgggtgctcgagaacgcgcggcacggggggagccctggctcgcgaagcacggagacgcctcccgcctgttcctcgccggcgacagcgccggcggcaacatcgcgcataacctggcgatgcgcgccggccagcaggttggatccggcggcggcgcggcgggggcggcgatcaggggagtggcgctgctggacccctacttcctgggccggtacgtgtccccgggcgcggagcgggcgtggtggttcat

SEQ ID NO: 19015 - DNA, 813 bp, Setaria italica
  Peptide Sequence Number=SeqID_84989
ttttgggtactatgaagttgagcatcaaataatacgtaataccctaccaagacgctttggtgcaccaggacttccagagctaaatgcttcccaggttttagcagttaaaagtgtcctccagaagccagttagtttgattcaaggaccacctggcactggaaaaactgtcacatctgctgcaattgtgtatcacatggcaaaacaaggtcaaggacaggttcttgtatgtgcaccaagtaatgttgctgttgatcaactggcggagaagataagctcaactggtcttaaggttgttaggttgtgtgcaaaatctcgagaagctgtttcatctcctgttgagcatcttacacttcattatcaggttaagcaccttgatacatctgaaaagagtgaattgcacaagctacagcaactgaaagatgagcaaggtgaattgtctagcagtgatgagaagaagtacaagtcactaaaacgtgccactgaaagagagatacttcagagtgctgatgtcatttgttgcacctgtgtcggtgctggagatccccgtctttcaaacttccgtttccgacaagttcttattgacgagtccacacaggcaacagagcctgaatgccttattcctttggtgcttggtgtcaagcaggttgttcttgtcggagatcattgccaactgggtccagtcatcatgtgcaaaaaagcagctcgtgcaggtctagcgcagtctctgtttgaacgccttgttatcctgggagtgaaaccattcaggctacaggtccagtatagaatgcatccttgccttcttctagttaatta

SEQ ID NO: 19016 - DNA, 681 bp, Setaria italica
  Peptide Sequence Number=SeqID_84990
cctaaaggaagataatgagttgaggcttgtgcctggagatgagctgcgcttgagatatcctggtgatagctcacatcccacatggcagtctgtggggcatgtgattaagctcactgcacaagaggaggtggcacttgagcttcgtgctagtcagggggtacccactgaactaagcgttggattcagtgtggattttgtttggaagagtactagctttgatagaatgcaaggagcgatgaaaacttttgccgtggacgagacaagtgtcagtggatacatataccatcatcttttgggacatgaagttgagcatcaaataatacgtaataccctaccaagacgctttggtgcaccaggacttccagagctaaatgcttcccaggttttagcagttaaaagtgtcctccagaagccagttagtttgattcaaggaccacctggcactggaaaaactgtcacatctgctgcaattgtgtatcacatggcaaaacaaggtcaaggacaggttcttgtatgtgcaccaagtaatgttgctgttgatcaactggcggagaagataagctcaactggtcttaaggttgttaggttgtgtgcaaaatctcgagaagctgtttcatctcctgtagtctattctttacttacttttcttattttatttcttaggttttaagttcttactta

SEQ ID NO: 19017 - DNA, 900 bp, Setaria italica
  Peptide Sequence Number=SeqID_84991
ccacaaccccgcttgcgtggctaggtgcaacgtgccatcctgccgcaagtggttctgcaactcgcgagggaacacctcaggctcccacattgtcaaccacctggtcagggcaaagcataaggaagtgtgccttcacaaggatagccctttgggagaaacaattcttgaatgctataactgtggctgtagaaatgtatttcttcttgggtttatctcagcaaagtcggagaacgttgttgttcttttgtgcagagagccatgtttgagtgttaatgcattgaaggatatgaattgggatctcagtcagtggtgtcctcttattgatgacaggtgtttcttgtcatggcttgtaaaggtaccctcagaacaggagcagctaagagctcgtcaaattagtgctcagcaaattaacaaagtggaagagctctggaagacaaatcctgatgcctcccttgaagatcttgaaaagcctggtgtagatgatgaacctcagtcagtggttttgaagtatgaagatgcttaccagtatcaaaatgtttttgctccgctgataaaactcgaggctgattatgataagatgatgaaagagtcgcagagcaaggataatgtaactgttcggtgggatattgggctgaacaagaagcgtgtagcttactttgtctttccaaaggaagataatgagttgaggcttgtgcctggagatgagctgcgcttgagatatcctggtgatagctcacatcccacatggcagtctgtggggcatgtgattaagctcactgcacaagaggaggtggcacttgagcttcgtgctagtcagggggtacccactgaactaagcgttggattcagtgtggtaaaacttaaaaagtaaacgtttaaaggtaaaaatttaaaactaaa

SEQ ID NO: 19018 - DNA, 3039 bp, Setaria italica
  Peptide Sequence Number=SeqID_84992
cgcgctcagcttcgaggagcctgtgggcgccggcgccaactaggacgggtacgactacggcaagggcgacttcgttgagcacgcctgccggtactgcgggatccacaaccccgcttgcgtggctaggtgcaacgtgccatcctgccgcaagtggttctgcaactcgcgagggaacacctcaggctcccacattgtcaaccacctggtcagggcaaagcataaggaagtgtgccttcacaaggatagccctttgggagaaacaattcttgaatgctataactgtggctgtagaaatgtatttcttcttgggtttatctcagcaaagtcggagaacgttgttgttcttttgtgcagagagccatgtttgagtgttaatgcattgaaggatatgaattgggatctcagtcaattattctattgtactacgtcttattgttgacaggtattacttgtcatggcttgtggttgttcttgtcggagatcattgccaactgggtccagtcatcatgtgcaaaaaagcagctcgtgcaggtctagcgcagtctctgtttgaacgccttgttatcctgggagtgaaaccattcaggctacaggtccagtatagaatgcatccttgcctctcagaatttccgtccaactgcttctatgaaggcacactgcaaaatggagttactgttaatgagaggcaatcatctggaattgattttccttggcctgttccaaatcggcctatgttcttctatgtgcagatgggacaagaagagatcagtgctagtgggacatcatacctcaatagaaccgaagctgcaaatgttgaaaaaattgtaacaacatttttaagaagtggtgttgtaccaagccagattggagttatcacaccttatgaaggacaaagggcatacattgtaaattatatgtcaaggaatggctctcttcgccaacaactttacaaggaaatcgaggtagcgagtgtagactcatttcagggaagagagaaagactacattattctgtcctgtgttagaagcaatgagcaccagggaattgggtttctcaacgatccacgcaggttaaatgttgcgctaactcgtgcacggtatggcatagttattcttggtaatccaaaagtattgagcaaacagctcctttggaatagcttgttgacgcattacaaggagcatgagtgtttggtagaaggacctttaaacaacttaaagcagagtatggtgcaatttcagaagccaaaaaagatctataatgagcggaggttgttcctgggcggtggtcaaggtgttatgcagggagccaactttggggctggggccagcccagcaggagataagagaagtggtagggggaaaggacaatcatttgttccttatggcccaccaaatggagttcataagcctggtgtgcacccggcaggctatgctgtacctcgtatgccttttcctccatttcctggggctccacattctcaaccatatgcaattccaacccggggattgcatgggcccattggagctgttccgccggtgcctcaacctggaagtagaaattttggggcacctcgttccaacacgggtggtcctattggtggtcatcttgctcatcaacagaactctcagcaggctatgggtggcatggggtcaaattttaactatgctggcttggagaatcctagcagtcagccttctggtggagcccaaatgtcccaaactggattaatgacacagatgcctgtccaaggactcagtcaaacattccgtgatggtttttccattggtggcatgtctcaggacttcttcggagatgatttcaagagccaaggatctcatgtgccatacaacattgcagatttctctacccaggcttctcaaggtggtggttatggtgttgagtttactcaagcaccccaatctggatacactggaaattatatgaaccaaaatgcacatccaggatactcccatattggtacaaccaatgacattgtatctcaggatcacatggcccatggatctcatggaatgtttacacaagcgggatataatgatccctctcaagatgagtcatctcagatgcattacggaatggcttctgctggccccctccagtcacagagcatgatgaaccccctatactctcaatcctatgcccattataacacccaaccacagtctcttcaacctcctccgcagtgatagtgaaagcttgtgattggctgaagccgcattttggaagttttgtgggtttcatctttggcccacaggttgtgcccccttctgcactacggaattgatggtgcatagacatcagatgcaagcaacaagaacaagcatatcatgacacgctatgtgttggatatttgtcggggcaggcttgtacaagatggctatggctattgatcaacggccagtgctgatgagcacaaggattgcagcgtatctcatacttgatcgttgtaggtcactacgcaatttgacaacaagaggtgtcattgtgcatcgagagaggttgatggtgctagcctcatccctcacctgtatagaaaggcaatcagggcctatagtggtatgatgtgaatattccagggtttgctgccatcaaaagtcagggtgcagcagttgcatgcctccatggtaccacgaaggcgcctgcagagtggctttgtatagaggtgctataggtggggtggccaaccctttcggatattgcacatggccaagatatttttacctttacattatgtatgcattcgatatagttttgatgtttatgccacagaaatgatcaggtgatcttggcgaaagtagagtttgtgatgattgggaattgggagtattttgtgtaaactttctttgatcgccttatcttgtgtgggacagatggattgatctggggtttacttctataatttggatagctctgagaaattccttgatcatgccttgttgcatttgatatttgttcctgtatctttaagcaagtggctatttttgagaggccaattctggaataaaatgtgtgtttataaaa

SEQ ID NO: 19019 - DNA, 316 bp, Setaria italica
  Peptide Sequence Number=SeqID_84993
ctccggcggtatccgacggtcgaagctgttcttcccgagaattattgtctcgatcacggtgaggttccccaatccggccggtatgacgccgttgaagccattcccccacagcgacaagtacgtcaggttcccacacttggctatggagtccgggaagcttccagtcagcttgttcgctgacaggtccaaagattcgagcttgcagccgaccgggaacgtggccggcgggacgctcccggtcagattattctcggcggcgttgaactgcctgaacctcgtgatgcccggccacagctcgccggtgaagttgttggag

SEQ ID NO: 19020 - DNA, 231 bp, Setaria italica
  Peptide Sequence Number=SeqID_84994
cagcttgcaccctgaagaacctccgcagcagccagttgataaacatgaggcacagccacacagttcacactatgatgagcttgctgccagcacagctgatccaaactttgtgagtactgtcaatgataacaacatgccttcggattacatggatgatgatcttctcttccccgctaggcaagcaagatcagaatgccctttggatctggagaatcaaatggaagaaactat

SEQ ID NO: 19021 - DNA, 489 bp, Setaria italica
  misc_feature (484)..(484): n is a, c, g, or t
  Peptide Sequence Number=SeqID_84995
tttgctgtaaaatccatcaagatcatttaagaatttcacagcataagtatgcttcttccattggatggcaactgagaccacaattatgcatcgaggttttgatgcattgtgccagtgttaatgttggtattatctttgtagcatcgaatctctacatccacaaattgtcaaatgtagtacaatgtcacactggcagtgaggtaaatgtgagaataagagacctttcaatggcctaaccatggaaactggaccagacgacttttcgtagtatgagcagccatgttcaacctaggttgacaaaggacagataaatcgtcccctcgtggatgaataaacaattccgagagaaagggggaataatttgctctgtagatttctccgtctctagtctagctatctcctaataacatatatcgacacacctgaggctgttcctgctccggctgctcctcctcctggatctcctgctccagcgtcggcggcnccttc

SEQ ID NO: 19022 - DNA, 352 bp, Setaria italica
  Peptide Sequence Number=SeqID_84996
cattgtatttcccccagctagcaggcacatttttccacttcttcatcaaggatctgagagcagccgcatcttgcgggttagtgtcggcggaggcaattcttaatccggttgcgcacaagacgaagagcagcaagaggagctgctgcctccccctcatcatcaccatcagctccaccgtgcccgagccagaactaccagaagaatgccttctccgatcttaattcccaaaggtcctcctcccaaatccctcgtccttgcggaagaggttgtgcagcagcaagggagcaaacctctaaggtgggaagaggaagaaggcgagaagcgaagctcggcgatgccgaagtaggtacga

SEQ ID NO: 19023 - DNA, 281 bp, Setaria italica
  Peptide Sequence Number=SeqID_84997
ttttttttttttttcgtaaatcccccataatttgcatcactggcttattacacgctttcagaaacaagctccatacaaaaccaatccccacgccaacctggcttacaaacacaaaatttatacaacaatttgttctcaatataaaccatatataaccaaagccgcgtgtatagcaccacaccccaaagtgaaagaaaaatgcggccttaaaatcaggaaactgtcagcacaacgttctccaggctacggcagcaatggatcctgatcatgagtcgtgatta

SEQ ID NO: 19024 - DNA, 1300 bp, Setaria italica
  Peptide Sequence Number=SeqID_84998
tttttttttttttttttaacccccaataaatttagacaatcaactggcttattacatgcagcttgtttctgaaagcgtgtaataagccaatccccacgccaacctggcttacaaacacaaaatttatacaacaatttgttctcaatataaaccatatataaccaaagccgcgtgtatagcaccacaccccaaagtgaaagaaaaatgcggccttaaaatcaggaaactgtcagcacaacgttctccaggctacggcagcaatggatcctgatcatgagtcgtgatgactgccctctgtaccagtccacttcaaagtagacctactccttgtaccaagatggtttctgtgcagccatagctcggctcataccgtgaatgacatggcgctgcaggctatgctgctatcgccgccaatccctggcattgtgtagttaccatcagttgttctgtcttctgtgggatgaaataaagaaacgagtgctgctgtctgttcaatggtcagcatggcgttcccgtttcacattgggacctctacttggagaaggtgttttaccacacccagctaatctcatcactcgttccctctcaagttcctgatccaactcttctttccactttctctgcctttcggcaaagctgatgcttgggctatcttgggcatcaagattcactttatccccaaactcattgagttgaggagaagctatctctcttaaaattcggctgctcttcaccacattgctttttgggaattgcttgctgcagctttcaggacttgtattattcaaattatcacaagttggcgatgcacctcctcgtgtcttacttggaggtgactttcttcgagggggcaatttcggactaactgggatttttcccttggaagtttgatcagcttcctgacaactccctgcattcgcggtgttgtagaactcctcatataaaggtgtttgtagttttttcaggtcaagagccttctcctcaagaaatgcctttatttttgactctgtaagtacatcatcatcttcacaacttccctcaacagggaaagtaaaatcattctcagttatgctgctttcaggatgttttgctaatccactaaattccattgattgatgagaattttgctccaggctcatgtcaaacttgctttcccagttatcaaatggttctgacataggattatagctagatccaactgctggatagtcatccttgtcagcaaactcacacatgtcatcatcgtcacagcctaccctcccataagggtttgatttttgatgtatttgttggtagttca

SEQ ID NO: 19025 - DNA, 1567 bp, Setaria italica
  Peptide Sequence Number=SeqID_84999
gatgcaacagagaagtctgaatttaccacgcttgcaaaggtttaatcgcagagccatcacatttctgggagcctacggctggctcaacaccaattcccgtcacaaatggtgctgatggatcaaatctaaccctaacaataatccaagcatggatggaacctgcagtccgcaatttccttccagaagagaagagaaggggttaaaaaacgaaaaggttcctacatgaatgatactgacaacagacatcaaatatgctcaagctgtcagattgtttatgctcttatgatcatctccagcgaaacaagcatctataggaatgacaggcatagctggagaagcacaagcaggagcatcaagaggaagttgcttccgagccgctgcagcctccatgagaaggcagagtcaacctcgatcatgataccgaatctgcatgtcccagtgctggggtcttggcccgtggtcgtcgcgaggttttgaaacccacaggccacatcgtcttggtcattcttctggtagtagttgttgaacgcatatgagatgttgccgcgcacgtccagcatcccacatgaagtcttgtaaccaaggctggtgcagtctgccatggaacacgcataagccacgttgtctgcaagcctcggttcggtgaggctcaccgaaggcttcagtacgcaccacttcttttcaaggtacttaacgccccttgctctcacaaggccacctgaatttgctgtcccaagattcagttggtactttggctggccatcataagtaaagatcccccagtgccgctcgaaatttcctggttgtatgctcttctcatcctcatcaattagactgaataagtaagcatcaacaggtccaggccgcatcggtgtccctcgcccagaagcaatatgagtcatgaagccttggttgaagcgctgagccatctgagcattggcattcctgtccccatcagtaggccatccaatctccccaacaatgactgggaggtttccaaagccattctttttcagagaccatataagtgtgtcatggttcgcatcaaacatgtttgtataagtgatggatccatcaacgatgggcgtcgaggccccctcaaagaaggcatagtccacagggaagtttggatcaatgtagaggcttatgaaagggtatatgttgacagtgaaagctccaccattgtcactgagcaattttacgatagcgatcattagatcatgaatatctgtgcggaagtccccatcagaaggcttgctagttggtgatgcatagacatcagcattgagagggcatgtgactttaacttgattgcccaaaccggcctttataagtgcactttgtatgttttttatggcaggataagtggtttgcagaaagcttccattgtatgtctccaagaaaggctcattcccaactgcaacgtacctgacgctgacgccgtcattgaggtagctggagacgttggtgtcgacccacttctcggcggccttcatgtttgtggccatcgtcagcaacatgtcgttgggaatgccgaccatcacactaccctctactacttgtagtt

SEQ ID NO: 19026 - DNA, 769 bp, Setaria italica
  Peptide Sequence Number=SeqID_85000
tactgcttcaggacttctctaggtaagggtgtaaaggtcaaaaagaaaaaaaactgcattacagatttcttagacaacatgtcctggaagttgtttacactattaatttcattaatcattgttatatattagaagccttaataaatttgactagtgatgtgggaacatccagtaaagcattgacaatctgcatttgaattcattagctacttaatgtttttttttcacttttgtgctaatggaccttcaacgcagatggaaatacgttctagacccagcaataaataaagaggcttggtcgcaacaagaggagctaagattgattcgtgcacatcaaatatatggaaacaagtggtgtaaaatggtcaaacatttcccagggaggtatgaatggatggtctcacctgtaaaaaaaaagacaaaccacctctccttctgttagctaccatttttgtcttttgattttcattatttccttagtgagagctcattatgcatataccctcttcaaactactgtgagggtggcactaaagttattgacatcatgtacaaccaggacaaataatgcactcaaagaacactggaggggttctatgaaaagaaaactggattcatatttagcctcagggttgcttgaacaagttcctgaccttcatgaaaatctatcagttctgcagagcagtcagtcagatagtccaaaggacagcaaagtttcatctgatagaagtcaattttcgtcaattttatctacaaggtccaaacttaaa

SEQ ID NO: 19027 - DNA, 690 bp, Setaria italica
  Peptide Sequence Number=SeqID_85001
taccgtaaattcctaaaccttacgttgttctaccgtatgctctccggcagcctcctgctcctcccctcgcatcccaaattcacctcgccgccggccaggtcgtcgcggccccgccccggcgcccgccatcaccgaccaagccttcttcgccaggatcgcaccgcgcgcccagcacatcgccgagcccgagcgccccttccaccgaagcagcttcaggcgatgcttctggtggaatcggagcctcatctctgaccgctgccatggagcagagtagcgatgggatgccaaggcagcggagggacttcagttcaacaaatcacttgagcaactccgacgcggttgctgaaggcatgactgatatatcacatgaaacttcgaaacattggcaagatatggaatcagaaaatacagaggttccacctcaaaagaagaatgtgcacggcttcaatgagtgcagtagtttaaaaaatcttgaaaggaccaaatgcagatggtcaccagaggaagatgagctactcactcaattggtacacaaacatgggacaaagaactggcataatatttcatgtgctatacctgatcgaaatgcacatgcatgtttatcaagatggaaatacgttctagacccagcaataaataagaggcttggtcgcaacaagaggagctaagattgattcgtgcacatcaaat

SEQ ID NO: 19028 - DNA, 490 bp, Setaria italica
  misc_feature (463)..(490): n is a, c, g, or t
  Peptide Sequence Number=SeqID_85002
gtcaaaggactcccccgaaaactggaacaacaactccagccagtgacaatagctctccgtcagatgtatgccaagatccatgctcactggagatacatgaggcggatgcatcagatcttctggacatgtcctactgtgatggcttgatgatcgattctcctctttatctgcatggcagtagcttcatatagaatgaagatcgtcacttagacagtgcaacgacaagtattgcgcttgctccgttgcacctttttggtaccaggagatgatgaactgaggtacaaacttgatgctgtcttcctataatcgaacagctccacgtataaggagctcgctgcgtgttggatggaatttttatattgcataagttgcaattctgttctgttaaatgtcactgtctcactggtttggagggcagttttctattttcagtttgtttaaactaaaaaacaaaaaaaaaaannnnnnnnnnnnnnnnnnnnnnnnnnnn

SEQ ID NO: 19029 - DNA, 2239 bp, Setaria italica
  misc_feature (2199)..(2199): n is a, c, g, or t
  Peptide Sequence Number=SeqID_85003
tgttctttgctacatttgcatattcattgaatagaagtgtatggattatgtgtttagatcatttttttggtttcaagcagaggttccacctcaaaagaagaatgtgcacggcttcaatgagtgcagtagtttaaaaaatacttgaaaggaccaaatgcagatggtcaccagaggaaagtttttaggactataattttattattcgtgtggtttttctttttattccatcttgtctgctaagagaaagaaactgattgtttttttccaggaagatgagctactcactcaattggtacacaaacatgggacaaagaactggcataatatttcatgtgctatacctgatcgaaatgcacatgcatgtttatcaagatggaaatacgttctagacccagcaataaataaagaggcttggtcgcaacaagaggagctaagattgattcgtgcacatcaaatatatggaaacaagtggtgtaaaatggtcaaacatttcccagggaggacaaataatgcactcaaagaacactggaggggttctatgaaaagaaaactggattcatatttagcctcagggttgcttgaacaagttcctgaccttcatgaaaatctatcagttctgcagagcagtcagtcagatagtccaaaggacagcaaagtttcatctgatagaagtcaattttcgtcaattttatctacaaggtccaaacttaaacaagagatcagagaactaagtgaaaatgctgatacttcagtaggagaaagctctgatttcatctatgctaaagcacttgatacccattcagccaaagtttctgaaagtataataactaaaccgcagcagtgtgcgagagcaagaaagaaactggattcggtgtcaaccccagtgaagctcaagagtgatttaccacctgaaaccgtcaaatgtcgtcaagaaatggaatcaggaaagacagagggaccaccatgcaagaaaaatggctactgcttcaaggagggaagtagtttgaaaaattctgaaacgaccaaaggaagatggttagcagaggaagataaaattctcactaaaatggttaccaaacatgggctgaaaaactggcaaactatcgcatctgctatacctagccgaaatgcacaacagtgccgaataagatggacacgcagtcttgacccagcaataaacaaagaggattggtctgaagaggaggagctaaaattgattcgtgcccatcaaatatatggaagccagtggcttaaaatggtcaaacatttcccagggaggacaaatcatgcactcaaagaacactggagaggtcgtatgaaaggaaaactgaattattatttagcctcaggacggctcgaagaaattacagacctgaaagaagatatatcagttccagagagcagtcagtcagatattccaaaggacagccagggttcatctgagagaaatcgaccaccatcatctttacccccaagacccaaatctaaaactgacctctcagaacttgatgaaaatgcagatacatcagaagaggaaagttccgactgcatctatcctaaaggtcttgatgctcattcagccaaagtctctgaaaagataatggcaaaatcaaagcagcgagctagagcaagaaagaaactggattttctgtcgaccccagtggagctcaaggtgtgcaccgctgcagcaagttgtcaaaggcctcccccgaaaatggaacaaacaactccagccagtgacaatagctctccgtcagatgtatgccaaggtattccacaaaatgctgcatcagaacctgtggatgtggttataccaacagctgctagtaaccatcccaatgatgttcattcattggcaaccccagatccatgctcactggagatacatgaggcggatgcatcagatcttctggacatgtcctactgtgatggcttgatgatcgattctcctctttatctgcatggcagtagcttcatatagaatgaagatcgtcacttagacagtgcaacgacaagtattgcgcttgctccgttgcacctttttggtaccaggagatgatgaactgaggtacaaacttgatgctgtcttcctataatcgaacagctccacgtataaggagctcgctgcgtgttggatggaatttttatattgcataagttgcaattctgttcttttaagttaaaaaaaaaaaaaaaaanaaaaaaaaaactaagagaaactagaccaaaggacaacaac

SEQ ID NO: 19030 - DNA, 478 bp, Setaria italica
  Peptide Sequence Number=SeqID_85004
ggacagctagtttcttcttgcttcataactgcatcctagttggagaacaaatacctttctgttcttctgccttcaccactttattcactgatgagtaataaagggggtcaccgcttgcaactcacaactccattgtaaacaggtaatcttccttcaacagctctctcagctgacacaaatctgagagcgtgctacaatggctaagataggagctgctattttggtctgcatagtggttttggccctggatgtaactgctggcatactagggattgaggcgcaggctgctcagaacaaggttaaaaaggtgacaattctcttcattgaatgtgagaaaccatcatacaaagcataccagcttggcctcgctgctgcagttctcctggtagttgcccactcaatcgccaacttccttggtggctgtgcctgcatctgctcccagcttgagttcatccgggcatccattaacaggaaactg

SEQ ID NO: 19031 - DNA, 393 bp, Setaria italica
  Peptide Sequence Number=SeqID_85005
ttttgatgcctgcattctcgtagagcatgcaggcttaaatccttttggtggcttgcgttctgatagtattccaaaagctgggtgtccagtcatgaatttacggcagacattggatgatttgactcgatgtggttattctgtgtgcatagttgaggaaatccaaggcccagttcaagcccgtgcccggaaaggtcgatttatttctgggcatgcccatcctggtagtccttatgtgtatggtcttgcggaagtagatcatgatgtagagttccctgatcccatgcctgtagttgggatttcacactctgcaaaaggctattgcttgatatcagttctagagaccatgaaaacttattcagctgaggagggcttaacagaggaggctgtggttac

SEQ ID NO: 19032 - DNA, 197 bp, Setaria italica
  Peptide Sequence Number=SeqID_85006
gtccttgaaaataattttagatccgggatcaaacgataatatggtaacaaattgtgttttcagatctacactgcatcgtgttgttgctgttggtaaagagcggtattcggtggctttctttcttgacccaaactctgatacagtggttgagtgcttggaaagctgttgcagcgaggcagatccaccgaggtttccac

SEQ ID NO: 19033 - DNA, 449 bp, Setaria italica
  Peptide Sequence Number=SeqID_85007
tctaggtagtaccttcaaggagagtttctacattgggcctattggggacagtgatcttcagaatgatctaaaccaatggccttctgaaggttcttatatgctttgccatctgttaacaactgataataatgctgtctgtcagcctgcatcatatccatggacatcattcatgttatcagtagcctatgcttttaacatttccttcttttttttggctatcggtagagcgctttccgtcttggaaggagacaatgaagttgtacattgcaactgctctggatactggcgaaaggatactctctctaattgctttgggtttggatttggatgctgaattctttcacaaaattggtgcattggactgcccgtcaacatttcttcgtttattacattacccaggtgaagtaaatgagtctgatagtggaaactatggtgcattctagtcttct

SEQ ID NO: 19034 - DNA, 1926 bp, Setaria italica
  Peptide Sequence Number=SeqID_85008
gttccggttccgctgcagctcagagatcggcgatgtcggggagcgtggacctccccgtggtggacctcgcgtcctcggacctccgcgccgccgccgcctccgtccgccaggcgtgcgtggagcacgggttcttctacgtcaccaaccacggagtggaccgcgccctggtcgaggcggtgctggccgagagcaaggggttcttcgacctgccgatggaggagaagttgaagctgcataggaccaaccaccgggggtacacgccgccctacgccgagaagctcgacgccgcttccgagttcgtaggagacctcaaggagagtttctacattgggcctattggggacagtgatcttcagaatgatctaaaccaatggccttctgtagagcgctttccgtcttggaaggagacaatgaagttgtacattgcaactgtctctggatactggcgaaaggatactctctctaattgctttgggtttggatttggatgctgaattctttcacaaaattggtgcattggactgcccgtcaacatttcttcgtttattacattacccaggttacagtactccatttttttttctatatcaatagggaagaatcaaagtttattgtaatatttttgaaatggcgcactccattcttgatctttttttttgtgattcttctcaaatggtccagcacttctttacgaatttctcatgctcccgtagataattataatagcgaaactacacaaatggaaatacaggtcttctttttttcttgaatgcttagcaaatttgttctactatagaacatatatggatgcctatgttactctaaagaattaagaagacattgtcctagtttttgttgcttgcctggttggggctggggagcataactaatgtgtccactaaatatttactggaaagggccagtcacatatttatacttgcatgatctcattattttctactgaaactggtgtgaacttaaatccatatgttattaaaaaatactttcaatttatttgaacatgttcatagttagtgtactagcatctgccagcagatgatatgcagagccgtgcacctctcttgctgatagttcaaagtatccatcttactgctgtgtactggagtgcagccttcgttactgaaggatactcacttaagcaatgtggatgtaaggtatataagcttgctgtgtagctttgttttctggtcttcttttatacggtaagtgggggcacagacagacaaaagcacagggcgtctttaagtttcttctaggcactgtagtcttgataatctgagtgttttcttttccttttgtattatggagccattgagcaactttgtgttatgtgcttacatagtattcccattttattgattcaacacaggtgaagtaaatgagtctgatagtggaaactatggtgcatcagctcactcagactatggtgcaataactcttttagtaacagatggtactcctggcttgcagatatgcagggagaaggatagggatcctcagctatgggaagatgttcatcacattgatggggcccttattgttaatattggcgacttgctagaaaggtggacaaattgtgttttcagatctacactgcatcgtgttgttgctgttggtaaagagcggtattcggtggctttctttcttgacccaaactctgatacagtggttgagtgcttggaaagctgttgcagcgaggcagatccaccgaggtttccacctatcaagagcggcgactatataaccgggcgaattaattccacatacaaataatcatccatccatcactacatgtgtaaagctatgcacattcataacagcttgtttacctattatttattcgttttgtattcccggttatttctttaaaattttattttttcttaaggttacttaaaaaaaaaa

SEQ ID NO: 19035 - DNA, 1983 bp, Setaria italica
  misc_feature (1909)..(1983): n is a, c, g, or t
  Peptide Sequence Number=SeqID_85009
ccgacacatagatgcagcccgcccaaatgaatggaggcgcagcgcagtccccaactccagctacgccacgccaccacggcagcaaatcagcagcgcttccgttccggttccgctgcagctcagagatcggcgatgtcggggagcgtggacctccccgtggtggacctcgcgtcctcggacctccgcgccgccgccgcctccgtccgccaggcgtgcgtggagcacgggttcttctacgtcaccaaccacggagtggaccgcgccctggtcgaggcggtgctggccgagagcaaggggttcttcgacctgccgatggaggagaagttgaagctgcataggaccaaccaccgggggtacacgccgccctacgccgagaagctcgacgccgcttccgagttcgtaggttggatgtctctggcctcgtctgcttctcctctgcacttggtgtacgaattttggtctgggcactaaaattgtcactgctgttgcttagtacatggcaggtgttttaaacttttaataacggcaagtggtcaggtggtgccggagtgcctcaccgatggaaattagtactcttcttaagattagaaaatttggaggatttactgtttccaccggcagtgtttccatagcatttagtttgttgttgtatagaatggctcaccggctgtgatagctaaaactgaactagaaccatgatgtccctgtttatgtcagaaaatatgtcgttattgctcgttttctcctggtggtagctacaaaattcatatcgtggaacctgccttgcttcagttaactgatttggctgtgtgtgaaacttgggactagatacagtgggttcaggataattccatggagaatggataagtactgaagaacccattcggcatgtcattgtcacatgtagcttgaagctacagctgcatttcatagactttaccattaccacttacatttctggtgcttttagtgatatagttgaatctgctcttaggcgatttttggagcttttgactcctccctgtaataatatacctatgtaagagaagcagatcttttgctaaaaaatatgtttcataaaaaatgtatagtttaatctactattgcttttctgaattgtgatattacaggagacctcaaggagagtttctacattgggcctattggggacagtgatcttcagaatgatctaaaccaatggccttctgaagagcgctttccgtcttggaaggagacaatgaagttgtacattgcaactgctctggatactggcgaaaggatactctctctaattgctttgggtttggatttggatgctgaattctttcacaaaattggtgcattggactgcccgtcaacatttcttcgtttattacattacccaggtgaagtaaatgagtctgatagtggaaactatggtgcatcagctcactcagactatggtgcaataactcttttagtaacagatggtactcctggcttgcagatatgcagggagaaggatagggatcctcagctatgggaagatgttcatcacattgatggggcccttattgttaatattggcgacttgctagaaaggtggacaaattgtgttttcagatctacactgcatcgtgttgttgctgttggtaaagagcggtattcggtggctttctttcttgacccaaactctgatacagtggttgagtgcttggaaagctgttgcagcgaggcagatccaccgaggtttccacctatcaagagcggcgactatataaccgggcgaattaattccacatacaaataatcatccatccatcactacatgtgtaaagctatgcacattcataacagcttgttaccatattatcgtttgatcccggatctaaaattattttcaaggacaaaaaaaaaaaaaaaaaaaaannnnnnnnnnnnnnnnnnnnnnnnnnnnnnnnnnnnnnnnnnnnnnnnnnnnnnnnnnnnnnnnnnnnnnnnnnn

SEQ ID NO: 19036 - DNA, 259 bp, Setaria italica
  Peptide Sequence Number=SeqID_85010
taatcctactgatggtggtggttgtgcatgtggaggccatcatttggttcacacagttgatccatcagcagctgttggaagtgactatgggtttacgggtggaagctattctgagagaaagcatgtacattacaatggtaaaggacaatactcattccatacagagcaatctgatggcagcatggtactggatgaaagcctgcatggccattcagatgcagaccaattatatggatatgatgacacgcagaagaattct

SEQ ID NO: 19037 - DNA, 657 bp, Setaria italica
  Peptide Sequence Number=SeqID_85011
aacaactttcatttgctcattctgagtgtgttgagaaggatgctattttagctaaacaggcaaaagtagctgaagaagccatattaggttgggaaaaagcggaggctgaggcactacttctcaagacacaacttgatgatacactggatgataaaactgcaattgagcaaaggatttgccaacttgacgaggctttaaatgttgcaatggtagagagggactcgttaataaaggaaacagctcaaatgatttcatgtgaacaagacaaagttcagaagctggaagaaagtttagtggaaaaaataaacataattgctaacttagatgccgagaatgacaaactttctgaaattgtcagtgttaaagagaacatgatctcagagctaattgaatcgaagggactaacagaatcaaacctcaaggaccttgcaaggaagctagagtcagccgaaagaacaaattcttcacttagatatgaggtttgcatgctgcagaagcaacttgagattcgaagcgaagagaggaaatttagtctcaaatctgctgatgctgcacacaaacagcatcttgagaatgtaaagaagataaccaaacttgaatcagaatgccagagactgcgttcaatggtacgcaaacgattaccaggtcactagtgcg

SEQ ID NO: 19038 - DNA, 503 bp, Setaria italica
  Peptide Sequence Number=SeqID_85012
aaattaaaccctttactttaatacttaccaatagaaataacttgatctgtgttcaatcggatgtgcttatggctgattaatttcgtatactatctttcttgaattatgactaataaagttaaacaagggatgtattttttccaccatttttacattaaattcttattggagtatttctgtctattttgttatctattgaatttatctttaaggatcatattcatggtctggagccaacacttttccctgtttattttgcatttatatagcttataccttgtgtaaagtaaaaaaattctgccttgcagatttgtcactgtgacattaactggccagtcttccttgccatctgcagatggtcaagttcgacttgaaaagcttttggggactgagcctggggacttttctgtcaactgggagagctctaaaggcccaggacggaagggcctttcggctccaagaaaaagactaagacaaaaacaattagggaaataccaattaga

SEQ ID NO: 19039 - DNA, 679 bp, Setaria italica
  Peptide Sequence Number=SeqID_85013
ttgtggaccaggttgatatgttatgctttcaaccaatgcacactcgagactgttctcaggtacaacgccttgcatctatttatcaattgaagagcggatgtcaaggttcagggaagaagaggtaacttatttggggagggtcatataatcatatatgatcttgtcatataatatttcataaaccctagtaatacttttttatggttataaattgggagttatgttcatggcaatgcactctttccatttttaatatgttaaaagtccttgagatttatgttgcagcgcagtgaagaggacaccgatcacacatatcactgcatgtgagtttatccctggtcagaaccatggggatttactgcaagcctgcaaggatagtgaattcacagaacatttttgcattgaaagtggtcatgcactaacggaaagggttcctgagcaggctaccatccctgcttacaccttactaattcacaaataaccatttatgattttacttttactacatcatcttaagtcaactcttgaggtaggaaggtgcatgacttctcctgcaatgagccgttcatcctgtgtggatgatggtaaagggtttagtggcttactcaaaccactccctttgttgcatgggcactgatacggaaaatatgacgctgacattcttgtcgtgttcattgtg

SEQ ID NO: 19040 - DNA, 524 bp, Setaria italica
  Peptide Sequence Number=SeqID_85014
tagggatgtaccaagtatgagagtgatgggactggaggatatgttcatggtgaaggatgtacggatggcaaacaggtcaaggaaggggtcgaagacaggatcatcatcctctcagctctcacggtcctggcccaatgagggtaggaagagcaaaaagtatcatagtgtgccaggtgaaaaaaagaagcataggaaggaactcattgcaaagaagcgtcagcaaagaatgctaagtagaggagttgacctggggcaaataaatacgaaattgaggaaaatggttgtggaccaggttgatatgttatgctttcaaccaatgcacactcgagactgttctcaggtacaacgccttgcatctatttatcaattgaagagcggatgtcaaggttcagggaagaagagatttgtcactgtgacattaactggccagtcttccttgccatctgcagatggtcaagttcgacttgaaaagctttttggggactgagcctggggacttttctgtcaactgggagagctctaaa

SEQ ID NO: 19041 - DNA, 2761 bp, Setaria italica
  Peptide Sequence Number=SeqID_85015
tgggtcgtagtgcagggcggaggtggccggcgcggcggctccaccgcggatggcgactcctcccacgccgtcccgttcagctacccatctctccgcccgggctccgcccactccgagcgggaagcgcaggcgctggaggtcaccatcgacaccgccccctgcgccgatccggccgcctccgtcccggtgtactcgtaccgccccgagttcgtcggcggcctcgggctcgggtttcacgaggacgaggatgcggacgaggagggggccggtgaggctgtacatctcgggctaggattccgggatggcggcaacgcggcgatggacctcgaattggaggagctggaggaggaagatgcttccttcaagacgcccaagcggaagccgcagcagaaggcgaatcgcaatccgggatttttgtcgattgggggagtcaggatctacacggaggacatctcatcgccggaatcggaggggatgagcggctccgatgaggattcagagtccgaatcaggtgacggggagagatttgagaatgatgatggcgaaagtgacgaggaaggtagtgaggatgaggaggggggctcggagatcgatggtgaatcattagggtcagattcagatgaggatttgagcattggggattcctcttcagttgatgatgaggttgtcgctgattacatggaggggatcggtgggagtgaggagctattgagcagcaagtggatcgctggtatgaatttgggtgataccgatcctgcagagcagatggatacagatgacgatgatgatgatgaggatgggttcctgaagaaggggaaggaaaagcttgagggctatgcactaatgactgcatctgagcagtatgggatgaagaggccaaactcggccgaacggcggaagggaaaaggaatggtttgtgatagggatgtaccaagtatgagagtgatgggactggaggatatgttcatggtgaaggatgtacggatggcaaacaggtcaaggaaggggtcgaagacaggatcatcatcctctcagctctcacggtcctggcccaatgagggtaggaagagcaaaaagtatcatagtgtgccaggtgaaaaaaagagcataggaaggaactcattgcaaagaagcgtcagcaaagaatgctaagtagaggagttgacctgggtttcttatacattgcagataaattccttaagaatgacttttctatgttaccatgttgcttttctgttgtttggttatgcacatagtatcatttgatctctttttacattttattgcatgaaatgtggttagtggtcacctctgatctgtttttgtgatactaatagctaatcttttattttagtattcatagaagctcttttgatgagtggtttgttgctttttctgtctgcagaaattgaggaaaatggttgtggaccaggttgatatgttatgctttcaaccaatgcacactcgagactgttctcaggtacaacgccttgcatctatttatcaattgaagagcggatgtcaaggttcagggaagaagagatttgtcactgtgacattaactggccagtcttccttgccatctgcagatggtcaagttcgacttgaaaagcttttggggactgagcctggggacttttctgtcaactgggagagctctaaaggcccaggacggaagggcctttcggctccagaaaagctagcaaaacattgggaatccattggaaagaaatcatcttccaagaaacaggtctcctttgccgagcgtcctgtatcttttgtttcgtgtggcaccatggcagaatctgttacagagacaatagctgttgactcaagtggtggtcatacctcacctgggaaagctgctgaaagcaacaccaccgagctgggctcctttgaggtgcacaccaagggctttggttcgaaaatgatggcaaaaatgggattcattgagggcactggccttggcaaagatggccaaggtatagtgcagccaatacaagccatccatcgtcccaaatctcttggactcggtgtagaattcaacagtgaggctgaggcaatcaaggcaaggacagaacccatgaaagcaagatcagagccaagtaaagtgaggccagagctgaggcggaatgtgcgggcactggagactagtggtgttggctccttcgagagacacacaaagggttttggatccaaaatgatggcaaaaatggggtttgttccaggctctgggctggggagggatggccagggcattcccacccccttgactgcggtaaggcgacctaagtcacagggactgggagccaaggataaatattaacctataccatttcgctttcaatgtatccttcttgttgtgtacctgttacaggcgtttgccttagatcacatcggtgttcgctgggagagcgcaaacccttggaacaccctgagatggtgaaacgggttttgacgcccctagcggtagcacaggaattaccttctgttgacattacttttcacctgtttctttcaacctctgatggaaatttcatttattttgttctttcgaagttgagtcatctggttgttttgggtactgtgccgtgtacaagcgtctgcaactgtatttcttatgtgtagagcgttgcttctcatcctggattctcaatctggtaatagtgctctgtacttgtcggttaaggttcgttacctttaagtttcttacttagtaggtagttaggactaccttacgaagaagaacaacaacaaaaga

SEQ ID NO: 19042 - DNA, 365 bp, Setaria italica
  Peptide Sequence Number=SeqID_85016
ggaggagctctactacgccgggagccacgggatggacatccgagggcccaccgccgaccccaacaaccacggcaaggtaaatttacatcatctcctcatccatccttgcaagcaacaaggttttactacggtgaaaacgacacgcttaagcttcttcctcctcgagctgtttcactgatggagcctctcctctccgtgtggttgattgaccaggaccaggaggctaagtcggtgctctgccagccggcggccgagttcctgccggtgatcgaggaggcgtacgccgcgctggtggggagcgtggaggcgtcgatcccgggcgccaaggtggagaacaacaagttctgcctgtcggtgcacttccg

SEQ ID NO: 19043 - DNA, 306 bp, Setaria italica
  Peptide Sequence Number=SeqID_85017
gatcgtgagcgggaggtgcagagacaaggtgttcaacttcgtgaagctggcggagctgtactacgccgggagccacggcatggacatcaaggggcccacggcgcagtccaagcacgccaaggcaaaggccgaagctgttctgtgccaaccggcgagcgagttcctgccggtcatcgacgaggtgtgccgcgcgctgacggccacgacggcggcgatccccggcgcgagggtggagaacaacaagttctgcctctccgtccacttccgctgcgtccaggaggagaaatggcgtgctttggaggagca

SEQ ID NO: 19044 - DNA, 366 bp, Setaria italica
  Peptide Sequence Number=SeqID_85018
cggcgatcgtcagcgggcgctgccgcgacaaggtgttcgagttcgtgaagctggcggagctgtactacgccggcagccacggcatggacatcaagggccccgtgaaaggctcccggcacactaaggccgccaaggccaaaggcgttctctttcagccggccagccagttcctgcccatgatagagcaggtgcacgaatctctggtggagaagaccaagagcatacctggggccaaggtggagaacaacaagttctgtgtctctgtccacttcagatgcgtcgacgagaagagctggagcgcattggcggacacggtgaagtcggtgctcaaggactacccgaagctgaagctgacgcaggggcgga

SEQ ID NO: 19045 - DNA, 308 bp, Setaria italica
  Peptide Sequence Number=SeqID_85019
ccccgatcgtcgaggaccccgaccgcgccgtcatgaccgacgaggtgcgttatcctctgttcatcttcctcctcctcgcatctgactagcatgcataggaaagcagagcatgctctgctgcccaaagcattttggcatccatcctctgacgccgaccctgtcaaactctggacgcagatgagggaggccgttcgcggcgtggcggcgcgcttcccgacggcgatcgtcagcgggcgttgccgtgacaaggtacacacacatttctcttcctcgctgaaaagtccgtccctttcctcggcctctcaccg

SEQ ID NO: 19046 - DNA, 625 bp, Setaria italica
  Peptide Sequence Number=SeqID_85020
ctcgaacttgccgagcgccgacgggtgcttcctcatccaggcggtgaactcgtcgacatcggcggcggcgcgggagcgggcgctgccgcgacaaggtgcggaatttcgtcggcctctcggagctctactacgccggcagccatggcatggacatcaagggaccaaacaagcaggcgaaaggagtcctgttccaaccggcgagcgagttcctgcccatgatagaggaggtgcacgagcgccttgccgagacgacgcgctgcatccccggggccaaggtggagaacaacaagttctgcgtgtccgtccacttcagatgcgtcgacgaaaaggttcgttgcgtgcgtggccgcaaatggccgtcgctttctcatcccatcctgccgttttcagctttttcatggagaccccacccccactgcattatcatctctggcaaatggcaactccgatccaaaatccacgcataaagcttctttcacctgcgcacgcacgtcgacgccaacgccacctgaacccatcgtcgagatcaccagctcgacgtctcagcctgattcttctggtggcacattgacttatgagggacgctttgagttgctgtccttatctgggtccttcatgccaaccg

SEQ ID NO: 19047 - DNA, 1188 bp, Setaria italica
  Peptide Sequence Number=SeqID_85021
gtagccatcagtgaccatgcaaagcacggcgtggtgctcggccccgaggacgccgtcgtcgcggcggcggcgcggcatttctcgttcccgccgccgaggacggggggcggactcgtgccggaagctggcggcgcaggtcgacctcggcgccgctgtgatggggtcctggctcgactccatgaaggcctcctcacccaggcacaggctcatggcgcccctggccggcgccgccgacgcggagcacgacgactggatggagcggcacccgtcggcattggagcggttcgaggcgctggcggcggcggccaaggggaagcaggtcgcggtgttcctggactacgacggcacgctgtccccgatcgtcgaggaccccgaccgcgccgtcatgaccgacgagatgagggaggccgttcgcggcgtggcggcgcgcttcccgacggcgatcgtcagcgggcgttgccgtgacaaggtgttcggcttcgtggggctggaggagctctactacgccgggagccacgggatggacatccgagggcccaccgccgaccccaacaaccacggcaaggaccaggaggctaagtcggtgctctgccagccggcggccgagttcctgccggtgatcgaggaggcgtacgccgcgctggtggggagcgtggaggcgtcgatcccgggcgccaaggtggagaacaacaagttctgcctgtcggtgcacttccgctgcgtggaggaggctgcctggggcgcgctcttcgagcgggtccgggccgtgctccgggactacccgggcctccgcctcacccagggccgcaaggtgctcgaggtccggcccatgatcaagtgggacaagggcaaggccctcgagttcctcctcgacgcgctcggctacgcggagcgcagcgacgtgttccccgtctacgtcggagacgaccgcaccgacgaggacgccttcaaggtgctgcgcagccggggacagggcgctgggatcctcgtgtccaggttccccaaggaaaccgccgcgtctttctccctccgcgacccggccgaggtcagggacttcctgcgcaggctcgtcgacgccaacgccacctgaacccatcgtcgagatcaccagctcgaacgtactaaactacgaatacggaacggaactaaaccaaacctaaccctaaccctaaccctaaaccaaagaaa

SEQ ID NO: 19048 - DNA, 859 bp, Setaria italica
  Peptide Sequence Number=SeqID_85022
ggtgttacatcggtgacgaccgcaccgacgaggacgctttcaaggtgctgaggaagaggggtcaaggcctcggcatcctcgtctccaagtgtcccaaggagacgaacgcctcctactccctgcaggacccgggcgaggtcatggacttcctgctccggctggtggagtggaagcgcaagtcatcgccgccgccgccgccgccgataatgatccggccgcgggtgtagctatctcagcagcagccggtcggtcggcggcgggtcgactagtcaatcgatggaccgatcgaatcggtgtccaatcatgcgaacataccccaccaccaccaaattccgcctcccccccctccctctctctaacgattcttagcccttgttgtggcctccgaaacggactcgtggtggttgctgcattacacgcatgttatgttcttcgattccctggccgggggccccccgtgctgcggccgcgccaccgaggaaaaagaggccacacacacaacaacacaaactccctccgccgcctgtgcatgctcccgtcactggaaaatgccggagcatgttgtggtggtgccactgtctaatacagtaaccatgtctactccgattccccggcaatgtaccactagtagtaccccctccccgtgttatttttgtctcccgtcgcctccccatgggtttggaaggcatctgcgaagctacctgccgtcctagaagagaagaacctttgcaagaaagagaaggttcccttcaccccatgtaactagtagctttatatatatattattcttctacctaggcactgttgttctttgtaccatctgtgtaaaatgtagtaaaagtaagatccaagtaatggg

SEQ ID NO: 19049 - DNA, 584 bp, Setaria italica
  Peptide Sequence Number=SeqID_85023
taagttgggtactaaaggtctaaggtcccttcgtagtttccttccttcgtagttcgtcttcggtctttcgtccgtacttgtcgtccgtactccgactgcaccaacgtcctgcccgtctacatcggcgacgaccgcaccgacgaggacgccttcaaggtcctccggcggcgggggcagggcgtggggatcctggtgtccaagcaccccaaggagacgagcgccaactactcgctccaggagccggccgaggtgatggagttcctgctgcgcctcgtggagtggaagcgcctctccaggtctagggccaggctcatgagtctgcaatgacacgacgcacgcggctggttcttgtgaccgtggacaatgcgggcggcggatgcaaagctgattgcgagatggtgctttgtgccagtagatatcggatctagcactgtttgtactttgtaccgtctcgttgagtgcgacttctctgttttcctctcccttcttttttcccccgggggccctaagggctgtataacgagcatgtacattatgtagctaatgctatatatacaagaggagaagaatcaagtaaccaaaaa

SEQ ID NO: 19050 - DNA, 824 bp, Setaria italica
  Peptide Sequence Number=SeqID_85024
acacgcccgcctccgcggtcggcgccgctatgaagcgcgggaggggccggcccctcgacttcgccgcggcggcggcggcgggcaaacagcaccagcatcaccagctccaccaccaccaccagccgttcggcttccacttcgactcgatcggtgacatggtggcttgttctgctggtgcaaatttcactccacatataattactgtcgcccctggtgaggatgtgacaatgaaggttatatcgttttcacaacaaggaccacgggctatatgtattctctctgccaatggcgtgatatcaaatgttacactccgtcagcctgattcttctggtggcacattgacttatgagggacgctttgagttgctgtccttatctgggtccttcatgccaaccgaaaatagtggaacacgaagtcgatctggtgggatgagtgtgtctctcgccagcccagacggtcgtgtcgtcggtggtggagttgccgggctcctggtggcagcaagccctgttcagattgtcgtggggagcttcctgccaagctatcagctggagcagaagaacaagaagccgcgggtggacccggcacccaccctcccccagacccctcccgccattccaatctcaagcgtggacacccacagcggcgagcaagggcagcacagctccgcggcccatcagagaacagtgaacgtcgtgacctcagcgtacggagcggaccagagctgggcgtcccctgcccagcccacacccgaggcgtccaggacgccgtcaggcgatcagaagacgaccgcctctggatcctgaacctgaaacgtccagtcagag

SEQ ID NO: 19051 - DNA, 1027 bp, Setaria italica
  Peptide Sequence Number=SeqID_85025
ccatgcgcgcctcgtccccgacccgctcccgcgcgcgccgccgccgatgtcgacgagttcaccgcctggatgatgaagcacccgtcggcgctcggcaagttcgagcagattgccggctcatccaaggggaagaagatcgtcatgttcctggactacgacggcacgctctcccccatcgtcgccgaccccgacgccgcctacatgagcgacgcgatgaggtcggcggtgcgcgacgtcgccaagtacttcccgacggcgatcgtcagcgggcgctgccgcgacaaggtgcggaatttcgtcggcctctcggagctctactacgccggcagccatggcatggacatcaagggaccaagctccaatcccgagtcggtcctgtgccaacctgcaagcgagttcctccccgtgatcgacgaggtgtacaagttgctggtggaaaagacgaagtccacacctggagccaaggtggagaacaacaagttctgcctgtccgtgcacttcagatgtgtagatgaaaagagatggaatgctttggccgagcaagtcaaggcggtgatcaaggactacccgaagctgaagctgacgcaagggcggaaggttctcgaggtccgtccgagcatcatgtgggacaagggcaaggccttggagtttctgctcgaatcgctcggcttcgccgagcgcagcgacgtgttccccgtctacgtcggcgacgaccgcaccgacgaggacgccttcaaggtgctgcgcagccggggacagggcgctgggatcctcgtgtccaggttccccaaggaaaccgccgcgtctttctccctccgcgacccggccgaggtcagggacttcctgcgcaggctcgtcgacgccaacgccacctgaacccatcgtcgagatcaccagctcgacgtctaactcgatcggcggctaccacctccctccctccctccagagcggaagaaaacgctcttcagcttgttaggagaagaagagcgtcgttcatagaacctgctagcgttttcccatgtccccg

SEQ ID NO: 19052 - DNA, 1070 bp, Setaria italica
  misc_feature (9)..(9): n is a, c, g, or t
  Peptide Sequence Number=SeqID_85026
cgttacaanaattactacgcgcgcctctctgctcacacgtatgtgttgattgtatcgtcgacgaccccgaccgcgcgccgatcagatgcggatggccgtgcgcagcgtcgccaagcacttcccgacggcgatcgtgagcggccggtgccgagacaaggtgtttgagttcgtgaagctggcggagctgtactacgccggcagccacggcatggacataaagggcccggccaaggcctcttcccggcacgcaaaggccaagcaggcgaaaggagtcctgttccaaccggcgagcgagttcctgcccatgatagaggaggtgcacgagcgccttgccgagacgacgcgctgcatccccggggccaaggtggagaacaacaagttctgcgtgtccgtccacttcagatgcgtcgacgaaaagatgtggggcgaggtctcggaggcggtgaagggcgtgctgcgggagtaccccaagctgcggctgacgctagggcggatggtgctggaggtccggcccaccatcaagtgggacaagggcaaggccctcgagttcctgctcgagtcgctcggcttcgccgactgcaccgacgtcctccccgtctacatcggcgacgaccgcaccgacgaggacgccttcaaggtgctccgcaggcggggccagggcgtcggcatcctcgtctccaagcaccccaaggacacctccgcctcctactccctgcaggagcccgccgaggtgatggagttcctgctccggctcgtcgagtgggagcgcctctccaaggcccgccccaagtggtgatcggcggcggcgaccgccgccggcgccgatcgcgaggagatcggccgatcgattgccagacggatttggtatatatattatatatatacatcttctctttgatgattaaattagaagaagggagggagccggccggccggccggcgtataaggttcgttgcgtgcgtggccgcaaatggccgtcgctttctcatcccatcctgccgttttcagctttttcatggacgacccccacccccatgcattatcatctctggcaaatggcaactccgat

SEQ ID NO: 19053 - DNA, 715 bp, Setaria italica
  Peptide Sequence Number=SeqID_85027
gagtcgctgagccaggtggcggcggtgctgggcacgcagtggggcgacgagggcaaggggaagctcgtcgacatcctcgcgcagcgcttcgacgtcgttgctcggtgccagggtggagctaacgctggacataccatatacaattctgaagggaagaagttttcacttcatcttgttccgtcaggcatccttaatgagaacacacagtgtgtaatcggtaatggagcagtcgttcatcttcctggattctttaaagaaattgatgggctagagtctaatggaatttcttgcgaaggaagacttttggtatcagaccgtgctcatcttttgtttgatcttcatcaaattgttgatggacttagagaggcagagcttgggaattcccttatagggacaacaaggagaggaattggaccatgctattcaagcaaagttatcaggaatggactcagagttagtgatctgcgacatatggatacctttggtgcaaaactcaacaccctactaagagatgcagctatgcgctttaaagattttgaatatgataacaagattctcaaagaggaggttgagaagtataaaaagtttgctgaacgattggaaccttttattactgataccgtgcatttcatgaatgagtcgatcttgcagaagaagtaactattgggtaggtaccaaagtctatgtctaacatggtagcttgaccaccttcaac

SEQ ID NO: 19054 - DNA, 237 bp, Setaria italica
  Peptide Sequence Number=SeqID_85028
caacaaggaggatcttgcaacggcgacatctgatcaagaactcgatgctggaaattctgtgggcgaaggagggacagcaaaggcagtgccggcacaaggagaaagaagcacaggaggatccggtatgcatccctgatctcattgtgaattagtttggagatgctactaatgcaggtcacactgtctatactttttttgttgttgtttggactcacatctagaacctgtcaaatactg

SEQ ID NO: 19055 - DNA, 938 bp, Setaria italica
  Peptide Sequence Number=SeqID_85029
gatttcagaaccactgctataatcaacttctgaatcactgaatgagctttcatctcccccatatccatttgaatatgcagaagatagtaaagaatcatccctttgatgacagccatcttgccagcgctgcacgataccatgcactagtcctgaagatcctacagtcgcatggttataatctactgatccattaagaccatttcggttaattaactgaaatgaatttaccctggagatcagctttgcctttgatataccaggcttccctggggtaggcctcaaaagtactattctacttggctgagacggtatttcttcctttgaactaggaatctggtggaactttctcatgctcaatacattttgcttactaacttgttctgttctggattgctttatgccatcagtctcaacagatttaattggcttcagcaccgtaatacgctttgtctgaggtggtgcttggtttgtgtgaagcccattcggctgttttgagaaagaggagttatgttcttcaggattttgaagaaataaatctttatttgaatgtggaacttcaagagcttcttgtaactcttttgtatgaaggagcttctcttccatggcaaagcattttggtttaatgaacttctcttgcacaatatcaaattgcttactcttggtctcagaaggccatcctttcagagaagtttgatcttgaaaacagcttgttcctgatcgatgttcagatacttcataaacatcattatattcaattgtttcatcacgcaattggtgatcttgtgtcttcaatcttatggactgacggtgctctttcccatgtaaggtttgttgatgcatttgaatctctagtcaagtcaattttggatggcatacaattggttcttcggtaggtaaatcctcctcaagacccattacgcctgccaatgacacttgga

SEQ ID NO: 19056 - DNA, 1363 bp, Setaria italica
  Peptide Sequence Number=SeqID_85030
actaaacaaaatatttcgtagttttccttgagaacttgttggaatctacagtatatttcatccgattcccagtgtgttatcaattatcatatacatgagcagctccaccatctacaaagagcgcagggagaatggactcctgcaagtggcaacagcctgcagtgctgatggaataggcagctcattactgatgagctgatgaccatcatgttataactgcacagcaaaacttgggcccgactgcctacttttgcatccctctcactgtcatttaggcctaaaatctatatacctatgtatgtggccccaactggtcttacaccgtgtagaagatcatggcttcaggccccgataccgatgaacttcagaaggctgttgttggggtctctccagtaaaagccacggatgaacatgggcaggatgttgcatgccaccaacacatatatcatcagggcgtgcttccccatccactccatggtaatggtaggtcttctaaacccgtacacgtccaccagagtgtatattccagcaaaaaggagccccgcagcaccagcagtagccaaagtgtagcttatcgtgtatagtggtttattcatgcgcattccaacgaagtccattaagaaggctactgctagcatgctgaaggaagggatcagccaattggtgattcttccccggtgtttctcaaaatggataattatatgcccaaattgcagaccaatcaagcaagtgacaattgccatgacagagctcaggaggccttcaggatcaaatggcgcctggcaccatgatggagcatctggtggtagcggtccattctctggataatttatactgcattccttcgtacgtgcgtaaacaggccgtctgtagagatgatcgatccctaaaattgtacggtcaaccattccaactgcattgcaagccggtccagtatctcctctgactccacatttcacagagaatgacttctctatggaaccaggacctgatatctgataatcccagtccggaacatatattccatataaaagaacagtatatgtgaaagaaaggaccaatcctacaaacagttggtagcggtatctcctgagcaaatcaagtccagaatctacatcatcatctcccttgagccaaatctcacatattgcagcaaggagataggctatcgcgatcctctgaagtattcccatcaaccgtattttcgccagatcaacaccgaaactgagactgtgaacaccatgaaaaaatccaccttggagaacgagaccaaggcagaataacttgagggctcgaaatgccgctttcttagttgcctccaatttgtctggcacacgcttgtacgctaagtgttaagtagaca

SEQ ID NO: 19057 - DNA, 564 bp, Setaria italica
  Peptide Sequence Number=SeqID_85031
gttgatgaagtcgttggcgcccatggccaccacgtactggccctcgccgaagaacttgtccgccgccgcgccgccgatcttctcgcgcatgaacgcctgcgtgccctggaacagctcgatctgcttgtacagcgagaacctctggatgaagagggaggacgtctcgttgaggatgccgccgccgccggaggcgtagttgacgccgttcttgaagatggtgtcggcgtccagcgaggggtcgaggaacgctggggggcgcgggaggcccatcttgtcgccgacgatgtcggcgacggtgcggccgttgcagaacctgccgttgggcatgccgcggccgaagtcgatgccgtaccacggcgtcgcggcgcgggcgaggctcttggtcaggtagttgttgttgcccacgtccgacagcgagtcgccgaagatgaactgcaccacgtcgccgcggcacagccccaccaggagcagcgccacggcaagggccacggccagcggcttcctctcgcgagccattgccgtcggttgctggtcggtcttgcaaaggctctgtttctcgaggtc

SEQ ID NO: 19058 - DNA, 885 bp, Setaria italica
  Peptide Sequence Number=SeqID_85032
aattgccttgcggaagttcctgaagcaaatgcttactggaacagtgagaaggaagaagcccaaaagcatgattcagttgatatatctattgctgttgccacagagaagggcctgatgactccaattataagaaatgcagatcaaaagactatatcagcaatatcctcagaggttaagcagctagctgagaaggcaagagctgggaaacttgcacctaatgaatttcagggggggactttcagcatctcaaatcttgggatgtaccccgtggaccatttttgtgcgatcattaatcctccacagtccggtatcttagctgttggtagaggtaacaaggttgttgagcctgttgtggacagtgatggaaatgagaaggctgctgcagttacaaaaatgagcttgacgctgtctgctgaccatcgtgtgtttgatgggcaagtaggaggcaagtttttcacggagctggcatcgaatttcagcgacattaggagactgctactgtaaatggaaggatgtggatgtcgtgttttgaagaattctttttggcaatgctgctcaagaaaaggagaacattgagatgcaactcggggctcagttgcttgatcgacagcccatacaaaagtaaccaattttgtaataattctaataagaaagaattagcacctccagagtgtttttttcccttttaacgttagttgggaggaggcaaggcatgtcctgagaattgacagatacggtgccacatttcatgtttaacgtggttctgcaacattgatccttgatgaggtttcctgcgtcttaagcagatctcgtgtttcctgtggatttcgggcggagacattagatggactcagcgctattttgttcatgatacatggaagtaat

SEQ ID NO: 19059 - DNA, 1558 bp, Setaria italica
  Peptide Sequence Number=SeqID_85033
aaacttgcctcctacttgcccatcaaacacacgatggtcagcagacagcgtcaagctcatttttgtaactgcagcagccttctcatttccatcactgtccacaacaggctcaacaaccttgttacctctaccaacagctaagataccggactgtggaggattaatgatcgcacaaaaatggtccacggggtacatcccaagatttgagatgctgaaagtccccccctgaaattcattaggtgcaagtttcccagctcttgccttctcagctagctgcttaacctctgaggatattgctgatatagtcttttgatctgcatttcttataattggagtcatcaggcccttctctgtggcaacagcaatagatatatcaactgaatcatgcttttgggcttcttccttctcactgttccagtaagcatttgcttcaggaacgttccgcaaggcaattgccacagcttttatgatgatatcatttactgaaactttaatgccatgttgctctttcagttcgctcctgaaagcgagcaagggatcaagtacaacatctttggatagatataaatgaggagtcgtctgttttgattcaatcaacctttttgcaataaccttacgtatctgactattcagaatatcttcatatgtatcagccttttgtgaagtagtggctggttgagcctgggaatcatgagttggctgagatgaaggtgccgctggagccttcttttctttggctgagcttgaaactgcacctgacttcagtgcagccagaacatcccctttcagaagggtgccacggggacctgatgctctcagtgatgacatatccagtccatgttccttgataagtaacttagctgccggactgattcggctcactactgagctttgttcagacacactagttacatcagtttgtggtgcactttctgttgactgctcttccttttgttcacctccgaaggatgtatcagctggtatgcttttaatatcatcaagctcttcaaccgtgacagcaatgggttgtccaacctgaacatcctttgaaccttcaggtgctaaaattttggccagatacccctcttcaaggctttcaaattcaagagtggctttatcagtttctatctcgcatatcacatcaccaacctctatcttgtctccttcctgttttctccatttcgcaatgttaccttggttcatagtaggggacagtgctggcatcccaaccaccagatgtggaggaagccctgttgaggagaaccaacgggttggcaagggaaccttgtaatgttcaaccattgatgctaggagtgatggccttaaggaagcacatcgcccagcctcggctaaggaaccccttgcgcgcgacaagccgaccagaagcgcacggatgtttgccatcttcccaaattcgctgggacgggcggatctccaacacctctagaccgggagtggcgccgcggccggtggccggaggatcagggagggagggagggaggggaggtagggaagggacccgcggcgcgggcggaggagggttcggcggcggaaagag

SEQ ID NO: 19060 - DNA, 128 bp, Setaria italica
  Peptide Sequence Number=SeqID_85034
tagccacgcacaaagcgggcgcaatcctcctgtctcaccttcgttccacgcaaacttttctcctcaatcctcatcgtcttcccccccttctatctccagtcgctacctgttcataccctctctctctc

SEQ ID NO: 19061 - DNA, 539 bp, Setaria italica
  Peptide Sequence Number=SeqID_85035
cctcatggactgctgctgccgcgcgcgccgcccggacctagcgtttgccttcttcggccgacttctccaaacgggcctgggaatccaactcatcacattcaccagcctcctcaagggtctctgcgatgcaaagcggacggatgaggctctggacgtgctgctctgcaggatgcctgagcttgggtgcgtgcccaatgttatctcctactctgttcttctgaagagtttctgcagtgagaagaaaagccagcgagcggttgagctgctccagatcatggccaaagaaggaggtgtttgctcgcccaacgtggtatcatataacacggtcatcgatggtctctttaaggagggtgaagtagctaaagcatgtgatctgttccatgagatggtgcagcaggggatttcacctgatgtgatgacttacagctctattattcgtgcactgggcaaggccagagcaatggataaggcagagatgttcttccgacagatggttgataaaggggttcaaccggacatttttatctacactaacttaa

SEQ ID NO: 19062 - DNA, 1909 bp, Setaria italica
  Peptide Sequence Number=SeqID_85036
taggttgcaagtgtaagagcttattcctaagcataagcaggctgtgaaagaggtgattgagaactatcctggactatcatctgaagtcccacctgtctctgcactggaagagcaagttctttcatacttccgcacagctaaagatatggaagaatcttctagtccattccgcgatgctgcagttactcagaccccagctgttgaaactgcccctgtggatgcacctacttcagctgcaggtcgaccggtagatactccaccaaggctgactaaacctaaaatgatggaagatagagcagttgctactttgcccaaaccaagcactgaactacgtagacctggaggaagaagacctcttgtgcgtcctactcttgaacgaactgaagaaccacaggctgatacggatacatcagctgttgatgtctcgatggttggtcaggacaaaggtggctcgtcactagagcgtgaagcttctggcagtttacctgtgtcacagccttcaagtcgtaaacgtctcatatcgtctgcgcaaacaatagacagtgccgcacaaggtgaggctaatgatgccaaccctccatctaagaagcccaaggaggaagaagcttcgcaagggactagcgagctcaaaagtggccaaccacctgttggggatgtatcgacacatgttggtgtgcttccatccactgatgaccaagatgggcaacaatctacagaagagatggacgctgatcaggcatccacaccaatggaagaggttgaggcaacaaaggatgatgacatgggtgataaagatgactctggagcacatgtggatgcatcattggacactaaaggccaggatgctgatgttagtattgaaataaacgcggttcccgtagaagatgtgctggcaaagtcagatgcattagttgaatcatttgatgatgaccagaaaattgaagacttgaaggaagatgctcagcttactactgcaactgatgttgacgatgagatggaggagggagagttaccggaggaacctgaacaacctttagaaagtgcacttggagaaactaatagggagcctacttcggatattggtgagcaagctgggaatgttttcagggcagcatctccaggaatgctgacagagaagagtgatgttgatgtgtcagaggttgagggtgatactacggctgaacatgctgcagtggaaccagaccaaagtccggtagcacaatcaggaactgctgattcaccaagcagagctgctgacgcatctcccgcacgtgaaccttcccctaatccagtccaagctggagcattttctcgaccacagaataccagcactacaacagaggcacgtgaaccttcctctaacccagcccaagctggtgcatcttctgaaccacggaataccagtactgtaacagaggctactgaaactcgttccagaacaatcaacttaactgagagggccagacaaaataggcaaaccaggtttcaacaacgtgcacaacaacccgccactgccaggggtcgtgggcagctaacccagaggaaagatgctgctggccgaggatccagggggcgcggggggcgtcagacttaggaaagtaggatgtctttgtcgagagcagggatacgttcctccacggggatactgaaataaccttgtaattttgatagttaaatgcctttttgtgcaccaatattcggaccatatatgcatgcagattgttctgcgaatttttatgtggctgatcctgattgacccctactaaatgtgccttaactgaatccctctgccttatatggtcttgtttagtttggtggggttgaacagcatcggagacgattgaggtggattgcgtcggttaagagattttgttctgcagcagcttataaactttaaaaaaaaaaaaaa

SEQ ID NO: 19063 - DNA, 547 bp, Setaria italica
  Peptide Sequence Number=SeqID_85037
ctttcctcggtggtcgtttgctttcgccgagtcccggagtcctcaactcctgatcctgactcgtcccaaccggccaggcggaacctgctgcttcgagcggaagaatccaacgatcaactcgggagatctccggagctactccaatccctccaaaatgaagatagcctggggtaagaatgccaagacgaagaggcagccagtggtagtgtcaactaaaccaggcctaccatttggagtggagagtgacaccgaagaggccgaaaaggatgaaactgcaggggcaaacacaaactgtcctggagcaaagccacttgacactgctgagtcgctccagcatcaaggagacaagctagccgaggaagggaagtaccatgaagcacttagtaggtgggaggctgctcttaccttggcacctgataatgcagtactttatgaacagaaagctcaggttttactcgaagtgggagacgcatggcatgcactgacagcaggaaccagagcaacagaactggatccggctatggcccgaggctgggtcacacttggt

SEQ ID NO: 19064 - DNA, 312 bp, Setaria italica
  Peptide Sequence Number=SeqID_85038
tagctgcacgtccctccggcacccgctggacaactgcgactggttcacggggctgaactcctggacgcagctgcaggacggcgtgggcgcggcgtcgacgcggcacaggccgaacgccccgcatgacgcgtactcgtcgcaggcgtcgcgtggcaaccacgggtatggtctccacaccttgcttgtcggaaaccacaccagcacccgcaccttgccgacctcgtccagaacgacgcgggcggagagcgcgccggccgtggcgttgagggcgtaggtgacctcgccggggtcgtccaccatctggacggagaa

SEQ ID NO: 19065 - DNA, 902 bp, Setaria italica
  Peptide Sequence Number=SeqID_85039
ggaaacaaaattcgtgccagaaatattcagtttcacggatccttcgactcaagatactgggacaggctaggtgaagaatgggcaagccctgtgcctgaatatgaaagtgcatactcttctatattctctaacctgtaaagataattgaccatgatacctccactttgttgaatgcccttctctgattggtcagccatccagtttattctctcaatcattgctccgttttgcaagtgaaaatttgcaacagcatctagagcttttcctctgattttctctctggcaagataccttgcacacaaacgcattagaggagatttcaacgcagcagataatttttcagactttacccattgacttgttttcagtatatcttgcaatagttcaattccttgtttcccatgagcttgttcaatggcatcatgaatcatcttctcttcctcgggaagaaggatggattctctgaaagtagagctagctccttcgaatgaattcccctcttgcgattctgtctgtgctaattttatttgggaggccagtttagcacgaagccattgcatgaaaccagggattgggctaagtgttgcaaaaatctgtactgaaggcatatctcgtctcaacatgtcaatcacacgcttgagaagaaacttcccagattaatacctgataagccaggctgggtagacgatattgaataaaacagtgcacagctggcttcagattcaggagtcggggggtcatcccacaagacctcctgtatagatgcagccatatctttgtgtaaagcaacttcgatgaaaatcaggggctcccctggtattgctggatggaagtagccaaagcaacggcgaccaacacccaatcttctcttcaagtctatcaggtttctgattggatgcact

SEQ ID NO: 19066 - DNA, 262 bp, Setaria italica
  Peptide Sequence Number=SeqID_85040
gggcggccgatcaggcggtccacggtgctcgccgcgacggagagcatccacggcgcgtcgttgtacagcgtgctggcgccggggccgtggttgccggctgcgatgctgacgaggatgccgttctcgacggcgccgaacgttccgatggcgatggggttctcgtagtacggcacctccggcccgccgccggcaatggatatggagaggacgtcgacgccgtcgcccacggccgcgtcgatgccggcgaggatgtcgtcgccgg

SEQ ID NO: 19067 - DNA, 279 bp, Setaria italica
  Peptide Sequence Number=SeqID_85041
gtggtggtagtagccttccagccccgtgtgggtggcggagtggtaggagaagagcaggaactccgatgtgaacgcagtcgccgccaacaggcacagctcgccgtcggtcagtggtaggtacctggtcttctgggagaggagggcgagcgcgccgaagaggaagaacgtgaggagcatgccgccgtgctcgaaatagatgaggctggccggttcgacgccgccgccgccgccgcggccggcgaagatgccgccgccgagctccaggcacatgtccaggaa

SEQ ID NO: 19068 - DNA, 322 bp, Setaria italica
  Peptide Sequence Number=SeqID_85042
tactggcgacgctgctcaactgcatgctctgggtcttctacggcctccccatcgtccaccccaacagcatccttgtcgtcaccatcaacggcatcgggctcgtcatcgaggccgcgtacctcaccatcttcttcctctactccgacaacaagaagcgcatgagggcgttcctcgtcctggccgtggagatcgtgttcatggtcatcgtggtgctctcggtgctcctggccgcgcacacccacgagaagcgctccatgatcgtcggcatcctctgcgtcatctttcggcttcgtcttgtaattagttaacgtaccttacccta

SEQ ID NO: 19069 - DNA, 485 bp, Setaria italica
  Peptide Sequence Number=SeqID_85043
tccactcccgccgcccacccgccgatggcgtccgcgcctgcccccggcgtggtggtggtgttcgacttcgaccgcaccatcatcgactgggacagcgacgactgggtcgtcaccaagctcggcgccgccgacgccttccagcgcctgcgccccaccatgcgctggaaccctctcatggtaacgcccaagagacgtctcctgacttcatcatctgataatctccgcatcgatcgggcaaacgaatgatgatgcccgctgcctctgcttgctctgcttctccttctgcactttctccaggacaggatgatggaaggactgcacgcgcgggggaagacggtggaagacatccgcgactgcctcaggagcgcgccgctcgacgcgcacgtcatctccgcgatcaagacggcggcgtcgttagggtacgccgccctgccgccccatgcggccatgcccatgagttctaggcttgactgtagcatttgcta

SEQ ID NO: 19070 - DNA, 1245 bp, Setaria italica
  Peptide Sequence Number=SeqID_85044
cgccgcccacggcgcgaagtagaagacgcgtcccaccggagaaccgggagagcttgtcctccattcaccatccgtccatccgccgcccaccgccgatggcgtccgcgcctgcccccggcgtggtggtggtgttcgacttcgaccgcaccatcatcgactgggacagcgacgactgggtcgtcaccaagctcggcgccgccgacgccttccagcgcctgcgccccaccatgtgctggaaccctctcatggacaggatgatggaggagctgcacgcgcgggggaagacggtggaagacatccgcgactgcctcaggagcgcgccgctcgacgcgcacgtcatctccgcgatcaagacggcggcgtcgttagggtgtgacctgaaggtggtcagcgacgccaacaccttcttcatcgagaccgtcctggcgcaccacggcgtgctcggctgcttctccgagatcagcaccaacccagcgcgcgtcgacgccgacggcaggctcaggatctcgccgttccacgactccgcgagcgcgccacacgggtgcagcctctgccctgacaacatgtgcaagggcaagataatcgagaagatccaggcaatagccagcaccaaggaccagcatttcatatacattggtgatgggaagggagattactgcccctccctcaagctgggtgaaggggactatgttatgccaaaggagaactaccccctgtggaacctcatctgtagcaacaagcaccttctcaaggctgaagttcatccatggaatagcggcgaggaactggaaaagattctacttgagttggtcaacaggatgatcaccccacctgcacaagtgtccccatttgactgcagcaaatgcgagatgagcaaaccaacatccactgaagtaggccaccatcaggccctccgtgtgccacactgatcagtgattgattcttagtttgcaagtagaggcctgagtgtctgatcatttctgtatgcctccattgatagaagtcctcaagtcttgatagaagtcctcagtctgcattcaaaatgcagcgatttagtagatggataatctgtgtgccattactcaataaactgtagcatgatatcaaaaaatattaatcaacaccgcatttgctgcagtcaaatggggacacaaaaaaaaaaaaaaaaaacaaaaaaaaaaaaaaactaaaaaaacgtaagaaacgtaacgtaaccgaaaccggaaacggaaccaaccgaacggg

SEQ ID NO: 19071 - DNA, 921 bp, Setaria italica
  Peptide Sequence Number=SeqID_85045
tttttagaaagaaacaatagtagtaagcatgggataacaagttaataacgttggtggaatttacagcgacgcgttcaacctggaggataaacgcagttcagtacctaatgctggaactagggcgcagattcaactgcgttcgacgcgccaagcgcaaccagacaggccttgagcaggcagagcagagactatgaacaagagtactacgctaccacagggcacccgcggaatctacacttcggttgaaggaccagctcacgtagagcgcggcggatcactgctggggagggtagacgggcgccgaagcatgccccgggggagcctgctgctgcggcttgatcccccgggtgcgcatgtactgcaggaactgtccaggcagctcctccaggagagattgcacgacggagatctggccaccttggacttccctcatggggacaaactggacgatgtcgcgtgtcgcgatcctcccagtcgagctctccagtcgcttaccgttgtcagcgtccaggatctccatttgttggaaatcagcatttccaacgccgacaatgagaatcgacaatggcaagtctgatgcccttacaatgcaatcttttgtttcttgaatatcagtaagaactccatccgtgataatgagcaggacgaaatatttgttgtttgagtattgaagggactggcttgcaatatctgcagctctgttaatgacaggcccaaacatagttggcccagcaagagaaacggcgtaaaagggaagaggtgtatgctgacatgatgccttcaactccaacaacctcagagtcatttgttgctgtattcaagttaaaacagtgtgatacatgaccctgtgtccttgctccaaaaccccatgcaggaaatcgcctatcattgtcatagaactgcagaacttcgcccacccaa

SEQ ID NO: 19072 - DNA, 667 bp, Setaria italica
  Peptide Sequence Number=SeqID_85046
agacaaggaacgaaaaataattttagtttagttttaggaagttaattaggaaaggggactggcttgcaatatctgcagctctgttaatgacaggcccaaacatagttggcccagcaagagaaacggcgtaaagggaagaggtgtatgctgacatgatgccttcaactccaacaacctcagagtcatttgttgctgtattcaagttaaaacagtgtgatacatgaccctgtgtccttgctccaaaaccccatgcaggaaatcgcctatcattgtcatagaactgcagaacttcgcccacccaagtattgcctgttggtatgaattaggtctgccagaggggtcaatgtagtgtaaggactgaggtacacgggggtcaccatttgaagcagtaaaatccacagccaccataaaattgagctcaaatccactggaaatatagtccaagaaagtatgctggactttctcctgcaactgatccacaaacaattgtcctttcatctttctttgtcccttatggctgtaaaaatttgctccagactttgaggcatataggttttcaagctgtgtaattgttgtctggaatgcccctatcagttcatggttaccactggactcaaaatcaaaacactcaactagcagtgggttatccttgcttccatattgctga

SEQ ID NO: 19073 - DNA, 907 bp, Setaria italica
  Peptide Sequence Number=SeqID_85047
cgcttccggcccggggttccggtcctcgtcctgctgctgatcgccgctgcggcattgccgcgccgggcgctcgcggtcaccgacgccgccgacgtttctgctataaatggactttatgttgcacttgaatcaccaaagctgcctggatggtctgcaagtggtggagatccctgtggtgagagttggcagggtgtcacatgtactggctcaagtataacctcaatagttttcaatgctgcgaatttaggaggacagctaggcagcctggggaaattcacatcaataactgaaataaatcttagcaacaataatatcggtggaactataccggaagatctacctgccacactgcagaatttctttctctcagataaccaactcactggaagcatcccaatgtcattatcaaacctccgcagtctaacagccatgtcactgaatggtaaccatctagatggaaaattgccagatgcatttgattcactaacgggacttgtaaatctggatatttcttccaacaacttcagtggtccattaccaccttcattggggagcttgacatcactgactacattgcacatgcaagataatcaactaactggaacccttaatgtgttgcaggatctccctctcaaagatttaaatgtagagaataatatgttctctgggccaattcctcaaaatctgctgaacataccaaatttcaaaaatgatgggaatccatttaataccagcacaactccctctacttcaccctcttcgacacctactggctctacaccaacatcaacaccaacacaaacaccatcatcctcttcaggagctcctccaccatctagtacagcgtcaaactccagtggatctactgcacgagatagcagctctccatcatccaagaagcacaagt

SEQ ID NO: 19074 - DNA, 875 bp, Setaria italica
  Peptide Sequence Number=SeqID_85048
ttacaagacaagaattttagaaggaaattaggcccagagaacatattattctctacatttaaatctttgagagggagatccattttccttagttctaataccagcacaactccctctacttcaccctcttcgacacctactggctctacaccaacatcaacaccaacacaaacaccatcatcctcttcaggagctcctccaccatctagtacagcgtcaaactccagtggatctactgcacgagatagcagctctccatcatccaagaagcacaagtcttcaaccctaagaactgttggatatgttcttcttgccatcgtgctattcatagttatagtgctgctggtgatattttgcctgtccaagtaccaagagaggcaagagagacgtgagtattccacaagtcaattagggagggtgcgtcagagggttgaggaaccaaaaatcaagcaagcttcggtgcagtcaacaaacgatgccaaaaaaggttcagctgaaaatcctgatagaaagaagcctcgtgaaataaatttaacagtaccaggtccagctgaaaatcctgatagaaagaagcctcgtgaaataaatttaacagtaccaggttcagctgaaaattctgatagaaagaagcctcgtgaaataaatttaacagtaccagctgcccttgagaagcctcctgaaaagagaaaagagcatgtaattaatttggagcgaacagaatcagagatctttgctacagcacctccaccacctccacctccacctccacctcctcctcctcccctgccgccgccgctgccaccaacaccatcaccaccatcaccacctcctgttgaaaaagtaactgtaaatcccattgtcaggccagaaaaaag

SEQ ID NO: 19075 - DNA, 951 bp, Setaria italica
  Peptide Sequence Number=SeqID_85049
cactccactatacaacacaaaacaaaacgtactgcacgcaccttacttcctactacagtagtataggaagtgcctagctcaactggttaggatggagggtggtcgtgcactctaaccacccaggttcaaatcccctctagcttaaatttggatgcctatttcttcttcttaatgaaaaatcacctagctcctcctaggttgatctaattattacactagtatctacagagcagagcagaagcacagcaccaccaggcctcaagccgagagtctttccatatttctgaacttgtccttcagatcgatcgttgatctctcttcaaagatgacagggtatgccattttgatatctttccaattgcctttgccatacttctcaaccccttccagcaaggtttttcctctatctcaatccacttctttctgaccttatgtgcacatgtaggggaaggatgtggtttcctctcgaaagggggtaactcacgcttccctaatggcctgtcatcattagagtcatccaagccatcccactcataagtacttgcattgggatgtctctccataagactgcgctttttagacgcagggacagacttctccggaagttggacaccctgtgctcctcctatcaacgcattttgatgctcagccgtaccttcttgagcacagccagcttcactgcttttctcgaaggatcagtctcatggtttcgttgagcaacatcagcttcattagcattgtttgcgttatcatcttgcataagcttggctaaaatctcacgctctgtggactcccctactgcatgaagtaaccacaaatttcattaattcattcttaggtagtacttactcaaaacaacaactggaaagataaacatggtaattgtttcgaagaaaaaaaagctaggataatggattatgcaagtattttttcttttttggaggtaccgag

SEQ ID NO: 19076 - DNA, 261 bp, Setaria italica
  Peptide Sequence Number=SeqID_85050
gcgaggcgctggccgggcacttttggcgcgccgacgacgaggactgcctgtccttcctcgacgcgcagctacggggctccgtcgtgtacgtggcattcggtagcttggccgtcatgagccccgcgcagctccaggagcttgcggttgctctggacgcctccggccgcccgttcctgtgggtcttcaggccggggttggcaggcaagctgccgaccgcgttcacggacctagtggcacgacatgctgggagggggaatttgt

SEQ ID NO: 19077 - DNA, 301 bp, Setaria italica
  Peptide Sequence Number=SeqID_85051
tagtggcaaagctccagttcctgatccggaggccgacgacgcgacgacgctgatgaaatcggaagcagcctgcactgctcccgtgcagctcctcatcgaggacctgccgcggaagttctcgtacgacgagatccgggccgtgaccggggacttcggggacgtggttgggcgcggcggctccgccgaggtgttccgaggcgtcctcgacgacggcacggcggtcgccgtcaagcggatgaccagctacaagccggtcggcgaggaggacttcctgagggagatctccatcgtggcgaacgtg

SEQ ID NO: 19078 - DNA, 382 bp, Setaria italica
  Peptide Sequence Number=SeqID_85052
gcctcgaattgggtcgtcggctcctggtagctccatggctgctgctgttgcagctcgccgttgtacgagtctcctagtccacccagtggtgccatcagcatggacgacgattgcggaaaggacgccgccggcagcgcggctgtcaccgtctccggcacgggcgccgccgtctggaacgtgaagtcggtgtactgccgctgctcatccttcacgctggcctgcaggttctccgccgtccccatccagttgaagggctccgacgggatcgcgcccgtcgtcggcgacgggaataggctgggcgtcaggagtatcggcgagtcgaggaagccggagaacgcgttgaggaaagccgacggcgacgccggcgggtgcgacagcggcg

SEQ ID NO: 19079 - DNA, 406 bp, Setaria italica
  Peptide Sequence Number=SeqID_85053
gttgttatgaattatggttttttagttgcacaattttggaacttaggaaaggaagatctcaacaaatattgataaagtgttaaaatctcttcccactgattcagcatgtggtttaatttctcacctgcatttacatgcacttctgcgtgatgcagatgcctatactttggttgatcattttgttttaaaaaattatagcgtaccccttgtgcacttgatcctctgaatatctgttaagctttcaatagtcagacatgttcagaatgttgtatattaaatggctatagattgttggatgccagtgttattaggattgtgatatatttcatttttattagccttccatcctttttctgccagattttcacctggtgatactaacttggttcttgcgtaagtaaattta

SEQ ID NO: 19080 - DNA, 947 bp, Setaria italica
  Peptide Sequence Number=SeqID_85054
ccacctcgtccccgtcgtcctctgacctctgctcgctcctctcttcccgtccatggcggccgcagcaacgtcctcctcggcctccgcttcgccgctcctcctcccctcagggccgagacaagcctcgtcgtcgagggcgtggcttcacggcggcggcgcgtccaggagcagggcgccgtgctgctgcaaggccgccggcggcggaagcgcggcgaaatgcggggcagctgacgatttgacgaccagtggtggcagcagtaccaggagggggatgctaggggtggccctgggagcgtctgccttggggctggccgcgttcgatgccgtcgccgccgggttgccaccggaggagaagcctaagctctgcgacgccgcctgcgaaagcgagctcgaaaatgtgcctatggttaccacagaatccggcctgcagtacaaggacatcaaagtgggtgaagggccaagtccacccattggtttccaggttgctgcaaattatgttgccatggtaccaaatgggcagatattcgacagttcactggagaaaggtcagccctacatattccgtgttggatcaggacaggtgatacaggggcttgatgaagggattttgtcgatgaaggttggaggactacgccgtttgtatatacctgggccactagcgtttcccaagggtcttacttcagctccaggaagaccaagagtacctcctagcagccccgtcgtattcgacgtcaacttattgtacataccgggccttgatgacgagtgaaaaacacagtcatgtttttttgtatattgccaagaaacttactgtacatctactagagcaacaattctttccggctgaacattatgtgcaagtatttgtgttgaagtacatagcaacatggttgattcgttatttggaaactcactgaagatgcaatgatatgtcacaaaaaaaaaaa

SEQ ID NO: 19081 - DNA, 396 bp, Setaria italica
  Peptide Sequence Number=SeqID_85055
ctgcttaggatgtgcaaggatttcaaagagaaggatcccagtttgatgtttgaattcaccaaagacgtgaacaatcgtctacagaacattgcctggacatattcggcttcggttcaggcttacgagatgtttggtgatgctgttgtgtttgacaccactcatcggttatctgcactcgacatggcgcttggaatatgggttggattgaacaattatggaatgccttgcttctttgcttgcgtgcttctaagggaagtgaatcaggaatcatttgcatgggcattgcaggtatttctcaacttcatgaacagaaaagctccacagatgatattgactgatcaaaatatgtgtctcaaggaagtctaaatttgtaaaaggtaatttccttagtctact

SEQ ID NO: 19082 - DNA, 719 bp, Setaria italica
  Peptide Sequence Number=SeqID_85056
ccacccaaggttggtgcatgataacctcctagactaactgaagtcactgatctagtcagaagagcttcaccaggcattccttgcatgttaccatggtatgttgccccctcaagtccaacagaatgaaactgagataccagcgaatcaatgctagatgtcacaggggacaacaaaccagaagaacttccagcataatgatttggttttggaagcagccaattcccccatgttccacgctttcttagcttatcaccctgtacttccacaacggtagacagcatgactgtttccaagataaactgtatattgttagtcaaatctttgactttgcggaagccagcaatcagggataatggcacccagccttggtcatccatgtgttgccgcaagaatgtgtccttgcacaaattgtcatcactgaaatagtaatcaatttgcaccagaagctcctttcgaagaggatcaactaacatagcctgggggcttgccggatgaggcacaaaaggcaggccttgaatgccttccgtggaaggcgacaccggaaaatagtaaacatgcggcactatgtctgggaagcccataggtgccccataaggtggtgtctgagtagtagggctaacgaatggtggtggcggcggaggtgctcctgctacaacagccagagcaggaggagccctaacgtatgttggctggtggccacgatgctggtgaactggtcc

SEQ ID NO: 19083 - DNA, 1825 bp, Setaria italica
  Peptide Sequence Number=SeqID_85057
aatcctcgaggaacacaagaattaataatagtgtcacctactttatatatttttgttcactccacagtttctgaatgataccgttcacgacacttgaaataactcggttcacacaaaaagagaaatcaaactgctgcattcagatacaagcctactgactgggaagtaacacatctcagaaagaacaagagttccgatacaatctacctatcgcccctcttcttcttttctacctttttctattttttcttttttttgttttttcagtttttgtatatttctatctctatttttttgtattatgcttttgttttttttttttgcttttttaaccaactgatctttacacctcgtacttagataaggtgtgcatgccgtcactgtgaaaactcggcctgccgttatacttcgtatctctcgagcatatagcctcagaaggtatcgctcctcagtaaatttcttgctgcctttggtccgaaaagttgtccactcccattattgtgtagcccacccaaggttggtgcatgataacctcctagactaactgaagtcactgatctagtcagaagagcttcaccaggcattccttgcatgttaccatggtatgttgccccctcaagtccaacagaatgaaactgagataccagcgaatcaatgctagatgtcacaggggacaacaaaccagaagaacttccagcataatgatttggttttggaagcagccaattcccccatgttccacgctttcttagcttatcaccctgtacttccacaacggtagacagcatgactgtttccaagataaactgtatattgttagtcaaatctttgactttgcggaaaagttagatgagtgacaccgtctctttattaaagaagaaaatgtgttgccgcaagaatgtgtccttgcacaaattgtcatcactgaaatagtaatcaatttgcaccagaagctcctttcgaagaggatcaactaacatagcctgggggcttgccggatgaggcacaaaaggcaggccttgaatgccttccgtggaaggcgacaccggaaaatagtaaacatgcggcactatgtctgggaagcccataggtgccccataaggtggtgtctgagtagtagggctaacgaatggtggtggcggcggaggtgctcctgctacaacagccagagcaggaggagccctaacgtatgttggctggtggccacgatgctggtgaactggtccatgcccatctctgcggccacctccgcgccgtggcccatcaaaacccccatggtgctcgttcccacgtcgacccccacctccaccattgccattgcccctcctgtttcccccaccatagccaccaccacggccgtgggcatgggaaccaaaacgtccactctgatgatgaaaatctccgccgttgctctgggcattaggcacatagacaggggacggttctggggcaggggcattcttctccagcccatccgccgcaggcatcaccagagcacgctgggccacaggattgcgcacaggagcctcattgccagggttagcatccggagcgcccgaattgcccaaagagactggcgagatcaccgccactgtggaagcgggagaagcggcctttggtgacgccttggccgccagccccgcagccggtggcgggggagacgccagtccgggcagcgccggccaggactccacgtccatgatggggttttcaaccgccaccgcggctggcaccgtcgcggccccggggcgcttccatgcggcggccgccgccccagccttcttcgccccaaccgggctatcggacgggggcgtcccggccccag

SEQ ID NO: 19084 - DNA, 643 bp, Setaria italica
  Peptide Sequence Number=SeqID_85058
cctcaaaagcaaagatccgagtgatggaacagaacaggcactacttgatgagctgacttcctttgatagttatctaaaggataatggtccttttattaatggtggaacaatttctgcagctgatctctctctgggccctaaactgtatcacatggaaatagctctgggtcactacaagaattggtctgttccagattcactttcacatgtaaaacaatacatgaagtcaattttctcaatggattcttttgtaaaaactcgagctttgccagaggatgtgattgctggatggcgccctaaagtcatgggttaaatcacatttgttaagtaacaaattcaggtaaactgcatatgttcccactgtagaaaggacatttgcgcatctagatttgcttggtctgctgctgctattttgcttctgttgcaataatggtgataggatgcatggttcatacttatgtagtaacgtagaaatatggaggccttcttaagctttgttatttcctaattatacgcaaagcaatatttcaatcagatctataattgaatatgcatagaaataaaaatacattctcgaaactaaacacatgtagtgaattatctatcatgtgattgtgcgggcgtttctgctacttgtttatac

SEQ ID NO: 19085 - DNA, 810 bp, Setaria italica
  Peptide Sequence Number=SeqID_85059
agaattagactagaattactagaatagttaataaacaacaaagacaattaagaaggaagaaagtaaccctagaaaccaacccttaggacaaactccaactggacaaagcttcagtagggtcaaaaatattttccaccttcatcggtttcctcaaaagcaaagatccgagtgatggaacagaacaggcactacttgatgagctgacttcctttgatagttatctaaaggataatggtcccttttattaatggtggaacaatttctgcagctgatctctctctgggccctaaactgtatcacatggaaatagctctgggtcactacaagaattggtctgttccagattcactttcacatgtaaaacaatacatgaagtcaattttctcaatggattcttttgtaaaaactcgagctttgccagaggatgtgattgctggatggcgccctaaagtcatgggttaaatcacatttgttaagtaacaaattcaggagagacatggctatcagaggatctagatacacaggttcctcgcatatgttaagtctgtacatgaaaggtggtggatttttattggaatttccagggcatagcatgtaaggtattcatatctgatctcctttgctttccgtgtcaaatagaaaatgtcaataaaaatcagagacctctcatggaatcgagcattattgtcaaacctgttgaacaaaggggagttgttgtttgctgcatcatagcaatgtttatttaacaaacaacattccaaattaaggatctgtggtactaaccaacctcttggtgaagtcatgaaaaaa

SEQ ID NO: 19086 - DNA, 711 bp, Setaria italica
  Peptide Sequence Number=SeqID_85060
ccgccgcgcgttcgcggcccgcgcctcggcacagccgctcgaagtctgcgcgaaggagtccatcaccgtccctggccgcctaggcgactgtcctttcacacaaagggttttgttgacaattgaggagaagcatctgccatatgatctaaagctagttgatctagctaataaaccggattggttgtttgaaatgaacccagaaggtaaggtgcctattgtgaagctcgaggacaaatggattgctgattctgatgttataacacaagcattagaggagaagtaccctgaaccacccttggcaactccactggacaaagcttcagtagggtcaaaaatattttccaccttcatcggtttcctcaaaagcaaagatccgagtgatggaacagaacaggcactacttgatgagctgacttcctttgatagttatctaaaggataatggtccttttattaatggtggaacaatttctgcagctgatctctctctgggccctaaactgtatcacatggaaatagctctgggtcactacaagaattggtctgttccagattcactttcacatgtaaaacaatacatgaagtcaattttctcaatggattcttttgtaaaaactcgagctttgccagaggatgtgattgctggatggcgccctaaagtcatgggttaaatcacatttgttaagtaacaaattcaggagagacatggcta

SEQ ID NO: 19087 - DNA, 449 bp, Setaria italica
  Peptide Sequence Number=SeqID_85061
cagcagtgtacataggcgtaaagttcgtgtgtggcagatgatatgtgttttatcgcactatgtagaagacgatatagttggagaagtgatattgagcactcacacctgtctttatagaaataatctgcccgctgtccggcagtacttggagacatttgctatcctcttatacttaaaatttccaacattggcaaaggaacaacttattcctatttttcatgacaaagggatgcgacaacaggcactgtcgtcttatgtttttatagtagcaaatgtgattcttcattcaaggcagctgtccgtccagagaaaccacctaaatcaactgcttcctccgatactgccgttcttaacatcccatcaccacagtttacgttgttttactcagctacttgtccattcagtgctatcaaggttgtggcctactctatatctcgaaacttcagaag

SEQ ID NO: 19088 - DNA, 340 bp, Setaria italica
  Peptide Sequence Number=SeqID_85062
cacacaacaagagcgaagaagcggcagcctgcctattcccgtcttccgccggcccgttccgccgaacacgcctccaggtctccttccgcccgagcacgccacctcggatccccctccccgctcacgtgcgcgggcgacaccgcgccctcctccaccggccactcctctcctccccccacctgtccaccgaacggcggcgtcgagtggggatccctcgggactggttgggaagaatcagcatgctctacagagaagtgttgcagaagactaaaaggagtttgggaagattgcagaattaccaaaaaaaagatttgcccttcagcttctgagtccttcaatt

SEQ ID NO: 19089 - DNA, 1519 bp, Setaria italica
  Peptide Sequence Number=SeqID_85063
tagtacttagtaagtactaaggtaagtaaaggttggttgacctagaaggaccaactaccaagccagcaaggtgaagaaggtcaaggctgaggaggagaaggcagcgtctgaggacaccccttctgtcaaggggaagaagggcgggggcaaactggagaagccaggggtgctcgattcctcgccgtccagcagcaagcctgagaagcttccgcgtgctcagcgtctatggacgaagaatgatgagatgaaggtcttggaggccctcgcggggcatgtgaagagtgacggcactctaccaaagactgatttcctccttgctactgttggtgaccgcctcgataggaagaactgcacctactcagatatctatgagaaggtacgacagctcaaggggcggtatgagaaagcagtgagcacaggcattgtgccaagtaaagaagatgagctccagatttataaactctcggaagcagtctggggtgagaaggcgaaggaggctcttgctgcagctagatctcaaaatgatggcgctgtgacaaagagtaagaaggggcagtctaacaaacagaaagtggatggaaattcaaagggtggcacaccaaaagaggctgccgccagtactgccagtcaaaatggtgattctcagaaaggaagtaagaaggggcaggccatcaaagagaaaacagacagagacgtaaagagcaggttgtcaaaggaggcaaccgctactggtaccccaagtaagagtaagaagtgggacaatcaaaatgaggagttggacaaagatgcaaagagcggtgatttgggaaagagcaagagggagaaaactgacaaagggaagaaggacatagatagggatagtctcaagtcaaaggaagccgcagctgcaaatcagaatggtggcactctgactaagaacaaggaaggggaaactcatgatgatgaagtagaaagagatgctaatgtggaagttacacgtaggggttttgatgaattgcaggggttgtattccaaccttgctgcttatgtggaggagattgaggcccagaatccatgtggggagactctgaagagagcatttgagttcattggtgatgagaaggcacaatctttggaatacaaggtcaagaggcaaagagtctctgaggcaaaggcacagctccgtcgagcggacgtaaagaaggatgttctcaatacgttgatgagtttggtggattaaacttatatggttttatcaagtgctttttgtggtggctggatagaagattcaggtggaaagaggtgatttagtattagtttaaagggtgggattcaaggtgtttaacaggtggctatatttctgtagttgtcagctattatcacattagtgagtgccagtgatgagatgattgtatttcttccaagctgttgcttaagctgttggttctgctaatctttaagacattccgttgtagcatttggctttggcaggtatatacttaatgggatggtaaatttttgacaaaaaaaaaaaaaaaaa

SEQ ID NO: 19090 - DNA, 382 bp, Setaria italica
  Peptide Sequence Number=SeqID_85064
ctccgaatcgccgatccctcgtcctcctgcggcgccccgctaggtatcgccggccgcttgtttggtctgacggcgtgaggaatcactgggatggtgggatcagggatggagggtgggggcgcgcgggtgtcgcctacgtcgagcggccgccggaggcacaaggcgctcgcgcccgggcgcttccagataagccctggcgttgtcttcgatgggaatcgctccggcttggagacgctccagatgagctgcgatacggcggcgggtggcgggctctccgactcgctgagccatggaggcagcgtggatggggaattggagagccccgcaatcgacggggataacgaggtttccagaggaggaggaggaggaggcggggtcggag

SEQ ID NO: 19091 - DNA, 663 bp, Setaria italica
  Peptide Sequence Number=SeqID_85065
aagctgaaaatccgattaaaccagtttaaagacccgttgtgtattcaactcattccacattattaattgtggctttataatgtttctctacctaaataagatcaatcgaaccaaaaaaagaaatctaaaaacctcacctacatcagggcgagctcactaagaattcacgcttctagctaaatcatgatccgttttccaagtacttcacaccgttttgttctctcggggccacgtcctccttcgatcttagtggcgtggaagctatattcttgatgattgctgcatacagatcgaaatcagctttgtacttgcagcagctggcctcgatccactgctccgcaaggcttgtggacacactgtcttggctatctctttcatgctcttcaatcgctggccttatctcgtcatacagggcatctatgtcagaagcagcctgattcttcacttcctcacagtacaatatttcttcacgcgccacagatgatgctagccgatcgcaaatatctggaatatccagttgcttaagcagaacacgtttaggtttcctaccacggcgcttgggtatggactttacagggaccaatgctgaatggttgctgttgttttgtgattcaatttggttctggtgatttgctgcttccggcactgaattttgaggagcga

SEQ ID NO: 19092 - DNA, 1976 bp, Setaria italica
  misc_feature (1946)..(1976): n is a, c, g, or t
  Peptide Sequence Number=SeqID_85066
cgcgcaagtcgcgctccaactccgacctcctcccgcgcccccgcctcgactcgtcccttcccgccgacgaactctcgcccatcgcgcgcgcggtatcggcgcccaatgttcagccggttctctccgtacctgcccccattcctgaggagtcgctccactcttcgtccgcttccaccgccaccgagtcggcggaggagcctatcgtcgcggcgcccaaggagtcccccaaggctgcccctgccgttgctgctgtgcctcccgtcgggggtttgcccttcccctcgccaaggaaggggggcggggaggtagggatacgggggcgcccggccgcctctgctctccccgcctccaccaatcactgcactcgctcctccgccggtgaggaggcccgttgttgctgttgatatgactgggtcggcttgggacattgtgcagtcgtttgctcccagtgaagagagaagcgaactgggaggggctcatgaacgcgcacacactcgtcaagtgtcagacacagaggaggacggggttgaggatggggtggcagcggtggagggggagctgaaagagttgagaataggagagaccttcgagggtttcactggaacatcttccttgtcgactacgaatgatgatgatgcctccagtaccaccacggaagccatgttcatcatctcaccgaatggcaagttcaagcggaagattaagtcatggatgcgtggtgctcttctgggaagtggctcattcgggatggtgtatgaggggatcagcgatgagggtgcattttttgctgtgaaggaagtatctttgcttgatcaaggaagcaacgcacaacaatctattctcgcacttgagcaggaaattgctctgcttagtcagtttgaacatgaaaatatagtccagtactatggaactgacaaggaagaatcgaaactctatatctttattgagcttgtcactcaaggatctctttcatccctctatcaaaagtataaactacgagaatcgcaagtctctgcatacactaggcagattcttaatggattgctttacctccacgagcgaaatgttgtccacagagatatcaaatgcgccaatatattggttcatgcaaatggatctgtgaagcttgcggattttggactggcaaaggagatgtcaaaaattaatatgctaagatcatgcaaaggaagtgtttactggatggcacctgaggttattaatcctaaaaagatgtatgggccttcagctgatatatggagccttggctgcactgtattggaaatgctaacccgtcaaataccatttcctaatgtcgagtggacaaatgctttcttcatgattggaagaggggaacgacctcctatccccaactacctgtcaaaagaagcacaagatttcattggccaatgtgtaagagttgatccagagaaccggccttctgcgttacaacttttggagcacccatttgttaacaggccgctgagagcttcattcgactcttcgtctccccctgccatccgcttgtagtactgatgggtgggtgcttgtctttgtgaagccaatgcttaagtcatctaccgttatgactatgctttgcagatcttcatgatttccacttctggtgccagaaaggagctacgtggccttgtttaggatatactacagtttagtatgtgtagtcagttggatagtgagcttcagtattgaatgtgttccattgtattctttgggtattcttcgttaagcgaagggttttccattcagtagggttttttttgtacacttgctaggtaaaaggggtggaattttctgtgatagtgatctagacttggccgatgtctgtaaatgtttgacatcatcattcgttaatgcacggcttgttgctcgaaagaaatacgaaaactactaataacttttagaataagaagggaatagaaagagatccnnnnnnnnnnnnnnnnnnnnnnnnnnnnnnn

SEQ ID NO: 19093 - DNA, 521 bp, Setaria italica
  Peptide Sequence Number=SeqID_85067
tatattagtgttgtttacattaaatactagaagcaattcgcattacatcgtatactagagatttcctcacttggtggggcttctttgttattttgaactcaaatatattagtgttgtttacattaaatactagaagcaattcgcattacatgtatatagagatttctcacttggtggggctttcttgttattttgactccaatatttaccttacgccagattttcgatgcccaacggtatgagcgtttcgtagtcattgttcttgttgcacccatccgtgctactataaatatacttcgagtggctcttctccaggagcttgataatatgctcctccagatcctcatccttactgcaccttcggatggtactcctctcaccgtttgagacgatgacgacctcctctttgtacgttgcaagcagattggccaccaccacgttcatcttgtacttgtttctagtagtcctattttcttgtcttttcttgtaattgtaggtattattcttgtaattcttgttct

SEQ ID NO: 19094 - DNA, 1162 bp, Setaria italica
  Peptide Sequence Number=SeqID_85068
aacagaatctccctgtatggcatttaattgttatgataaatggaagtataatcgttgttctacttgcagtgatacaaggcatttactttcagcttgcatagttgatacatccttcaacacgaatcaaaccatcctcagcttgattcagcattatttgagaaatgatgtggacaatgacgttacaaagcacgattcacttaagcagttcagctaagtgggtaagttacaaagtgaaacagacttgatcaatcggtgattctatctgcggtactctcataatgttttgctctaactggaagctatacacatgtagatctatctatgcacacttcttttttctaagggagaccttagttcttttaaatgaagctgtttactccccttgacgataatctaaaccagctccatatctccatgcttcaaggtactgtttccattgatacttgtccctgggaggcaaggattcgacccaagacctcgtgactggatcgatgaaggtagaaaggaaagtgtagaaaccaagcatcagaaaatggcctgaccagtcaaggatgactccaagtccaacctgcttaaatatggaaggcagaagttgtggccgagtgagcattactagacccaaagttttcactagtggtccaaattgtatcacatcctggagaaatggccggagtactgaatccccaagtttctgcattgactgaaaattagcaaaaagaagttcattaataaaggttggcgacacattgatgtccggctgtactgacatcgctcgttggaacagccatgatgcacttaaatttggcatgtaagggttcagcagccgcaggctatgagcatccaggaaatctccttcaactgcttcatatataccatttgacaaacgcccaagatgtctcgtcaagcttccaaaacctccaaatgaaacaggtgactgtattccactagcatcaccaacctgtaagatacggtcaaatgcagctggcaaggggctatcccgataagttggaaaaattccaaatataactctccttatatccagattttcaagaactacatcctggtaagcaggcataaggttccaaaacacttccaaaagttcttctagcttacggaccccctaatttttggatcaacataagtgaacatgtatgtagtacga

SEQ ID NO: 19095 - DNA, 1184 bp, Setaria italica
  Peptide Sequence Number=SeqID_85069
cccactattgttaccccgtttcaaattgtaagttattttggtttttctactgtatctagtgttatgtctagatgcataataatatctatgacctagaaaagctgaaacatcgtacaattttgctgaacaagctatcgggtccatctccatcaaacaagtaaaatacaattcaaggaagaagcatctctcactaaaaaggtattgactgatataggtgatgaaaaattgataaatgtaactttggattatctttccttttctctcttcatgttccgtgtgttttcaggaaaagaaaagaacaaatatattagtgttgtttacattaaatactagaagcaattcgcattacatgtatatagagatttctcacttggtggggctttcttgttattttgactccaatatttaccttacgccagattttcgatgcccaacggtatgagcgtttcgtagtcattgttcttgttgcacccatccgtgctactataaatatacttcgagtggctcttctccaggagcttgataatatgctcctccagatcctcatccttactgcaccttcggatggtactcctctcaccgtttgagacgatgacgacctcctctttgtacgttgcaagcagattggccaccaccacgttcatcttgtacttgttcagagccatttctgctttctgaatgaggatatctgaatctgtctccagcttgaaagatatgcaaaaggccaagggggcccattggtttcgaagaactgaaagcatttttgggacctgacttagcttcatatccagtgggcctccggctgactgaatcttatgttttgccatgctatcccatggaacataaaagtcagacacagcagcagcgagatagaacatcccttggagacccacagagctcatagacgtagccaccatcttcagtaactgaagatattcaaatatcgtggtgaatgggagtttcagcagagagcctccttcaatagccttgctatactccccgattgccttctttaccaccgtcgtgtgagactcaaccactcgaaccttcgattctgtagttacatcaaagaaattgagaaatgaatcatcaggcaggaacctacagaaaggttggcagctcccactgcacgcatatgcataacagcattaaccagcctttaagaatactcagtggacgcggcg

SEQ ID NO: 19096 - DNA, 1550 bp, Setaria italica
  Peptide Sequence Number=SeqID_85070
ctcctccaccgcagggacagggaggaggcgtccccttccacctccacctgctgctcctacccactccccgtcgcctcgcggattcgccatccccgaccgccccgctaccggaaccccggccccttggacctcctcctctctcctcgctagaatttcggcatcgaaacgaactgaaaaggcgggtgattcggaccagatccaaccggtgcacgtagcagagtttccccaagtcgttcggaatgcccaagccggccttctacagaagaatttctctggcaagaacatgtttgctggtggcattgataaagaaacatcccttgcgtggatgatatgtggaaatgagcttttatctggaactactcggcttctgttgctaaagactgtcttgtccttgacgttccatcttctctgattggatacaaagacgtgaaacccctccccggtattcagtggacagtttgtataatgagatggcatagtagcggtgcatcaacaagaaacagtggagagatattgtatagaaaaagttctactggtgttatcctctgcaacaaaagaacacaagctgttgcttattggcctgacatctatgctgaatttaataggagtcttgtccttagttcaccgtttgatgagctgtctgcaagtgatggtgcatctgatcgtttcaggtttaattcgattattgcagctgcagttccaggaggcactcacgagtgtattgcaatagcttctgagcctacaggtgctttgtggttgttcaagtgttcaccagaaggaattcgtcaagaaaaagtcctcagagatacattaggagatggtggtgcggatcattctcagaaaagtaatggtggaaggtcattggcttggctgccaagtaatgtatcatcggagggttctgatcggaagttctttttgttgacaaacaatgaggtgcaatgttggagtgtctcactcttgcatgacatcaatataaaaaaattagggtctcaggaaattgttggtactgatggcgatgcgagcataaagaaagatatagctgggcaaaaaaaatatatggcttttggacatgcagatagatgagcatgggaaggaatttagcattcttgttgctacattttgcaaagatagggttagtgggtcgaactacactcagtattctcttctgacgatgctgtacaaacctaaccagaagttttcatctgaagataatgtagttaaagttgaaaggtttttggagaaaaaagctccctctcaggtgattattcctaaggctagagtagaggatgaagaattcttgttctcgatgaggctaagaactggtggtaagccttctggttctgtaatcatcctgtcaggtgatggaacagcaacagtggccatatattggagaggttcgacccgactttatcagtttgatttgccttgggattctggaaaggtcctggatgcttccgttatcccatcacctgaggatggagatgaaggtgcttgggttgtcctgacagaaaaggcaggagtctgggcgattcctgaaaaagctgtattag

SEQ ID NO: 19097 - DNA, 1058 bp, Setaria italica
  misc_feature (984)..(1058): n is a, c, g, or t
  Peptide Sequence Number=SeqID_85071
ggtgacgtgcgtggggcagatcaaggcgcgcccggccaagcccaaggcctcggcggcggaggcggcagcggcgacgggaagaagagcaagaaggccacgtggctgcaggcgctggggataaagaaggacgccatggcgctcttggacgccctgcacggcgccttccggttcaacgtcgccggatgcttcggcagcttccccggcgccgtgggcgtggggtacacttccggggaggatgacgacgacgaggaaggtgaggagcgcgccgagaaggaaaccgagcacggcgaggcattggccaggtggttcatggtgttggaggaaggcaagaaggtgtccgccaagaaactgcagggacaagagccgcagcagaaccagggggaggaggacaaggagcaagatgtggtgccgccggcgaacgcgctgatgctgatgcggtgccggtcggcaccggcaaaggggttggcgaggaggctggaagcagaggactctgaggatgtcaagatcgccaagaagactccagaggaagagaatgagaaggagagcctggtgctcatgacctactcaccggacttcttcaaggtgtcacttgacatagccaaggagacgtggatcgttggcggtgacgacgcggtcttgcgctgccggagctggaagagatgatcacaaggatcgttcaacaaggaatgtatgtgcgtttttgtttaccttctactccttgctttcttttttgtttctctcttctttttccccctcttgagaattactactctttgcataaggctcgagtgaagggtttgatcagtacgcagcagaattagtttcgccagggccatcatattggcctctcggcaaaacattcctgctctgtaaatagtgctgtaacgccccttgttaaatgttacccaggtatactttactggtgatatgtgagattgatagtaaatttaatgatgagcttgacagctcctttcgtgaaacttnnnnnnnnnnnnnnnnnnnnnnnnnnnnnnnnnnnnnnnnnnnnnnnnnnnnnnnnnnnnnnnnnnnnnnnnnnn

SEQ ID NO: 19098 - DNA, 563 bp, Setaria italica
  Peptide Sequence Number=SeqID_85072
ctaagcctgagcaaattccatggattttgtcagcaatgcatgataatatatcatcaagtagcagatagtacaacaccagatgactgcctcgagatatagcccttaaaatatttatcattagaataatatgtccctgcttatattaatctataatcattttcatattacccaatccgctgctccactggccattattgaccgacaattctttttgctgtctattttatctcaagtctccttgatttgctgtcgatcaagtgatgcatctggatggttgacaggttttatttttccctcgaggcacaactgttggttgtatattggacgccaggccaaggaagcacgcacggcatcggggagcggcatgccggggctagccggaacgtgctgcgaggaagcagcatgccaggctcaaagcgcggcggcggggaagcggcacgtcggggcagagtgcgaccgcgcaggagcaacggggtgtgccgtcgatgggcccacctctgctccgcgtggtccagcggagatacggcacggcgcgtgtcgggcagcagctgcggagcaaaatg

SEQ ID NO: 19099 - DNA, 854 bp, Setaria italica
  Peptide Sequence Number=SeqID_85073
ggaggaaaatcccgcaaagaaaaccacgtgtatcagcaattttatttatcagactagcatcccagcaaaagagaaaaaacattgcataaagatggccatcacatcttccctcaaaaaaaaaccttcaattctccttgtgggctaaatgagatggttactacaacagtataagagacctttctacttgtattgctctgaaacaatgcgagtgaacttgtccatgaattggcatttcttgtcaaaacccccagccagggttgttcttaagagagagtagagttttgtcagtaaaccgctttactgaagaagggatgttttcagggagagtatttgcaactctttgcagctcctcttcttgttgttttgcagtaacaacatcaggtccactgtacatatctatgagctctttcatatggggtgctctagccattacatctttcacagcttcctcccattcttcctggttctggatgccctcatacgcaactatgaagggcttcaccttttgaagcatctcctccaatgacatttgtggtttctcatcaatatcaggattagcaaaattcacatggtactgtggttcaaactcaatcatgttgtttgtgtggcaagcctcttggtacgcattctccattggatgtggcagcgcattatctgccgcctccataaacgcctgctccagaatcttcatcttgtcctcgccaagcttcttctccagcttctcaccgtcggcgttgtcccccaagtagatcgcttgccggtcatccagatcaacagaccggcggtcgtcacgcgtgcgacccctgccacggccgcgaccacggaagccgcgacccctgccaccgcgccctccg

SEQ ID NO: 19100 - DNA, 773 bp, Setaria italica
  Peptide Sequence Number=SeqID_85074
gcctccctgtctgtcccctccccacctccccccctaaaacgcacctgccattgccgcaccgccaagctccccctcctcaaatgcccgagaccccaccgccgcgacgcgcccccaccgtcctcacatggctaacggcctcctcctccgcggcgcctccccgtgcctccgccccgccgccccggcgaccgccggctcctccgctgaccccgttcggggccatggcgcggtggcgatcggtgattcggggccgcgcggtgttgctctgagggtgagaggatctagccggagagatttctcatttatcacaatggcctcgagagatcattctggcttgacccgacaacttctagattttcaacatgatacagtagatgcggtaggtgcagaacatgatccattcatggagttgaaagcaaggttcatggacttcaaacagcgaaactatgtggaaaacttttcaaattaccaaagtctggctgaacagcaaacaccaaagttcatggtggttgcttgtgctgactccagggtctgccctaccggtattttggggtttcagcctggggaagcatttacagttcgtaatatagcaaatttggtaccaccatatgagcatggtggttcagagactagtgctgcactagagtttgctgtcaatacactccaggtagaaaatgttttggtggtaggtcacagccgatgcggtggcatccaggcactaatgagtatgaaagatgattcaacctctggaagctttaataaaaaaattgggtttc

SEQ ID NO: 19101 - DNA, 1294 bp, Setaria italica
  misc_feature (14)..(14): n is a, c, g, or t
  misc_feature (1293)..(1294): n is a, c, g, or t
  Peptide Sequence Number=SeqID_85075
cgcaatcactcctnttgtctgacatgtatcagtttcttcttcttcttctcttttttgcggacttcaaacagcgaaactatgtggaaaacttttcaaattaccaaagtctggctgaacagcaaacaccaaagttcatggtggttgcttgtgctgactccagggtctgccctaccggtattttggggtttcagcctggggaagcatttacagttcgtaatatagcaaatttggtaccaccatatgagcatggtggttcagagactagtgctgcactagagtttgctgtcaatacactccaggtagaaaatgttttggtggtaggtcacagccgatgcggtggcatccaggcactaatgagtatgaaagatgattcaacctctggaagctttattaaaaattgggtttcaattagtaagagcgcaaggttaagcacgaaagctgcagctggaaatttgagttttgaaatgcagtgcaaacattgtgaaaaggaatctattaatagctctcttttgaacttgttaacatacccatggataaagaaaagggtgaatgaaggtactctgaaccttcatggaggctactacaactttattgattgcacatttgaaaaatggacattagtgtaccgtgaagggctagaaggtggaagcaagtatgctataaagaacaggtccacttggtcttgaccaatgaaggccttatttacttgggtaaatttcactctgcccgctgcagttcagcatggttttgctttgccactacgttgttcatttccattgcaccttgctccattgtggtggtattgatgttccgcagaaggtagtccctgtatcaagaaactgttacatagctgttggcatcatccatggtcatgcatggcactatgccactagcatgacacgcttgaactgtatgttgtattgcagatgcatgcagatgcatcggcattgtatagcagttatttgatacagggactctaatggagtgaggtgcaacacaatggacaatatggtagcaaagtgaaagtctgtcgaactgccggggacaaagtgaattttatccaactacttgtatgttgttttctgattgaaaccattaaggaattatgaataagctagaagatcactcatacgacgaatgcatgtaatggtcgccgcatttggcgtcaccgtgtgcaattgtaacatttgtaccatgtgttgtatcattgtaactgtgaggtacaaatattatacatcatttgcaactgttggtgttatcaatttaacaaaaaaaaaactaaaaaaaaaaagnn

SEQ ID NO: 19102 - DNA, 795 bp, Setaria italica
  Peptide Sequence Number=SeqID_85076
ttgatcggaacattcaactccggtggtcttcttcatcaattccccgccgcagcgtttctccgtctcgatctctgtgtctgttgtctgtctccgcgcgatgagcagcagcaacggcggccgagatgatggcggcgaggacgacgtcctggaccacgagtaccaagaggagtacgtgaggaactcgcgggggatgagcctcttcgcctgcagatggctgcctgggaagaggaggaataagcagcagggtcccaaggcgctcgttttcctctgccatggctacgccgttgagtgcggcgtgacgatgcgcggcaccggcgagcgcctggcccgtgccgggtacgccgtgtacggcctcgactacgagggccacggccgctccgacggtctgcagggctacgtcccagacttcaaggccctcgtccaggactgcgacgaccacttcacctccgtcgtccgctcccacggcgccaccgtcaggcaccgcttcctgctcggcgagtccatgggcggcgccgtcgctctcctcctccaccgcgcacgccccgacttctggacgggcgccgtgctcgtggcgcccatgtgcaagatcgccgacgacatgcggcctcaccccgtggtcgtcaacatcctcagggccatgacctccatcatacccacctggaagatcgtgcccaccaacgacgtcatcgacgccgcatacaggacgcaggagaagagggacgagatcaggggcaacccctactgctacaaggacaagccgcgcctcaagaccgcattcgagctgctcaaggtcag

SEQ ID NO: 19103 - DNA, 641 bp, Setaria italica
  Peptide Sequence Number=SeqID_85077
tgtccgtacgtactattgttcggtccttctaccccgttggttcgttctaactattccttctagggtcctattgtacctccatcatacccacctggaagatcgtgcccaccaacgacgtcatcgacgtcgcatacaggacgcaggagaagagggacgagatcaggggcaacccctactgctacaaggacaagccgcgcctcaagaccgcattcgagctgctcaaggtcagcttggatgtggaggcaaacctcctgcaccaggtgtcattgccgttcctgatcgtacacggcggggcggacaaggtgacggacccttccgtgagcgagttgctgtatcgatcggcggcgagccaggacaagacgctcaagctctacccaggcatgtggcatgccctcacctccggtgagtcgcccaacaacatccggacagttttccaagacatcattgcttggctggaccacagatcctatagaacgacgtcgtcgatggaggaggtggagctgaaggctagacatgacgaccaacatcaccagcagcatggcaacaagtagctgctatatacatatatatacgtgtatagaatccaatggaagagttcaaattaaatgagatgcagagaaccattatttgtggatacatgt

SEQ ID NO: 19104 - DNA, 437 bp, Setaria italica
  Peptide Sequence Number=SeqID_85078
gaggcgcgcgcgctcgcggtcggagaggaccttcccgatgcaggagaccttcggggacccgggctccgggacggccgccttgtgcgcgcgcccgccgccgccggtcttggccttcttggggaagatggccggcgggtagtggtgctgccgccgcgcgccgccgagcttccccgagagcccgatgatgggcgcggccgtcggcttgaggttgccggagaaccgctgcgaggagccgttgttgtggtgggggtggttcttgaggaggcacttggggttggtgttctccttgagggagtcgtcgcggtcgtagacgccgttgatctcggaccaggcgatgtcgtcgcccatgcggaggcgcgaggactccggcgggtcgccggcgcgcgaggcggcgaggaggggaggcggataccacgacgatggcgtacgaccgacga

SEQ ID NO: 19105 - DNA, 720 bp, Setaria italica
  Peptide Sequence Number=SeqID_85079
aattacccaaatatccattacttcagaaatgaattaaaacagtgacaatgaacactctattgtaagaccagaaaacttctgaggtaatttatgctgcaccataaggttttcctttacaagaaagctatctgaaatgtctatatgtagctaggatgctgatgctacatcgtctggaacatgggcactctctaggaggacataactgcaaagttttactgccttcttgcaaaacatgggcaaagactaaagaagttgcataaagatcagctcttgttttcagtagtttctgctgaagtagaggatgcggtggatgctgtgaggtccctggcgctttgtgacacatatggcttcagcttgaaatcagtcaagtcagggaccacaaatcttggcaacttttcatcaacaataacatatccacctttgcgtgtgtggaacccggtgggcttgcagttcttgcccttgtagtaatcccttggcgcccgcttggaggaaaggatgtcgagcgaagacaaccgcttccgccgcatcgcccgccccagcgagcccagcaccagccccagcggcatcctgcaagaccgcctccagcgagcaaccaaccgccgaccacgcaggttccggatcacgcgagggcggcgcgacgtcgggaggcggcggcggcggccggagacggtgctgtcgcgtggtagggttttgccgccgggattgggaagtcaggctatt

SEQ ID NO: 19106 - DNA, 544 bp, Setaria italica
  Peptide Sequence Number=SeqID_85080
gccattagtctgatctgctatattcatttgccgctcatcttttcgaccaccaggtttggtggcctcatttgttgaagagcaggaaactcagaatcttttgcggtggtgccagcaacaacttcagcaaagggctttttcatagtaaatttggaagacctttaccaaaattaataccagagttgctcattgattccatttcaggttgttttccagtattttcaagctttgcagatttaatttgtggtgtaacttgggttacagcagatttcacttcaccagtgactactgggggagtctgagggttagtactagatcttgtggatgaagtaacagtattagaacgattgccatttctaacttgtcccttaccaacagatatcatccaccttaaaagatacctctctttggggctaaagccactttggagcaaccctttgtgcttgtaatatcttgctcctccgagtcgcaccaaacgccaagaggatactgaaaacgagaccagcatcgcgacctcttggaagcacaagcgtaggcagtagatctt

SEQ ID NO: 19107 - DNA, 1275 bp, Setaria italica
  misc_feature (1241)..(1275): n is a, c, g, or t
  Peptide Sequence Number=SeqID_85081
ccttcatggaagaaccaggatctggtgctgtggctaccatcggtgagaaacaggtttctgttggaacattagattggattagaaggcatggtgtcgttcgcaaccccttcccagaagcggagcattttggccagtctgttgcgtatgtagcagtggacggtgctctagctggtctaatttgtttcgaggataagctcagagaagattctcgtcaagttatcagtaccctatctgagcaaggaattagtgtttatatgttatctggggacaaggaaagtgctgctatgaacgtggcttcgattgttggtatccaggcagacaaggttcttgctgaagttaaaccgcatgagaaaaagaagttcatatccgaacttcagaaagcacacaggttagtcgccatggtcggtgacggcattaatgatactgcagcactggcttcagctgatgttggaattgcaatgggtggaggcgtcggggcagctagtgatgtatcttcagttgtacttatgggcaacaggttatcccagcttgttgatgctttagagttgagcaaagagaccatgaagacagtgaaacaaaatctttggtgggctttcctgtataacatcgttggactccccattgctgctggagcattgcttccagttacagggacgatcttgactccatcaatagctggagcgctaatgggttttagttccgttggtgtgatggccaactcgttgcttttgagggtaagactgagttcaaggcagaagccaagcagccaggctgagaccaggaaagagacacgcaaagccacttctgatgccctagcaggtactggtgatgaggcggtgaaaagttactcgtctaagtggagtacctgactgggtggttcaaatacacactgtgattcggtcgcaggccacgggaaatacacaagggtgggttgccagtgccacagctttgctcaaacgagtggatagtgtgagccctagattctgttggccattgatggcatcgtcaattgaacaatcaagctgatagagaggcatgggttgtaggataggtgagatcagctgctgcagtttggtattcatggtgacatcaatttctctatgtatgctactggcccccactttactacgaccttttttagacgaatccagagattttgtttgttttaacagccggctgctgtcaattttatggccctttcgggcctctctgatgcgtagtgaaatttctcaataaaaaannnnnnnnnnnnnnnnnnnnnnnnnnnnnnnnnnn

SEQ ID NO: 19108 - DNA, 758 bp, Setaria italica
  Peptide Sequence Number=SeqID_85082
tcatagtcggcaaaaaatgcttcaccatggcattatcacaatctcctagtcacatctatttcatactgtccaaaataccttccagatattgccatcagtatattcagcattaccacctcatcatccatctccgactttgtggcaaggatggttgcgcacttgcgcagcaaggaccttagagaggcacatgtctccgcatccaagggagtgtccacagctacacagagtgcaaagagccacaggccgttattccttgatagtgagtccatactctgaatcatatctatgtagttccttagcgtcgcagctctagcaacagaatccatgttgtgaagcattgtcagtgtaggttcagtctgtgactccgtgctgctgccaggttttgaggagattttcggtccaccagatatagatggttcgtcagagctgtcatgctcggagaacaccagtctggtctcagaaaaatgggtaataaatgcatcctcccattgctttgatgcacccaaatcaggtgagcacttaggtatgtcaggaatttctggcatataaggtgtttgctcctttctagctccatttaaatctaccttggcaaccttcactctaggaatttgtttagcctcccacctgacacgccgaagatactcaaaaccatcaagaggctctccagactcaaaatcagggtaggtatcaactgcaaatgcaggtttcagaatgccatcatagtcatcatcgctgtcagattcatactccacatcttc

SEQ ID NO: 19109 - DNA, 275 bp, Setaria italica
  Peptide Sequence Number=SeqID_85083
ccgggacggaaacaagaggcgaattcctcggttacgtggagggtaggatggcggccgccgcggcgctcgcgttggcgagtcctctccggcgtctcctccgcgcccctcacccgcgcggagccatctccgccccgtactacggcatcacgcgaggacggtgtagctccgccattgccgtcgccgccgcagcagccaggaattcggcgatgaaaggaagcgtggacaggaatgcagccgaggaagtcaggaacattctggatatggcagaaagggca

SEQ ID NO: 19110 - DNA, 758 bp, Setaria italica
  Peptide Sequence Number=SeqID_85084
atcgccatggagtacctttcctctttcattcttccaaatgtcacaagcttacggagacaatcacggaattctgtcagcacaaccctttcttgttctgcatacagttcagattggttctggttgacagctactgtctgctgagcaatagcattttgagaagtcgtaaacattgtatcttgttcatcacacatcagtgctagtgttccaggagacataggcctattggacttgtgatcatcagtgcagttaggtctggattcttctaaaacagctttgcccgtatgagttcccctgcttgaatggtcatcaattgatgctttgtgatctggatcttgattatttccttctctatcatggtttgtcgatcctagggaacctgcctttcatcttccttctgtcccccctttcatcttctttctctggaaccctctcttcctgtgtcttcctgccagcatatgcttttgcagcctctcctgacaccaccaccagaagcttacaaaggtcctttatgtcctctgtttggacaatgtctgctaaaaggggcctgtagctaactttaaagggccccagagtgggaggatgcgcagactggcttattggaattgaaccatcgggtactgcattcttctgaggcaggtgactattcctttgcgccacatgttccttatttgaatggtcaagtgaaggatcaatgtgcttcctcttccttgatgtggaaggagaaggaaatcctgtagctccaatagcaccatttactg

SEQ ID NO: 19111 - DNA, 504 bp, Setaria italica
  Peptide Sequence Number=SeqID_85085
tcaggcatccaatactccatcaattgataataaagttcagacttcagaaaaataattaaccaagtacagtatcattaataaaggcagaactaaataatgaagctgtaatgtaaagaactaaaggtcatggttctcaaactacctgcttgaaatgatatcccccctgtcctatctaattccgtattctctaacagggcaaaaattgaactcgaggcaagaaccacaaagaaaatacagaaacatgccatcaagaaatagctaagggaaaaatatataaacaatagtgacaggagggaacaacctataggataccttaacagcaaaatctctagttgcaaccttcttcccaagctccttcgaagcatcactcagctttacacctacagcttccccttttccggtatgattagctgcattcaggatgcagaaatgtgctagtagcacaaaacattaagattgcttgtatgttcatatgtgacaccgatagacctgacagacctcagt

SEQ ID NO: 19112 - DNA, 585 bp, Setaria italica
  Peptide Sequence Number=SeqID_85086
cgaagggtggggtggggaaagggcggcggcgtggtggaggccgtgccggagaggttcgtcgacttcgatgtcgtgttcgtgtgctacttccctgggatggggatctctgccgcggcactgctcaagtcgctgaccaagaggtgctccaaaggtgcaagagttgtcatgttcttggatcaaggcaggcagaactttgaacaacaccggagagagcatcctgatgttgtaacatctgatttgcccagtaaatcatcactggagaaggctgcatcagggaacaagtatgcaataacagattttgtggatgagcctaccttgtaccttgctgttttgcaatatcaaggataagattttctatattttaaagcaaattgtgattgcttgcgatggctagtttcagggtggcttaagtaattatatctctttggccagcttgtgttataaattttggtgccctgttcaatttgtttgagatctactgaatcaccaaggcaaatcttgaagcctggatattgatccaagcgttttgcattcagagcacacacaatgggggtgcttagtatgcatgtgcatagcgacaaaatt

SEQ ID NO: 19113 - DNA, 783 bp, Setaria italica
  Peptide Sequence Number=SeqID_85087
ttgctttacttatgattgggatttggagatggtgcaaggtggaaccttgggaagagttcatgactttctggggagtcgatgctaatgcattgtgttctagctgtgattttaaagcctttgcgggtttaatttttacaggaaaaatatgcttgcattcattcatcctggatggggaaacagcgtacttgcacgcttggttaatacagcttgttcttgaacacagatagttgttccgctggtcgctgggtttaggaaggcgcaaatttggcagattggtcaactaaaagccagcagtcaacactacatacagacatatctcttgtggtcccagggtgtgcagggaatgggtgtcatccttcaggacttcagctttggagctaactgaagttaactcgagcgctttagctagcacagtcccgaactttcagaagagcgttgttataaaaaaaagaactttcagaagagcgtgaaggaaacaccgaatcccaaattaccttagcgagcgccggatagcaggaccgatgaagacaggtaacagccgaagcagagagcagctcaccgtgtcaacaatgtgcgaatggctcttttgattccaaactcacgtcacaatgacgcgttagctgcaagtcaacaagtgattagtattatacgtcgagtgataattcgaggcacggtgacagttgtttttgaatgacagcgtagctttaggcttacggtcaacatcttgcatttgcatttgaattgaattcaccatgaactattcataaagtgctttgcatgatt

SEQ ID NO: 19114 - DNA, 1496 bp, Setaria italica
  misc_feature (1430)..(1430): n is a, c, g, or t
  misc_feature (1472)..(1496): n is a, c, g, or t
  Peptide Sequence Number=SeqID_85088
ttcccaaggttccaccttgcaccatctccaaatcccaatcataagtaaagcaagaggagaatcatgcaactgtgaaaatgcaaccttggagatggtgcaaggggagaatcatgcaattgtggcttctgtttttgtgcgtctagcggatctgtacaacaagacagggaagctgagggagtcaaaaatcttactgtgaaaatgccctaaagatttaccagaaacctattccaggagcttctctagaaaaaattgccactggttttactgatgtttcagccatatatgataaactgtatacttaatctatctgcctggggcaatttatttgcctcttgctttacttatgattgggatttggagatggtgcaaggtggaaccttgggaagagttcatgactttctggggagtcgatgttaatggtgcaaggggagaatcatgcaactgtgaaaatgcaaccttggagatggtgcaaggggagaatcatgcaattgtggcttctgtttttgtgcgtctagcggatctgtacaacaagacagggaagctgagggagtcaaaatcttactgtgaaaatgccctaaagatttaccagaaacctattccaggagcttctctagaaaaaattgccactggttttactgatgtttcagccatatatgagacattgaatgagcatgaacaagcactcaagttacttcagaaggccttaaaaatgtacaacaattcggcctgccagcagagcacaattgctggaatagaggctcagatgggtgttctgcactatattctgggcgattatggacaggcctatgatcccttcaagagcgcaattgcgaagctccgcacttgtggtgagaaaaaatctgccttctttgcgattgccctgaaccagatggggttggcatgtgttcaaagatactcaataaatgaaggtgcagaactgtttgaggaagccagaactgttctggaacaagaatacaggccatatcatccaaatactttaggagtgtacagcaatcttgctggaacttatgatgcaatgggccacctggatgatgccattgagatcttggaatatgttgttggaatgcgctgaggagaagctgggtaccgcaaacccagacgtcgatgacgagaagcggagacttggggagctgcttaaggaggctggccgggtgcgaagcaggaaggcgaagtccctggagaatctgctcgagaccaacccatacactgtcaccaagagaaacacagttgcggcataaatgactgctctgatgaaaagtgtggaatgttactaaggtatattcaattggtttgttcgaatggggcaattgtagtggtgcccgcctatctagaaatatgaagtgttcaaattgattgttgtaaagtttcaaatgctatcaatttaaacttgttcagtgccttttaaaaanaaaaaaaaaactaagaagaactagaccaaaggacaacaacgnnnnnnnnnnnnnnnnnnnnnnnnn

SEQ ID NO: 19115 - DNA, 2719 bp, Setaria italica
  misc_feature (2622)..(2719): n is a, c, g, or t
  Peptide Sequence Number=SeqID_85089
ccacctcctatggcaaggcagcctcccccgacctcttcctaaccttcctaccaggctctcctcctcccgcaacggacctgacggttcattcctccatcggcctccccgccgcacgagctgctcgaccccctccaccgcggccggcaggcgcacgtgcaaatgccgcgtggatcgagctgctgagcgctgatcacgggtggagagctggagagctagccatctgcttcggtttccgggattagaacgtttttggcgtaattttcgcccaagatgcctggaattacagtggatgggcttgtcacagaggaggcgctgaacggggtgaattcctctcaaaacaacgagcatctgtccgctccaaagtcgacggcagcttcaacaatggcggcaagcatgcaaagcgaggcacttgagatgcatgttgagggttccggtgctggggagccctcaattgagcagctctacaacaatgtgtgtgagatggagagctcaagtgagggtgggtccccatcacgtgagagcttcggctctgatggggaggaatcaaggattgactcagaacttcgccaccttgttgccggggagatggaggccatgaaggtgattgaggaggaagaggagaacggaagtgttaccaatgcgctccctcctgcagagaatgggaccccagtcaaggcgcagtcttccaattcgtccaagaagtcgaagaaggcctcaaaatcacagctcgagtctgatgcctctgttggccctaatggaaaggcgtctactgaggatggcgagagcgaggtcagcaaaccagcaagccgagttggccgtcggcggaaatcaaatgccaatccacagaatggaacagaagatgctggacttgataatccagaccttggtccatttcttctcaaacatgcaagagacttgattgcctcggaaaatccacggcgggcattgaaatatgctctccgtgccaccaagtcatttgagaaatgtgctggtggaaagccgagcttaaacttggtgatgagtttgcatgttgttgcagcaatctactgcaacttgggaaaatatgaagaggctgtccctgtgctgcagcgatccctcgagatccctgtaatcgaggaaggtcaggagcatgctcttgcaaagttttctggctgcatgcagttgggggacacctatggcatgctaggtcagactgcactctcactgcaatggtatgcttctgggcttgaaattcagaagcaaacattgggagagcaagacccaagggttggagaaacttgccggtacttagctgaagcccatgtgcaggcattacaactcgatgaagcacaaagactgtgtcagatggcccttgacatacacagggaacacggcgagccagcctcactagaagaaacagctgataggaggctgatgggtctaatttgtgacaccaagggcgaccatgaagctgccctggagcatctagtgatggctagcatggccatggtagccaatggtcaggagatagaggtggcctcagtggattgcagcattggtgatatctacctctccttgggtcgatatgatgaggctgtgtttgcttatcagaaagctcttacggtattcaagaccagcaaaggagagaatcatgcaactgtggcttctgtttttgtgcgtctagcggatctgtacaacaagacagggaagctgagggagtcaaaatcttactgtgaaaatgccctaaagatttaccagaaacctattccaggaacttctctagaagaaattgccactggtttaactgatgtttcagccatatatgagacaatgaatgagcatgaacaagcactcaagttacttcagaaggccttaaaaatgtacaacaattcggccggccaacagagcacaattgctggaatagaggctcagatgggtgttctgcactatattctgggcaattacggagaggcctacgattccttcaagagtgcgattgcgaagctccgcacttgtggtgagaagaagtctgccttctttgggattgccctgaaccagatggggttggcatgtgttcaaagatactcaataaatgaagctgcagaactgtttgaggaagccagaactgttctggaacaagaatacgggccatatcatccagatactttaggagtgtacagcaatcttgctggaacttatgatgcaatgggccgactggatgaggccattgagatcttggaatatgttgttggaatgcgcgaggagaagctgggtaccgctaacccagacgtcgacgacgagaagcggagacttggggagctgcttaaggaggctggccgggtgcgaagcaggaaggcgaagtccctggagaatctgctcgagaccaacccatacactgtcaccaagagaaacacagttgcggcataaatgactgctctgatgaaaagtgtggaatgttactaaggtatattcaattggtttgttcgaatggggcaattgtagtggtgcttgcctatctagaaatatgaaatgttcaaattgattgttgtaaagtttcaaatgctatcattgtttacttgttcagtgcctttatactgtccttgtgaatgtgagcggtgactactgtttctcctttctaaactnnnnnnnnnnnnnnnnnnnnnnnnnnnnnnnnnnnnnnnnnnnnnnnnnnnnnnnnnnnnnnnnnnnnnnnnnnnnnnnnnnnnnnnnnnnnnnnnnn

SEQ ID NO: 19116 - DNA, 808 bp, Setaria italica
  Peptide Sequence Number=SeqID_85090
gtataattggaatttggaagtatttttcaccaacatggtccttgagttcaccaattcattttcttcacattttcagcgtgttccttgagtttaagggtcttgttaattagtgctctgcgctatatatacctcttgtatcaagcaccactattcattttcctattgtgtgtgcaatcacacttgcagaaaagttcatatagcttcttaatctgttctatagaagactgcctgtctgctgcctttagcgctagcccatcaacaagcttgttgctgctgatgcaaagttgaactttgatgataatgcggcatttagacagaaagaaatatttgcactgcgcgatacaacacaggaagaccccagggaggttgctgctgccaaagcagatttgaactacattggtcttgatggagagattggttgcatggtgaatggagcaggattggccatggctaccatggacattatcaagttgcatggtggcacacctgccaattccttgatgttggtggaagtgcatcagagggtcaggttgtggaagcatttaagatactgacttcagatgatagagtgaaggcaattctagtgaacatttttgggggcatcatgaaatgtgatgtgatagcaagtggaattgtaaatgctgctaaacaggttgacctgaaggttcctgttgttgttcggctagaaggcactaacgtcgaccaagggaaagaggattctagccgaacaacaacaggttgacctgaaggttcctgttgttcgttgggactacgtaagggcccaaacggtaaccgtaccgaacccaaa

SEQ ID NO: 19117 - DNA, 1851 bp, Setaria italica
  misc_feature (1801)..(1851): n is a, c, g, or t
  Peptide Sequence Number=SeqID_85091
ttttagtttttacttttttactttttaattttaagttaaactaagtaatttaaagtaaagtacttaattaattagtaaactttttacttgtgtattgtattagtagttgtaaggtctaatttcttagttgtaactactattctattgtaaattgtaaggaaacggaaagtgaaaaggaaggggaaaagaggaaaccgcagaggaagcgtcttccttccacgcttgtagggtttccggatcggaggagccagccccgcccaggtcgccgcagccatggttcgcggatcgctcgggaagcttgcgtcccgcgccctctccgtcgccgggagatggcagcaccagcagctccgccgcctcaacatccacgagtaccagggcgcggagttgatggggaagtatgggatcaacgtgcccaggggcgcggcggtcgggtccgtgcaggagctcaaggacgccttgaagaacgcattccccgaagagaaagagatagttgttaagagtcaaatccttgctggtggccgagggctgggcactttcaaaagtgggctgaaaggtggtgtccatatcgttaaggctgaggaagctgaaggaattgcgagtaaaatgctaggccagattcttgtcacaaagcaaactggtccagaggggaagattgtgagcaaggtctatttgtgtgagaaactgtcacttactaatgaaatgtactttgccatcacccttgacaggaaatctgctggtccgctcattattgcctgcagcaagggaggaaccagtattgaagatctagcagagaagtatcctgacatgattatcaaggttcctattgatgtattcaagggaatcacagatgaggatgctgctaaagttgttgatgggctagcgctaaaggcagcagacaggcagtcttctatagaacagattaagaagctatatgaacttttctgcaagtgtgattgcacactgctagagataaatcctcttgcggagacagctgacaacaagcttgttgctgctgatgcaaagttgaactttgatgataatgcggcatttagacagaaagaaatatttgcactgcgcgatacaacacaggaagaccccagggaggttgctgctgccaaagcagatttgaactacattggtcttgatggagagattggttgcatggtgaatggagcaggattggccatggctaccatggacattatcaagttgcatggtggcacacctgccaatttccttgatgttggtggaagtgcatcagagggtcaggttgtggaagcatttaagatactgacttcagatgatagagtgaaggcaattctagtgaacatttttgggggcatcatgaaatgtgatgtgatagcaagtggaattgtaaatgctgctaaacaggttgacctgaaggttcctgttgttgttcggctagaaggcactaacgtcgaccaaggaaagaggattcttaaggaaagtggaatgacactaatcacagcagaagatcttgatgatgcagcagaaaaagctgtaaaggcatccgtcaaataactgtagtgtatcagtctgaaatttctttttacaagatgagcaatgctcttttacggatttcggatcagggctgaagttgtgaactcatcttttttgaagaggggttattttggcttgagttttcctgttaaacgttgccagtgccaaaacggaatgaaacgctgttgtctcatgttaataaacatttatcggtgcgattgggcaactacttttcaaatgcattacattttaaaccctaaaaaaaaaaaaaaaaaaaaannnnnnnnnnnnnnnnnnnnnnnnnnnnnnnnnnnnnnnnnnnnnnnnnnn

SEQ ID NO: 19118 - DNA, 1186 bp, Setaria italica
  Peptide Sequence Number=SeqID_85092
tttttttttttttgttttagcaatttgcatcctctaatataaccgaatgtaaaaaagttacagcgtgagatagaaccacatagctgcaactgtggtgcagacagcagtgcattttcagtgctggatctaaagagtgttgagaaactagtacaactgtacaatgaggcgaggttgccatgattcaaggccacgctccagctcttcacaaaggaagattatttggtggcccaagggctgcagttttctttaacagcaccattatgtacagaggctgctggtgaatcactcgttcacctgaggcccagcctctgcgggcacttcaggtgcaggtgcttttgcgagtcccaacctctgcaggtgcttcaggtgcttctctgcagctgccttgtctgcagcttctcgcttctgagcccttttcgcccgccttccagcgacatccttggatactgacccagaccctgaccctgacgtcgatgctgccttttccttcttctttggggtcctggatggaccagctgccgcatcattattcactggcctcgcctctctcctgcctcctcggatgtacccattgtcaccccatctcctgttaccaatacgaaagcttggggacctgctcatgtaataagtttcctcgtcaagatcatcttcatcgtcatcatattggtactggtggtaaaactcgtcttcttcaagagcctcttcatgaggctctacgatcagaggttcaaaccaagcggccctcaggagaaggcaaacgctctcctcaaacaggtagtcatgtaggcagccatcaagagaacggtgcacgctgaggaattcaaatgggtgcttgcactgtgggcatagaggggtctgcttgtaggatgcccacctcaaaatgcatgttacgcagtaggcgtggtcgcatcccttgacgagggccgtctcctggagcgcgatcttatcgaggcaaatcgcgcacaccccgcaatccaccacccggtcgccaccgctaccagaggccgaagccgccgccgccttgtcgagggggagggctgctggcacgccgacgattccctcggaggaggacaaggcggcagctgcagcggcggcggcggccatgtcggtggggaaaggggtgcgggcgcggccctctggttaggttgggtcggtgaaggaagaaggggacgagagcggagcgaat

SEQ ID NO: 19119 - DNA, 520 bp, Setaria italica
  Peptide Sequence Number=SeqID_85093
agggaaaatggtgtttcctttgctcagttgcaatagaaatggattgcttttaatcctagcagtcctgtccctacgatttctttcagatagtagattcttttcctaatctttctcctccttgctacagcttgcagtatttgtatgtgatgatgttccaaaggttgttcttggggacccttggaggtttcgacagatattgacaaatttggtgggcaatgcagtcaaattcacagaacggggtcatgtatttgttcgggtctgtttggctgagaactcaaatgtggaagctaatcaggtcatacatggaaccatgaatgggaaagatggtaaaattgagtcaacagctaatggtgccttcaatacattgagtgggtttgaagcggcagacagacgaaataattggcaatattttaagctgctgctctctgacaaggagtcgcttttggatgatcttgatggtgaaattcttaattctaaaattgtatttcttgtaccgttcgtttcttacttattttggttt

SEQ ID NO: 19120 - DNA, 607 bp, Setaria italica
  Peptide Sequence Number=SeqID_85094
atgacaaagtttcagaagattgtagaaagatggaagaactcaaaactcaggcagaagctgctgatgtcgcgaagtctcagttcctggcaactgtatcacatgagatcagaacacctatgaatggcgtccttggaatgctggatatgcttttgggaacagatctgaccatgactcagaaggattatgctcagaccgcacaaatgtgtggcagagcattgataacactgataaatgatgtccttgatcgagcaaagattgaagctggaaagttagagcttgaggctgtgccttttgatctgcgctctctcatggatgatgttatttccttgttttcttcaaagtcgctggagaagtgcatagagcttgcagtatttgtatgtgatgatgttccaaaggttgttcttggggacccttggaggtttcgacagatattgacaaatttggtgggcaatgcagtcaaattcacagaacggggtcatgtatttgttcgggtctgtttggctgagaactcaaatgtggaagctaatcaggtcatacatggaaccatgaatgggaaattatgggtaaaatttttgttagttttcttttaactttttattaactttta

SEQ ID NO: 19121 - DNA, 259 bp, Setaria italica
  Peptide Sequence Number=SeqID_85095
aaactgcaagcaaaatgtatcaaggagataaaaaagtaaaaaaaaagttaaccagaaaactccgaagtctgaacatgtccagcaccagagactgaattcaagcaacaaatcatttcttttgccaatttttcttctatttagcttctccgtagttgtgtcagataaaatcataaaagaaagtgttgcatttatctgcattaatcctgtcttaagcaaagatccatcaactcttcatgccatcacatcaaaatttcatccg

SEQ ID NO: 19122 - DNA, 562 bp, Setaria italica
  Peptide Sequence Number=SeqID_85096
caccgagacatcaaggcaagcaatgtgctcctcgatggcgggatgatcgctcatctaggcgacttcggcctcgcaaggctataccgaccatggcaccgacctacaaaccactcatgtggttgggaccatgggttacattgccccggagctttcacgcacaggcaaggcatcccctctcacggatgtcttcgccttcggcacgttccttctagaggtcacctgcggtcggcgaccggtcagcaacagcgtgcaacatggccgggcattgttagttgaccgggtgctcgagtactggcacagaggagctctcgaggagaccgtgtattcgaggctgcaaggaaactacaacattgatgaggcaaggatggtgctgacgcttgggttgatgtgctcgcacccgttcccaagtgaaaggcctaccatgaggcaggtcatgcagtacctcgacggcgatgtgccgctgccggagctgattccggcgaacatgagcttgttaagtctcatgcggaatcaagtgtcgttcgaccagtctgtcctgcagtacccgtggtccggcgaccag

SEQ ID NO: 19123 - DNA, 470 bp, Setaria italica
  Peptide Sequence Number=SeqID_85097
cgttgcgtcgcggttgttctacctccatgaaaagtgggagcaggtcgtcattcaccgagacatcaaggcaagcaatgtgctcctcgatggcgggatgatcgctcatctaggcgacttcggcctcgcaaggctatacgaccatggcaccgacctacaaaccactcatgtggttgggaccatgggttacattgccccggagctttcacgcacaggcaaggcatcccctctcacggatgtcttcgccttcggcacgttccttctagaggtcacctgcggtcggcgaccggtcagcaacagcgtgcaacatggccgggcattgttagttgaccgggtgctcgagtactggcacagaggagctctcgaggagaccgtggattcgaggctgcaaggaaactacaacattgaatgaaggacaaaggaataggtagactaagaaacgaacttaagggttaagaaataagtaagaacaa

SEQ ID NO: 19124 - DNA, 412 bp, Setaria italica
  Peptide Sequence Number=SeqID_85098
tctactaatgttactaccgtttgtctatttgtatttctattctattctagtcttgtactattacgcatctgtgcttagtttacaataattttacatcgtcgggcacgtccaggcagctgctagctggtctggtctggtctgatctgaagagctcacgagcacaaagcaatacgctggcgcgtgcaactactacacgcctactcacgagcagagggcacatcacttgccggggacgaagttggtggcgtacgcccatgcgttgttggcgacggggtcggcgacgtggtcgaagaggttctcgatgggtcccttgccggtgacgatggcctgcacgaagaacccgaacatgggagaacatggcgaggcggccgttcttgagctccttcaccttgagctcggcggcggtgtccgg

SEQ ID NO: 19125 - DNA, 578 bp, Setaria italica
  Peptide Sequence Number=SeqID_85099
ttttgagaaaaacaaacgttgttcgtgcacgagtgtgtcccatgagataactaactgaagatcgatctgacaagtgacggttcactcacgaatggtacaccgttgcattgattcatcatcagctgacatacgcatctgtgcttagtttacaataattttacatcgtcgggcacgtccaggcagctgctagctggtctggtctggtctgatctgaagagctcacgagcacaaagcaatacgctggcgcgtgcaactactacacgcctactcacgagcagagggcacatcacttgccggggacgaagttggtggcgtacgcccatgcgttgttggcgacggggtcggcgacgtggtcgaagaggttctcgatgggtcccttgccggtgacgatggcctgcacgaagaacccgaacatggagaacatggcgaggcggccgttcttgagctccttcaccttgagctcggcggcggtgtccgggtcgtcggcgaggcccagcgggtcgaaggcgccgccggggtagaccttgtcgagtccctccccgagcgggccgccggtccgcgtcggttagtcccttcgt

SEQ ID NO: 19126 - DNA, 1269 bp, Setaria italica
  Peptide Sequence Number=SeqID_85100
ggctcactgcagacttcaggacgcacggaccattcacatcttacactagcagcagcagcctgaaattaacagcgtcattgcaagacgccatccagcagcagctccacagctcagaaaaacgtgcgcaagaggagagctgttcatcggtcatcagtagagtgagttgtaagtgcagaacgtcgcgacgatggaggccacgcaaatcaacaaagacggcagcagggtggcattcaggaggcgactctgccccagataaccggcggcggtgatcgtcatgtccgcggcgacgcgggccagcgtcccggcctccgtcgagagcagcccgccgttgtaggtcccacgggagagcctcgacgacatcacgcgggagaggagggacaggttgaccccttcgagcacctcagagaatacgaacgttatgagagctgacgtgacgtattgtgggacggagtattgaggggtgaagcagaaactcatgactatgccgatcaacaccatgatctcggatgccaccagaatttgcctgtcctgaaacaagttggtgacatagcttccagactcggtgtgagtagtaagaacagtcagtccaagaactgctaaaaagattgccacagtactagttgtccagttgaagtagaatgtggtgaccacactggactccgagagtagaatttccatggcaaacttgagcatgaagtagatcagtagttgaaccttaacggatggtgttagcaatctgtatgctgcagcaagtgatgtcgcaggtttatgagattcttcagggtcttcttcattgtcgtcattgtcctctccatcttcatcgtgtctttcctttacatctacgagcaaaggctgtcctagaccatcctccaaatttccgcttacttgatgatcagaatcagatgactgtgagttgacagaattgtctgtagcaatgtgacccggctctttgaatgaaatccacaaccagcacagatacacaagccaagcaacgcacatgacccacccaggtaaggtgttctgattgaatgtgagcccatagatcctaaattttgtctgcagcaaaccggcaagagcaggaccgcatgccattccaagagcactagcactgacaaaccctgcagatgcctgcagcctggttttcagaggtacgcagtcgctgatgtaccgacgattcacagctctggcagaacccaagccacacagcagccggccaacaatgagaacagttagggaattcagatcatacgccaaagcatacagctacgg

SEQ ID NO: 19127 - DNA, 2031 bp, Setaria italica
  misc_feature (2016)..(2031): n is a, c, g, or t
  Peptide Sequence Number=SeqID_85101
tgtttcttctgccaggggaagtgatgatggctcgtgtatggactatgatatatttaagttatctcttggcaatgaaggtacttccaagctgcataaacaggcttgtgattccaggaggccttttgagaagcctgggttggatcttaagttatcattggcgccatctcaatctggtgtcactgatgtagacctaattagaaccactgcacttcaggagacttttgtgcagccacatattatggctttagtgccaacagttgatgaaggatctacatctgctcgacgtccacatggaggcatggtgctttctttccttaaccaggctgaccgattctcaggggtttctttgagccaagcatttccagtgagctctaatcaggttcaagctccagctcctccaacaccaacagtgctccaactgccgaaaagtccagcagcctgctcttccgggtttgtccattcacagcagcgcagcagtagcacaaaagtttgttcatactcaggatgtgtaaaaggggccagaggttcctcagggcgatgcatcgctcacggtgggggtagaaggtgccaaaaggatggctgcaacaaaggagcggagggcaagaccatcttctgtaaagcccatggaggggggaggcgctgtgactaccttggatgcaccaagagtgctgaaggccgtactgattactgcatagcccatggcggtggtcggcgttgcagtcaagaaggatgcaaaagagcagcacgagggaaatctggccgctgtatcaagcatggtggcggtaagaggtgccaaaagctaaactgtacaaagagcgcagaagggcggtcaggcatgtgcattgctcacggaggtgggcgccgatgtcagcatactgattgtggcaagggagctcagggcagcactaatttctgcaaagctcacggtggtggcaagagatgcacacaccctgattgttccaagggagcggaaggaagtacaccattctgcaagaaccatggaggtggcaaacgctgttcagctgaaggttgcaccaagagcgtgcatggtgggacccaattctgtgttgcgcatggaggtgggaagcgctgcattgtagaaggatgcaggaagagtgcaagaggccgcaccgaccgctgtgttggtcacggtgggggcaagcgatgccagtccaccggctgtgggaagagtgcgcagggaagcactgacttctgtaaagcgcacggtggaggcagacgctgcttgtgggggcaaccaggttcagacctgggatctggtggcgctccttgtgaccgccttgcaagaggcaaaaggtgcctgtgtgaccagcacaacgccctggtggacgacaacagcgtccacgggggtgcctcatttggtgttttcagtatggtaagcgacgccctttctcacggagctagtcctccaagcgctggaacaagcatgcacagcttcttcatgcaccccgtggaggctcctcggcgggcaccagcctcagcccatgagggccgggtgcatggtggtaacttcatgcccatgcttgatggcggcgtgagcctaggaaagaagcccaccaacaatgttgatgctggttctagtacctccgcagctcgcagctggaaatcatcaggtgacattgaaaagcctagcagctcagcacggcgcagctggctgtaatgccagagttccttctccgccagccctccatcttggtttgctccatttcgtcttgaaagtatctcccatgtcctctggtgtgaaatatatgaatggtgtattgtctggtttgctcagcacgactattgtgtgaaattgtctgtatggtgattggtcaggagtcagggcttccttgtttgtcgtatgtgcgttgtaacagtggtatggtcgtgtgtgctctataatagtcgtgttgtccatttcaaaaaaaaataatagtcgtgttgtatgatataaataaaggatgaaggttgaataaatataagctaattgtagaaaattaaaaaaaaaaaacaaannnnnnnnnnnnnnnn

SEQ ID NO: 19128 - DNA, 1970 bp, Setaria italica
  misc_feature (1)..(19): n is a, c, g, or t
  Peptide Sequence Number=SeqID_85102
nnnnnnnnnnnnnnnnnnntttttttgacgtggaatggatgcttctctgcctttttggatcgtctcaccaaacaagttacaacatgacttgttccgtactactaccaactcttttacattggtacatcatcagaccaagagagccaccatccatcttgtcatctagttaatggcaggagacacaaatctcctgcgaactaagaacacccacctaaacaacatacggataaatcctacagaaaataatcctacgtgactcaactcggagggcgcacggctgactccttgccgaagctcacgatgtggccgtatgatcgcaaaccatgctgcagtgttttcgcattatgtgcgaaaatgctgggtggttcgcatgagatcttacaaggctcagaagtcccatcgatccagctgcagcctagcttcggccatatccttttgagccttccgtcgccggtagaaaattgggcaatcccgacttgtgcagaggacgtcctggtgcagagacccctggcactcctggcattgcgtccatagcctcccaaagagcacctccaggtcagaaacatttgctactgttttgcagtataactctgcttcccttcccttgcaatgtgagcaaagtgtctgactggcaccactgataacggctttgcatccaaggcaagtcaaatgtttctttgcaaacttcattataccgctatttgaaggagtagagatcgaaacagatctggtgtggcttccatgaagcaattctttgctggcattcttcaggattggctcgaagatccgcaaaagtggcttgctaatttggttctcaaggtagtattgaggatctatgggtatgttattgtccaaaacatagattggatcttctgacttctcatatgcctttgccccttttgctgctttaattataacataaggaacacgatcaccaacagtaggtgcagtagcaggatccctctttcgcattctctcagcaagctctacatgagcagcttttaccgcataatcttctcctgttttagtcaaaccctttgttataacaagaagagacaagtccacacgattcattaatagatcagatatggtgttcttgacatattgaactgcaccaggaatatcacggtccactagtattttatgaaggcactcagttaccaggttctttactaataaacagttatctcttcttacagtttcaataccttttgcatccattttgtcaaatttctcaggattcgtccagtacaaaccagcatatctcttcttgctgatcagcaggtaaggaaagtagaccttctcaaactccagcttgatgggcttagtaaatgttccactaatataatctgcagcttctcttcctaacttcattgcatcttcaacagtagaagcaccaaactgtaccatcactgaatctgtatccccgtaaattacctctgcattatgctcatagcctcctactgttgtgaatttatcttcgacaagcttttttgtatgttcaatcatctgtcgaccatagctggtcacacttgaagaaatctccaaacaaggtaattgaccaacagttgcaccagtgaaaccataaactgagtttgcacttattttcaatgcaagctgacgaccatcaagaacagccctttcgagtgggtcctttgcttcctttaaatctgcttttgcccttttccgagcagctaacaattcttcaaggatctcaggaagtatacccttctgtagctctggtttcacaaatatttcaccagatggagttttattgaggctttctggaggtaagttgagtttccgggcatcctctgggggcaccaaagtacagtagcacagattatacgccatcatgattgatggatacaaagaagcaaaatccaaagttgcaatgggcttctcataaaatccagcccttgcctccaaaacagttgcaccctcaaaggtatcttgtccagacccttgac

SEQ ID NO: 19129 - DNA, 1281 bp, Setaria italica
  misc_feature (1230)..(1281): n is a, c, g, or t
  Peptide Sequence Number=SeqID_85103
taacgaaaggggggaaaggaacaaacagatcgagggagaagaaaaaaaaatccaccgtcttctcgtggtctcctcctcctccttccaaaccctagctgccccgccgcccccacacctcgccgtcaccgacgccgccgcgcgccatggcgaagtcgcggccgcccaagcggatcctcgagtcttacaccatcaagggctccgacagagtcatcaagcctggtgattgtgtgctaatgagagcatatgatgcatccaagccaccctatgtggcaagagttgaggcaattgaggcagcaggatctcgaggcacaaatgtgagagtacgggtgcgatggtattataggcctgaggagtccattggtgggagacgaccttttcatggttccaaggaggtcttcctctctgaccactatgatttacaaagtgctgacacgatcgaggggaagtgcaatgtccacagcttccgtagttatacaaagcttgattctgtcaatgctgaggacttcttctgccgctttgagtataaatcagctacaggcagcttcgtccccgatcggatagctgtgttttgcaagtgtgagatgccatacaaccctgatgatcttatgatccaatgcgaggaatgttctgactggtttcatcctgcttgcattgggatgactatcaaagaagcaaagaaacttgagcattttttctgccagacttgtacggctgaaaatgggaagatggcagagaattctcatgaagctacagcgcagtcagaagaaaagccagtggagtcaaaaagacggagacggtgatggccctgctgattaatctatgacaactgctcggttgtacaaaagccttctgaggtctgtaatgccatttgttgttgcagtctgtggctctaggggtccttctgatgtcaggcacatgctgtacatagcttgcaacctgatgagattgttgtattagagagagcatactaggatatttgcatggtagtgttggactatcagagtatgtgtagagtatggcagcatcatgccagcatcaggtgatcaatctttgggcattttaggactcgttcatcatctagcaataatatcgccacacagctgggcctggccagtcatcgtgtttgttgagaaaactctgtacttcatgtgaactttgaaattctctatgtaatgcaagcatctcggtgtggtacctgcaaaatgctgcttgggattggaatcctcccgnnnnnnnnnnnnnnnnnnnnnnnnnnnnnnnnnnnnnnnnnnnnnnnnnnnn

SEQ ID NO: 19130 - DNA, 397 bp, Setaria italica
  Peptide Sequence Number=SeqID_85104
ggaccagtgaaataaatcttgtgcacagatgatgggttgatgcccttcttgatattgttcacaatctgaacaccatgtttgtcagcacgaaaaaggtacacaaaaagggtagcaagaatgaccgaagttataggagcaatagctggcacccagaaatacttcttattcttttttccaatgtactttgcaagcagaagaaaagccaggaaagtgaagccaatcacaactgtctgccagttccacccatgatgaaccgaaccccaaacagactccataacagaaactatatccgtttcctttgtgaagttccttgatacccaacacatatttgagctgctgcagggcaatagtgattgctgctccccccatgaatccaacaattgcagcatgcgacaag

SEQ ID NO: 19131 - DNA, 326 bp, Setaria italica
  Peptide Sequence Number=SeqID_85105
gacaatgtcaatgccaagattcaggataaggagggtatccccccggacccagcagaggctcatctttgctggcaagcagcttgaggatggtcgtacgctagctgactataacatccagaaggagtccaccctccaccttgtcctgcgtctgaggggtggcatgcagatatttgtgaagaccctcactgggaagacgataactcttgaggttgagagctccgacaccattgacaatgtcaaggcaaagattcaggacaaggagggaatcccacctgaccagcagaggctcatctttgctggaaagcagcttgaggatggccgtacgc

SEQ ID NO: 19132 - DNA, 295 bp, Setaria italica
  Peptide Sequence Number=SeqID_85106
accaccagcaggtagtcgctcctacggtatgtggtgctgctgtcagtaaagtagacgtcgccggtccgctggtcgacgtccagcccgttgaggaagttgaacggctcgccgccggcctcggccgccacgacctccgcgagcccgccgcgcgccggcaccctgagcagccccaggtacgcgtcggcgacgtagaggtcgccggattgccggtggaactggaggcccagcggccgcccgcacacgctctccggcaccaccagcttctttctccggcgcgcacatcgccacgtttctt

SEQ ID NO: 19133 - DNA, 229 bp, Setaria italica
  Peptide Sequence Number=SeqID_85107
ttgggtcgtcgtcttggacaggctgtgcgggtgcgcggagggtcgcgccgcgctgttggcgcacggcgccggcgtggcgaccgtcggctggaaggcctttagggtgtcggacgtggccaccgacaaggcggtgcgggtgctgcggtcggtggcgaggcacgcggccacgccggcggtggtgcaggagatggcgcacaccggcgtcgtgggaacgctctgcgcggtggcg

SEQ ID NO: 19134 - DNA, 257 bp, Setaria italica
  Peptide Sequence Number=SeqID_85108
ccaacgcgcgcgcgcgcacccaccggagccgtgccgtgctctccacaacgacgcgccgccaccaagatcgtgcgcccggctgacgcgactccacacaccatgatggccaactccggccaggccgtggtcgacatcgacgaggccggcggcgaggccatgcggccgccggcgctaccgccggtcccctacgtgctcaacttcaccgacctgtcgtacagcgtcaagaagggcggcgggctgctgggctgcctccgtcg

SEQ ID NO: 19135 - DNA, 815 bp, Setaria italica
  Peptide Sequence Number=SeqID_85109
caactattaattcttaatcaagttgtgaaacgagagtgtagcttttcctttgaatttttccatgctagtatttacactttattactgtaataaagtgtaaatactagttacacttattgctacttgaatgaaatggcagagcagtaggagctcatgggtaatcatgtaagtttagtattgtttgtatgacttgcctgtatttttactgaactaaattgggctaggttacttatttgcacagaatctatctaatctgcttatctcttcatgaccacctgtgggcacatgtttgcattttcttccagcagatgaacattagatgaaaaacagtagccgatatctcctgctacactggtttagtgtcgtatacagaatggcacatcatttcattttccataccatcttcttgattatgatgatcattagttttgctttccattctttgatcatttgtcctgtattatcttgtgggtacgcccagtactccttgggtacattttcccatgactgatactaaatttcatgcaggaatcaggtcatgcagaagtccaaaaggattcccaacgggctgcaccatctgttgcagtttcatatagcacagcacatccaaccgaggatgcagattcaagaaccctctatgttagcaatgttcactttgctgcgaccaaggactcattatctcgccatttcaacaagtttggtgcagtactgaaagtagtcattgtcactaatgctgcaacgggtcagccaacagggtcagtttattattaatgcttgttgtagctgggataagaattttgtcatgctatttttta

SEQ ID NO: 19136 - DNA, 2340 bp, Setaria italica
  Peptide Sequence Number=SeqID_85110
atttcttgttagtactaactaaattctgtgcacacaactgaatcaagtacagccactaggggacgaaataagagggaatggaaaggaattggtcgggacggtaatgaaaattttccacttcgaagtgtactaactgatattcttcacggagaggagaaaagaacacaaaagtccaatgaaatacgacaccctctatcaaaacaacagaatggcaggaagcgcgaaagggatgatgagccgcagcaaacaaagagagacgtctcatcacgtcccatgattggtggtggtgcttcccgccgtcttctacagtttgctgttcgagatgcagtaaaagctgtacagccaaccagcagctcttctgaaccagcatccaagcgtctgcgctctgtggtttccacaacttctgcagagaacatgcatgataggagatcagaaagatctcaagacaacctgagcgataggacatcagcaagatctcaagacaacccgagtgatagaagatcagcaagatctcaagataacccaagtgagagaagatccgaaagaactcggccagtgttacagttacagggagctgctttagctcttagagctgcagcggaagctgctgcagattccacgaaggttagatctactggaagtgttttcaagcgattgggtcatgggaatgttgtgaaacagccatctcgttctcgtgaagagaagagagattatgaagattttgaaccagttatggccgtagatgaacgggattctgatcgatatgttaataatgaggaatccgaagaggaatctggagagctgaccattgcagatagggtagctgcaatgaatgttgatttgagctctgaagatgatatggagcgagatgaggggatttcaagataccaaacctgtgtgtcacctgacggtgctttttcatcatttgaagacaagaaagctttatcggcaaaatgcagtggtgaacttgagactgatgcaataaggccttcaggtgttattgacaaggagcgatctgttccttcatcaacagaaacagcaagtaaagctgtgcctatttctgttgatgtaaatacggtggtacctctcagttatgaaactcctaaagatgttcatgttgtggagaagccttacacacccatgaattcaaatgccaccagtgtggctaccaatgccaaagaatcaggtcatgcagaagtccaaaaggattcccaacgggctgcaccatctgttgcagtttcatatagcacagcacatccaaccgaggatgcagattcaagaaccctctatgttagcaatgttcactttgctgcgaccaaggactcattatctcgccatttcaacaagtttggtgcagtactgaaagtagtcattgtcactaatgctgcaacgggtcagccaacaggatctgcctatgtagagtttttacacaaagaatcagctgaacgagctctgtcattgaatggcacatcatttatgacgcgtattctcaaggtcgtccggcgaagttctcatgaagctgctcacttttatggttggcctggtagtggacgatcatcattgtatggtaggcacagtaggatggcatacccaagggctgttctcccgggcggttcctttagagggcgtgctccgatgaaacctggtgctagaagtttacagtggaaacgtgagccttcaggcactgattcaggtacgaaaactgacatgagtgtgccgctatcctctgaacaggtgctcccgcctgccacatagagggagcatattatagttgagctgataatcagaaccaatcggtatcttgcttgttgcccctaatggttgaatctggacagcatgctgagaagattgttccttcatgctgcactgtaaaaagtctaaaaaaaagcatgaaaaatacaaaaaagtcaaaaataagaaaattggggaggagtttggcatcagatatgatgataagctatcatgctggagttggtcctcttcgcaatatgtgagagtaggctgacatactccgcaagcagttttccttggacttcagccatctgaaagaggatcattcacatatgcagtgatcaccacactttggttgtgttggtggtctctggacaaggattgatgaacataatgcttcgcattgtgggatggaagatgcttatcaagtagaacaagatgagcagattttggacaagatatttaccaacggtatcattgatgtaagcctcaattgtatagcagtaacctatctatttatactcttttctctgaatcaatctctttcccagcaaaaaaaaaaggaaaagaaggaaaataaaaaaaggttctttttcccttaaaaaaaaa

SEQ ID NO: 19137 - DNA, 375 bp, Setaria italica
  Peptide Sequence Number=SeqID_85111
cccggcatgtaatgtgctgtctagttggactgtgtgtcatgccccttacaattgataaccttgctgctacaatgatatgttacaattgagaattttcctggtgcttaagtggtgagaacaacattttatgctcactttgtgcttttcttatgttggtctcccacaggagcggctctgtttgttttctgatccacaagtatggatatcgagtggaaaaatctttgctaattagttggtttgaagcaagttgcaaagctttgagaagtgtcttgagccatgcaaatgccataaagtttcaggactcaatactctggcttctcagggctctcaaggagttctccatggtgctcatgttcaatcctagggaggaatcac

SEQ ID NO: 19138 - DNA, 782 bp, Setaria italica
  Peptide Sequence Number=SeqID_85112
gcggagaacgcaggcagaagaggttggggatcatcatcaatgctgccgggatctcctctccacccagctcctgccaattgaatccgccggcgctaccttcgatcgaggtttgctcgaggccgcagcgctccggcactgccatgagaggatgacccccgcgcaggatccgttctacatcgtcaaggacgagatccaggactcgattgacaaagtgcaagatactttcaaccaatggaagcagacgcctgaaaatactggagagtatgtgcatctgaccaaagaactattaaccagttgtgaaagtatccaatggcaggtggatgaattggagaaggcaatttcagttgctgagaaagatcctgcatattatggacttaatgatgctgaaatcaggagaagaagaagctggactaacactgcacgtaaccaggtgctctctttaaggcggaatgttgaagctggaaggcaaaagactttgtttggacattcaaccaacacctctgaatccatcagatccaagaagcacatttcacaagataatgatgaattcattgcttcggaatctgatcagcagatgctcctgataaagcgccaagatgaggagttggatgcacttagtgctagtgtccagcgaattggcggcgtaggtctcactatacatgatgagcttgtcgggcaggagaagcttttgggtgagctgagcctcgatatggaaactacttcaaatcgtcttgactttgtgcagaaaagagtggctatggtcatgaagaaggcccgcttga

SEQ ID NO: 19139 - DNA, 474 bp, Setaria italica
  Peptide Sequence Number=SeqID_85113
cttcaacttagctgttgtccttgctgttatgttgcccaaagttaccaatttcactcatcattcaccaaaaatgactaaccttctcatacatagaaacataatggatgtactgaatgacatcttcaacgaaaactgcagatgctttgatctaatgatacttgtatgtacatctttaataggcgccaagatgaggagttggatgcacttagtgctagtgtccagcgaattggcggcgtaggtctcactatacatgatgagcttgtcgggcaggagaagcttttgggtgagctgagcctcgatatggaaactacttcaaatcgtcttgactttgtgcagaaaagagtggctatggtcatgaagaaggccagcttgaaggggcagatcatgatgatcgcattcctagtgattcttttcatcattcttttcgttttggtgtttttgacttgagatatgggtgtggcctgtgtgtaattt

SEQ ID NO: 19140 - DNA, 375 bp, Setaria italica
  Peptide Sequence Number=SeqID_85114
tacttacttacttttttacttctttaattaatttttaaattagtaattgttaagtaggtttgttgaaaatggtttgcttgtaaaagttatgagcttagacagtttgactgtagaattgttctgtaaatatagtgctgtaggagtcatggagtttggagtacaatacaatctaacctgcataataattagatcatatacaatgttttggagtatcttttaacagcagcatcatttacagtcatctggcgacattgtgttaactctcaggattaatgattgccctggtagatgagtgatttgtgacctattcatagatacttgtagcttctgaagtgttatcatccttgtgaagtaaaaatagttagacaattgctt

SEQ ID NO: 19141 - DNA, 314 bp, Setaria italica
  Peptide Sequence Number=SeqID_85115
ggattttagttgggcggtgacgcggacaaccgcaaaacctccgccccgcggacccatggcgtcgtcgtcctcgcctccgccgccgccgccgaagctgccgatccccggccgccgcaacatactcatcaccagcgccttgccctacgtcaacaacgtcccgcacctcgggaacatcatcggatgtgtgctgagcgccgacgtgttcgcgcgctactgccggctgcgcgggtacaacgcgctctacatatgcgggacggacgagtacgggacggccacggagaccaaggccatggaggagaggtgctcgcccaagg

SEQ ID NO: 19142 - DNA, 370 bp, Setaria italica
  Peptide Sequence Number=SeqID_85116
gaggaacagcgggaccacgatggccgccgtcttgacggcgccgaggaggacggtagcgccgagcacggcgcgctccgaggtgatcccgacgtggctgaacacccgcggcgcgtacaacaccagtgccgccacgccgcaggcctgctggaacacctgcaggccgacgatggcgagcatcacgcggcggacggccggcgtcgggcggaggaggatctcgcgccacacgcccgtcgacgacgacttgccgccgccggagacggcggcgttcttggacgcctcccggactgaggtcacgatctcctggaggcggcggtcggcgacggcggcgtcccccgcggtgcgcgcgagcacgcggcgggcctcgtcgggg

SEQ ID NO: 19143 - DNA, 413 bp, Setaria italica
  Peptide Sequence Number=SeqID_85117
tcgtcggggtattgatggcgtgcgcgcccgaagcctcggccgctgtccaggacctcgccgcgctggcggccgccgcggctgcccccgccgacgacaaccggggcctgctgctgctcatcgtcgtcgcgcccgccattgggtgggttctcttcaacatcctccagcccgcgctcaaccagctcaaccgcatgcggtccgactgagcgagctctcttgccaagcacctgcagtgcgtgtgcgttcgtgtgtattaaaattaaggatggtagtaacgtgaatcgcggtctgcgtgccctgtgtttcgatgcaagttcttgaacaaatgcagtacagctctttcttctacccaaaaaaaaaaaaaaaaaaaaaaaaaaaagagacacgacaacggaggggtaagtacggacgaagga

SEQ ID NO: 19144 - DNA, 290 bp, Setaria italica
  Peptide Sequence Number=SeqID_85118
ccatcaggcagcagcacgagcagctccggcgcggcgacgggggcgaccatggctcttccgaccaggttggtcagcgattctccgacacgattctttttccccctgccgcgagagaggcagctgctgatttctcctcggccccccacgccgtcgttgcaggacgggaagcaggagaaggaccggcaccggggaagaggccggcactggcggccggcgctgcagagcatctccgaggccgcgagccagagcagcagcagcgtctctgaagccgccaccagctgatgctactg

SEQ ID NO: 19145 - DNA, 812 bp, Setaria italica
  Peptide Sequence Number=SeqID_85119
tccctctccctctcaacgactcacaccgccgccgccgcggctccttgaaccaccagtccaccaccaccaccactggtgcggagggggcgcgggagcgatgggcaactgccaggcggcggaggcagcggcggtcatcatccagcaccccggcgggaaggtggagcgcctctactggtccaccaccgccgccgaggtcatgcggaacaacccgggccactatgtcgcgctcgtcatcctccgcgttgccgctgacaaggccgccgccgccaccaccggggacgccgcggcggcggccaccaccggtgccggtgccggaggcggcggcgggggaggggccaagatcaccagggtcaagcttctcaagcccaaggacacgcttctgctcggccaggtctaccgcctcatcaccgcgcaagaggtgaccaaggcgctgcaggcgaggaagaacgagaagatgcagcggtgcgaggccatcaggcagcagcacgagcagctccggcgcggcgacgggggcgaccatggctcttccgaccaggacgggaagcaggagaaggaccggcaccggggaagaggccggcactggcggccggcgctgcagagcatctccgaggccgcgagccagagcagcagcagcgtctctgaagccgccaccagctgatgctactgacaggaccgtgccatccgggcttcttcttcttcttctttcttttgatttatgatttgcttgttagtagtataaagtgcttgagcctagccagcaacccaaaaaaatgtaaatcagagtgtcagagcaggatcaataggagcctttg

SEQ ID NO: 19146 - DNA, 340 bp, Setaria italica
  misc_feature (320)..(320): n is a, c, g, or t
  Peptide Sequence Number=SeqID_85120
cgacgacgcgcctaagcaaaggccatggtcgatgcgcgccgccggctctagctatatatataccggaactacgatcacccatccttccacccaccttcctctacctgttcttgcgtgcttaattgctccatccatcgtcgatcatgagctaccaggcaggctacccgccgccgggcaccgccgcgtaccctccgccgggccagcagcaggcctacgtcgcgccgccgccggcgtacccgccgtcccaggacgccggcgcgtacggccagcagcagcagcaccagaccaccagccgcggcggcgacggcttctggaaaggntgctgcgccgccatctgctg

SEQ ID NO: 19147 - DNA, 728 bp, Setaria italica
  Peptide Sequence Number=SeqID_85121
agtggtatggtcgttgcacacagaaatctattgcgtcttgttggattctgtatgacatcagcagaatgtttgcttgtatatccttatatgggtaatggaagtgttgcatcacgtttaagagaacggaaaccgtttgaacccctttagattggcaaacaaggagaaggattgcattaggttctgctaggggcttgtcctgtttacatgaccagtgtgatccaaagattattcatcgtgatgtcaaagctgcgaatatcttattagatgaagactttgaagctgtagtgggacacttcaatttggccaagctaatggatcacaaggatacagatgaggtaacaactggtgttcgtggaacaattgggcacattgcacctgaatatctttccacaggaagaatctccgagaaaatcgatgtgtacggttacggaatgatgctcttggagctcattacaggacagcgtgtgtttgatcttgctcgccttgccaatgatgaagatgtcatgctacttgactgggtcaagggactactaaaccagaagagactggagatgatcattgatccagatatacacaagagctgcatagattctgaggtggaatccctgatccaggttgcgctcctttgcacacagagctccccagtggaccgacctcagatgtcggaggtggtgaggatgcttgaaggaatggacttgacgagatgggagagtggcagcaggcagaag

SEQ ID NO: 19148 - DNA, 337 bp, Setaria italica
  Peptide Sequence Number=SeqID_85122
gctggggactctgtggttggcactggtccttgatgatgcggctgatgctaatttttttcagtcttctgttctgtttctggatgcagttttgattgctccatgtatgttctgcctattacatgtttaattatgtggttcttcatctttctctggttgaattcaagcaaggagatggctgtggatgctccaagtcaagtggatatgcagttatgcacccctatgttgtatggcatggcatgacaggttcttttctcattgccacggacttgctagcagttctagaattcaggatgcaccctttgaacagtgaaattgctaagcttgctttaactatttg

SEQ ID NO: 19149 - DNA, 1275 bp, Setaria italica
  Peptide Sequence Number=SeqID_85123
atacattttctgatgatcatttcatctccagaaacctcctgcaaaccccctacaggctacaggcgcctcgtccatttgcgtgtgctttcgatgctctcaactcctcttctacatacaacatgttctcaccaccagacaacaaaaaaaaaatagctcgtgtgcttttgatgcacaactcctcgtccattttcgttactcctgttacagtagtaagctgcgtgcagtagtcatgttttgctacgcgacgtagttggccttctcctcccgcatggcatcggcgagctcggaccacctggtgcggacggtgatgaccagcagggcgcatgcctggcacgtgaggccgcagatgagcccggcccagagtcccctggcgcggaggtccagcttgaaggcgaagagcagggccagcggcatgcccacgaagtagaacgccaccaggttggtgaccgccgccaggtgctgccagccgcatcccctggccacccccgacagcaccccctgcgccgagtccagcacgatggacaccatcatcagcggcgtgatcgccgcgaactccgacgcgatggtggcgctcccgctgaagagccccgcccacagggtgtggcccgacgccaggagcagcacgaaggagagggccaggaacaccgagagcttcagcgtcaccgacaccgcgttcttggcacgatccacgttccccgcgccgatctcgttcgacacccgcgtgctcacggcggcgctgaacccgaacgtgatcatgtacgcgatcgcctccgtgctagagcacatggcgatcagcgatgtgctcacggtggaatttgggagcaggccggcgatcaggaccaggagctcgaacgcccagtactccaagcagaccatgacggctgagggcgtggcgagcttgacggtggggagcacgtacttgaatgcgtctgcggagaaccccttccacgtctcgctgaacgccctggagcgcgtcacgtacgcgagcagcatgaggcaggagacccagaaggtggcggacacggcggcggaggcccccacgaggcccagcccgagcacgttcaccaggaggtgcaccagcgcgacgtggatcgcgaagggggccacggagcacaccacgaggggcgccaccacggactgcgcctgcaggtagcggagcaggcactgcaggaaggagaaggcgaagaggcccgggatctggcaccggacgaaggacgccgcggcgcgggacacctcggggtcctgccggaggagcagcagcaggggctccgtgaa

SEQ ID NO: 19150 - DNA, 255 bp, Setaria italica
  Peptide Sequence Number=SeqID_85124
tccaccaccacatgcatagacccatcccacagtacgccgcacgcgcttacgtgggccccgggatttactccagcgatccggtgcacaaagaccaggcgtagcagatcctgcttgccctcgaaggaatcgaccccctcgccctcctcctctttatctcgcagccgccgccgccgcaaaccctaacccgagttccgatccggttaatcggcgacgaggaagacgacggaggcggcagatctgcggggatccgacggc

SEQ ID NO: 19151 - DNA, 250 bp, Setaria italica
  Peptide Sequence Number=SeqID_85125
agtttattggattttttaaattcatggttcaggctgctactaatataaactgacagttttcaagatgtttctgctgccaggcatgtcctaggcgtctaatgttacttgccttcttaaaagtaatccagctttaagtacttgttccagataggagaaatctttgaagaaatggcattatgctaatgttctccccaaaaggagtttgttcgatctgttcattctctgcaccaatttagctaatgcattgatt

SEQ ID NO: 19152 - DNA, 820 bp, Setaria italica
  misc_feature (794)..(820): n is a, c, g, or t
  Peptide Sequence Number=SeqID_85126
tcttcgtcctcctcgcgtcgtcatcgtcgtcgactcgtcgtctctgagccagtcttacttggaagtagggttttgctctctccaatccgatccacctcgcagccgccgatggggaaggactcgaagccgaaggacgcgaaggggaagggcaaggccggatcctccggcggcgacgacgccggcggcaaggggggcaagggcaagggaggcaagtccgcagatggcctcggcacatgcacctacgtcaaagctaggcacgtattgtgtgagaagcaggggaagatcaatgaggcttataagaagttgcaggatggatggttggacagtggggacaaggtccctcctgctgagtttgctaaggtagcccaggagttttctgaatgcccatcagggaagaaaggtggagatcttggttggttcccacgtggcaagatggctggccctttccaggaggttgcattcaacacacctgtgggagctgttagtgcaccattcaagtccacgcacgggtaccactttatcctctgtgaaggaaggaagaactgatcagcttcgggtcggggagatctcatcaggcaatatgagacgcaatgcaaacttctctgttggcttaataagcgctggacatgtgtgttttgtgtttggctattcgcatgctgctgctgcaaaggagttgccaaaacaaaacgaagtgtgctttgctgtaattatcctatgatgaaactatgatgctgatatgtcatatgctcatatctatctgggttggttactgtaacaatcaaaaaaaaaaaaannnnnnnnnnnnnnnnnnnnnnnnnnn

SEQ ID NO: 19153 - DNA, 465 bp, Setaria italica
  Peptide Sequence Number=SeqID_85127
ttcatttgtttgtttactttagattaaatttcttaacagtttagtggttgtgttcatgccctttggctgatgataaagtaatgctatagtcttccgattcgcatttttcatgatcttaccctttaacttgtcgaaatagaaacatatgtagggtccaaacttgttctttgtcaagctgatgtgatcccaaagctgactgatctttcaactatgcaggttaacagctatggagggctggatcaactcttgctgcttgctgctttttgaattcatgaagaatgaatggaggatttaatggcagtggtagcaatggagaaaagcagtttgagtggaaagcaccaacgtggaagaacaccaactgttgaaggccgaacttgtaacccaccgacatggcaaaattgttagtgataattggcattaccgtgtaacagttttttaggccatatacgataaagtcagtactaa

SEQ ID NO: 19154 - DNA, 490 bp, Setaria italica
  misc_feature (38)..(38): n is a, c, g, or t
  Peptide Sequence Number=SeqID_85128
ccgccactggcatcccacccccgagcaccgcaagaagntcccccagacacaactctccggcttcttctaccctcgctatctgctcgaccacgaggacgagataacagcaattcccgatttcgttggcatctcgggggccggaagaagtgccatttcctgacccgtcgttgcccttcttgcccggctacaggtggatccgttccaaggacagctgtggtggccttctcctctgcggctgctggaaggtgaaccccagagatgaattcaattacgtggtgtgcaaccctgccgctgataaatgggtagtcctgcctgagccccccgacgatggtagctcggtgtccacaatccgtttgtgttttgacccagccattttctctcacttccacgtgttccagctcctagaggaagatcaatacggatatatcactggcctggatatttactcgtcggaaactggtgcatggagtcacaaggaaaatggttgggg

SEQ ID NO: 19155 - DNA, 2355 bp, Setaria italica
  misc_feature (2315)..(2355): n is a, c, g, or t
  Peptide Sequence Number=SeqID_85129
ccaacataattacagctgttctctggagagagatgtaattatgttggctcgggtctcaggaatgtttctttacccgcagactctctaggttcttcctctagaagttttggaagacatgaaatgggtgaagatgaagagactagaaggaagattgaagatgttgtccatcactgttctcgtagactctttacagacagtgataaaattgggaagaatttcttcacatcaaataacaatgattccatgtgtaatgatcctgaacagagcagtgtcttgaatggtgaaaattttgagtcactaatatctgatgctgtgatggacacacctagaaatggcagtaggttacctgatgttttcttggaggatattgagccatcccatgaatttcctcgaattccatactcatgtccacttcccatcatagattcagctgctaaagagattggcaccactagcactgaagctagagataattttgttggtacagatgcaaaactaagtaagaacggtaaccgaaaccgatctgccatgagtggcgctgagaatcctccccaatgttctgcaaagttcagtgatagggtgcctgatcgccatctaggttctgggatgaatcgagtgagccgcagctctagcctgaaggagacaccatgtgctcgacaacctgatgcagtgccctctgttgataaaataggagacaggtcatcatccaacagcaaaggtaggcgaagcccattgaggaggatgttagatccaatattaaagccaagacattctagtccagtacgaccttcatttgttccgaagtgtcatcttccagtcaataccactaaacagtctctggacatgggcagatcagtgccacagaatgtgcagcgaaggtcagttgatatggtagtcaattcgaattatccaactgaagcaaacataaaccagcctcctcatgtgctgttaaacagtgcaagatacctccagcaagaaaaggattcaccaacgacaaggcaagcgcttctgcagctagcatggaagaatggcttgcctttattcatgctgtcgtatggtgagtctgatatcctggcagccactgtgagaaagaagagcatctctgagaaggatgatctggaaagcacatatgctgtattcactgttgaagaacctaagaaaaaaagtggagcttggatcaaggcagggggtaagaacaagaaacatcacctgttatccagcatagttggagaattaaaggtcacacgccgaaaatcaagatgccaccacacaaagaatattcatgtacacagggagtttgtgttggttggttccgaatttctaccatcatctgaagaatcaggcgattcacacatcagcggagagcttgcagcttttatcagcgcacttcctcagcaagaagcagaaacttcaagtcaatcatcttcacagaatgtgggacaaaataattcggcgccgattggctgcggttgccccccattgggaaacttccagccttgtaccaggaatgctaattctggttcagccaatgttattgccgtactacctgatggcttccatggcacatcgacatctgggcagccattgcctttgatcgagaggtggaaatcaggaggaacttgtgactgtggtggatgggatgaaggttgcatcctgagtgtcctcactggtgcggccccagaaaatgatgccattcaggctaaccaggcaatggatggcagccagcgatttgagcttctagctcagggtcgatcgcgagaagacaggaatgccttcagtatgatttccttcaaagaggggctgtatacagtggaattcagatcatccattgctttacttcaagcttttgcaatgtgtatagtgatgcttcatgggaggttccctagcaggatgcaagttgcttcgcaagcagcgcaagagcatgatctccttgccaatcatgagctcaagaccatggcagccagtcaaggtagagctccgaccagctatgtgccccatcggccacctctttctcctgtaggccgagcctagcttgttgcaattaaatgtatgttctttctgtgtcctctcttcagttgtgtagtgcctgtgggatcaatataccatggtcctatggtccatatgcaatacgcatatccaaagtgacaatccctgtgcaatctgctttagaggtagctatctgtacatgttgatgttgtatgactgctgctatgatgtggctgcaaggtccatctcagcgcttagttaccctttatatgttcaccccttgtcagttgcttctatgctgaaaggatacacacctcctgtaaaaaaannnnnnnnnnnnnnnnnnnnnnnnnnnnnnnnnnnnnnnnn

SEQ ID NO: 19156 - DNA, 328 bp, Setaria italica
  misc_feature (312)..(312): n is a, c, g, or t
  Peptide Sequence Number=SeqID_85130
ctgcgctccaccagcttccgcgccatgcacgccttgaggctgctgcacttgtagtacccccgtggatacggcgagcccttgatgggcttctggccgtacttgcgccatgcccacaggtccgtggacacgccgccgtcggccaccggcacctcgcacaccactttcttcagctggctcttcttgcttcttttaggcctgggagtgcggactcccggcttgcggccgggctgcttcctcggttgcaggagctgctgcccggacgtcgaggcggccgggaaagagaggagcacctcgtggtcgagcggcccccgntcactggaaggcgtga

SEQ ID NO: 19157 - DNA, 1451 bp, Setaria italica
  misc_feature (1431)..(1431): n is a, c, g, or t
  Peptide Sequence Number=SeqID_85131
cccctcctccctgccatgaacccgccactccgaccacttaccgagcgccgcaacgccgcttccgacgcccccccctcgccccgccgcttcgacgccccacagagccacggccgcccaagtcagcgccgccgccgctggcccttctccccgctcctgccagagaatttcttcgcatttgacatgggcaactttatttccggcctcttcggcggccggcggcccaaggacgatgggttggggttttacaagggatggtgcgatgcgcggtcgcgggatctcacggtgattacggatgaggagaccgggacggggcagcacttgctgggccggacgactaaggattggtcgaggaaggccgccttggaggcggtgaagggttcacagcggcagaagagcgagccgttctacaagaaggcgctgggggaggcgagacggaatgacaataggttggaggagagagggatcaaggtgaggctcgaagaggaaaggcttgctggcatacggaagccatacaaggctgctgaggaggatttatctgaactatttaaacctctcactgatgaggaggaaaaggaagttcatgactgtttccatgctagaggtccaagtagcaaagtcctagtgctgcatgaaccatcgaacattgaggttagcaaagagaaattccagtgcttgatacccggtcgctggttaaatgatgaggttattaacctctatcttgaattgttgaaggagagggaaaaaagagagccgaaaaggtttctgaaatgccatttctttaatacattcttttataagaagcttgcttgcggaaaaaatggttatgactacaaatctgtcaaaaggtggactacccgtaggaagttgggatatgacctcattgaatgcaataaaatctttgtccctgtgcataaagatgtgcactggtgtttagcaattataaacatgaagaaaaatacatttcagtaccttgattctcttggcggcatggatcataatgtactaaacatgctggctcgatatattgcagaggaagtgaaagacaaaagtaacgaagtaattgacactagttcgtggcaagaagatatagttgatgatattcctttacaacagaatgggtgggactgtggtatgtttatgctcaagtacattgatttccacagcagaggattgagcttatcttttcgtcagaaagacatggaatattttaggaagagaacagcaaaggaaatcttaaaattaagagctgactgatggatacacatccttctctttttcaaatagaagctgacttcttgtactgtgttttgggaactagaatagaagctgattgcaacgtcactgtgcatgttgagggtaattcaaacctgtaaatccttgttggatttttgtcgcgtgacacagaagctttgggcgctggcgtccaatgangtaaaggctaccgattttct

SEQ ID NO: 19158 - DNA, 402 bp, Setaria italica
  Peptide Sequence Number=SeqID_85132
ttccaaaaagcagaggctaccagcttgctgccggataactaggattgtaaaacagagatgttctgtagctaatgaaaagcatcagttaaacatggaattaatgaatgagtagatgtttcactaccagtctaccgcagacctttaatacatctgtttctcctgcggtcacctaaattctctgtgttggtgcgtaagtgcaagcttttgtccttgtgttaatgagtccataccatgttaaaaaatcaagattgttaacctttagtgtaaagcaaattcatgcataccatgttaaaaaatcaagattgttaacttttagtgtaaagcaaattcatgcactaaaattttctgatgaagtccaatgcactcttgcatgcagagattatagtcattatcattagactg

SEQ ID NO: 19159 - DNA, 709 bp, Setaria italica
  misc_feature (681)..(709): n is a, c, g, or t
  Peptide Sequence Number=SeqID_85133
aagcaaaacgcccccaatctccgcgccgccgccgtccccgtcgtcctccgccgttgcagccgcggcctcctcgtcgcctaccgaccgcgcccttcctcgccaccaccggtccaccggaggcgccgccatgtctcagaacaacccctcccagctcctcccctcagagctgatcgaccggtgcattgggtccaagatctgggtcatcatgaagggggacaaggagctcgtcggaaccctctgcggcttcgatgtctacgtcaacatggtgctggaggacgtcaccgagtatgaatacacggctgaagggcgtcgcattacaaaacttgaccaaatcctcctgaatggcaacaacatagccattttggttcctggtggttcaccgcctgatgtgtaatgacctcgcgctcccctgtgtaaccatttgaggcgaaggcagatttgtgaactctgcaccttatgttggtcaatcactgaatgttttctcagctcaatgtgtttctcctattcgtgattgtaccaaagtttattagcaactctgtcaacatggaagctccctcttctgtattgaacttactgacctgaagtagcatagctgtgcttaaatgattgtctatgcaaattctgatgtgtctctgggccctggcactagttaatgcccatcatgttagtcatcgtgctgcnnnnnnnnnnnnnnnnnnnnnnnnnnnnn

SEQ ID NO: 19160 - DNA, 271 bp, Setaria italica
  Peptide Sequence Number=SeqID_85134
aagaatacaaacttactacaacagatcccaggttgcacgattcaaatggcagcactttgcgtctgtcaactctcaagatatttgatggtggtgagcagatgctacagcaacttctgctcacaaactttacaggcctaactggtccagtccaatttaattcagaccgcaatttggtacacccagcatatgatatccttaatattggtggttctggctcccagttgattggctactggtccaattactcgggtctctctgttactgctcctgt

SEQ ID NO: 19161 - DNA, 541 bp, Setaria italica
  Peptide Sequence Number=SeqID_85135
gtcagtggcagatccaggacccaggctgcagccctggtccatggtcagaaaatcaatagaggtccaagcaaaattatgcaaaaactaaaggtgccaaacacttgagcttctaataagctaggatcagcccccctcccagccatttcctgggtccgcccctgaagattgtgatagtgattcctacacagtgtgcaattttcaggggatttttcagtatgaaaagaagccaagaagcattcgagaaaaataaaaagaatatttctcaaatatttcaggggatctcttcaatatgaccattctatgtcaggaaaggtatcgtctatttaggggacctaagaagtaggccctggcaaacaaaaacctgtggtccaccagctaaagcatagcatgatcaaatatgagattcactcaaaatataacacaaacaaagcttgtttgtaaagctgaactcaagctgaagttatccgtaataccgagctcgaatatatgaaaatccaaaaatacacagtacgcactaatatgggccaagacatccaaaaac

SEQ ID NO: 19162 - DNA, 486 bp, Setaria italica
  Peptide Sequence Number=SeqID_85136
ggtatacccgacaactagatcaggggttgtagaacgttgatctgtcgtacttgttcagaggtgcattcagctcaaaccgcttgggcaagtctgggttcgccagaaaccatttgccatatgccaccaggtcagtgtaaccctcggacactgccttgttgccttcttccctgttgtatcctccagcaacaatgaaagtcccagcaaatgccttcctgaaatgcagcagcttgtaggggatctgcaccttaccatccactttgaccccctcaggctcaaccatgctgcagtagaggacgcccagcttgttcatggcgtggatcatgtacaggccgagtgcatctgggtctgaatcccagcagtccaggcagtttgagtatggtgagagacggacaccgaccctgtctgctccaatctcatcgatggctgctttaattacctctagagcgaagcgacagcggttttccatgcttccaccatatttgtcag

SEQ ID NO: 19163 - DNA, 494 bp, Setaria italica
  Peptide Sequence Number=SeqID_85137
ttgttttttttttttttttatttagaaatcggcaattatccgatgaaaaaaacacatgttgatttttactatagcataacacgtttcatcacgagctaattacgcttttactcctcccttctgtccactgtcttcaacaatatataatgagatgttgaaattctgcatcctacttctgatgaattttgccggtcgacagaatttatactctatcgattgctcggtcttttgaacaaagtagttagtacaacatctcgttgcctcccaactcttcccagcctctcccgtggaaaaagcctccactcgcacgcatttcactggctacaagaactacccagtagccaccatataacagcagcatctagcatgtgatgtgaccatgcgagcagcctccaccatgacacgctgaacatcccatggcgtcctgcacaccgtcccggctagcttggtcagttcacccgtccaggttggtgacggggcccttgaaccagtgt

SEQ ID NO: 19164 - DNA, 244 bp, Setaria italica
  Peptide Sequence Number=SeqID_85138
tggctctccctcggatggtcccccgcgggcgcggagggcgccgcgccgcgctcgtcgggcgggggacaccctgactacccgcccgagacgggcgtgtaccaccgtgatgacctagcgccgggctcggaggatgactccgagtgggaggaggaggaagaagatgaagcggacgaggaggaggtgtcaccgtctgggcgtcagccagaaatggaggagaccaaggaggtcacgttgaaagcaggca

SEQ ID NO: 19165 - DNA, 1673 bp, Setaria italica
  Peptide Sequence Number=SeqID_85139
taacaggggcatttatggttgcgcatgttattggggacataattactggtgatgttgctgaacctgaggtgatcgttagctccgggccctctgttggtggactattggattcattgactggaagtataggtatttctgcccgatcaaagcctattgctgcacctgttgctgcaccaactgcttcagcctcttcacctgttggcgctgctcaatccgagtccttaaaaggtggtgttagaccttttgacaaggatttactgcggaacttcatcattggtgcaatgccttttggcacacctcaggatctcaattatgccaatgttaattcaattagaactactggatattctggcgatcctcttccgaccgaccagaagcaacctgcctggaaaccctacctgtacaaagggaggcaaaggattcttttttcttagcctggagactatacatgctgcactgtatgaccgtgacgatgtgccagatttcctttctgtttcaggacaagtaacctgtagggcggaactagaaggactacctgatgtttctttgccactgactgggttaaaaactgctcatgttgaggtctcatcattccatcattgtgtccaagcttcagagcccactaataataagcaaacccttgtttttcagccaccattaggaaattttgtattaatgcattatcaatcaccatgcaacactgctcctcctgttaaagggttctaccagttgtccatggtttctgaaaatgaaggtgcttttctatttaagctgacattgatggagggttacaagtctcccttcattatggatttttgcatgattacaatgccatttcctcgaagaagggttgcatcgtatgagggaaatccatcaattgggacagtttcaatgacagagcactcaattgaatggaggattgttacaagtggccggggcctcagtggtagaagcattgaggctaccttccctggtactgttaggtttcttcctagaacaacacagagaacaagttcgtcatttcggctagtttcaagcactgcatatactgatgatagtgacaatgagcaagataacgttaagaatggagctagcttggatgattacatcatggaaaaaatcaataaggatcttcaggcagttgatttagaagagccattgtcttggcaagcatataattatgctaaggtttctttcaagatcactggaggcacgctatctggtcttacaattgatccaaaatctgtaaacatatacccttctgttaaagccccacctgaatactcaatgcaggcttcttctggagattacatactgtggaacaccttgggaaaatgtcctaccgctattctacctagagaactatgattgtcagtgtgtttcagcatagtgtcagcataatttggtgtagatctttttgttgtacagactccacgttttgttttcccgtgtttccgttcctcgtccaagatctgtggtgggaagtttttggtccttcccattcatgagttctttccctttttttaaggagaaaaactacaaacctgcagatctttctgtctgaagtcccatcacttgtggctgtcgtgtggcaatacaatatgaaatccatgatgttttgagcaatggaatttcccatctcctgtggttggcaacctttcggttgattaaaa

SEQ ID NO: 19166 - DNA, 735 bp, Setaria italica
  Peptide Sequence Number=SeqID_85140
ctctacagtcaattctaccccgaaaagagaaatgagctcttgcagggtcatgcttgcatgtgtgtgcaaaacatacgatgcttcagccctctatatcatattggctcccactctgctataacacatcaatcagctggttaggttttcatgcacctactcaaggatgctgtttgcctaccatttacagacattgttctttctcattgtttctatgcttcctgctatggttgatccaactgtcccaacaaatcctagtgatgcgcagctacaaacagattcttcaacatacagcagaatttctggtagttgaacagggccacaatccttgtccgtgttctctatggcttttggaaggaatccagaccgtacaccatgttctgcagccataagcctttctgcagtctgcggcactaattcatcactttccttcagggtgtacaatctgtatcgctcatcttttgcaacatttgcaagataggttttggtccagtttgctggtggaagatcggtcatgatgaacatgtgaacaggaccactattcttgtttctcttcatttccaattcaacagctttcaacttctctttgagggcagaaaatgtagctttccagtgatttttgaattgaccgtctagcaatcttagttgcgcacaaagaaatggctccttgatcttgttcttagcaaattccctccctgcagccatgatctctggggcaaaaggaagaaactcaatctt

SEQ ID NO: 19167 - DNA, 1150 bp, Setaria italica
  Peptide Sequence Number=SeqID_85141
gagagaggcagtggcaggtggtcaacccggactgccccaacgccgtcaacccgttccaccgctgcgccgagtactgccccgtcccgccccccagagccgcggcaaagcatccgccgccggcacagagtcatgacgggagcacgcacagcgaccctggcgggctgcaccccaggccgcgccgccgcgacaagggcggcggctccggcggcctccccctctacgtctttctgcgcgaaggttctgatggcgacggcaagaaggtggatccccggtgccccaacgcgcccaacccattccacgtctgtaccgaccattgcctcgccaagatggctgaggctggccgctcgtcggagggcgccaagtcgccattatccctcttctctcgccactcccgccgctcctcgtcgtcctccgaagagggtagcgtgaagtcggctggaagtaggaaggtggatccgaagtgtcccaatgccggcaatccgttccatgaatgtggtgagcattgtggtgccaagatgcagcaggtggagcagcacaaggggaccaaaatgcagtccccgcgaaagaaagggggaaaggatgttactgtgattccaaattggaaggttgatccgaggtgccctaatgcgtccaatccattccatatgtgtgcccagtattgctttgatcatttgattgaaacaacgcagacaagtgcaaccaagtcagacaagaaaaaaggcaaggctgtttctaaagaagtagaaagagaaattaatcctgattgtgccaacgcatccaacccctaccacaagtgtggtgaacactgtaagagaaaagggtgatagatgaggaaggctgttgagacaaggcttcttcggatgaccaatgatggcgaaaaataagcaaatcccatctacaatagtctttcagtagaggctgtgttttctgtcggctccattttgtagagtggctgcggctgtttcaatcttttgcagtgtgcttccatatgtatatttttttcattgtgccatttgcaccataacacatatataggccctcccatgtaatgtatttcctgaaggttgtacaaatagaagcttcctatttgttcaaactttttttttgtctacttattatataaatgaagcaggtcttccatcccatcatc

SEQ ID NO: 19168 - DNA, 595 bp, Setaria italica
  Peptide Sequence Number=SeqID_85142
atctgttataatagcactgtggcgagctccacaagaaacagatctggcattcattttccaggcttgtagcatctaccaattttggaacagtctcagcttgatccgaaccagtgccaagctgcccaaactggtttcctccaaacgaatagacatcaccatctacagatgtacatacggtgtgccacagacctgcggcaacatcttgcatcttgattcccaggatagatgatacacacgtcggacttaaaacatcttctgtattcccttgtccgcactgtccatacagcccccatccaaatgtgagaagagctcctgaatctgttactacagcactatgacggcctccacaagcaattgccttcacgcaatttcccatgactttactgatgtgcccttcagcggtcttgttacctttcatagctgacggccgatccttgctgtacagtgccgattcaatgcacggtacaggatgaggagaagaaacagttctgattctggaacccagacctagttgcccttctcctccatatccccaacccacacctgacctaaatctgatagtgctaacgtatgacgaccaccagcagctacagcc

SEQ ID NO: 19169 - DNA, 283 bp, Setaria italica
  Peptide Sequence Number=SeqID_85143
caacaccaatcccaccgcttcctccttgcttctccactaaggaagccggccatggccatggctgtcatcacccccaaaggaggcagcagcagccccgcctacgttgccaagccgcctccgccgccgccgggcttccacaagaccgccgctgggtacgactcctacaacggccgcgccaccaccaccgccgccgccgccgcatcggagtcggacgaacgccgggcgctcgacggcatcgtgctggcgctgcacgcggccgcggcgctgctggcgttcgtgggcg

SEQ ID NO: 19170 - DNA, 329 bp, Setaria italica
  Peptide Sequence Number=SeqID_85144
acccggacgcgtagatgcccagcccgcgcacgcggacccgccgcacggcacggcggcgtacgacgacgactgggcggggtcgaagagcgggtccttctggttgtagcacgacgacgcgcacggcttgcactgcacccacgacaggtcgctgccggtatccacctccagcgtctgcgccacgcccggcgtgccgaggctcgccgtcaccacgtagttgaacgtgccgatgtcgtatccccagttcgccggcaccgtcgccgccgccgccgcctcggatcctcccagcagctgctgcgcgccggcgcccgacaccctctcaggatgtacct

SEQ ID NO: 19171 - DNA, 426 bp, Setaria italica
  Peptide Sequence Number=SeqID_85145
gaggcgggagctgtcggtggcgacggccggcgaggcgtcgtccttgctcgatctcggggccggcgaggccggcggcttcctgctgccgctaccactgccggcggcggcgatgccattggggagcgggaggcaatccgagctaggcctctggaatctcatcatgtccaatgccggcgctggcttcgacgggctcgacgacgcgacatctcgagcaaccgcgacggcctccgcggagccacgcatcgaatcggcgtcctccactctctcttcctcggctcctggttctacaatcgcgcgcgcactccgtcccctgcaacctcggcgtctcgctctacagatcaaccatctgagccgacgataccgaggagagatcgcacggtacgaaggttcttgcgaaattcttgtactagttcagagaggagcggg

SEQ ID NO: 19172 - DNA, 566 bp, Setaria italica
  Peptide Sequence Number=SeqID_85146
caatcttgctcaattttatatgttcatgtcagcatctttgtcgatgggctgattatgcccatcccaactccagctcagttaatcaaaaccatcaccaaagacaattctcaatcacagctgaaattatatccttcagtgttccctgagaatgctctttcaggccaagagagatcaccaatgaccgggctgaaccactgccactacaaaaatgatgtataatgctgtgtaagttctcactgtatactatttctttgtgtacccaatagtatgaaaatggtgaatcaatcatcagcaaaaggacagttaatgctggtgttaggaataatgataactaaatttgtgatattagaagcacagaagttatttggagaatacagacaaacaattataatcgaagaaccattttactggagaatatatgcagagatgtccaagaacggtataaaagaggagctccttgctgctgactgttttcaaacagttaccactacaactaatagacaggtatagacatcgtctggcatgcagcatagggtcataagtgcatgcagtttgccatgacatgt

SEQ ID NO: 19173 - DNA, 477 bp, Setaria italica
  misc_feature (28)..(28): n is a, c, g, or t
  Peptide Sequence Number=SeqID_85147
atatccttcagtgttccctgagaatgcncttcaggccaagagagatcaccaatgaccgggctgaaccactgccacttatgtgctcaataagttggcgtgcacaagctagtaggagcggctcatctctcttcccaaaaagaacagatacattgtaggttgggtccaagaaaacactttcatctttcttggcagctagtatggttcccatgcagccaatttgggtcacaatcaccagaaaggtatcttcatatttactgataacaatgtctgtcttattgcccttgatatctaacgagagggactgatgctgcacagggaagtgagcaccggattgcgcagagtttattggcacctccatctgtcggatgctcgtcgctggggaagagccccacgaagaactggccaaggttggcgccgctcgcggctcgccccttcgtcgccgctaggaaaggaaggccgggagagggagagggagag

SEQ ID NO: 19174 - DNA, 427 bp, Setaria italica
  Peptide Sequence Number=SeqID_85148
agactcaaaatcttggcaacaggagaagcctcaaccaccatctacacctcgctcatcataagacaatatcaatcacagaacaccttaaaaccacctcttaaccgttacagtagaaagaaattctacctacaaagttctagaatttcatacatgataaataagggttcatcttgctcagagttgttcacgtcagcatctccagcgcatcccaactctagctcagtcaataacaaccatcaccaaagacgattctcaatcacagctgcaattatatccttcagtgttccctgagaatgatctttcagaccaagagagatcaccatcgaccgtgctgagccactgccacttatgtgctcaataagttggtgtgcacaagcaagtaggaggggctgcagtcacaaaattttgtacagttgttagtccatgc

SEQ ID NO: 19175 - DNA, 567 bp, Setaria italica
  Peptide Sequence Number=SeqID_85149
cttagggtttttttttttaagtttgctccccggaaaagtgattatgtttagcttcagactcaaatcttggcaacagaatattacaaccatgcaggaacaccaactggaagcctcaaccacccacctcgcccgtggtaggacaatatatatcgatctgggactgcttaaaagttaaaaccgtcctattgtgtttgttaaaggagaaagaaattctaactgcagaagttctagaatttcatacgtcatacaacgagggttcatcttgctcaattttatatgttcatgtcagcatctttgtcgatgggctgattatgcccatcccaactccagctcagttaatcaaaaccatcaccaaagacaattctcaatcacagctgaaattatatccttcagtgttccctgagaatgctcttccaggccaagagagatcaccaatgaccgggctgaaccactgccacttatgtgctcaataagttggcgtgcacaagctagtaggagcgtctcatctctctccccttcttagaaacaagtaattaactaatttagttaaggtttagggttacctta

SEQ ID NO: 19176 - DNA, 1037 bp, Setaria italica
  misc_feature (223)..(223): n is a, c, g, or t
  Peptide Sequence Number=SeqID_85150
caaatacacactgcaaacaaaattgaagtaatctttgtataggtttaattctacaatttgaaaacacttgactacttgagcaaatcaatgggaataaaatgctttggttactacttggtagccttgcctccatgcacagcttattcttgcttggctagagaaagtggcattcatgtgtttgtctgatgaacgtgggttggatagcaaaaaattgcttgcaacncggggaaaaagaacatgagatgctcccccaaaagtgattttgagactcaaaaatcttggcaacaggagaagcctcaaccaccatctacacctcgctcatcataagacaatatcaatcacagaacaccttaaaaccacctcttaaccgttacagtagaaagaaattctacctacaaagttctagaatttcatacatgataaataagggttcatcttgctcagagttgttcacgtcagcatctccagcgcatcccaactctagctcagtcaataacaaccatcaccaaagacgattctcaatcacagctgcaattatatccttcagtgttccctgagaatgatctttcagaccaagagagatcaccatcgaccgtgctgagccactgccacttatgtgctcaataagttggtgtgcacaagcaagtaggaggggctcatctctcttcccaaaaagaacattgacattataggttgggtccgagaaaacactttcatctttcttggcagccagtatggttcccatgcagccaatttgtgtcacaatcaccagaaaggtatcttcatatttactgataacaatgtctgtcttattacccttgacgtctaacgagagggatcgatgctgcacagggaagtgagcaccggattgcgcagagttcattggcacctccatctacccaatcagcagagcttatagatcctcctcctgaatccaatagatgcaggtcgtcttctcccccaaggatgctctcaacccttacagatccgagccttgttgattcgattgatgtaggtattctcctctgcaagcccct

SEQ ID NO: 19177 - DNA, 247 bp, Setaria italica
  Peptide Sequence Number=SeqID_85151
caagaagggccggagcggccgccgcgcaaccggacgatggagctcgtggcgtcgagcggcggcgcgctcacgctcgcgcttctctgcaacaaggcgctgctccccgtgagggtccccatcaccatcgcgctcacgccgcccgtcgccagggccctcagccgctggaggctcgtcaagagctgatctgtgttttcatcacagctgctctgggagattggtgcatccaggatccaccttccagggcccg

SEQ ID NO: 19178 - DNA, 871 bp, Setaria italica
  Peptide Sequence Number=SeqID_85152
ccgatccgacccgacgcaaacgaccaaaaccctagccgtcacagcgccgcccccccaaactcataaacctccacctcgccggcggcagccgcggcggcgatggcgttctcgggccggattaagcatctcgtcaagaagtacggcaaggtggccgtcggcgtccacatctccgtctcctgcgcctcgatcgccggcctctacgtcgccatcaacaacaacgtagacgtcgaagccgtcttccgcaggttcggcatctccccgggcgtcgccgtcggcggggaggcctcacccgcccaggcccccggccccgccgcctgcgacgaggccctgcgcgacgccgcactcccgcccaggccgagtgatgttcttcaagaagggccggagcggccgccgcgcaaccggacgatggagctcgtggcgtcgagcggcggcgcgctcacgctcgcgcttctctgcaacaaggcgctgctccccgtgagggtccccatcaccatcgcgctcacgccgcccgtcgccagggccctcagccgctggaggctcgtcaagagctgatctgtgagtccgtccaccgattcggattctctgcaattgtaggatcagagcaaaaattgatgcaaccttcacctacttgtagaatgatgtggctgttgtttaattcgaaagagttcctgtcgaataatggtgctgtgaagctgaattctgttctagagaaacatgaaaattggagagcaacagatcaatttttttggctttgttagtgatactgtcatttgtcactctgtcgtttacatggtatttcaccataactgagtggatttctgtaacaattatctttgggtcatagcgatgctccagatgtctatgtttactt

SEQ ID NO: 19179 - DNA, 365 bp, Setaria italica
  Peptide Sequence Number=SeqID_85153
cgcaccacctcgccgtgcgcgccgccaccaccaagcgcggcgagctcgacctggacccggtcacggtccggggctacgtcctgctgatgccgttcttaggcggcgtccggcgcacgccgtcggaggccgagtgcccggcggaggcgttcccgaaccttgacctcgtcgaccggttctggcggctgtcgctgccggccggcgccaccagggaccacccggcggcgaacccgttcgggccggacagccccgacctgggctcggtggacctccggccggtgctcgtggtcgccggcggcctcgacttgatccgcgaccgcaccgtcgagtacgcggagcggctggcggcgatgggcaagccggtggag

SEQ ID NO: 19180 - DNA, 433 bp, Setaria italica
  Peptide Sequence Number=SeqID_85154
ccgccacatcttcccccttcccgcagcggccgcggagcgcggcctcccaccgcctcccgagctgctccgcgttggcggccagcgcggccatgacgcggtcgaggggcagcgcggccggggggcacccggccttgtcgcggctcgccatctcggaggcacgggagcttggggtccgatgtgagagcgtgggcgagggcctcgcgcatggtagggaggggtgagggttgagggggttgcggcgaaggccgcgtgggtgccgcggcctcctcccttagcctttagctcaggagcagctcggagctctcgcaattggcaattcccgtcacgagaccggaccgcgcgcaccggcggcggcggctcgcgaaagtggcgtgctcccccaacgcgcggctgctgcttttcctttgggccgcggcctccgatgcgaggatgg

SEQ ID NO: 19181 - DNA, 1526 bp, Setaria italica
  Peptide Sequence Number=SeqID_85155
cgcttgcagctcaaccctcggcacggcaagagtatttgcacgctagcttcattcgttcattggactctcttactccctccgtccctcgcacacccggccacacggcaacaaaacagtcaaagaaattaagagcagagcgagcgagagcgagaagcaagcaagcaagcgccatggcggcgtccaacggcgaggccgtccacggccggttcgacgtgatcgtggtgggcgcgggcatcatgggcagctgcgcggcgtacgcggcgtcctcccgcggcgcgcgcgcgctgctcctggagcggttcgacctgctccaccaccggggctcctcgcacggcgagtcccgcaccatccgcgccacctacccgcagccgcactacccgcccatggcgcgcctctcgcggcgcctctgggaggaggcccaggccgacgccggctaccgcgtgctcacgcccacgccgcacctcgacctgggcccgcgggacgaccccgcgctccgcgcctccatcagaaacggcggcgccgccgaggtcgccgcgtcctggccgtgggcgggcgtgttccgggtgccggaagggtggacggcggccaccagcgagctcggcggggtgatgaaggcgaccaaggcggtggccatgttccaggcgctcgccgtcaggaagggcgccgtcgtcagggaccggacggaggtggttgacatcgccaagccagcggatggatcaatcttggtgaggacagcgagtggcgaggaattccatggcgccaagtgcatcgtaacggttggcgcatggacaagcaagctggtcaagtcagtcatcggcatggacctgccggtgcagccggtgcagacgctcatctgctactggaaggtgaagcccggccacgagagcgagctcaccacggaggccggcttcccgacgttcgccagctacggtgacccctacatctacagcacgccgtcgatggagttcccgggcctcatcaagatcgccaagcacggcggcccgccgtgcgacccggacagcagggactggtccacgggcgccgccgacctggcggagcccgtagcccggtggatcgacgccttcatgccgggccacgtcgacaccgccggcgggccggtcatccggcagtcgtgcatgtactccatgacgcccgacgaggactacgtgattgacttcctcggcggggagttcgggaaggacgtcgtcgtcggcgcggggttttccggtcacgggttcaagatggggccggctatcgggaggatcctggcggagatggccatggatggggaggcgaggacggcggcggaggctggagtagacctccagcccttaaggatcgatcggtttgttgacaatccaaagggaaacctcaagaatcctggagatcaggacaaataacgagcaccgtccctctatgggagatcagatcttcaaccattcatgatcaagtcaaaatgtgtgtatggcatggcaattgctttgtctggaataatctgtcgaacattgcattgtaaaactttcctt

SEQ ID NO: 19182 - DNA, 403 bp, Setaria italica
  Peptide Sequence Number=SeqID_85156
ccttcttcaccttcttctttttctttttctgtttccgttcattctcttcatccccgacatccagttcctccgtctccatgtcatcctccttcaccttcttctttttctttttccgatcgatctcttcatacccaacattcagttcctctgtctccatgtcatccttttcgactttcttctttttatttttcccttttctgtccagcttagtgtcatcttccacattccaatcatacgcatttgcttcatcatccaacccgaagtcgccaccaaacccaaggtccgcaaaaagttcatccataccatcatccggacctcccaactttcctttcttcactttgagctttttcgcaagcctcctctccatctccagatcctcctccatgctcacagctccacccat

SEQ ID NO: 19183 - DNA, 312 bp, Setaria italica
  Peptide Sequence Number=SeqID_85157
aagaacctaactaggacagcactgggcaatgtttcagactcagttctctatctttctacatggaagttgaatgatgtgctgatgccagtcaataagtttgtgtttcagtgggcttgtgcttctaggtggatcctgaatgcaatgggatgggcgagcggtctagttgaagccgaacaagggaacaacgactgcttccttgatctgaggctgcaagttgctcctttctgtgcctgagccggactgcgggagcagaccggtgagccaaacaatgccactgtcaaccccattaggtccatggtatagaatacttct

SEQ ID NO: 19184 - DNA, 1404 bp, Setaria italica
  misc_feature (1341)..(1404): n is a, c, g, or t
  Peptide Sequence Number=SeqID_85158
gagaggcaggaagctgatatcgacgaggaggatgaggaggcccaggaggagaggaggaggaggataagggagaagcagctcttaagggagcaggaggaggaggagctacttcctcaggaagatgaggaacctgtagaggatgaggagtcagaggaatctgagtatgagacggattccgaggacgagcagatgggcatggctatggtgaaacctgtcttcataccaaagtcacagagggacaccattgcagagcgtgaacggctggaggaggaggagcggcagcttgaggagctggtcaagaagaggctggaggctaggaagattgagactaggcagattgtggttgaagagattaaaaaggaggtgcacattgaaaaggcactgaatgaagaggccaacattgaggatgttgatacagatgatgagttgaatgaagcagaggagtatgagtcatggaagaatagagaaatagcaagaattaagagggacagggaagaaagagatgcaaggttgaaggagaaggaggagattgagaaggtcaggaatatgactgaggaggagcgtcgggaatgggagaggaagaatccgaagcagcttcggcagaccaaacagaagtggaagtttatgcaaaagtattaccacaaaggtgccttcttccaggaaagtgctgatgatcttattcagtcagctggtaaagaagatatctacagccgtgatttctctgaacctactggggaagataagatggataagagcatccttcccaaggtcatgcaagttaaacactttgggcgcagtggaagaacgaagtggacacatcttgttaacgaggatactacagattggaatgcaccatgggctacaaatgggcctctccgagcaaaatataacgcaaaaatggcaggcatgaatgcacctattgctaaaccaaagggaagtaagaagctgaaggactgggatgaaaaatgagatactagcttgatctgtgggcttgtgcttctaggtggatcctgaatgcaatgggatgggcgagcggtctagttgaagccgaacaagggaacaacgactgcttccttgatctgaggctgcaagttgctcctttctgtgcctgagccggactgcgggagcagaccggtgagccaaacaatgccactgtcaaccccattaggtccatggtatagaatacttctggatctatacaggttctttgtaatggaaatatgtgccattttttttataaactcagtattgcccagcagccgtgccctttgtatctttgctgggaataacagtgatgatgaaagcaacgcctttagtattcaaaaaaaaaaaaaaaaaaannnnnnnnnnnnnnnnnnnnnnnnnnnnnnnnnnnnnnnnnnnnnnnnnnnnnnnnnnnnnnnn

SEQ ID NO: 19185 - DNA, 298 bp, Setaria italica
  Peptide Sequence Number=SeqID_85159
ttggtacaatcacaagaataataaactgagtggtattgaagtgaacctatcaaaagtgtatgtatctcgttataaaaaaagggtttaatgtgtctgtcactagtatgaaccaattcgcagcttctagtaagctcatctattgaactatactaagctgaatttggaacacgaacattctttttgtattatcattgttgttatgctactaaactttctcctttcgttgcagtctgggtttctttgtattcttattgataatctgattaaagttggagatatattcagactatgtcctagg

SEQ ID NO: 19186 - DNA, 573 bp, Setaria italica
  Peptide Sequence Number=SeqID_85160
cttcaagataccttgtccatttttcataatatcctgcgtgataatttccattatatcttgcaacagattggcaatctgtgtattgttctttgtaggatcattctcatcaataaaacttcagtagatctagcagcttatcaaacttttcacttagctgaggaagctcatccaatcggaattctttcacaagttgtttacattcaatgctatttttaatgttttcatctatcttatcgataactttcttatcactttgttcaactataatgctgtaaagtatatccaataatgtctcatagcattctattacagcatactcagtataaggatcctggtttatcctcttcatgagttcatcatcctttttcttgacattctttgccatgtcaagtgcaattggaatcttactggcaagaaggaaaggaggccactgaaaaacacttgtttcaccgccagaggatggaacaatcaacagatttttctccctattgttcagtaagtcctcttcccgcaaagaagtaataaatgcattccatatgtcagcaaacttatcatagggtaggtttcttttgt

SEQ ID NO: 19187 - DNA, 343 bp, Setaria italica
  Peptide Sequence Number=SeqID_85161
ctgaactgctcgcgccgggtggcgtagtcgacgtcgaaggcgacgccggggccgaaggtggggatggtgaactgggagacctcgtcctggctgatctccgagtcgaacccctggtagaaatggctcgacacgtccggcccgaccaggaaggtcaccttcaggtggagcaagcgcacggtgaagacgcttcccagcctcgtgtagcggtcgcggatcagttccaacgtgcccttggcgagcagtgctggcaggtcgcctaggagagggacccccggagacacgggtggaggggggcggcgtttccttgtcggagtacccgaagattgctgtcgtcgtcttgtga

SEQ ID NO: 19188 - DNA, 600 bp, Setaria italica
  Peptide Sequence Number=SeqID_85162
atgactgacaacctcaggcctactgtccacaacacgagtgacaacagcaggctttccagccatgttgcacttgtgcagagcagacttttgaaacaaaaagaccttctcaggtggaagatcaattcccagatttcctcttgacagaatgataccgtctgcctcagccagtatttcgtcaaaatggttcaagccctcaacattctcaattttagcaaaaatctgagtctggctaagatcgcccaattttgagaggaactcccgtgcctgccgcacatcttctgcatgtcttgtgtaagacaaagagaggaagtcgatcttattcggagcaccccactttttgataacatccttgtcctcatcagacagcgtgggtaagtcaatatgaatctgggagcaatgcagtgtgaacagtgacccagccaaggtagcggtgttcttgattatacagaccacgtcatctccattaacttcagaaacctccaaccaaactgaagtagtctcactgccggtgaacaagtattgccccacaaatattgtcgcaccttggttttctactagtcctttggtcgttagtttccttagttagttaagttttgttta

SEQ ID NO: 19189 - DNA, 1188 bp, Setaria italica
  Peptide Sequence Number=SeqID_85163
gtgtgagtagtttttgacgtaacgagcagcaaaaggcatatttagggtacagtatgatttcattattccatcagcccattaggtgggacaacttccaaccagcatcataggagttttagattgcagagcaaatcctatgatgacaccataggaaaaactgctcatgttgcgaagctataggattatacaaagccaacaagtttaggccttttcaaaaattggcaaaacatgccctagccaacaagcataggctgcttgtctaatcgtccagctcgatgatcttcacaacagatgaatctcccaccttctggcaaacgacaacgcgatcatgggacttgattacaccggaagctttgccgtggtcaagagcaaccttcagaactgactcatttgtagcgctggtagattcagctggatggcgtggatcggcaagcattggaaagaggcctctaactatgagcgattgtcttgcctcaaatgcaccagtgaaactccaccttagttggtttgtctttagacgggggatgaccacagatagaacaggcatggagggcctgtacttggcaattaaccttgcagctcgtccagaagaggtgaagcaaatgatgacagaggctttaactttgatagcagcccgtaccgcagatgaagcaatcgattccaagtgggtcataggctcacccacatatttcacagttcgcttgtagtataaatcttgattaaagaccttctcagcctcagcacaaattctccctactgttgaaatagtctcaactggatataaaccacggagagtctcagcaccaaggagaatggcatcactcccatcaagaactgcatttgcaacatcagtcgcctccgcacgagtaggcctgaggttgtcagtcatactgtccacaacacgagtgacaacagcaggctttccagccatgttgcacttgtgcagagcagacttttgaaacaaaaaagaccttctcaggtggaagatcaattcccaggtttcctcttgacagaatgataccgtctgcctcagccagtatttcatcaaaatggttcaagccctcaacattctcaatttttgcaaaaatctgagtctggctaagatcgcccaattttgagaggaactcccgtgcctgcctcacatcttctgcatgtctcgtgtaagacaaaagagaggaagtcaatctt

SEQ ID NO: 19190 - DNA, 1918 bp, Setaria italica
  Peptide Sequence Number=SeqID_85164
ttcttggtaacgtaagtacttagcaaaggttaaattgccaagtacaggccctccatgcctgttctatctgtggtcatcccccgtctaaagacaaaccaactaaggtggagtttcactggtgcatttgaggcaagacaatcgctcatagttagaggcctctttccaatgcttgccgatccacgccatccagctgaatctaccagcgctacaaatgagtcagttctgaaggttgctcttgaccacggcaagcattgggaagaggcctctaactatgagggattgtcttgcctcaaatgcaccagtgaaactccaccttagttggtttgtctttagacgggggatgaccacagatagaacaggcatggagggcctgtacttggcaattaaccttgcagctcgtccagaagaagtgaagcaaatgatgacagaggctttaactttgatagcagcccgtaccgcagatgaagcaatcgattccaagtgggtcataggctcacccacatatttcacagttcgcttgtagtataaatcttgattaaagaccttctcagcctcagcacaaattctccctactgttgaaatagtctcaactggatataaaccacggagagtctcagcaccaaggagaatggcatcactcccatcaagaactgcatttgcaacatcagtcgcctccgcacgagtaggcctgaggttgtcagtcatactgtccacaacacgagtgacaacagcaggctttccagccatgttgcacttgtgcagagcagacttttgaaacaaaaagaccttctcaggtggaagatcaattcccagatttcctcttgacagaatgataccgtctgcctcagccagtatttcgtcaaaatggttcaagccctcaacattctcaattttagcaaaaatctgagtctggctaagatcgcccaattttgagaggaactcccgtgcctgccgcacatcttctgcatgtcttgtgtaagacaaagagaggaagtcgatcttattcggagcaccccactttttgataacatccttgtcctcatcagacagcgtgggtaagtcaatatgaatctgggagcaatgcagtgtgaacagtgacccagccaaggtagcggtgttcttgattatacagaccacgtcatctccattaacttcagaaacctccaaccaaactgaagtagtctcactgccggtgaacaagtattgccccacaaatattgtcgcacctggtttcacagccttggcgagtccagagaagttgatgggcagcaagttggaggtggcttcttggccctgatgaggtgtgagaacaacagtgccattctcctcaagggagatcggggtttcactcttgttcaccacctgcagctccgggccgacagtgtcaagcatgacggcacatagcttcttggtggcctttatggcgagcttgaggttctcgagcgtctcctggtggtagtcggcgtccccccacgagaaatcgaaacgtgcgacagacatgccggccttgaggcatgaggagatggtgtcgacggagcgcgacttgggccccagcgtgccgacgatcttcgtcatagccgggaagaagctcgtcttcgatggctccaggatggaggccatccggatgggctcctcgagcagcagattcgtcgaatgcatcctgcctggctgctgctcgcgcttcgggtcagatcgggagggggcgggggcgatggcggggagagcagcggcggcaccccttgtgtcccctcttctcctcttcttctccaagaaagcagtggtggatcgatgcagatggctagtgcgctctctcccctcgcctccgctgctcgctcttaatcacgatgcgatcgtggcaaaaatcctacggcggcatatgctatgggaaaggtttccaaaccaatggtccgcgaaccgg

SEQ ID NO: 19191 - DNA, 528 bp, Setaria italica
  Peptide Sequence Number=SeqID_85165
ctttgtggtggggcaagcatcctgctgcagggctagtatcaagcaaggaagtgataaccaaattgaaagaagcacgagtgagatatgtaaatcttcaactcttgttgttcttaattcagaagattcttcaccagtggcgcaagaaaaaggtagaggaagtgacaagagcccagaaacgaatcagaagtcttctgtatcctctacaagtgattcagaaagcgaatcatcacaagacaccagtgaattatcgaattcacccttgccggataatgaattcatgaaggcttttactaacgatctactatcccgtggttatcccctgccaaaaatgcttgaaggaggcatggagttgcgtaaaaattttgaggaggaatttgacgggagacatatggaacaggctcacaaaaaaagttgctttagacacatctttaagtgttgtctcacttgcttcattccgtggaggaactaggttttttgcttgcactggtgtacttataggccgccacaaatccatcacaagaatcctga

SEQ ID NO: 19192 - DNA, 500 bp, Setaria italica
  Peptide Sequence Number=SeqID_85166
tacctagtacctttgtggtggggcaagcatcctgctgcagggctagtatcaagcaaggaagtgataaccaaattgaaagaagcacgagtgagatatgtaaatcttcaactcttgttgttcttaattcagaaggtgagaatagtagttactcgtgaagactgctaatgtgtactgttgtgaaattcacttttattaagtttaatttaatgaacgtttgtagattcttcaccagtggcgcaaggtgcgtttcgtggtgccctctgtccataaacgtcttctgtattttaacttatacatagaccaagaaggcattcaaatgattaaaccaccctcagttattatctctttatgcaatatgtatacatgtgaacaaaagtaaaaaggtggataagtattagtgattaagagtttaagaaataatgttttgcagtatggaataccaaaactattaaaaataccagtacttatattgctatagtaacaaatatcgtatgtgccaa

SEQ ID NO: 19193 - DNA, 324 bp, Setaria italica
  Peptide Sequence Number=SeqID_85167
gctttgttaccatttttttttttacctagtaccttttgtggtggggcaagcatcctgctgcagggctagtatcaagcaaggaagtgataaccaaattgaaagaagcacgagtgagatatgtaaatcttcaactcttgttgttcttaattcagaagattcttcaccagtggcgcagccgggaggcgcaggttcgtcgcgtttctcgccgtcacggcagctctggtggcgtcctaccacctcctcgcgccgaccaatccgtcgcgctaccacgcgctcttcctctccctcggttccaacgccaccgctgccgcccacctccgcgca

SEQ ID NO: 19194 - DNA, 1562 bp, Setaria italica
  Peptide Sequence Number=SeqID_85168
agaactgcatacagaagttgtgcaaaattatctgaaagtgttgtctcactgtcattcattggaaaaaatgaacattatcaatacacaggccttgttatcaaagtaacaaatactctagttgttttttgacttcagcaactgcgattagatgtaagcaaggtggcagaaaccgtaatatggatctgttgattcatgtgaaccttccagatgggcaaatgatgacggggtacttgatgacaattcattttgactacaatattgctgttatcggcttgggccctgtccatgtttttaaagaagcaagtctggatcagcccggggaagttggatatattaacactgtaacagctatatgttgcaacagtacaggaaaaataatgtccttaactgggctagtgactaagaaatcaagtgaactttatggtcaaaagcttattacgtccacatgtattattcctgagtttggtattggagggccccttgtcgactctgagggaaactttgttggcatgaacatgtctcaagtggataatgaagggactctattcctaccaaaggaaacaattcttgagtcgcttgtaccatattttttacctagtacctttgtggtggggcaagcatcctgctgcagggctagtatcaagcaaggaagtgataaccaaattgaaagaagcacgagtgagatatgtaaatcttcaactcttgttgttcttaattcagaagaaaaaggtagaggaagtgacaagagcccagaaacgaatcagaagtcttctgtatcctctacaagtgattcagaaagcgaatcatcacaagacaccagtgaattatcgaattcacccttgccggataatgaattcatgaaggcttttactaacgatctactatcccgtggttatcccctgccaaaaatgcttgaaggaggcatggagttgcgtaaaattttgaggaggaatttgcgggagacatatggaacaggctcaacaaaaaagttgctttagacacatctttaagtgttgtctcacttgcttcattccgtggaggaactgctgttataagcttgcactggtgtacttataggccgccacaaatccatcacaagaatcctgacatcagcgagtttggttagatttgctaataaaaacgagattgatggcagcttgaagattcgtgtgttacttccaaataagaaacatgccacagggaaactgcaacatcataatttacattataatattgctgttgtcagcatcaggaatttccattgtcgtcgaatagcaaaactccacattgagaagccagtttatcctctcaatgataatcaggtagtagctatagggcgtacctttgatacaggaaaactcatggcaacaagtggggtgctgactgacaattcaagcaatcttgtcagcgaagaacatggaatctgtacttgtaagatcaataagggtgggattggaggcccccttattgatttttgtgggaatttcattggcatgaacttctatgatgcgaaaaagtaactccttatctaccaagacatataattctggtagcaaatttgg

SEQ ID NO: 19195 - DNA, 897 bp, Setaria italica
  Peptide Sequence Number=SeqID_85169
tgtaaacttgtctagtctattctattaattttactatttattaattatttgtcttgtttgttcagcataaggaatttccattgtcgtcgaatagcaaaactccacattgagaagccagtttatcctctcaatgataatcaggtagtagctatagggagtacctttgatacaggaaaactcatggcaacaagtggggtgctgactgacaattcaagcaatcttgtcagcgaagaacatggaatctgtacttgtaagatcaccaaggctgggattggaggcccccttattgatttttgtgggaatttcattggcatgaacttctatgatgcgaaaagaactccttatctaccaagacatataattctggagcaattgaaggactttgatagaaaagggtctgctgctgctaagattaacgaagacggtgatccaaatagattttctgtgcctgggccatattggtggtatccttcccttgccccgcgctttatttatgaacgcaggagaaagcattgaattatcatcgatgcacaagtcctgatcctccttgagctggttgtcagggtcctagcgtggagtattgaattgcttgttaaacttcaactcccttgtgaaagatgtaacatggttcgacctctaccatatttcaactggcctgcgtgaattgcatgtgacatacatcctgagtcagcacatactttctgggaaagggatgcgacctgaatgtttttgtcctgtggttatcatatgaggacttcaatcgccttatttgtggttctattattagttcgtttgtcagtaaatataaatctgagaatggcgtgagaacccactactggtggtagtcctaattgattgattctgagaactctgaaaaagattatttatgccaaaaaa

SEQ ID NO: 19196 - DNA, 1203 bp, Setaria italica
  misc_feature (1155)..(1203): n is a, c, g, or t
  Peptide Sequence Number=SeqID_85170
ccttgacatcgacggcttgaccaccgtccagtacacaccgcgacgcatccccgccccgtcgccggccgagccacgccgccgccatctctcgtcccgcagatttcccctaaacctcacctgacccagaacccccgtcggcggccgcgatgataaagaggcgcttcttcaggcaggaccacggcgacagtggcggctcctcctcgtcttcctcctcatcgggttcggactcggaccgagacgtggcggaagaggcagcaagcgatgacgaagtagaggagcagcaaaaggaagaagaggaagcggtcgaggaggaatcgggagaagaagaggaagaagagctgaagcaacaaattcaagaagaaagttcagggtaccaaagtgaggaaagctctgggaatgatgttgatggtccatctgtagatgatgatcacagcagcccaagaggtgaagaatgcgatgaaataagtttgcctgtcaagaaatcttctggtgctaatgctggctctgccaaaagtgccgctaacacagatgatgctgttgaggaagattttgctaactgcattctgaagtgcaaatctgtgtataagtgcaagctctgtccaaggatcatgtgcctgaatgaggagatggtgagggtacatctcaaatcaaagaggcatgctcggtccaagaaactactaggagaagggaggcttaagctgatgctcaacagtgatggtgagctggaggaagaggaagagacacatgctgaacgacatgctcggactatcgctctcgctaagcaagtacagaaaccaaagaaggattcaggtaggcagcggcaaaatcggagaaagaagaggtctcggaatcatcaggagaagaaacaagaggcacaaggctcaaataaaaagcagcgcaaagctaaaggatgaagtggtttccgcagaaaatgtgctcagatctttttgctggttgcagcttcagctgctatatgctctgaaactgctagtaatgagatcattatgatatgcaaagtaatttctgcttggttgtaccttctgtttcaacgaaagttggttatagtttgctgaaactgaaagattgaattgaaatgacggaagagacaactctgctgttagcgactaaataaaaaaaaaaaaaaaacaaaaactnnnnnnnnnnnnnnnnnnnnnnnnnnnnnnnnnnnnnnnnnnnnnnnnn

SEQ ID NO: 19197 - DNA, 331 bp, Setaria italica
  Peptide Sequence Number=SeqID_85171
ttctttcttattttctctcattcatccgacggacgccacagctcacagcgcctgcaaagcaaaaccacttgagatttgagaaccggccggccagccaactaaccggcgccgtgaaggaaggctctccagtctcaggcaggatgtgcaactccaacgtcaagtccgcgggcgtcgcccagatcgacggccgcccggtgctgcagccggcgggcaaccgcgtggcgccgccggagggggcgcgcccgctcaagaagtccctgcacaagtcgctctccatgccggcctccttcgacaacaatgccgccgcggcggccgcgcgacccgcgcccga

SEQ ID NO: 19198 - DNA, 352 bp, Setaria italica
  Peptide Sequence Number=SeqID_85172
tccaggccacgccggggtgggcgtacctgctccggctccacttctgcgacatcgtcagcaaggcggcgaaccagtttgcattcaacgtgtacgtcggcgggtggtccgtgctctccaactacgagatcgccaacaaggacacttttggcgcgctggccgtgccgctgtacaaggacttcgtgctgagcgacacggacgcgacgggcaagatcaccgtgagcatcgggccgtcgacggagggcaacatggatccggacggcctcctcaacggcctcgagatcttgagaatggtcggggacacaggcagcggcggcgacccctcgcggagccgttcaaagaaaatcatcgccgg

SEQ ID NO: 19199 - DNA, 291 bp, Setaria italica
  Peptide Sequence Number=SeqID_85173
ggtagatgacctgcttctccgacgagtgcaggaaggccagcccgcgcgccgcgccgatggcgatcttgagcctcgtgttccatgccaacggctcggtcgaacccctcctgaagagatggttttccaggctgcctttggacatgaactcgtacaccaggagcagctccctgtcctcgccgcagtagcccagcagcctcaccaggttggggtgcgacagtctgcccaagaagttgacctcggactgccactcctgcaggccctggacgctctccgggttgagcttcttgacgg

SEQ ID NO: 19200 - DNA, 315 bp, Setaria italica
  Peptide Sequence Number=SeqID_85174
gggaggcttcgccccgcgccgcttcggcgccttggggtccggcagccctagccccagccccagcaccggcccccttggcacccgaccccgacgccgacgcggaggcctcgctgccgctgcttttgggagcggcggaggcggagagatcgaggctggtgaagtcgtcgagcgcgctgtctaggagctgatcgaggtcgtcgcccccgtcagcggccgtggcggcggcggcggagctggagttggaggaggccatcgccggaagcgccgctgcgcctcagaagccgcgacggcggccgtgctcctagatttggggcg

SEQ ID NO: 19201 - DNA, 357 bp, Setaria italica
  Peptide Sequence Number=SeqID_85175
atatcaagtttcaaacctccatgcaacggatgttatatacatgggcccaaaaaatgctgaacctgtcacggaaatgccgacaagccaaatgtactgtcctgaccacatgtctcttctctagagagcctcttctccaccgaggtttgctaactttctaagttctaaccacacaatatactaaacactttctacaggggaaaaggttggagaatataactgcatagcggaactctatgttatatataaaaggaccttgaatgacatcctcgactgagaggagtggcagccttctatatataacatagagttccgctatgcagtatattctccaacactttctacaggggaaaaggttgg

SEQ ID NO: 19202 - DNA, 1837 bp, Setaria italica
  Peptide Sequence Number=SeqID_85176
ttttttttttttttacaataaaacagcaacttgctcaactctgtattaatggaatcgattcccagataattagtttagcacagagactagcaatgtttattagcttcggctacagggggccctcctgaacgaccagaacctatatcaagtttcaaacctccatgcaacggatgttatatacatgggcccaaaaaatgctgaacctgtcacggaaatgccgacaagccaaatgtactgtcctgaccacatgtctcttctctagagagcctcttctccaccgaggtttgctaacttctaagttctaaccacacaatatactaaacactttctacaggggaaaaggttggagaatatactgcatagcggaactctatgttatatatagaagggctgccactcctctcagtcgaggatgtcattcaaggtccttttgtgctcttttgcctcttctcttctagctgcgacgcctcgttcagcatgtccacggcatcgctctgcatgtttagcttggatagcgcaactgcctgcatgtagaaagctgtgggccaatcagggtagatgatctgtgcttgcatcgcatcacggagggcagcatcaggttggtcacacatgaggtagcacaagcttcgtctggcgaatacagttggtgaaaccattgtccccacatcaacaaactgagtgtaacaatcaattgctgccttaaaatctttgtctttgaaggcgaagtcgccacgtttccttgcatccaacatatccctcatctgctgtgtccattcttgaaaagatagctcattgctcccttcatcatctctgtaatgtgtcgtgaataggatctgatggatggcagttagatccatccgggaacaggcttctcccatgggagaaagagggcgctgtggagtaggaggcgcctgtggttcttccacaggctttggaattccaagcatcacatatgatggtacctctaattttatctgcaaaggctccagaatggaaaccaactttttaatgtcaggccgatctcttggctcatactgtagacattgagaagcaaggttcaccagtgtagtagccacctctattgagtagttcccctccaaatgtgaatccattactgcttggatgtttctgcctctcatgatatcaagtgcatgtgaaggaggtatacgttttccactgagaaggtcaaggagtacagtgccaaaactgaatatgacgctttctggagtaaccctgccatttctcagatattctggaggtgtatatgctaggttagtgctatagcttttcccatccctgctgtttttcatcagaccaaagcatgaaagacgagggtcaccactctcatcaaagaggaccctgtatgcatttaagtcatgatataaaggccgccccttggtactacaatattccaatgcttgagaaatgtagtatgcaactctcagacgcatagcccattctatagtctggttttcccagtgaaacaggtgcttggcaagggtgtcgttgggcatgaactcggcaacgagaaggcgctcgtcgccgtcgcagcagtagccgatcaggttcgccatcctcctgtgccgcaggctcccaacccccttggcctcctccgcgaactgcttggggtcgggccaggcgagcttggcgaacttcttcacggcaatcgcgcgcggcggggcgccgccggcggggcccttcagctggcccctgtagacgaggttgggcgccttctcgccgctctcggagacgatgttcgccgccgcgaacccgcccgtggccgcgcggaggtccgccagggagtaacttccgtcgtaacgtccgggtactattccct

SEQ ID NO: 19203 - DNA, 254 bp, Setaria italica
  Peptide Sequence Number=SeqID_85177
cgtgtctcagccattttctagtgaaggaagatctgcagagctcgctgaacttctccagcagtattaaaggtgggaatttgattggtattcaaatccaaacaaaaggagtccaatttgtgtccagctaaagctggggcttgttggattggctagcttgattccacggaccgggaaccacagaaaagagatctgaaccttatgcatcgaccccatggcatcaacaagcaattggactgacaactaacaactacttt

SEQ ID NO: 19204 - DNA, 554 bp, Setaria italica
  Peptide Sequence Number=SeqID_85178
gatatctccaaattgtgaggccacaagtccatatagcgtccaagccaccggacatgcccatgagtaccatctccaccatattggtatcctcggtcgagggataaggaagccagcaaagatattccatattgcgtagaatgcagttgagactatggcagcaatgtcactgtttggtgtcatggcgactgccatcatgccgtagaacgtgaagtacatgaaggtgaagaacatgaagaaaatataccagaagaacttcacaactgtccagtcaaagccaataaggctgtagacaatgagaccatagatggctgtctgaaggaagatgtgtgggatctcaataagaacctgtgcaaaagcatagggtagagcagagtacatgccggctgccttttctcggtagaaaactgttcgctcaacatctacaattggttgcacagtttgaccattctgaattccaatgaaaagaactgctgcatacatggatcccaaagaattgaacaggtcctgcctattgccaatttcttgcctaagtttaagaagattgttccaaagat

SEQ ID NO: 19205 - DNA, 248 bp, Setaria italica
  Peptide Sequence Number=SeqID_85179
cggcgagcggcgatactaccataccatcaggaggctgaccagtgagtgaccacgctgacagcctcgccataaaaccacagagaacctgccaagataacggagagctcgctcgctggcctctgcgtctcctgctcccgctgcagctcctctccggctccgcgccccgggatcacgagaggtaaatggcagaggcgcaccggcgagggggagagcaatgaccatgaggtgcgccaggcacccgtagaggg

SEQ ID NO: 19206 - DNA, 1654 bp, Setaria italica
  misc_feature (1)..(48): n is a, c, g, or t
  Peptide Sequence Number=SeqID_85180
nnnnnnnnnnnnnnnnnnnnnnnnnnnnnnnnnnnnnnnnnnnnnnnnaaggggtttctaaaataatgtattttttacaattcattaccacaagtcaacaattttcgtctgttcgttcgagtgtgggcaagtaatacatttcaacttccatcgttgaacagaatactaacctacagtggacgattaccttattctgtcttcattcactcgatacatggaaggaagccgggaacaatcatggggtcaatactctttacacataacacctaccactctcttgctctttacaacccccggcctgtggttgtgggcttgtggcaagtcccatatacagcctctcaccacctgatgttaggttttctttccctgcaactttttgaggtacttcttgtgaagcttcagtgcaacagcacaagccctttgtgcatccaagtccccgttaatattgttcaatatcctgataacgtcatcgatccctcgagcttcttgcagcagctttggaccgttctctttcagaacactagcaaccaggaaaaccgaaatagggacaggtccatcaccatcatttgccccattcttcatattctccctctcgtacttgccaaactgacgtattgattttacctttggtttaaatccttcaattttgtgggttgccaccccagcttcgtcataagtagagaagatgtcaggatcgtattctagagcccacatcatctcccaaaggtacaaggagtccccaaatgacagttctcgccggaacagtaccatgaacatgcgaaatgcaaagagatagtcacccccaccaagtgtttctaggtggtcatgtaactttgggtcgagcacctgaataatagaagcaagatgttgaagctggttttccactccaacagactgctgtgtgcatctgaaattccctcgcagcctacgcatcaacctctcaaagcaccaaaatgcatctgcttcatcattgagcagtactatcatgggtgaacataaatcactcattccttgacaataaccaacttctttgtcaatccatgcatagacagctagaatatcccacaactttgaaagattttctttgttctcataaaataccatggagcggtcagtgcgtagaacatcaaggccaatctgatgcagcgtaagtttccattcaatgattttcttatccatgacacggttcggggagtcgctgacctcagctccactgctgctggtggaagtagcttgtgtgtccgaagcagcctcgagtaaaaccaatggatccttaatagggactccatcctcagtgatgattggggcggtgacaattttaccactgccaacgtgagaatccatctctctgcattcttccttccatctagcatactgcatccttctcctgtgcctaatctgttcccgctcatcgaaggtgctctcggggtcatagcagccaagcaagaactcccaaacctctcccctgatggcagggtggacaccccctctctgtatgcggcttagaaccgaagcgatatccaggcagccttcacgcgtgaacgcagcgtgccatttccgaacgctcagtgtcttgccgaccttgatcttgaacctggtgctggggacgttttggctgcgcaatcgggcgcggacctggttaaaggaatccgcg

SEQ ID NO: 19207 - DNA, 589 bp, Setaria italica
  misc_feature (123)..(123): n is a, c, g, or t
  Peptide Sequence Number=SeqID_85181
cggctcgccggccggccggccggcggcgtccatcttaatctctttctcttgcattctgtagttggctagcacggtgagcattgcgtgtgccggtagcaagaatccaatgctcttttttggcgngaaaacgcaggaactgtgtgtgcccccgcctttgcctttcctctgctgcgagcctgcagtagtaacttgcaagaaaccgtgaagaaagctagcaaggagttactactcctccaatatgccttttattttctttttttaacaaacaaaggttaaaaggacgaggggtaaacaagatgttactcactcatcaatcatcatcatggagcacctcgatcctcgagtgctgcgctcacttgtgacttgtaggacgccaataatgcgcagcagggccggccttacgtccgagcgcgcacaggacgatgatacagcagtgcgcacacaggccagggcagcaggagtaggtgagccatggcgtctagaggttgagaaattactagcaatgggcaatggcagtaacattacctactagaacattgaatccaaacagtacgtacactaggattaggatcagcaagttaaagttaaa

SEQ ID NO: 19208 - DNA, 1467 bp, Setaria italica
  Peptide Sequence Number=SeqID_85182
attgcttcctatttcttttcaaattaaaaaggaaatgataaacatgtcaatatgtcagatttcctttgggaactatgggacctttgtagtaactatcataaatagtctatacacatacatcaaggtacaaagtctttatactctgcacgactgtaccacaaaatccaaaaaaaagctcctgagttttgcttgtagctgagcatctccattgctactttgccttctgtgtacaaggagtcaatcgacgtcaagaaacagtctgaactctaaagcaatatctccatccacaacagccttcctcttcagttcttcgccaccccataatccattatccatagatgaatccgaaggtcatgacgagctgatccgcatcaagagtctgacgctttcttggaaccgccatggatcaagcttgctagcttcactctgggcttggagtactcgccactcattgcaagcttggccgcaagcccgctgccgaaatctgtgaagtgcacgccgtcccagctgaccaccttcgcctccggcggacaaaggtcaccgcagccgaacttccccggcttgaagttgtacggaggcccgccgttgccgcagcataccatgaacggccactcaatcccgtatttggtgtggttggcgacgaagtcgtacttgatggcgaacatgtctgtgtacacgatggtagcgtccttgaggtggaaccgcatgtcgtcgcagagctggctcagcttcttgttgtacgccttggcggcccggttgacgctggcgaggcagccgtgcgcgtcgtgctcgcctttctcctgcaccactaatgccggcaggcatcccagggcgccggtgccgtggatccagaacttcctcgcaccattgtcgtacagaatcgaaatcgccttcctgacctcgccgacgatctcggtgatcttcttgtcccactgatcagatggtgtatgcgccacaccaaccatgtcattgtgaccaatgtccatcatgtacagagcgttctcaaacccttccttgctcaccgggcctttcaatcctcgttcgaacatctcaagggatctgtgcctgaagtagacgaactggtcgacttggacgttcagggagtagggagagacaccgtgactcactgtggagccagccatggcgaagttggcgccgttgctgtagtctgaaccaattcccttgaggtatggattcagctcatgggtgcccaggctctcacagatgaagtcgatgatgacgcggccgtcggagagccgcccggtggggcggcggaagtaggtgcggccctccggcggcatgatccggatgccgccggccgccgccacgccgccggtgtccgagttcgagtcgccgaagttgaacagcaccaccggcgggcgctgccgctcctgctccttccccttcacttcggcggccggtggcgcgggcgccgccagctccgcgccgctgctgctgttgctgctg

SEQ ID NO: 19209 - DNA, 1737 bp, Setaria italica
  Peptide Sequence Number=SeqID_85183
accgaaactccactcggaggcctcacgggagactgtcgttgtcatcatgaaccatgtcaacctcgtcgagatgctcatggatgtgaaccagtggtcgacattgttctcaagcatcgtgtcgcgggctgccacgcttgaagtgctgtccaccggtgtcgctggcaactacaatggcgcactgcagctgatgacagcggagttccaggtgccgtcaccgctggtgccgacccgtgagagccagtttgtgcgctattgcaagcagcacacagatggcagctgggcagtggtggatgtgtcccttgacggcctgcgtgcaggtggtgcagtgggcttgcgtgggcgccgccgcccctcgggctgcctgatccgagagatgccaaatggctactcccgcgtgacatgggtggagcatgtggaggcagatgacgcgatggtgcatgacctttaccgtccactggtgagctctgggctggcgttcggcgcgcagcggtgggcagctgcactggagaggcagtgcgagcgccttgccagcgccatggccagcggtgtccctgcagcatccacaggaggtgatgctgcaggcgtggtgaactcagctgagggacgccggagcatgctccggcttgcagagcggatggtagcaagcttctgtggtggcgtgactgcatcaacaacccaccagtggacgacgctgtcagggagtggccctgaggacgtgcgcgtgatgacacgcaagagtgtagatgaccctggccgccctcccggcatcatcctcaacgcagccacctccttctggctccctgtgccgcccggacgcgtcttcggcttcctccgcgacgacgccacccgcagtgagtgggacatcctgtccaatggcggcgacgtgcaggagatggcgcacatcgccaacggccgagaccacggcaacgctgtctcactgctccgtgtcaataacgccaactcgaaccagagcaacatgctgatcctgcaggagtgctgcaccgacaagacaggttcctacgtgatctatgctcccgtggacgtggtggccatgaatgtggtgctcaacggcggggacccagactacgtggcgctgctgccatcgggcttcgccatcctgcccgacggtcctggtgcgggcggcggcgggtctctcctgaccgtggcgttccagatccttgtggactccgtgcccaccgccaagctctccctgggctccgtcgccaccgtcaacagcctcatcgcctgcaccgtcgagcgtatcaaggccgccctcgctgccgacaacactgccggcggtggcgcccgaccaccaccctatggtgatgaatgaaactggtgagggatgaagagcgggttgaatcaaaatcaaatcagatgaaattgagatttgggaggatctggcaatgcggggagtcaagaacgcaccgcgtgctctccttgcaaggtgttgccttctgattcagaggtagtaggcgaggggcgcaacactttgcaagggggttggttcgggcattgactctcttcttctttctctgtcctcccatccgatcgacctgccactctctcaccaggggtttgtagtagaagcagttagaccatgcatgcgtgtcttttatttggattcttggtgtctcaaatgtgtctgtacacctgagttaattgacttgactttggagattgttaaagtttgaaccggtttaacttgtaattgtttttttattcactaaaaaaaaa

SEQ ID NO: 19210 - DNA, 417 bp, Setaria italica
  misc_feature (34)..(34): n is a, c, g, or t
  Peptide Sequence Number=SeqID_85184
aatgtaggtctcggcggcgccgcgatgctggccncttggccgcagaggaggaggagaggccgcatgtgcatccacaggccgccgatgggaacggcggcggcgatgagcaggagcaccgtcctctgcatggtgatgccgaggagtgagtagtggcccgcgccgaatgcctgcccgcatatgggctccatgcccatggcgagaccggagaggacagagtagccggtgatgttggcgaagccgatggcgagtgacccgccggcaagggccagaccaccgaggcgaccgaggaagagcatcgaaatcatcgaccggaggtaaagcaggagccccgtcaggatcatggggagtgcgagggcgagaatggaccgcgcctcgccgcgcgcgtccgtcgggaactcgaagcccgggaagagggac

SEQ ID NO: 19211 - DNA, 292 bp, Setaria italica
  Peptide Sequence Number=SeqID_85185
cccaaaaccacacggatccagcctctttacccttccgccacagccgatggcatccgccccgccggcgccggcgccggcgcacacagcggggccgtcgctggtggacaccctcttccagcgctccctggacgaccttgtcaagtccctccgctccgacccgtcggccgccggcgagtccgccgccgtcgcccgcgcgctctccgagatccaccgtgagatccgcgcccccgacgccgccaccaaggccgtcgcgctgcagaagctcacctacctctcctcgctccacttcgcc

SEQ ID NO: 19212 - DNA, 302 bp, Setaria italica
  Peptide Sequence Number=SeqID_85186
ccctccctttttacccccccgcaagcccgcatcgcctcgccgtctcctcccggtcgcgctgaaaccttctcggctctcgccgcgccaccgccgcggtcgatccgacccggccgcagttcgggggaccccgccgccgccgcatcctccgagggccgtaggcggagtcggagtcgtggtcgtcgtcttcggcggcgggaatttgatgcgccacggagcgggcgcgaggacctggctgagttgaatacggcggcgaggggacgacgcgatgccgggggtgccgtccgcatcgggatcggggatcg

SEQ ID NO: 19213 - DNA, 329 bp, Setaria italica
  Peptide Sequence Number=SeqID_85187
gaaaagctgatgaatctgggacatgcacagaggtacttcgcaatttactaatctgtttatttagtataaaatgaaatgaatgcactactgtctgtgtttaatctcaagtgcattaggtatattttttactaaataagaacctcttggcctaatctaatatggtctttagtttactaagtgtttgaattccatatgaatcttgggaacatttcaactatgttgttcctttcatgggaagttaggaaaagtacaaatatggcaatgctagggtgaacaattagtcatgtgatcgaaatggttacattctcaccagttctatatttctcaag

SEQ ID NO: 19214 - DNA, 421 bp, Setaria italica
  Peptide Sequence Number=SeqID_85188
tgttcgcgctggccaccgtgcaggtgtcgctggccagcctactgtaccacttcgagtgggcgctgccggccggcgtgcgcgccgaggacatcaacctcgaggagagcttcggactcgccacaaggaagaaggagccgctgttcgtggtcgtcaggaagagcgaggggtatgagtttaagggggaggagcttaacgaggtttaaatggtattattttaatggttcatgcatgtctttgttgcctttgttcttattagtagagcaaataagtgttaaggcttgagattaactttattatagattaggtgctctatcttgtcgtcgcaggggagaggtaaaagcaaccttgtaatttttcttgaataataatacgatggtggcaataaaaaaatgtatcatatttcagcaataaaaaaaaaaaa

SEQ ID NO: 19215 - DNA, 1721 bp, Setaria italica
  Peptide Sequence Number=SeqID_85189
cccaagctatagtagcacacaaaccaaggaaaactttgccaagctattgacgcgccgcggccatggagctcaacctcgtgtcgtcggcgtcgctcctcctcctcgcactctccgccgcgtacgtctactacacgacgaggagccggtcgccgcagcggctgcctccgtcgccgccgggttggccggtgatcgggcacctccacctgctctccagagggatgccgcaccacgtcatggccgacctggcgcgctccatgaaggcgccgctgcttgggctccggatgggcagcgtccgcgccgtggtgatctccaagccggagctcgcccgcgccgcgctcacctccaacgacgccgcgctggcgtcgcgcccccacctcctgtcgggccagttcctgtcgttcgggtgctccgacgtcacgttcgcccccgcgggcgcctaccaccgcatggcgcgccgtgtggtcgtctccgagctcctctcggcgcgccgcgtcgcgacgtacggcaccgtccgggtcggcgagctccggcgtctcctcgcgcgcctaaccaggagcgcctcctcgccggcggcggtgcccgtcgacctcagcgagtgcttcctccacctcgccaacgacgtgctctgccgcgtcgcgttcgggcgccgcttcgcccacggcaagggggacaagctcggcgcggtactcgtcgaggcgcaggacctcttcgccgggttcaccgtcggcgacttcttcccggagctcgagcccttcgccagcaccgtcacaggcctccgccgccgcctcaagaactgcctcgccaacctccgcgaggtctgcgacgagatcgtcgacgagcacctcagcggcaagcgcccgcgcatccccggcgaccgcgacgaggacttcgtcgacgtcctcctccgcgtccagaagtcgcaggacctcgaggttcccctcaccgacgacaacatcaaggcccttgtactggacatgttcatcgccggcacggacacgtcatccgcgacgctggagtgggtgatgacggagctggtgcggcacccgtggatcctcaagaaggcgcaggacgaggtgcggcgcgtcgtcggcggcaagggccgcgttgaggaggccgacctcggcgagctccactacatgcgcgccatcatcaaggagacgttccggctgcacccggcggtgccgctgctggtgccgagggagtccgtggccccctgcacgctcggcggctacgacgtcccggcgaggacccgcgtcttcatcaacaccttcgccatggggcaggacccggagatctgggagaaaccgacggagttctcgccggagcggttcgacaacggcggcggcgagatcgacctcaaggacccggacttcaggctgctgccgttcggcggcggccggagggggtgccccgggtactcgttcgcgctggccacagtgcagctcaccctcgcgagcctgctgtaccacttcgactgggcgctgccggccggtgttcgtgccgacgacgtcaacctcgacgaggtcttcgggctcgccaccaggaagaaggagccgctgttcgtcgtcgtcaggaacaacgagcagtacgagtttatgggggaggagttgaacgaggtccaagactagctagctaacaaattgcgatcattaagctaccatttcaagagctcatgtccaagaataagatgtatctgttcacattgtcaataaacgccagcc

SEQ ID NO: 19216 - DNA, 583 bp, Setaria italica
  Peptide Sequence Number=SeqID_85190
aggacaattagactaagcaataatatgtgaaagtctctgaagctggcagaaggagctggcatggatggtcaagggaggcactaaatttaaatgatgtcaaagtatatctaaggctagccattccatctacttttatgacctgatagctcagcttggagtattgggcatttgagatggtggttctcctagcaggatttcttccagatccaaaactggaaacttcaattctgtccatcagcctaaacacaatgtggatggtttatacaattccaagtggcctcagcagtgtaataagtattagagtatccaatgaattaggtgctgggaatccacaggcagcacgcctatcagtttatatttcaggaatcatgtgcctaactgaaggcctttttatagctatcgtcacagtatcagtgcgagatttgtggggttatttatacagcaacgaaaaaaaggtcgtgaagtatgtatcaatgatgatgccaattcttgctacttctgacttcatggatggaatacaatgcacgctatcagctcgaggatgtggctggcagaaattatgctcacttatcaacttgtttgc

SEQ ID NO: 19217 - DNA, 1582 bp, Setaria italica
  misc_feature (1)..(43): n is a, c, g, or t
  Peptide Sequence Number=SeqID_85191
nnnnnnnnnnnnnnnnnnnnnnnnnnnnnnnnnnnnnnnnnnntttttggttttcacgggtcacggacaattaaaccttgaaatcgtatacagtatgttgctgattcttgcgtgcactcggttacaatcgatcgccattaccttcgctgaaaacgagcagaggaaccggcgaaatgttctttgctttgcttagatgtagcggcggctgcagtgccaagaccacgagcgagcgatcttaacaaaccaacagatcttgggcggatcgacctgatcaatcaccggcgcggagcggaatatattgacccgcgccgtcgccgatcgttgtaatgagaggaggaaggggaagaaggcaggcaagagagaaatcaaaaggaatcatggagagaaaagagagaagaagctgggtcgccggcgagcgatcaggagctgttgacctggttgcactgcttcctgatctggccgttggtgccggtgagcacctcgacgcggcccatcttcttcatggacatggagaaggcggcgtagaacttgaaggggttggtgaggtcctgcaccatctgcgccgcggcggcgttctgcgtcagcgccgcgtcggaggccagcgtgccctgcttgttgagcacgttggtgtagtagctgctgtcgaacttgaccgccgtgcggccgtcgaggttgacggtgcccgacgccgacgaggacgggcacgagttcatgagcgtcttggcgtaggccgagtcgaggagcgggtcgacgttggtggcgttcccgttgtacagccggggcgtgacgctggagcagctggcgacgccgatggtgtgggcgccggagagcgcgatgaggtcggtgaggttgagcccgcgtgcggcgaagctctggaggaggccgttgaagccggcgaacggggacgggagtgcgcccgtgttggacgccagcgacacgttgccgtcgcggcggcccgtctcgacctgccagagggaagactggaactggtaggagacggcgtcgcgggccgcgagcgcgacgatgtcggcgcaggagacgacgcccgggcacgcctgctccagctgggtcttgatggcgtcgatcacctcgtagccgcccacggacaggttcggccccgccttcttctcgctctgcgcgttgtccagcaggatcgacgcgtcgcaccccttgacgaagcagtcgtggaagtggaggcggaggaggcgggcggggagggccgggttggcggcgacctgcgcccaggtgacgctgcggacgatggagtccaccttggggcagctcttctggtagaagttgtaggccagcccggggttcgactccagcagccccgccctggcggagctcactaaatggcccaggaccaccgcggccacccaccaccacgccgtcgcggcgccaccaccaccatcgcctcgccaccgcgccgcccctgctgctgctgcgacctgctgcctcctcatctctctacctatcttcttaaacggactgagcctctgctgcagagcgacagtgatcttgaaggagggtgggagagagggagggaggaggggacgggctcggccggttcgcgagtgtttgg

SEQ ID NO: 19218 - DNA, 1141 bp, Setaria italica
  Peptide Sequence Number=SeqID_85192
ttttttgaggacaaagaagctcctatgatacctcaacaaggtgccggttctgatacacagactagaaactatattaagtacaaacaaagaagggaaaaagcacaaactgaccatgcctaacgaaataatagtgaagacatgatatctttctttgttaaattgacacttctatgcactgcttcaactgtcaggtagtctcatattaagcacttctggtggtggccgaagagtgcaaaccatttccctcgtcttcccgaaatagacctggtccagtgaatttctcagcttcccctccatttcttctatcattttccccatattaacgaggtgcccatctgctacagcaagagtcatgctcatctgccgtctaattgatccagacaaattgaaagttccagactgcttgttgtctgttgtcaatgacagcatcacagtgctgttcaagcagtaatgtgctgctccttcttcttcaggaccaacctgaattacatgaatggcatcccatgaaccaatctgcatgtaccctcttgttccttgtccatctttcttaattaagaagcatgcaataaaaccaccattatcttcatcctcccaaatgtacacagatgagatcccaccttcatagtactggtcacgatagacagagaaaacttcatttgcctcaatctcgagatttctcatctcttcagagggaactgtaccatcttccaaaggagggtcatatttgttcgaccaaggtgatctatatgagtcggcgtcacggttatactcgcatagaatgtattccttcagattctccttatccatgcaaacctggagcgggaggtcgacctgggagaggaggtcgagggagtggtcggggaggagggagagcagcgcgttgagcgccgtctccgcgctgcccggcggcatccgccgcatcagatccatcgccgcctccatgcgacccggcactctgtttcacctttgctcgtcctgtccccgcgtcctcctctcgtggatccctcgtcgcttctcctcctccagctgctacgtcgtcgtcgtcctctcccctcgtttggtttcgttgcttccgtcctaattcagttgatcgtccctcctcagcttcgtcttcttctgtggctctctttccatttcgtcg

SEQ ID NO: 19219 - DNA, 868 bp, Setaria italica
  Peptide Sequence Number=SeqID_85193
tttttttttttttttaccttttttgttatactcagtgtaaacccatttcgataattgtaattttctgatggcaagcagatttacacaaaccaaaaaggccggaacaaagaaaccccataaaccataacaatacagtgtaactcacagaatgaaaagggaaaaggaaaagaaagaaactgacatcaatatctagcgagcatgctaagtaacagggacacaaccagattcctcgacagaactgcatatctgaagcttcaagtggtagtttgtgttgcttcgctggttttgtagtcatgccaaaagtgcaggcacaggtgcaggtggagataccatccattaatggattaacaattctcaagatttccttatttgtatgattctttagcatcacctgaatctgagtccgagtcactagcattgtaacctgggcgtttattgctaactttccagactgtagatcgataccttgatgctttctccatccaaacccttgccttgtgctcgttcttgttgacgccgtatccactgcggtacatctggccgacgagcacctgcatggtgatgtcgccggcgcgcgcctccttgagcgcgtcctggaaccaccgcctcgtgcagtccgacaccacctccgcgagcggcactcgctcgtcctcctggagcccgcacgccgccgccaaatcccgcacctcggcccgcccggagctggccgccgccgcagcggcggccgcggcggcggagttcctgggcgtatccagtgggttgggcggcgtcttcgctgccttcccggcggtggaggcggcgaaagagggggagcggaggctgcgggcgtaggagcggaccgcagcggcggcgactgcagcggcggcgg

SEQ ID NO: 19220 - DNA, 252 bp, Setaria italica
  Peptide Sequence Number=SeqID_85194
gtcccggtatgtgcatttccatcgctgcaagcattttctttctgttgtttattccatcggcctgactgggtatatgctaaagttccgccagcaagtagtgcaccagaaacaactgcaagtgttctccttcttgaagacaaaaggttgcgcccgcgttctgttagctgcagtaactgaagcgatgacattgttgctaggttggcctctttggtcagatatgtacagctaaactgagtgtcgccgatcgggggg

SEQ ID NO: 19221 - DNA, 420 bp, Setaria italica
  Peptide Sequence Number=SeqID_85195
atttcaaatcttaccatggatggtatagtttgtaacctcaccaaaactaaagaagtttatttacatgcacctcagattgccctgatcacatctcagtttcttgcctaccaaatttgcctgatctttgaaacaggagaaccaaacaaaatcaaccaatctagtagaaactgcagatttacgcggtccaaatggcacatcaaacatcagcaccattgctcaacagtgcagattttgttcttgcaaggagtcggtaagcaatacagctctgacagagaaactttgctctgtgaactgctgattgatcatggttgctgtcaaccatcctcatcacaaagagcagccctccgaactgcctgatcaccattggtccgtctaccgtactattgtcgtcaaattttcccaatcattatgcagattcgg

SEQ ID NO: 19222 - DNA, 2297 bp, Setaria italica
  Peptide Sequence Number=SeqID_85196
acgaacggcccaaccttcattgactggtgtaaccttgaccggtgctcgcgcgtcaagcccttccgctgcggggagctcgacttcgaacagcgcatcaccaacgcccaggccgtcgccgcaacaggcagctgcaactacaacaagggcaggtacgcccgcaaggaggacgccattctccaggcccttaacattgagagggagcgtgcactggagccggcaagcaagacctaccttcatgggggcacctgctcgctcaaccccaaaattgaaatgcccaacggacaagtaaaagatgctgcagcaaagggtccttctaccaccatccattcactgccactaccgctgccgctgccaccacctccgcccaagaggaagcgcaagacgccctatgactctgaggatgatgcgcccaaagggtcccgccgtatgagagacctcagggatatcggatccaagactgttcccccaatggactccccccatgctggtacaatctctgttcccaagtatgatgatctgcctaatgttggccaggtgaaaacaagtgtgcagtctcatgcctccacaaagaggaagcatgcagctgcgcaccaggaccaaccctatggagtcccaaggaagaaggataggtcccgtccactatcagagctctgcaacggagacatgtggaatggttccagaccaaatggccacaaggctgatgaacatttcttgggtgcagctacttgttcaagcagctcatcaggcacttcaaccttggattcttcattggagacgaccagctgccatcgccgcgccgcattcaaaacagatcaagcaaagggcaccgagatatcctgcatgagcaggctattcactgatgattttcatcatagggatgattttgtcgaaactccacttgctggaagaagcatcttggaaccagatcatttgcagaaatatcaaccttgtggtttggcaaagcaccctacctggaaacataataagcaagctaatggctgcagcaaagttgtgaaatgtgaccgcaaaaatattaagatgagaagcataagctctgttgatcaggagggctacaacaggacaaaagactctgataagcacgagcatcacaaagcaaggacagtaaagcacaaagcaccaagagatgaggttgtccttttggagaaaaggctggacaagcgttctttgaacaagccctctggagatgatactaaaatgcatatcgccatgattcctactgattcggattgcgttggtgcagttgagcagcaatgttctaaaagaaagcgtgatcctgaagagtcatcagaaaccataagcaaccgttcaaattgtgatagtggttcaatatcatctctggtgtttgagctgcctctacaagtattgccgccccaaaagaaagcactggatcctgaaagatgccgtgcagtgaagccaatcaagacactgcatttgaattccaccctttgtaatgtggagttgagtgtcctggggagcagcaacaatgggcgccgtgtgccccttgtttctctaatgagtaagtggaatggtaagcccgttgtggggtatccagtctccgtcgaggtctgtgatgatgtgtttggctgtcctttatcaagtggaggtgagcagcaggcagttacaagcagcatggatggaataatgctgaagagggacgaaacaaagggcctgcaatgccttgtgccaccatcaccacaggcatgccgggcgaaacccaagagccgcagcagaaagccctcggagaaagatgtggacaagttgtggcagccgcacacgaaaaagccagcgtcctcgtcaagaaagatgcggaggctttcctcgtttgcttcgggtcagagagatggtgaggacaggaagtcagctgtcgggaaagtttctggagcaaccatcgcgtgcatcccgctccgagttgttttcagtaggatcaatgaagccctaagcttcccagttaaatgaggatacccaggctgctgagtcggctgcctgggagatgctgacggggcctccggtagtaggtgttgttgtacgcacgcctgttgtggccatagcgttgggagaacgcttggtgtggcctagtagcatggtgatggatgtatcatgtggttttgttttgagccacatcacattagaggtagtagaagggctgtgctgaggcacccccgggcagcttaaaacaacatttggtgatgggcacatgatctgacggcggaagcaaataactagtgtagcttctctatcttgtttggaaatctgcttctagtgttggtgatgcatcg

SEQ ID NO: 19223 - DNA, 519 bp, Setaria italica
  Peptide Sequence Number=SeqID_85197
tggatcgccacggacggcgtcggcagcgccgtggacgcgctgggcgccgacgacatcgacgccatggagggggttgtcagcctcaggccgtacgtgcagatgacggaacaggtaaggaacttctcggcgaggttcagggcgaggctccggtgggagagcccgagcgccgacatctacgcccacgacccgaccatttcgatgctctggtcgtacgacacggcgtgggcggtcgcggcggtggcggaggccgccggtgtctccagcccggcgttccagtcaccgcataggagcacggtgacggacctggaccggctcggcgtgtcggccaccggagcagcgcttctcaaggcggtgcacgagacgacgttccacgggctcgcaggcaacttcaagctcgtcgacgggcagctgcagcccccggcctatgaggtcatcaacatcatcgggaaaggcgcgaggtcggtggggttctggacgccggaggccgggatctcgcaggctctccaccccaacgccgcc

SEQ ID NO: 19224 - DNA, 431 bp, Setaria italica
  misc_feature (45)..(45): n is a, c, g, or t
  Peptide Sequence Number=SeqID_85198
tgcgcatcctgtccttgtaccggaaccagctcaccggcgagatancccggcgacctcgggcggtactcggagctgaacgtgatcgaggtgtcggagaaccagctgacggggccgctgccgccgtacgcctgcgccaacggccagctccagtacatcctggtgctgagcaacctgctgacggggcccatcccggcggcgtacgcggcgtgctcgctgctgctccggttccgggtgagcaacaaccacctggagggagacgtcccgccgggcgtcttcggcctcccgcacgcctccatcatcgacctctcctacaaccacctgacggggccggtccccgcggcggtggcctacgccgccaacctcacgtcgctgttcgcgtccaacaaccggatgtccggcgtgctcccggcggagatcgccggcgcgtcggg

SEQ ID NO: 19225 - DNA, 401 bp, Setaria italica
  misc_feature (400)..(400): n is a, c, g, or t
  Peptide Sequence Number=SeqID_85199
gaagaacaaggagaacaaacaaagaatgtaaaggaaaactcgtggtccacacaaactagcagggacattgagggtattttagatggaaatgattaatgagtgcggtggctggcaaagagccatatttttccagtgtcctacctaatgcctcgaagttatagtgttttaggagcaaaattggtcattttaacaaaaatagacttgttggtacattgttgcaatggcatcttatagcattaatatatttgttctatggggaaaaaggtattaatatgatgtttgttatcaaaatctgactgctgatgttcaaactatatgtactgaattagaggacagtatcgcagcggtcaacaattcaattatgaaatctctgaatagtgcatgcacaataatgtttgtnt

SEQ ID NO: 19226 - DNA, 423 bp, Setaria italica
  Peptide Sequence Number=SeqID_85200
tggccgaagcatttctcggcgtacaaagtgtccaaggtgaccctgaacgcgtactcgaggatcctagcgagaaggcaccctgagctgcgcatcaactgcgcgcatcctggctacgtgaagactgacatgaccttacaatccgggctcctgacgcccgaggaaggcgcgagcaacctggtgaatgtggtgctgctgccggaaggcggcccgaccggcacattcttcgcgctgggccaggaggctccgttcgtgtgacgctgcttggccgggcacggctgatcgccactggtccggttgttcacgcgccgttctccaactgccagttatcaacgttatattatttgcgggcgtgccagtataggattgttatacacataaataaataaatcacacacagccgcaacagaatgggaaacttgtatt

SEQ ID NO: 19227 - DNA, 1240 bp, Setaria italica
  misc_feature (1195)..(1240): n is a, c, g, or t
  Peptide Sequence Number=SeqID_85201
aggtacaataggaaggaaagactaattcccgatcccgcgaacgcaaggattgcagtggttactggcgggaacaaagggatcgggctagaggtatgccggcagctggccggcgccggcatcaccgtcgtcttaacagccagggacgagaagagaggcgcagccgctgtggagaagctaagagaggcagggctctccgatgtcattttccatcagctggagatcaccgatgctccgagcatctctcggttgactgatttcctgaagactcgttttgggaagctagacatcctggtaaataatgctgcaattggtggtgttgagtacgtgcaagatcctgttgatagctcactgaccagcaacgaaaagttcggtggcatggatcagcttcagaggcttgaatggatggccagtgctgtccgggagacctacgccgctgcaagagaaggcttgcagacaaactactacggcacaaagcatgtcatcgaagccttactgccgctgctgcaagcttcctccgatgggagaatcgttaatgtctcctccgaatgggggctgctaaggctaatcaacaacgaagagctgaagcaggagctgaacgacgatgttgagaaactcaccgaggagaggctggatgagattctgggcacgttcctgaacgacttcaaggccggcgaggtggaggcgcacgggtggccgaagcatttctcggcgtacaaagtgtccaaggtgaccctgaacgcgtactcgaggatcctagcgagaaggcaccctgagctgcgcatcaactgcgcgcatcctggctacgtgaagactgacatgaccttacaatccgggctcctgacgcccgaggaaggcgcgagcaacctggtgaaggtggcgctgctgccggaagccgggccaaccggcgtatacttcgacctgggccaggaggcgccattcgtgtgacactacctggctgggcatgcatgagtgatcgccagcaaccccttggctcgccgttctccgaccgcctgttaccaatgtgcaataaaattcgcagctagctctgtagttcatgtcaagtccaaatttttgggcacacgatggtatttttggtatttttatttgtcaacgaaagtgtatttgctagtttgaagttatattgtaccgcaagcacatagttcacgaaatttgttaaagacaacgtttcaaacgnnnnnnnnnnnnnnnnnnnnnnnnnnnnnnnnnnnnnnnnnnnnnn

SEQ ID NO: 19228 - DNA, 444 bp, Setaria italica
  misc_feature (400)..(400): n is a, c, g, or t
  misc_feature (443)..(444): n is a, c, g, or t
  Peptide Sequence Number=SeqID_85202
tgaagagctccaaagcaaatagagaattaaatcacttttagctcttgttcaagtgctgttggcctgatgaagcttcctggtggtaacatggagcagtgatgcggcaggcaaagttttgttagtgttgttgagcttgtagagggcctatttaatttggaatggaagacgcaagagttttgcaggaactgatactattctgccagaaattctggagaatcacaggaatcgttgtagcttgtacaagtaaattagataggaatggtccatggacagaaatctgtactgatttttgcactgtacacaatcacagatgcactgaaatccattatctgccagaaatgagtgtaagagggccggtcaatttcagatgatggaaatattttaaaaaaaaaaaaaaaanaaaaaaaaaaaactaagaagaactagaaccaaggacaacaacnn

SEQ ID NO: 19229 - DNA, 513 bp, Setaria italica
  Peptide Sequence Number=SeqID_85203
tacacaaaaagaatttagtttctttggaatgcgctgataggaggttatgagcatcatggtcatgctatagaagccttgcagctgttcaaggagatgaggggtgccaaggttgcgccaagtcacataacttttatttctctcctgagtgcatgtggaaattctggccttgtctctgaaggacgggtggttttttataccatggttcgtgagtattgccttgatgctagggttgagcactatgctgcgcttgtcaatctcataggacgacacggccagcttgaggatgcattggaggtgataaagagcatgccaattgctccagaccgagctgtgtggggggcattcctgggagcctgcactgctaaaaaaaatgaacagctggctcaaatggctgccaaggcattatcggagattgatcctgagagttctgctccatatgttttgatgcataacttacatgcccatgaggggagatggggaagtgcatctgtggttcgagaagatatggaacgg

SEQ ID NO: 19230 - DNA, 656 bp, Setaria italica
  misc_feature (628)..(628): n is a, c, g, or t
  Peptide Sequence Number=SeqID_85204
cgccttcgccgtcaagtgggccgtccagaactacctccgccccggggacgccgtcgtgctgctccacgtccgccccacctccgtgctctacggcgccgactggggctccatcccggtctccgtcgacgacgagcccgacgccggcatcgccgagggcgcggcgcgcgccgcggccgcctccggggaggaggagaccgagcccgaggaggcgaagaagaagcgggaggaggacttcgacgccttcacctccaccaaggcgcaggacctcgcgcagccgctcgtcgtcgcgcagatcccctttaagatccacatcgtcaaggaccacgacatgaaggagcgcctctgcctcgaggccgagcgcctcggcctctccgccttgatcatgggcagccgcggcttcggcgcatcgcgcagagccggcaaagggaggctcgggagcgtcagcgactactgcgtgcaccactgcgtctgccccgtggtggttgtgcgcttcccggatgatgctgcgggagctggttgcggccatgctttcggggatgagctgcgcacggtgcctgaaaatgaacctgtgtaccatgaggccccagaggcgcagaaagagaaatgagggaagagcagggcacccggnacgagaaggagaaagcagaggccttcac

SEQ ID NO: 19231 - DNA, 814 bp, Setaria italica
  misc_feature (53)..(53): n is a, c, g, or t
  Peptide Sequence Number=SeqID_85205
cctgtgctgggagctttgcttgttgccactggattttggattttgattccgcngttttgaaggagcgcctctgcctcgaggccgagcgactcggcctctccgctatgatcatggggagccgtggtttcggtgcccaccggaagggcggcaaggggaggcttgggagcgttagtgattactgcgtccatcactgtgtctgcccagttgtggttgttcgctacccggatgatgctgcaggtgctggtggagatgcagctggggcaatagatgagctgcacactgtgccagaggatgaacctgtgtaccacgacgcccctgaggtgcagaaagaaaactgaggcaatggcatggagctgaagcacaaaggaacacatgcagcttgtggtgagaggatccttgtgtatttggaagatgcaactggctgtttatgtttgcttctatgtccactgcgtatcataaactgggtccatcagcaggctgcttcccgtttagagtttcatattggagtcctagatcatcggagtctttgtcggtttgcttgtgagatgttcaatgtagagtacacttccagtgggttggagctgtcttatggtttacggatgcttatgctgggctcccgaatctatcttgtttttgcaaagccagttgacgaccgttgtattctctcgtcgttgtctacacggtcatgacatctattcagcttgctactgtattggatgcttggttaatagaggaccactattctgtatttactgctttgttggaaagaataattgtctagttgagcggtttctgctgctaaaaaaaaaaaaaa

SEQ ID NO: 19232 - DNA, 1187 bp, Setaria italica
  misc_feature (16)..(16): n is a, c, g, or t
  Peptide Sequence Number=SeqID_85206
cgagctgtcttcgtcngggtaaattcggcagaaccctagcggcgccctccctccctccgtccgatcggctcccctcccacccaccccgcatggcgaccaacccctcctccggcgctgacgcgcccccggccccggcgccggtgcggctctcggcggcggcgcaggcggccgcgatccagccttcctccccgcgcttcttcttctcctcgctggcggggaccaacccggcctccccgcaccgccgcatcgccattgctgtcgacctctccgacgagtccgccttcgccgtcaggtgggccgtgcagaactacctccgccccggggacgccgtcgtgctgctccacgtgcgccccacctcggtgctctacggcgccgactggggctccatccctgtctccgtcaccgacgaggccgacgccgccgaggacgccgccgccgccgcccagggcgggcccaccgaggaggagctgcagaagaagcgggaggaggactacgacgccttcacctccaccaaggcgcaggacctcgcgcagccgctcgtcgacgcgcagatccccttcaagatccacgtcgtcaaggaccacgacatgaaggagcgcctctgcctcgaggccgagcgactcggcctctccgccatgatcatggggagccgtggcttcggtgccgcgcggaggaccagcaagggcaggctcgggagcgtcagcgattactgcgtccaccactgtgtctgccctgtcgtggtggtgcgcttccctgatgacggtttggcggaggatggggaggccgggggcctgtcgtcagtggtgggtgcggaggatgtgctgcaccctgtgcctgaggaggacgccgagtaccatgatgctactgaggagcagcacaaggatacttgaccgcgtcgttgggttgtgaagtgaaaagtactcttggatccagcatgtaaaggttgtagcagtggactgttggctgggtgctagactgctagctgggaagtgcatgtgatgtttgttgaactttcagtgcccatgtctatccatgctttcgcattgtttgtatcttcagttgccttcgttcacctagcttgtctgactatttgactgcctggtgaatatttgtggttcaaaacctttgtactttcttcgcattgcactacctgtttctgatgaaagttacagtttaaccacttctat

SEQ ID NO: 19233 - DNA, 683 bp, Setaria italica
  misc_feature (624)..(683): n is a, c, g, or t
  Peptide Sequence Number=SeqID_85207
gatacgcagggggcaaagcagccacagctacagctaacagcctcagccgagatttcgggtaacaacgacaatgctttccatctatgtatctgcaactgctaacttcactggcgtgcatggcaggccgaggcttcgagatcagatgcagtactgtacggatcacccagaggaggtgagcaggctgtccaaagtgaaagctcaggtggatcaagtgaaaggcatcatgatggaaaacattgacaaggtcatcgatcgcggagagcagatcgatgggctcgtcacaaggacggagcagctgcacgaccaggctgctgatttcaggcagcaaggtgcgcgggtgcgtcgcaagatgtggtaccagaacatgaagatgaagctcatcgtcctcggcatcgtcgtcgcgctcatcctcatcataatcctctcagtttgccatggcatttgcaagtgatctgatccattcagcctttattagttcattagttagaatgttttggattcgggggggtgctggtggactgtacaggttggttgagcttccactcgacaatgcatgtgttaaccacatcaactccaatcatcattactagtattttcttgaaattaaaaaaaaaaaaaaaaaannnnnnnnnnnnnnnnnnnnnnnnnnnnnnnnnnnnnnnnnnnnnnnnnnnnnnnnnnnn

SEQ ID NO: 19234 - DNA, 713 bp, Setaria italica
  Peptide Sequence Number=SeqID_85208
tcaaatttaacttgcaacaatgtcagaggcatcagcggtgcgcgtgatcggtctgtggccgagcccgttcgtgatccgcgtcctgatcgcgctgaagctgaagggcgtcgagtacgagttcgtggaggaggtggtgggcaggaagagcgagctgctgctcaggtccaaccccgtgcacaagaagatccccgttctgctccacaacggcaagcccatctccgagtccctcatcatcgtccagtacatcgacgaggtctggtccgccgccgcgccggccatcctcccggccgacccgtacacccgtgccgtccagcggttctgggcacagtacatcgatgacaagttcccatcggcgatccgcacactcaggggaacggatgccggggacaaggaccaagcggcggagcagctgtccgccgcccttgcagctcttgaaggaggcctcctgaagctcggccaggggaagcactacttcggcgaagacagcgtcgggtacctggacatcgctctggtgtcgcacgtcgggtggttgaaggcggtggagaagatgaccggggtcgcgctcctggacgaagcgaaggttccgaacctggtggcgtgggctgatcggctctgcgcccacccggccgtggtggacgcgatccctgacgcagacaagttcgtggagttcagcgtgatgcacgggagcttctccaaaaactacagtccaacta

SEQ ID NO: 19235 - DNA, 284 bp, Setaria italica
  Peptide Sequence Number=SeqID_85209
atagcacgtcagatttgtttttcagctgctgttctgaaaacaaccacgtcctgtaaggagaaaacaaggattgaaatttactgcaaatccttttctttcaatccagcactgctaatttcctcttgaatatctttctgtacaaccttttatagttccactgaatcatgtttttttttggccatttgtcactcttaactaaataacaatttttgctaatgagctatggaacttgtgtccctgcagtccatcggtagcaatggcacaggagagctggaaacaagagt

SEQ ID NO: 19236 - DNA, 617 bp, Setaria italica
  Peptide Sequence Number=SeqID_85210
atggtctacgaacctctgaacgatcccaatcatatctcctcctccttttcctttgctcttcctcaccatcttcatcatctccatctgcttcagcttcatcgcctccatcaacctcatcatcatcaccatcctcttcaatgtcattgccattttctcttcgatcttctgcaccctgttcttcagagctttcctgttcatcttcagattcctggtatggatgcagccttcgtccccgcaaagatcttctaggccgtaaaccttcacggcggggtatggagttagacaacttctggcgctttggccgagctgacacttcatcatgtgcagcatcgtttccccctttattctttgaagtacgatatctaggtctcataagatcatcatcttccatactggaactatctgtatcatagccctcaagatttacaggaatccttcgctttcgcgttgaacggcgcaaatttgctgcgatagaatcggccggtggtggacgggcagctggtttgcgaagcagtttcttagcaatctgtgatgcagctgttcgcttcttagacttgaccttcttccgcattgctggcttgtaatacatatagccacgagcatagtacttcggccgc

SEQ ID NO: 19237 - DNA, 700 bp, Setaria italica
  Peptide Sequence Number=SeqID_85211
cgcggcttggttcatgctcgtggccttctgcatccctgttgctccagggaggagtaggttaatcctgggcgttccccaggaatgctgggtttggcttctcaagatcataccacggtggttctcccacagcatcaccaatcgtgtattggattcagatatctgcctcgtccactttgaggagcgcaattttattgctgcgggacttgacaattggcacaaggcttgccatgtgcccacatcttcagacggcatggtcgttgcgttcaggaattggtttagaaagtactgcaagcatcaggttggctggggaagcccacaagttgaacagttaccaccatcccctaccaaggataagctccttgagaggtattggtcacacgtcgtgcagtgcaccagctgcagtgcggcgctgaaggccatgaaggcgctcgaggtcgccatgcaggtcatgtcagtcgccattgttgggttcctctccgttgccaaggggactttgctcgcatcgactgttcagagaaccgcggtcatgtctgcagctgtgctgtgcttcgttgcatcccgttggcttgctaattacatagagaagaatttctattttcaagtattatgttcatttcttacaagtgaatgagtttcagaagatcttgccagtaaaatttatatgaaatgatagaagatgcaatcaatctaagtatatgaa

SEQ ID NO: 19238 - DNA, 294 bp, Setaria italica
  Peptide Sequence Number=SeqID_85212
ttagctttcccatctttccctcctcctcaaatatatatgggaatgttgcttcttggaggaatgcatctgaagctttaatgatgtcctggacaaggaaaacacgaacccgccatcctttcctcgataaaatgaagtcaaaaagatcttctgtagctgcaactacagaatgcatgtcaaatgatctccacttagaacttccattggcactctcaccagagccagctccagatccatttgaagactctgctgactgtgcagatatagctgcaatcagcctctccagtccgtatttct

SEQ ID NO: 19239 - DNA, 3359 bp, Setaria italica
  misc_feature (3358)..(3359): n is a, c, g, or t
  Peptide Sequence Number=SeqID_85213
aaacctaaagtaaacaaaaaggtaacaaataaatttaagttaagaacaaaactagaccaaacaaggaatagaccccctcctctgttagataggatggagggggaatacggttgcccaacttggccaacctagggatggccaacctagctgtgccgtacgccgctgcgcctcccttccccgtcgacttcgacgcgattcgcgtgcccgccatggcggactcgccggtggagctgccgggacggctcgccatactgccgttccgcaacaaggtgctcctgccgggcgccatcgtgcggatccgctgcaccaaccccagcagtgtgaagctggtggagcaagaactctggcagaaggaggagaagggcctgattggggtacttcctgtgcgggactcagaggctggagctgttggatcattgctgtctgctggtgtgggcagtgattcaggtgagggaggcagtaaggctggtggttctgcaggagagtcatcaaagcaggacacaaagaatgggaaggagcccattcactggcacagcaagggagttgctgctagagctttacacctttccagaggggtagagaagccaagtggaagggtcacatacattgttgttcttgaaggtctatgtaggttcagtgttcaggaactaagtgcaagaggatcataccatgttgcccgtgtttcacgccttgacatgacaaagactgaattggagcaggcggagcaagatccagatcttattgctctttctaggcagtttaaagctactgccatggaactaatttctgttctagaacagaagcagaagacggttggtaggacaaaggtgcttcttgacactgttcctgtttataggctagctgatattttcgttgctagctttgaaataagctttgaggagcagctttccatgctggattcggttgacttgaaagttagactttcaaaggcaactgaacttgtagacagacacctgcagtccatccttgtagctgagaaaataacgcaaaaggttgaggggcagttgtcgaagtcgcaaaaagaatttctacttcgccagcagatgagggctatcaaagaggaacttggtgataacgatgatgatgaagatgatgtggttgcattggaaaggaagatgcagaacgcaggaatgcctcccaatatttggaagcatgctcaaagggaattgaggcgcctacgaaagatgcaacctcagcaacctggatacagtagctctcgagcttacttagaacttcttgctgaccttccttggcaaaaggtcagtgaagaaagggagctcgaccttagagctgcaaaagagagtcttgaccgggatcattatggactaacaaaagttaagcagcggattattgagtatctggctgttcgtaagcttaaacctgatgccagaggtccagttctgtgttttgtgggaccacctggtgttgggaagacatctttggcttcctccatagcaaaggccctgaacagaaagttcataagaatctctcttggtggtgtgaaggatgaagctgatatcaggggtcaccgaaggacctacattggaagcatgccagggagacttattgatggactaaagagagtatctgtcagcaacccagtgatgcttcttgacgaaattgacaagactggttctgatgtacgtggggatccagcatcagctctactagaagttcttgatcctgagcagaacaaaacattcaacgatcactatttgaatgttccgttcgacctgtcaaaggtcatatttgttgcaactgccaacaggatgcaacctattccccctcctctgttagataggatggaggtcattgagctaccaggctacacacctgaagagaagctaaaaatagccatgaaacatctcataccaagggtattagagcagcatggcttgagttcgacatatcttcagattcctgaggctatggtcaaactaatcgtcgagagatacacgagagaagctggtgtacgtaatcttgagcggaacctagctgcattggcccgagcagctgctgtcaaggttgcagagcaagttaacactcttagacttggcaaggaaatacaaccaattactacaactctgctggattcgagacttgctgatggtggtgaagttgaaatggaagttattcctatgggccatgatatatcaaatacttatgaaaatccatctcctatgattgttgatgaagccatgctagaaaaagtgcttgggcctcctagatttgatgacggagaagctgcagatcgtgtagcaagcccaggagtttcagttgggcttgtttggacttcatttggtggggaggttcaatttgtggaggctacagccatggtgggtaagggtgacctgcacttgaccggacagcttggtgatgttattaaggagtcggcgcagctagctttgacatgggtgagagcaagagctgctgaccttaatttgtcacctacttctgatatcaacttattggagagccgtgatattcacatacattttcctgctggtgctgtgccaaaggatggcccttctgcaggagtgacattggtaacatcactagtatcactttttagtaacagaaaagtcagagcagatactgctatgactggagagatgactctaaggggccttgtgttgccagttggtggtgttaaagataaggttcttgcggcacatcgttatggaatcaagagagttattttacctgaaaggaacttgaaggacttggctgaggttccatcacccattctctctggcatggagattctgcttgtgaagcgcattgaggaagtactcggccatgctttcgaaggtggatgcccattgagatcgcgctccaagttatagcaccgagtcagcgtttgatatgggtattttcttttgtgaatcatcatcgtcacagtacagatatccacggacgagcaatgctatgagacagtgagggcttagctctctggccagcgcaagatcctggcacgcccttgtcagttaagcttcagatctgggatgtgtatactgatcaaaattcagagagcagtcgggagatatgctggcacttccattgggtttccctgcatatttatctatagagataccagctatatctttgcatagatggggtacaaagctgggaggtccacttgtcggtttctttctctgttgctgtatatgtaatctattccagggggaagtatagctaatatgaggtcgtggggctactccgtcgaagtaaaaattatgcgggatgcattttcctccagtacatatgccgacgaactacttaaaatgaataaacagtccccggcctttgctatttaaaaaaaaaaaaaaaaaaaaann

SEQ ID NO: 19240 - DNA, 461 bp, Setaria italica
  Peptide Sequence Number=SeqID_85214
ttttgtttttagctagagatgactcgtttattcaacacaccattggatccacatttaccatgctttctactgatccgcccgaatctacagatgctacgatgcagacaccgggtccatggctgccagcctcctcagatcctcttcggtgaccacgaacagcttgtcgttgtcacggatcacgtcgatcgagtcgatctccgctccttcgtcgttcacgatcagcgccttctccgcgtcaactttcagcttctcacggataatggctttgaattcttccatcgtgccgggaaggttgatcagcttgccggcttccgagctgtggtttctgaggaacgggtggcccttgtatatgctcacccgaggccagcgcgcgctgtccgagcttgtgctctgctggaacctgccttgacggcggtgcctcgacgagccgccgccgtccgggaccaccgccggcgagtcga

SEQ ID NO: 19241 - DNA, 1260 bp, Setaria italica
  Peptide Sequence Number=SeqID_85215
tcattgacgaccaactgcatagtccgggacattagatggcatcataaaggaactagccacaagccaccaaacggtacaagacatgcttcgaacatttgcatggatgatgtgaagatggacaacagtttcaggggacagaaactacgaaacaactgcgcccagctagcacatggagtagcaggtgccatttattcaaactgcccagaagattgtagttcagtagcatacatgctcccaacaggaaaagatcaactaatcacgaacattctttacatttgtgagtcacaagtccttctatttccaatcaagcatatccaaaagccataggatttcagtttctgacctcgcagcgtcgcagaaatctagctcgataccaaatacctcgacgacgttgcctcctttgtacaggaaaagcaaggacatccatgcccggatgtctgatatgaatgggtgtctgggtgaaaacctgagatactcgtatgccagtgcgcgagcagcattactgtcgatgtaatcgaaggttgacttgttaatgatgcaagccatcttattggaatccttgcggtggcaagaacagatacagtgatggctggtcccatagggattgataacctgggttcaacttccaacatcatgatgcagtctagggacttcaaatgtgctgcaagtatatctgggatgccgcgaggagtgcactgtaggcctgctcgaagggtgcaacctgaaattgcttgagaaaagatgagggatccctcaagccacatatcgatataaaaaacaagatcctcaaacgtgagccttggtacaggaaggtgctgcattgttggtggctgggagaaggttaaataaagcttcttgtagtttgcatcagaaggaggctgtttgcaaatggacggccactttcgtgagcaaatgcatttccagaagtaatcatcctttgcaatgtcacgccactgacggcatacaagcatgcaaaagactagatctttcccatccaataatgggaaaacagacttgagaacctcatcaggaaattcattttccattcctatccaagaactgaaggaaatggaatatcctctacagcgcctggagacaggattctgtcagatgctcgtcgccgccgcccgacgaagatcaggccaaggatgaagggtggctcctcgccttgtcgtcccagcccgataggagaaaggccgagagcggagcggagaaaggaaagcggcggaggaacgaaggcccaacgcgcactccgttcac

SEQ ID NO: 19242 - DNA, 332 bp, Setaria italica
  Peptide Sequence Number=SeqID_85216
cgattttgtccacaccgtcgtccagaacctctgaatagtgaatccgccggtgctccggaagccgctggaagcgccgcgcacgatgctccgccgcgccctcctctcctccgcctccacacgccacggcggggcacaaatcccgaaccccagccactcgcctccccaggccctccttcaatggcgccatcacgcctccgttgcctcctcctcggccccgccgcaaccgccgcctcctcctcctccatctccgcctcgtggtccgtcgcggccgggcggaggcggtcccagcgtctcgtcgctgaaccccgccgaggtcgccaagttcgccgcca

SEQ ID NO: 19243 - DNA, 249 bp, Setaria italica
  Peptide Sequence Number=SeqID_85217
cacatctccagagtccaagtgcacaggctctcgatcaacgaacactgcaagtggcgttccaggcttccagcctccagccatggcgagatcgttgggcctggggttcgcctgcttcgcgctggtgatcgcggcggccagcgcgacgcagttccgggtcggcggccagaaaggctggagcgtgccggacgccggcttcgagccctacaacacctgggcggggaagctccgcttccagatcggcgaccagct

SEQ ID NO: 19244 - DNA, 735 bp, Setaria italica
  misc_feature (722)..(722): n is a, c, g, or t
  Peptide Sequence Number=SeqID_85218
acagttctataacatgacagatatcacaagcaatatttctggtgtacagcaatactgggagcatctaaaatatccttccggtaagtaaaattttgctctttgaaacctggctgagacgggaaatccaggcccttactcgggatgagagtgttgatgccatagtataccacattcatggtgtcatcggatccttcatgaagaggcttgaaaagaacacaagtcaaggaggatttcaccagagactaggagggaagaattcaggacattgctctctgatgctgctaggccattcctcctcggccgaacagagcgattcgtcaccgaggtagagctcttcctggtttcaaatctcaacatggaagcgtacaacaaattacgcgttcagagattccgggagtccagttcccatctaatgagagagcaagacgcactgcctcatgatcggtctcttgaggagcactacttgtattttatatgtaatgatacggattgtgatgagatgtagtgatctgcaatttgtgtcactaatgtccttgttccctcgtacatctcttagtctggttcaattttggtctagccccaattactagtttacaacttcaggctgatgaaattaatacaaagtatgaactaagctgaacatgagagcataacagttgggaacttcaagttccgaatttgctgtagtaaaaaatctcaatgcagacctctaaaaaaaaaanaaaaaaaaaaaaa

SEQ ID NO: 19245 - DNA, 363 bp, Setaria italica
  Peptide Sequence Number=SeqID_85219
attttcagcattctatagtaagaagccaatggcaatttcttgtaatatgaaatgcatcatatgcataaatattagaattatagattttccaggagctggctttgtgattctaaaaaatgtctgttcttattaagtgttgaatttgagctaccttcagatttccaagttcacaggaaagttcaaatcatcagcaaatggggcaaatggtaaattttggacgaacactatcccagattggtgtcttaagtgtcgatccaaaggtgagcaatatgtgctttgttctcgccagtttgtccacttttgccacatatatgacagattgaaggatctccaggtcaaagtgcttgtgattaccatcattct

SEQ ID NO: 19246 - DNA, 422 bp, Setaria italica
  Peptide Sequence Number=SeqID_85220
cagtaaccgtcgtgagctaggactggtccaaaggtgagcatcatgtcagatgtggctctcgccatggcttaccttcaccatgagcattttgatgtagtcctgcattgtgacctcaagccaagcaacgtgctgcttgatgaagatatgacggcttgtgtagccgacttcggcatcgcaaggctactgctgggagaggatacttccatattttccaggaacatgcatggaacaattggttacatggcaccagagtacgcctcgaccggcaaagcgtcaaggaagagcgacgtgttcagctacggggtaatgcttctcgaagtcatgaccgggaagaaacccaccgacgccatgttcaacggagaagaagtaagcctcagggagtgggtgagccaagctttcccatcgagacttgcccatgatcc

SEQ ID NO: 19247 - DNA, 455 bp, Setaria italica
  Peptide Sequence Number=SeqID_85221
aattgtggcttgtttgcacggaacaggacggtgttctgctggggtgatgaaacagtgagcggtgttgtcgggctggcaccaagggatgtgcgcttccagtccataggagcaggtggttaccatgtctgtggggttttggagaatgcacaggtgttctgctggggcaggagcttggaaatgcagcaggtggcaccggccagtgcgatcggtgatggagatgtgaacatagtgccaatagatgcaatggtctctgtggtcggtggacgatttcatgcctgtggcatcaggagcattgatcaccaagtagcttgctggggtttcgcacttcgtaacagtacgtcaccaccaaaagggctgaagatgtatgcacttgtggctggggactactttacttgtggagcgcctgctgagacatcactgatgccaaggtgctggggaaacagtgggccaatggc

SEQ ID NO: 19248 - DNA, 487 bp, Setaria italica
  Peptide Sequence Number=SeqID_85222
tattgctgaaagtatcaagcctagagtgccaccacgctcttcaagaaggaaaatcctcacaagtgaatggaatgctaatgcatatgtcaatgcactctgtaagcttgcttctagaggccatattgcttaaagcaaaatctttggacgcccttggtagagtaacagatgctgcagaagaatgcagaattatcatagacatcatagagtctgcatggccatatggtgttccagatggtattgctgaagagtgtaagctaatagacatattccattcagctctagaatatcttcctaaactgtggatgaggagtggttgttttgacaaagccatcattgcatatcggagagctcttgcaaagccatggaatctagattctcaaaggtccgccaacttacaaaaagatttggcagtgactctgctgtattgtggtgttgatgtgaagttccctcaagaatttgctcaggaaaggaatctggtaagccctgg

SEQ ID NO: 19249 - DNA, 397 bp, Setaria italica
  Peptide Sequence Number=SeqID_85223
gcggcaagcctggagcgcttggacctggcggcggcctcggagtccgcggcagcgtcgaagctgccctccatcttggcgtagtagtccatcatggcctgggagcgggtgtcggcgttggactcgagcagcgcgagctcccgcctggacgcgtccgcggcgcccgcgcggtccgcgtgctcctctgcatccagcgccgccagcgaggtgagtatccgggcgatggaccgcttcttgccgttgccgtccttcttggcggcggcgccgccctcctcgtcctcgcccgccccgcgctgcggcttccgccgccggccgttggtcatcgcgccggcggcgttggcgttgccgctggggtcgtcgagcccgagcggcgacggcgccgcggcttcctggaggaagg

SEQ ID NO: 19250 - DNA, 518 bp, Setaria italica
  Peptide Sequence Number=SeqID_85224
gtcctcgctgccgtccggctggacgtgtacggatctcaccagccatttgacgtcgccgccggaggcttcacgtggcgccggcgccgccatggcgacgcgcacgacgcgggtgttgagcctgacggcgtcggcgagcccgaacgcggcgcagaagtccttgaggtagcagtacacctcgcggcgtcccgggaagcggcgcgcgtcgcggccggcggcgccgggcctgggcacgaactggaagtcggagaagcccatggtctcgcgcgtgctgagcagccgcacggacgcgtacatgctgctgtgcacattcaccggcaccgcggctccgagcgggtcgtcggcgtcggtccgagggtcgtagagccactgcccgccgatgtcgccgcactgctccaggaccgtgacggcgaggccctcgcgccgcagctcgcgcgccgccgccagcccggacatgcccgcgccgacgacgcataccttcttgggctcagcaggcggcctcatgctagccatgtccacgt

SEQ ID NO: 19251 - DNA, 1019 bp, Setaria italica
  Peptide Sequence Number=SeqID_85225
tttttttttttgttcatgccaacactagataattacgggacatgctagcgttgatacttggtagttggtacaactcgaaaggttcagcggcacaaccacaaccgatgaacacacaaaggctgctccccttattcgtaaaattgtcacagaacagggtagaatcatcaacactagcaacgcactaccttagaaacacacattcgcggaaaaataaactgaaaaagagaaggctcagattgacgcatttacaacgaacgacgcgatcctgatccccgagtaggcgtcattccataaggcaaactcagttttcccggaacttcgacaacaaaaagtgttggaacttggaaaatccatccatcgcatcctggggaagagggagcgtgaagggaggaagaacggtctgtccacccttcagatccttcgcgccggtgagcggtgggagcgccagagcaggctgctgcttgtttagcttctctatgatgtatgagaaagttccgaaggtcaggcagctctggatcagagtttgtggtgcacctggaaagctcagagcaaggccagtgcaacagcctgcaactcctgcattgataccatcatcttttccacgtagttttctcaaagagcaggctaccaaactttgaacaccagcaagaacagcaaatatcttagcagacgatgcagcatcaggaaatgatcctttaaaacccttcatcataaccaaacctttaccgtatccgacgacggcgccgacgagggaccccgcggcggactcccaggcgaagcggaggaggcagaccccgggggccgcggtggccgcggcgagcgggctcgggttccgcgacaccgcgaggcgcgtcaggatcgggttgttggtggcgccgggccggcgcgcccccattcgccgcggatgggactcgtcggcggagtcggagtcgctggtgccgccgtcggagaaggggtcgtcgtcctccggcctcgggtcgccgccgccgctcgccatggccgccgcagtgccgtgctgg

SEQ ID NO: 19252 - DNA, 989 bp, Setaria italica
  Peptide Sequence Number=SeqID_85226
tgtacgtgtggcacttctgcaccgtgaagcgttacgagttcgagatgcacagcaaggtgtccatggcctggatccttggcctcggcccgagcctcggcctggtcagggtcccggggataggcttcgtgtacacggagctggccagcggcgtcccccacatcttctcccacttcatcaccaacctgcctgcgatccactcggtggttgtcttcgtctgcgtcaagtacctgccggtgtacacggtgccgacggaggagaggttcctggtgaggaggatcgggcccaagagctaccacatgttccggtgcgtggcgaggtacgggtacaaggacctgcacaagagggacgaggacttcgagaagatgctcttcgactgcgtcctcttattcgtccggctggagagcatgatggagggctactccgactcggacgagttcagcgtgccggagcgggggggtgccggcgcgctgatgagcggcggcgcgagcgcgttcctgggcgagaagacctgcagcaccatgtgctccaacggcgagctgagcttctcgtcgcaggactcgatcgtgcccgcgcagtcgccgcggccgccgctcagcagggggatgacggacagcggcctgctgacgacgaggttgtcggcggggcaggcgagcacggtgggcgacgagcttgagttcctgaaccggtgtaaggacgccggcgtggtgcacattctggggaacaccatcgtgcgcgcgcggcgggactccgggatcgtgaagaagctcgccgtcgactacatgtacgccttcatgaggaggatgtgcagggagaacagcgtgctcttcaacgtgccccatgagagcctgctcaatgtcggtcagatttactacatctgagagattaacttcttcttcccttccgtgttcgaatcttgttcttggttcctggatatgtacattctcttgtacagaataagacaatggattagaaaacaatttaccccaaaa

SEQ ID NO: 19253 - DNA, 1029 bp, Setaria italica
  misc_feature (1020)..(1020): n is a, c, g, or t
  Peptide Sequence Number=SeqID_85227
actggcacaaggacagagcatctgctgaaatctaatcttatactgctatgagctcagcagcatctgcactcggcagctccgtattttgccgtgcggctgctagctactggatcagcacgccaagcgaacgtacgtgccgagtgtcaacgaggaaaaaaaaaacctttctctcctaccaccgccaggggggacattctcagagctggaagtgatctatgatgtgctgtatcacgtccgctccatcgttcatgaacgcgtacttcacctggataatgctgtgcgctgcgaagctcgttatgctcgactggaagctgacatccaccttctcccacgaaactcttcggagacccgtcaccatcttttcttcaagaatgtccaaattacagtctgtcatggaatcttggcacttctcatcatcaatttcttctgagtactcctcatgtacaatgtgggggtacttctcagatgacgatactgccaactcaggaagctcagtgtttcttctaatagatgatgttctccagccaacaatatgatcacagtcagcatttgcgtacaccacacgtctcttaaatgctcgcaaagcagatataaagtagagatcgccatgatcttcaaccatacgctgcagcagtggtggttgcccttcttcatcgtcagttagaaagagatgtttgccagttctcctaaatatccaatggacgacccggcaagcaaccttttccatcgcaagggatccaaacaggagggggacctgtttatttcctcgtgaaccaaggtgaggcgttgctacagtaataaagttaattgcttccaatccacagatggttcctttagtatttccatcagacacaccatctggatgtcgataaagttttgcaattgcatatcttgcagctaatcctccaacagagtgtgcaagaaaagaaattttggtgagttctggccttcgactaacaacatcaagcacctcatctgctaagcgttcccccatgacgtcaactccatctagagttaacnttgatgtaa

SEQ ID NO: 19254 - DNA, 1017 bp, Setaria italica
  Peptide Sequence Number=SeqID_85228
gagcttgttgcattcccaacttttgcagagatctcttcaaggccaggcaagtgctcgatgctgataggtgtagtgccatgttgatccactctgtgggcactgaagcctagcttgagcctcttgagattaggcattgtgtccatctcaaatttcagacatggtactgcactgcagatgagcttgaagtacttgagagctgagaatcctgccttgtcgaagacgatcctcttaacgggcgccatctgcaaatacagcgacagagcagtgagagcagacaattctccgagaatattaacaccgtccctcagaagttcccttactgaaatctttaaaatgcggaggttgccaagctttcccatccacttgggaactctggaaaaggtgaaaatgtgcggcaaccattcaaatctctcgagaaggggaggtgcgaattcatcccaggaaaatgttacttctgaaggactgtgaacaacatttttatgagcggagccaagaatgagagctagagttttgaggtttccatgtcctccaagtaaagagcccagaacttccatgtttctctgcagatggtcaggaaccggtatagagcatgtgaggtgaagatactgcaggttcgtcagcttgccatggctccacacactggcaggtatggcactaatccaatccatcagatttgtctcgaaaggcagatggaggtgcagcaggcatggtaaatggataatatcccatggaacatgtgtgattttcgtaccgatatcaagggtttccaaataatgtaaccttcgcatatgctttggtagttctatgcagacatcacttgcaacctttagatatctcaactgtagcaattcagaaatcccagtaagatctattgtgtcatcaccaccttcatgaccagataatccaaggtttagaacacggattagcttaaactccctaatagaaggcatgcacttcgataatccaaagtaagcaagggagcgaacttgtgacgatcttatgtttgtccttgcatac

SEQ ID NO: 19255 - DNA, 632 bp, Setaria italica
  Peptide Sequence Number=SeqID_85229
aagacccaaaagaaacaagtagaagagatatgtaagaaagatgccgtcgaaacagttaatgcgagatcatccaatgttcggctgtcagtcgggacttactccactgttgaaagtggcattcaggaaataggactcagtccaccgagcgtcgggcagtggagctcccctgactcgatgaacattcaattcaacaggggcttcaagggctgtatagagtacccgcggacgtcccagaagcacagcttgaaggcaaagctcatggaggcacggatggagagccagaaggtccagctccggcaggtgctcaagcagaagatttagagtggccagaaccagaaggtgaaacattgtaaacctagaatttaatccaaggaataatgtcaagagtacttagatgtttcttttccatgttttagagtaacctgtaatgcatgtacaacaaggactagaaaaaggggacaatgctggcctttgtgggccggctctggagccttgctgcttctgtatcttactttagttttgaggtaatggttccattttataggctatggtgagatccgtcatgatgtataatacagacatatacaagcagcaatgttcggaaaaaattgcttaaacccggaaaaaaaaaa

SEQ ID NO: 19256 - DNA, 1883 bp, Setaria italica
  Peptide Sequence Number=SeqID_85230
aaggcgagggaggtgtcagtgcggaggctcgcggccggggtgtggcggctgcgcccgcccgaggcggtggccggggccaccgcggccggaggcgccgagaggagggtccgcgtgggtgtcgagcatatcccaaggcatctacaagtccagcttctcaagcagaacactttgggccatcaccagagtatgaagaatgaggcttcaagccccatttctgtcttggagaggaagagtggagagcttcacaaggtacaacttcatgctacttccactacaatggaaaaggcaacaaaatgggagcctgaggacagaaaaggaatggaatcgcatgatgcctatctgatagccagccagctaaatcttcttgacgagcagcaagacacaacttatgttgctaacctccagatggagctccagcaagtacgtgatagggtgactgagctggaaactgagcggcggtcagctaagaagaagcttgaccacctgttcaagaaacttgcagaggagaaagcggcttggaggaatagagagcatgagaaagtacgtgccattcttgaagatatgaaggcggaccttgatcacgagaagaaaaacaggaggcggctagagatgattaacttgaagctcgtcaatgagttgaaggaggccaagatgtcagcgaagcagctgttacaagagtacgagacagagaggaaggcgcgcgagctcactgaggaggtgtgcaatgagctggcaagagaggtggaggaagacaaagctgagattgaggccttgaaacaggactccctgaagctgcgagaggaggtggatgaggagcggaagatgctgcagatggctgaggtgtggcgtgaagaacgggtgcagatgaagcttgttgatgcaaaacttactctcgatgccaaatacacacagctgagcaaactgcaacaggatgttgaggcttttatttctgcatgcagctgtgctaatggagacatcacggtagtagaagaagcagagaacataatacaggcaatcaagtcagtcagagcccaagatgctgaattcagatatgagcccccggctgcctcagaagacatattttccatttttgaggagctgcgtccgagtgaggagcctgtcatcaaggagattgagccatgctacaagaataactctgccaaatgtgaatcagaaattcaagaggctagcccaatgacagatatattcctcgaaaagaaagccaaggtgtactcaaataaaagccctcaagatgaaagcgacactgaagatggcagcagctgggagacaataagtcatgaagatatgcagggttcaagtggttcacctgacggaagcgaaccatcagtcaacaacaagatctgtgatggaagcatatcttggaaaagtggaaatgatttcgagtacagagggaatgagaagttaaaggatgatttgaccgatgcatacctgacaaacgtgaaccaacccaagaagaaagaatcagccatatcgaagctctggaagtcatcacgcccaaagaacagtgagatatgtaagaaagatgccgtcgaaacagttaatgcgagatcatccaatgttcggctgtcagtcgggacttactccactgttgaaagtggcattcaggaaataggactcagtccaccgagcgtcgggcagtggagctcccctgactcgatgaacattcaattcaacaggggcttcaagggctgtatagagtacccgcggacgtcccagaagcacagcttgaaggcaaagctcatggaggcacggatggagagccagaaggtccagctccggcaggtgctcaagcaaaatagaaaggaaagatctaagtactcttaaccaagaaaggtagaaaacaattagtaaaacctaagaaa

SEQ ID NO: 19257 - DNA, 310 bp, Setaria italica
  Peptide Sequence Number=SeqID_85231
gtccgggccagcagcttcttccaccagaccaccttcagcctgcccctggcccgcgccgccgcgttcgtcgccgacgtgcgccgcctgcgggacctcaaccccagggcgctctgcggcgtcgagctctacgacggcatcctcatgcgctacgtcaaggcgtccacggcgcacctcggcaagcccccgtccgccggctccggcggcggcgacatggtggacttcgacatgacctactaccgcagccgcgacccccggcgggcgcggctgttcgaggacgtgatggaggagatcgagcagagtgggcatcttc

SEQ ID NO: 19258 - DNA, 925 bp, Setaria italica
  misc_feature (894)..(925): n is a, c, g, or t
  Peptide Sequence Number=SeqID_85232
gctgcaatccacattccacagtgaaaacgcatgtagcctaaagcaatatcgtatcgctcctataaaacacaaccccaagccgatcgatccatgcagtgccgagagccaactgccaaggcacaggtagcgcagggaaaccaatcgcttagccaccagcgtgccagcagccatgcggaggagttcctgcggctacggcggctacggccagccgcaacccgacatgaacatgaactaccaccgcagtcactccgagcacgtcaccaaattcgccgggaacccgcgccacaccggcggcggcggcgccgtgcagcaccacacggccgtgcacaaggagtcgttcgaggaggtggacggggactgctacgacccccgccgcggccacagcaaccacgccctgcagcagcagcagcaggcgcaccgccaccacaacggcggcggctcccaccgctacgagacttaccaggagacctacgaggagtcgtgcgaggaggagacctacagcgccggccgccgccacgggaacggacacgccggcggcgggcgccgctacgagtacgagagctacgaagagaccagctacgaggacgaagaggaggtcgtgggcggcggcggctacgcccagctcaagcgcggccaacgctgcgcatgagctagcagccattgcgccggctctcgtgcacctggatgcgagactccgtattggtagacaccacgttgatgcatggggtacacagcactgcagcttaaataataatctggtgatgccgggctaatcgtacgtaaataaattgtacccccacagttgatcggtgctctgcatccaccgtataaaaatttgtgcttgcttgtctccttcaaattaaaaaaaaaataacaaaaaaaaaaaaaaaaaannnnnnnnnnnnnnnnnnnnnnnnnnnnnnnn

SEQ ID NO: 19259 - DNA, 453 bp, Setaria italica
  Peptide Sequence Number=SeqID_85233
aaactcatcagctaacttctgaaggctcctcaggaacttagccatatgcatctgccttgctgatagctctcctcttcctgagaaatcagttctgtacaaagctgtggcactgtctacgaccatgagagcaaacctggtctctatcatcatggaagctgcctccagcagaagcctggattgatgatccgtattataagctctggcataagccacattctccaacacatcagcaccattcagtccaaacctgtcagcgatctgcaggagcctttgtggtctgaatgtaccctctgcatcaatgtatagagcctttccttcaccaccaccttggtccaatggaagctgacaagtaacacaaagagtgtgacacaactgagtctttccagagcggaactcaccatatatctctgtgatagatcctgtttctattccccccctcaagatcttgtctaa

SEQ ID NO: 19260 - DNA, 464 bp, Setaria italica
  Peptide Sequence Number=SeqID_85234
ttgaaaacgaaatgatgagaatgcaaggttatactcgaccggacacaggtacacagattcacaagaagtcatgtttagcaaaaacataggagtagcatgactttctcacaggacggctggttttcccaaaccagttcacaactcctgcctagtcatcggcattcagaaaagaggtagtaccaaagctatcaccatcatctatcaacctacttattaacagccaagaaatgccttcttgcagaaagactgattagttaccctacgttgagacagactactggcagcagcgtagtaagatccacataccagcagcaacgacttcctttttcgtctctcttttaaaactgggtagaatcaacgaataacaaacgaacagaatgcatatgtcgatcggtctacttctgtacaggcgattttgatatgctttggggacgatccagcagccagccgaatctacaccggga

SEQ ID NO: 19261 - DNA, 396 bp, Setaria italica
  Peptide Sequence Number=SeqID_85235
gcccactagtctgacaaggtcctgatcctgtaacactctcttcaagacaatttgcagattcttcagcagattgaagtaaagaaaggaacaatacggggaacgggacctagtttactaggaaaagagtccacatggtagtccttgggcaacgggaacagatccttcttcgctgacccagtacagaagatttcaatcatatcttgaccacagctaaagctgtgttcctcaccttcatcacccaggttggtcttaagctgctcaacaggcattttcaacgttccagcaactgagggcagcataattgcactttctattcctttaactggggcatcttcatacataccgttttcaaggattttgtcttcattaggttcatagttttcttctttatgatct

SEQ ID NO: 19262 - DNA, 1085 bp, Setaria italica
  Peptide Sequence Number=SeqID_85236
ctcctgagtcgacaaaggtgccgccgccgccatcgagcccgatggcgaagctcgacgccgtcacgttgagtcgcttcgtcccaacagagatgccgatcaagggcacgtaatagtagtagtttctgccactcgggtccctcactaagtaagttgtctggataggccctgtggtcctgtacttggacaggtcggccattgccccgaagaacatgtggcttgtatcgcggtcgaggaaaggagtgaggcagtaggagaacctcggtatctgtagctgcgacaccaaggataacttgtccgggctgatccctaggatgccggaggcgccgtcgatgctgccggaggtgagccttccgcacccgaagtcgagggagaccgagaccttgtggtgctcgccgaacgtgaaggtctcggacgcgagctcgcctctggtcgtggcgctcccatagtcgtaggtgtagaggcacttgttgctggagcagttcttggtgttgaagctgcccgtctcgcacagcctgccgtcgcaggggacggcggcgaaggaggacgacccggcagggtcgtagagcggctcgcggtgcttcccacccaagagcttgcagtgcgtccagatgaggtcgctgccggtgtcgaggaggagcgtgcgcggctgcggtggggtgccgacgccgacggtcagcgtgtgctccgacctgccgaacggcctgaccagcacgtcggcgtcggagatggcgccatgatccgccgctatagccacgctagcggcgtcgttccacgcgcgccgccgggccttgctcgccatggcggcgtcgcggagcatctcgtggtttgagagcgggctgccggcatagggatggttgagctcggcgcggaggtcaaacgaggcatccgacgtagctgccaaagaggccaggaggagagcgaagagcaagacgaaagtagacggcgccatgtatgtcttggatcgccgcagctagtttaatcaacaacggactacaggtatgggagttgtaacttgcgagtacgatccatttgttaatctgtgtattgatgcgcttccacgcctatgcgcacgaaggcgatgtgtg

SEQ ID NO: 19263 - DNA, 1648 bp, Setaria italica
  Peptide Sequence Number=SeqID_85237
aattagagaagagtcatttgatatttgatttgatctccgccctatgtcgttcatagtgcgaacaagtagcactgtgcacattacagtgagggcatggccctaccctacccgacccgacctgtcggattatttatttcctgactgtaacttactactccattccatttccaatgtagagcagtagaggatcatgccacaactcagatctggtcgcactgcgtgggcgcgaaggagaacttctggttctgcacgtcgaagagcacgtgcatgttctgctgctggaggttgccgaggaccggttgcgtatccacgccgatcacaaggcacatctccccggggctcggctcggcgaggtagctttctcgatgcagcaccatggtggcgccgccctcgaagtggtacagcaatggcggcgtctgcaccgcctccatgggcacgccgtgtggcagctggaagcagaagtcgaagtccggatcagaggcgttcctccgcggcagcttcagggcatccacgagagcccccttgagggcatctcgtgctgcagccgtgagggcgcctgtcgtgtagcccgagtcgatgaacgttctgtcgaagctcgacgccgggacgttgagcttcttggtcccaaccgagaccccgatcaagggcaaaaagtaatacaggttgctgccgatccggttgttcagaaaagaaatggtttggattggggccgtggtcctgtacttggacaggtcggccattgccccgaagaacatgtggccactcttacggtccgtgtaaggagtgaggcagtaggagaaccttggtatctttagctgcgacacgaaggacaacttgtccgggctgagccctaggaagccggaggcggtgaagatgtcaccctccaggaacgttccgcacccgaagtcgagggtgacggggaccttgcgacgcacgccgaacgtgaaggtctcggaggcgagctcgccgacggccctgccgctgccgtacccgtaggtgtagaggcacttgttcctggagcagttcttggactcgaactcgccctcccggcacagcttgccgtcacaagggacggcggcgaaggaggaagacctgtcggggtcgtagagagggtcggtcggcgtcgcgccgccaccgaacagcttgcactggacccagacgaggtcgcttccggtgtcgatgacgagcgtgtgccgctgcggcggggtgccgacgtcggcggtcagggtgtagattgacttgccgagaggcctgaccggcatgtccggcgaggagatggtgccgccaccgcccccgccgccgcgcccgcacgccttggccaccctagcggcgttccaggcacgccgggccttgctcgcgctcacggcctcgcggatcatctcgtacttggaaaccggccggccggcgtaggggtggttgagcacggcgcggaggtcaaacgaagcattccctgtagtgcccgaggaggcaaggatggccacaaggagcaagatgaaaccggagggtgccatgcctggatgggattgctactgctgctactgctagtaggggatttgcacgcgcgatgtttttttttaaacctgtgctcacacgtgtggcgattattcttgtgcttccatgcttatgcgtgattttttttctttttgtg

SEQ ID NO: 19264 - DNA, 264 bp, Setaria italica
  Peptide Sequence Number=SeqID_85238
cgaaagatgcctaaattcgatagatcacaggatatccccgcacggctttcacagattcaacaacgaaagacaaggaacaaaaaggcaactacactgagccgggtgctaaaatggatctactgagaaatcatcgggaggagatggggaacgacgagacagcaggagaagcgatcggggggaaaggatactgaagaggtagcgctcccaccaatcgagcatgtagaggccgatggtgacattgtagaggtggatcttgcgcccgat

SEQ ID NO: 19265 - DNA, 1095 bp, Setaria italica
  Peptide Sequence Number=SeqID_85239
attacacaggcaaatgatcataagcagatttcgtccaatcatggctatgtactgcctcccacaagatagtttccatcttggaaaagtgtcttcagattactttggaagaacccaaggagataccggagaatgtaccaaaagaggcaaaccatcaaaatatctaatcattgtcaagggataacatgttattttaggagcatttatggggtagtaaaggacagcatcattgaaaaactttagagttcctgatattcttcagcacactcagcactcaattccatgaagacacaagagaaagtcaaaaggctgtgtacatgtatcaactaaagcctttttatcagcataaatataaaaaaggcagggaaaacaaataatttactgaataaaaggttgcctctaaaatttcttggacagtttccgggttgatgaagtggaggcactgtaaatatcgatatcttgttttccaggattctctatgtattgtggagctaatttgccaatgtggacatgaacattagcatttactatagaacttggtattattagaaatttaaagcaaccaggaagaaaatggtgcatagcactcttaattgcaggataacaattgctgcatactgttaaaacagtgactcgaggagcatgccatgatcagggcagggttagccagactcaggtacacaaggaatactttgtcttagacaagactcaggtgcacaatgactttctcagcatattttagaaaaaaaaatggcaatgatacaatccaaattcagacttcctaaaatagtgctttgagtcattttaagcctggattagtgtaggagctctgctatgattggcagacaaacgcaacatctgcaagaaaactttctgaacttccgagctaatatacaaattgttacacaactcatattctccgaatagttggggctacaaaactacaaatttccctattactagtgtataattcctcaaaggaagctctggtatcccagatggcaactacaatcgaaagatgtgaaattgccgctgccaaaggaagaaatactgctaacgcaatgcatgccgaaagatgcctaaattcgatagatcaca

SEQ ID NO: 19266 - DNA, 645 bp, Setaria italica
  Peptide Sequence Number=SeqID_85240
tttttttttttttttttctttacagaggagtcgtggtgtgtccacgaagcacagcggggatgacaatcatgtacaacacagaaatgtcaatcttgcactaattctattgttactaactactagtaaattgttctaattctttgtctactaactaattcgcaatcgatttgtactgtcctccactagacagaaataccagaagacttttagcttccggggagatacagaaatggctacacggtgataattgtctaattccttctctgttacgcagttaacaactaattaaaccgatgaaattacacaggcaaatgatcataagcagatttcgtccaatcatggctatgtactgcctcccacaagatagtttccatcttggaaaagtgtcttcagattactttggaagaacccaaggagataccggagaatgtaccaaaagaggcaaaccatcaaaatattgaagaggtagcgctcccaccaatcgagcatgtagaggccgatggtgacattgtagaggtggatcttgcgcccgatccagctcatcctcccttccccctccccgcgacgccccggcgccgcagctcgcctcgcccagatccggaaggagcggcggcctgtcaagaagaattagtacttacgtaagta

SEQ ID NO: 19267 - DNA, 875 bp, Setaria italica
  Peptide Sequence Number=SeqID_85241
tgacttagctcaacccacaccatcctggaccataagacatgttggtggtgccatgagaggtgctggtgcagagcaaatctcagttctggtccgtacaattgtagagagcaaagctagcaagaatgtcttgcagtacttttacactttagggtacaagttagaccatgaactcttgaagattggttttgctttccgtttccaccgaggtgcccagatcaccgtcactgttacatctgctaacaagatgccaagactccatgcaaccgatgaagctgtgccggtcactcctggcatacagctagtggaaatcacagctcctgctgctgctgacaattacaatgacgttgtttcagccgtcactgcgttctgtgaatatcttgcaccgctgctgcacctgtcgaaaccaggacactcaactggaattgtcgcaactgctggcgccgctgctgcctcgctcatgtcaagtggtggtggcaaaaccttgtaaagtggtcttcttggtctcttggagctgagtggaatgtgtggctgttgatgtgttcttctttgtgctgagtaggcagtttttccgtattgctggcggtccatggctgacgctgcctgtacccacccagttagttgacctcctacatctgattccatgacggtgtcgtgccttgtggctgcacggtccgtgagacccacctgtggtgtatacacctgttttttagtataatcagatcacaacgccagcttgggtgatctgatccgggtagttgttctgaagtaatgcactcgcatgtttcgctatgctttaggaagctgcaaattgttggtgtttgggacatcatggggcaatctttgtaatcttttgtgatgtcgatgagacgatgact

SEQ ID NO: 19268 - DNA, 364 bp, Setaria italica
  misc_feature (341)..(341): n is a, c, g, or t
  Peptide Sequence Number=SeqID_85242
ttgtcgcagcagcaattctgaaggcccggtcattgaagaaagctagtgaagcacgtgtatggaagctcactgcattccagcgcctggacttcaccagtgatgatgtgctggattgcttgaaagaggagaacattataggaaaaggtggtgccgggattgtgtataagggggcaatgccaaatggtgaacttgtggctgtgaagaggctcccagctatgggccgtggctcatcacatgatcatgggttctcggcagagatacaaacacttggtagaattcggcaccgtcatattgtgcgcctgctaggcttctgctcaaacatgagactaacctctggttangagtatatgcccaatggtagccg

SEQ ID NO: 19269 - DNA, 329 bp, Setaria italica
  Peptide Sequence Number=SeqID_85243
tgccgccgtacgtcatcatgggggaggcccgtggcggcgccggcgcagcagcagagggggaaggggggacagccccatggagcacatcctcgacttcttcaacacctggagccgcaaggctgaggagctcgcatccaacatctggttcaaccgtaaggcccctgctcctcgatcctctgcagctactctgcgtgactgctttagatcactgttttcactcgaccagtcatgagaagcagaggatcctctgcttttcctcgttacccgagcagagttggtgctctgttctcggggacagagggctctctgctcttattgattctttttac

SEQ ID NO: 19270 - DNA, 992 bp, Setaria italica
  misc_feature (939)..(992): n is a, c, g, or t
  Peptide Sequence Number=SeqID_85244
gcagccgcagccgcctgaggcggtgcggtggggcacgcgtcagatgggcccgcctgcggcccccggtgcgcacccggagaaccaggaggcggcgcggtggacggcggcgcgcggggaccaggagctgccgccgtacgtcatcatgggggagcccgtggcggcgccggcgcagcagcagagggggaagggggacagccccatggagcacatcctcgacttcttcaacacctggagccgcaaggctgaggagctcgcatccaacatctggttcaacctgaagaccgcgccgtcgatgtccgacgcggcgatggggaagctgagcctgggcgcgaaggccctgtcggagggcggcttcgacaagctgtacaagcagaccttctcctcgggtcccgaggagcacctcaagaagaccttcgcgtgctacctgtcgacggcgacgggccccgtcgccggcacgctctacctgaccaacatgaacgtggccttctgcagcgaccgcccgctctccttcgccgcgccgtccggccagaccgcctggagctactacaaggtcatgatcccgctggccaaggtcgcggcggtggagccggtgaccatgaagcagaacccgccggagaagtacgtgcacgtcgtcaccgtggactcccacgacttctggttcatgggattcgtcagctacgacaaggccgtgcatcacctcaccgaggccgtgtcccaccgctcccagcacggcgtcgccggcgccacagccgctgccggcaccaagtgacgagggtccgttcgtcggagacgcatatgtactcggtacttcagtagtgtggcttgcttgttgatcaggacggtggccgacttttgtgttgtggatgtttttgcttgtgaattgttttgtatccacttgtgaatagtacacgttttccctaattcaccgaattgaaattnnnnnnnnnnnnnnnnnnnnnnnnnnnnnnnnnnnnnnnnnnnnnnnnnnnnnn

SEQ ID NO: 19271 - DNA, 272 bp, Setaria italica
  Peptide Sequence Number=SeqID_85245
aaagagtcctaaagtacatgaacaagaaaggttaccggcccagtgtgatatctcagactggtctaatggaggcctatggaagaggcaagcagtaccgtaaggctgaagcagtattccgtaggatgcagacatcaggccctgaaccatcacctgtgacatatcaaatcattttgaaatctttagttgaggaaatctggtgattatgcccaggctcgtaagctatttgcacagatgtccgagagaggaattccactatctacagtcacttttaa

SEQ ID NO: 19272 - DNA, 1316 bp, Setaria italica
  Peptide Sequence Number=SeqID_85246
ggggggagagacggggtttaagcgaggaggaaggagaggttctccgcagctcgctcccactcctcgctggagccgataaggctgccgcgccctccctctcctgtcctgttccaatggaagcggcggcgattgggtcgcagtccccgctctccttcccctccagcctctgcaaagcaaaagtatcctctggtttaccaatctgcaatgtgaaggtcaagaatcgcaggcttgaggtagtttgccatgggatgttggcaaccagaaagtttatgcaaaggaaaaggaaagaggaagttttcaaggatgctgctgatgaggccgagcagaagaattggaggagaatgatgagggagatagaggagaaaggttcagctgtgtccattctgaagactcagcgaagcgggaaagaaccacttccaagagatgttattcttgggactctggtgcggttcaaacaattgaaaaaatggaatattgtcagtgagattctcgaatggctcagaacacagcattggtgggacttcactgagatggacttcttgatgcttgtgacagcttatggaaagctgggagattttagcagggcagaaagagtcctaaagtacatgaacaagaaaggttaccggcccagtgtgatatctcagactggtctaatggaggcctatggaagaggcaagcagtaccgtaaggctgaagcagtattccgtaggatgcagacatcaggccctgaaccatcacctgtgacatatcaaatcattttgaaatctttagttgagggtgacaaatataaggaagctgaaactatatttgaggaccttcttaatgaaaaaagagcttcttttaagccagaccagaagatgtttcatatgatgatctacatgtacaggaaatctggtgattatgcccaggctcgtaagctatttgcacagatgtccgagagaggaattccactatctacagtcacttttaatagtttgatgtcatttgaaacagattacaaggaagtttcaagtatttatgatcagatgcaaagagctgggctgaaaccagatgttgtgagctattccctgctcatcaaagcttatgggaaagccaggagggaagaagaagcattggcggtttttgaagagatgcttgatgctggagtcaggccgacacgcaaatcatataacattttgcttgatgcatttgcaatatctggattggtagatgaggctaatacagttttcaaggccatgagaagacacagggttgagcctgatctttgctcttatacaactatggtcttagcttatgtaaattagttaaaattagta

SEQ ID NO: 19273 - DNA, 1072 bp, Setaria italica
  misc_feature (1037)..(1072): n is a, c, g, or t
  Peptide Sequence Number=SeqID_85247
ttctttagttattttggattacaaggaagtttcaagtatttatgatcagatgcaaagagctgggctgaaaccagatgttgtgagctattccctgctcatcaaagcttatgggaaagccaggagggaagaagaagcattggcggtttttgaagagatgcttgatgctggagtcaggccgacacgcaaatcatataacattttgcttgatgcatttgcaatatctggattggtagatgaggctaatacagttttcaaggccatgagaagacacagggttgagcctgatctttgctcttatacaactatggtcttagcttatgtaaatgcttctgacatgaatggagctgagaaattctttcgtagaattaaagatgatggtttgaagcccaatgttgtggtttatggaactctgatgaaaggctattcaaagttaaataatgttgagaaagttatgcgggtgtatgagagaatgaggatccagggtgttgaacccaaccagaccatctatactactatcatggatgtacatggcaggaactcagattttggaaatgcggtcatttggttcaaagaaatggaagctcgtggatacccaccagaccagaaagcaaaaaatatcctactttcccttgccaaaacaccagaagaacaacaagaagctaatgaatcggtaggtaatggtgcaattcagctggaagtgaaacctgataacgaagaggtggatggtgctggtgagcatgaaattacacagaatgattctggaaatcagcatttgttagatgacacacgtgcaagaaaccatgtaaatggtaggatcagggctggtaattatgcttttgatgaggaggatgacgatgacgacgatgatgattatgaggaagaggatgatgaagagtttaattttgtttctttgaaagataagagagaactaaattttgcaagttgatgtcataaatcttggtgtatattttttccacagaactcatgatcacatgatggcatttcatatacaaagggactaacttgaaataaagttnnnnnnnnnnnnnnnnnnnnnnnnnnnnnnnnnnnn

SEQ ID NO: 19274 - DNA, 578 bp, Setaria italica
  Peptide Sequence Number=SeqID_85248
cgtatacgctgaacttgcttcgccctttcctcatcattgtcatcactgatggtgatcaaaattgccatctcgtattctctataagctgcccacagtttgctgccctcagtaacatgcagcccccctgcagtgatggctcgctcgaacaaatctctcatcttggagaggccagacgttgtacattgagacactgatggatcatgctcttcgacatagtcaaggtaatcccgccataacttaatggacaggtattcttgcaccccacgctcatatagcttttcaatatcagcgaaagattcctcactcatgctcagtgagatttcatccttcgcccactcctgccacatcttcggggtaagagggaagtacttgttcatctcttcccttgccgcgcgaagcttctcaatgttgcctgacttcctcaaacactggatatactgcacgtgggtctcgtagtcgagaggctgctcctggagtgtccgctctagggcctggatgcggagctcgtcgacgccgcccgccccctcgtcgtcggagtccgacgagtccgagtcggagcccgagggcgcggcggcgtc

SEQ ID NO: 19275 - DNA, 525 bp, Setaria italica
  Peptide Sequence Number=SeqID_85249
tgaattcatgtttattgctagatactttgtggagttaggtgttcttgcaggaagctattgtgatatctccaaagctggttttgaaggtgatggaatgcagatatgttgtggtgagaaaggttgtcatctctgcttctgctgtggaagaataatttgaactgaaaggaaaattgtgatggaagttttacatcgtgactggaaatatccaaaagaaacccattcaccaagagggtaaatactttaatcagaggtatacctgaagagatgtttaaggttctgcaaactggcaaacgaaaaggaagctgcagatagatggtccaattgcccaaggaagctctactacggtatcaatagtttgagtaggtgtgcacatcatgattcagatatcgaagcatgcatcaactcgagggtgctcaccgtaaccagtttgtctataatggctctttcaggatgaggctgcttcttcgaataaccagtttctataatggctgcttctatcatgctggtgcctgtttatgtgatacc

SEQ ID NO: 19276 - DNA, 2693 bp, Setaria italica
  Peptide Sequence Number=SeqID_85250
tcggaggagggggcgatggatggggtcgcggcaggggctggggagggcacgtcctcgatgattgatggtcgctcccagtggcggaggaggtgttgaaggtgagcgaacaagggtgcagtgccgcttgactcggtggcatcatgcctcaacggcggtggcggctgcccacgggaccgatgtcaccgccggctctctggtggcgctactctccacctcgagcggcgcaagatccggtcgaacagcggctggccatggcgatccccctcatgcttgttgtcgctccccctcggcctgctcatccaggtagcctccctccccaccggagctcagctcgatttgttttcaatcttcctgtttgggcggccgggctcatctgtagcgaattggcaaaagatttgacttttaacccttccaagacacgaagcaagcacgcacacatttttttcccctcctccgaattcccattagtcctaattcagtacattctcgatgtactgtaaacatttagtagtttatgtatattctgcaagtttacgtgtctagaaaacgttggatacatccatttctatgatgcaaactgctaatgctcgcccgacttgacgacatgttcccaatgaaaggaaactacaacattgctttgtgagaagcaactgaggactgaagcacacgaccaataactaacatggatgatcttatgtagttcattagatttgattactaactcatgaacaggtttagctttgcgtacatgatttaccagtttgttccatggcagtagacaattaaaagaaaacctttagttttcgtctctatgtgttggcagtactcattttgctacattaaggcactgaggagatgagctgttcgattggaagtatggcatgaatcgttagcttccttttttttttttgcatcccaatatgagcatttcttttcttttcttctttttttttgccaaaatgaattcatgtttattgctagatactttgtggagttaggtgttcttgcaggaagctattgtgatatctccaaagctggttttgaaggtgatggaatgcagatatgttgtggtgagaaagtatcaaatataatctagcattaagttaccgctgagttgcttcactggtgccagatgctttgttactcatttgcaatgtgaaagtgttcgttctttccgattggcattggcaatgttgtcatctctgcttctgctgtggaagaataatttgaactgaaaggaaaattgtgatggaagttttacatcgtgactggaaatatccaaaagaaacccattcaccaagagggtaaatactttaatcagaggtatacctgaagagatgtttaaggttctgcaaactggcaaacgaaaaggaagctgcagatagatggtccaattgcccaaggaagctctactacggtatcaatagtttgagtaggtgtgcacatcatgattcagatatcgaagcatgcatcaactcgaggatgaggctgcttcttcgaataaccagttttctataatggctgcttctatcatgctggtgcctgtttatgtgataccaaagtaaatgttgtgagaaaaaaaaattattcttgtcctctaatttttttttcatatgtgtgcatgatatcatcaaatagttttttaaagtttgctttatattgaatatgagcactactggttcgactacagataagggctaggaactattgattaaaacggtgcttaatttagttgaatataatacttatgctcggttggtgaaatctatggattgataggtattgctattaatggaagacgttcaatgtccgttcctatagttttcatcgttctattggaatggttgcatgcttcatattttcgtagatgtagtgttgttaatattgtttatagaacatttaaaaggaagaaaaatgggaataattgagtattccattttattgtttttttggagcatgaggactttgggggatttatgtccccttgatatcgtattgctactggcagcactattcagttttgcaattttagtttacttttatagctaattgttaagcttgtgacaaggcaatcttagttcctacatgccttgcgaggtcagcaaacttcattgtgcatttgaagttggcaacctcacggaaggtactaacttttgtcatatgcaagctttagaggaatatatgtttcggaactggttgtcatcagagtattcagagccaatgaattttttgaaagatgcagtaactgttatgaaattcttgcaattatttgtttacttgatttttgtgacatctcagagttttctttgggtgacaatgcgactagatgtttatgatttccatggtaaagagctttctcttcagctgcacaatgatggaagctcgggcagtctggaaagttcctaaggtaaataactggctggactattttaaagttacatttatttgatgacggcatggcttaatagcttttcagctttctaaagactcaaaactacattggctagaatgtcagtaccctacaagaggtagagaggaatttttttcttgccgtgcaatctaagagtggtaaaatgtgcaaagaattgagatacaattagttttctgccacttggagtagaagaattacttcctctatatacaggaactttctctataactggagcttgcccaggcacacccgcagcttacaa

SEQ ID NO: 19277 - DNA, 1583 bp, Setaria italica
  misc_feature (1526)..(1583): n is a, c, g, or t
  Peptide Sequence Number=SeqID_85251
tccattgtggctaataggtgagcccgcactagagctaagcggcagcaatggcggctctgcaagctacgccgctcaaaaccctagccttctcccgccggcgagccggcggcgcggtggctcggcctcggcatatggcggccttccggtgctccgccgcggcgaggagctacaacatcacgctcctccccggggacggcatagggccggaggtggtcgccgtcgccaaggacgttctctccctcgccggcgcactcgaaggcgtcgagctccggttccaggagaagctgatgggcggctcggcgctagatgccaccggcgtgccgctccccgacgaaaccctcgcggcagcgaaggattctgacgccgtcctcctcggcgccataggagggtataagtgggataacaatgagaagcacctcaagcctgagacggggttgctccagctccgtgctgggctgcgggtgtttgccaatctgcgtccagctgcggtgttgccacagctagtagatgcatctactctgaagaaagaggtagctgaaggtgttgacattatggttgtcagagagcttactggaggaatatactttggcaaacctaggggttttggaacgaatgacaacggagaggaaactggcttcaacacagaagtttattctgcttctgagattgatcgcatcgcacgtgttgcatttgaggttgctcgcaagagaagagggaaactatgctcagttgataaagcaaatgtgctggaggcatccatgctttggagaagaagggtgactgcactagcttctgaattccctgacattgaactctcgcacatgtatgttgataatgctgcaatgcagcttgttaggaatcctaagcagtttgacacaattgtcacaaacaacatttttggtgacatattatctgatgaagcatcaatgattacgggaagcattggaatgctcccgtctgccagtgttggtgaatcgggacctggtctttttgaacctattcatggctctgcccctgatattgctgggcaggacaaggccaatccattagctacaattcttagtgcagcgatgctattgcgatatggccttggagaagacaatgctgcaaagagaattgaagctgcagttacagaaacactgaaccagggattccgaactggggacatatattctcctggaacgacattggttggatgcaagcggatgggggaggaagtcttgaagacagtggagtcacaaaaggcggtggctgctataaactgaaagctgtagcctgagcaaatgagattgttcttttagaagttgagcctgctgaaagagcatactgcatctggattgtttagttcgttgcctgccgttgaattgatgggcggcctctttctctctttgttgcttgttggacttcctgtaacttaagtttgtgatatatgggagaatactgttcgtccaataaatgggataataaaatggggatatttcccttcatggcagccgaaaacaaaaaaaaaaaaaaaaaaaaaaaannnnnnnnnnnnnnnnnnnnnnnnnnnnnnnnnnnnnnnnnnnnnnnnnnnnnnnnnn

SEQ ID NO: 19278 - DNA, 343 bp, Setaria italica
  Peptide Sequence Number=SeqID_85252
cggagtcgaggtatatcgcgcgcggcacgcagcgcgggagcaggtcggcgaggtggttccgcgcgtagttgagaggggcctcgagcgcggcgcgcacggaggcggagatgagcccggcgaccgcgtcggcgcggaacgggtagatctcgaagcgcagcgaggggaacgaggcggcgacggcggcccggaggtcggcgaccggcggcgcgccgccgccctccgcggcgaggaagtggaagaagagcgactccgggcaggaggcgtgcttgagcagcgagtagatggccgccatggagccccggaggtagtgcgcgtcgagcgtcatggcgatgtggacgaggcc

SEQ ID NO: 19279 - DNA, 701 bp, Setaria italica
  Peptide Sequence Number=SeqID_85253
ttctttatttatttgtaatgaaagaatgatcaataatagaacaaaattccaagtctttcctacttgtacaccctccaatcgagagaattgggaaccccaaggatcaccggccagaccaaaaagaatcaaaatcccccaaataaccaatctgaattctacccaaaagagcaagagctctccttctctatgaactgatccctcttctccttcccctgctgtcgctaccgctgctcccttcaccgccctgtacagcccaccatgagcggcagctagctcatagcagcggcagcaacagctccagcaagacaacacaatgcaatgcgatgggggcacattgccatcgccaagaaccgctcaatcagcaagtacctgttgcgcctatggaactacaagctctctctaccatgaaaacagggatgcggacaatgccggcccggacgccggcgaggcagcgccactgccgtcgctggggatgtagaggtcatataacctccaggtgtggtcgagcgggcatggcctgccggcgtcgaggcggtcccatggcttgcccttccccgaccagtgcatgaggctgacgggcccgtcgtggagcgggcggcagctgccgtgcacgttgtcgcctccgaggccgtgctggttccagcggtggtcgacggcctccacctcgccggcgaagacgagcaagaacgggggcagggacg

SEQ ID NO: 19280 - DNA, 1339 bp, Setaria italica
  Peptide Sequence Number=SeqID_85254
gttttttggtcacaagaacaggatccactcaatttgattcaaatcaatttaatccatattataagagtgtactgaatagacatgtaaatgaaacaattctgaactattagaccaaaaaaactgaaacctttatcctatccaagaattgtacaccaccaatcaagtaattccttccaacccctgatagtctccaccaatcaaagcccaatgaatcaatctgaatcgtagtgcaactgaacaagaatttgctctccctctattcactgtcttcatccccttgccaccaccgcaatgtgtataccgcccctcccctcactgtcctgtacagccgaaggcggcagctcgtttgcagcagcagcagcagccgtggtggcagtggcaatgcattgcaaggcaattccattaccagccaagaaccacggcatccccaaaccaaagaattattgtgtatgtatgtcttcagcttctcctaccaagaaaacaccgccgcaggcaatgccgccgatgatgacaaggcagaccgggactgccctgatgctgatgaatcattctcgccaatgtagaggtcgtacgacttccaggtgtggtcgagcgggcaaggcttgccggcgtcgaggcggtcccatggcttgccctttccggaccagtgcatcaggctgacgggaccgttgtggagggggcggcagctgccgaacacgttgtcgccgcccaagccgtgctggttccaccggtggtcgacggcctcaacctcgccggcgaagacgagcaagaacgggggcaaggagccgagctcgtagattctcttctctttctgcatctccatccagcgctcgatgcgctggcggtagttgccgacgcgccatctccggaggtcgatgaccatgaccccggtgttgaagtagcagggcgcgcggcggcgcccggcgaagacccgcgcgccgaggacggggtcgttccagaaggcctcggtgaagtaacgggagaagttggcgtggcagtactctggcgcggcgacgaccgcggcggcgggcaggcgcgtctcccagagcctgcgcacgtcgtcgacggcgagcacgtcggagtcgaggtatatcgcgcgcggcacgcagcgcgggagcaggtcggcgaggtggttccgcgcgtagttgagcggcgcctcgagcgcagcgcgcacggacgccgagatgagccccgccacggcctcggcgcggaacgggtagatctcgaaccgcagcgacgggaacgacgcggccaccgcgcgccgcagcagctccggctccggctccgggccctccccgcccgcggcgccggcctccgcggccaggaagtggaagaagat

SEQ ID NO: 19281 - DNA, 356 bp, Setaria italica
  misc_feature (11)..(11): n is a, c, g, or t
  Peptide Sequence Number=SeqID_85255
aggaacagcgngaagtcctcctggaactgcttcctgtacagcttcaccaccgagggcggcgtggcctcccagatgtacatgttgccttcgttcagaaccgtgcctctcgcgagctcatcaggaaccttggagcgccacatgaggcagtaggaggagtggaagaggtggacgcagcggtcggggaagagcctggtgtagaaggaccccgggagcccggcgatgtagtacggcggcagggactcgcccttatccttggcggcggccagcttcttgaacagctccagggactggaagacgaggttgaagtcgttcccggggaggtcgttcaggaagaactgctacgttgtcaccaccgg

SEQ ID NO: 19282 - DNA, 316 bp, Setaria italica
  Peptide Sequence Number=SeqID_85256
gggtttgtcccatacatcacctacaatattccctacatacaagtttatattaattgagcagccgcaagtccagaacgaagtcgttgatcgctgtggtgtaggaataatttgtctgtatataatataatataggagatgatcagaatgccctccaagtcgactcgttcattgccagttgctgctccggcggcggcggtggctgctgctgatcgcattccatctcaacctttgccaacgagcttgcgaacatggcgtgctcacttccggaggttccacaaaccgccgaggtctccgaaggtgccacgaaacggagcgg

SEQ ID NO: 19283 - DNA, 1004 bp, Setaria italica
  Peptide Sequence Number=SeqID_85257
tgtgcctcgaggagctgccgagtgatgctgtgcagaggctgccaagtggtaggtctgactttgcaatcaacatcaataatgggtgcttctcctgggaagcctcacctgaagtcacaacgctgaaggacctcaacttcaaagttaggccaggcatgcgtgttgcagtttgtggaacagttggctctggcaaatcgagcttgctatcttgcattcttggtgagattccaaagttgtctggagaggttcagatctgtgggacgacagcatatgtcagccagtcagcatggatacagagcggcaaaattcaggacaacatactgtttggcaaggagatggacaatgagaagtatgaaagggtccttgagtcgtgctcactgaagaaagacttggaaattttgccattcggtgaccagactgttatcggagagcgagggatcaaccttagtggcgggcagaagcaaaggattcaaatagcccgtgctttgtatcaggaagcagacatctatttgtttgatgatccattcagtgccgttgatgcgcatacaggatcccaccttttcaaggaatgcttgcttggggctttggcttcaaaaacagtagtttatgtaacacatcagattgaatttctaccagcagctgatctcattctggtcatgaaagatgggagaatagcacaagcaggcaaatacaatgatatacttggttcaggggaagagttcatggagctggttggcgctcacaaggatgctctcgcagcattggacttgattgatgtcgcgggtagaagcaatgagagctccccttccagaggcacagcaaagctgaccagatcactatcatcagctgagaagaaagataaacaggatgaagggaacaatcagagtggacagctggtgcaggaagaagaaagggagaaaggcaaagttggattttgggtatactggaagtaccttaccttagcttataagggagctcttgtgcctatttagttgtttgtctttgtc

SEQ ID NO: 19284 - DNA, 1454 bp, Setaria italica
  Peptide Sequence Number=SeqID_85258
ttgcaaaggatgactaaaaataacgaaagacccagattattgcgatgtactgagctccagtttaagctcaataatgggttgggcagagaaaagactgcttgcgtaccatgaaactttcaatactagtaatatttactccttgcaatatattctttcaataggaatatcaactgcaaagattcttgttgaagatcaagataaatcttatgaataccatagtggagcgaagggagatattaatgttgtgcacagcaggattgaaacctatatacactcgtcacttcgcactgcttttgctcaatgttgattcatacagaaaatggaagagggagcttcaaagcggttatcaaggaaccatacgcctatcctgtcaattctggcaaagaaaacaagtgaccttgctattaaggagaaaaatgtatatagtccaatattgaagaaatggcaccaccttcgactcagtgtgagtagtgcaacccttcatggttgcttcggaaatgagctgaagcaatttatagctggacttacagagctcacaccagatacagctcaagtgcttaaggcggccgacaagttagaaaaggatctaattcatattgctattgaagattctatggacattgatgatgtaggcaagtcattggtaagacaaatgccaccttatgaagttggaactgtaatggccaatctggtgaaagcatgggtaaaagaacaagttgacaaacttaagggatgggctgaccagaagttagagcaggagacttggaacccaaaggataataatatggacagttttgccccctcttctgtggagatgctgcacttaattaaggagacttttgatgtattttttgagttgtctataccgatgcactctgctctgcttgctgatctgacagctggacttgataaatgtctacactattatgtctccaaagtgaaatctggttgtggtaagtatattgtgaagacagttcttacgtataataatgttggtgacttcattttgaattgatttacaggaacacagagtactctttttcctcagttacctcatctaacaaggtgcgatgttggatccaagttattcaagaaaaatgaaaaaccacagcttcttgtgaagcgaggatcacaagttggatcgacaactggaaatgaatcctcgagtctttcaggactatgtttacgaataaatacccttcattacattcaaaatgagctagaaaacctggataagaagacaaaagcatgcttgcgaaatgctgagttggctcagcctgatgttgttgatggactgaacatcaacttactgctcacactgagtgcttgccaagaaggaatccgacagttgtgcaagacaacggcatataaggtgatattcagtgatctgagtcacgttcttatggatgctctgtatgttggtagccctcgcccctgcatacaaacaggatact

SEQ ID NO: 19285 - DNA, 276 bp, Setaria italica
  Peptide Sequence Number=SeqID_85259
tgggaagagcaaggtgcctgatgtttttgtcaggatagtgcagcagcctaataacctgcacctttctagctattctgaaacatcaaccaaggatgtaagtatttttctgtaacttggtgtcaatttgctacctcttggaatcaagatcgagacataagttatatgtatgctattccaaacagggcctgacagttacatgttcaaagaggggaggagaaacatacatacaaaaccactccaactggctgcaaacagtgccaaagaaacctgatgcta

SEQ ID NO: 19286 - DNA, 268 bp, Setaria italica
  Peptide Sequence Number=SeqID_85260
ctaagtgcctctacaatgggcacctatgttcaatgagcttgtgcttgggcctcaaaagagaaaaggctcctacccttccatgcagttcagatttctcggccccaaactccatgttagcacttctcaggtaccagcaatgttaatttgcactttagatttgaaggtctctgtttgttctttcattcatcgttactaaaccgaaaaaattaatctctgaggaattaccatttttcttgcaaagaattacttctcttcagtgaagtcacac

SEQ ID NO: 19287 - DNA, 2352 bp, Setaria italica
  misc_feature (2268)..(2352): n is a, c, g, or t
  Peptide Sequence Number=SeqID_85261
ccctctcttcccttgaagaaaggcctgcgctcgggcggtggttgcgcactccaccatcgtccgtagccccgaccgcgaggcggttcctcgaagaagaagaagaagaagagaggaggaggcgtgtgacggccgatggaggtcggggaggaggcggtgcgtgcgctgggcgcggggttcgacctcacgtccgacttccgcctgcgcttcgccaaggccagcgaggggcggcgcctggtggagctcggcggggagaccagggacgtgccgctcccgggcggcgccggggccaccctccgcggcgtgcctcgcgacgtcggcgtcgacaagggcgaccgcatccgcttccgctccgacgtgctcgagttcaaccagatgtcagaattacttaatcagaaatcttcagtccaagggaaagttccttccggctattttaatgctctttatgaattaagtggagcttggttgactgatgccaaagaaactaagcatctagcatttgacgggtatttcatttccttgtacaacctgcacctaaaagcttctccattagttcttcgagatgaagtaagaaaggctgttccatccaagtgggatcctgttgcattagcctggtttatcaaaacttatgggacacatataattgttgaaatggcaattggaggccaggatgttatatgtgttaaacaaagtcattcttcaactgttgcagctgctgatttaaagctgcacatggaggatcttggtgattttttattttctgatatgaagaaccactctccaatacatcgcaagacaaaggatgggaagagcaaggtgcctgatgtttttgtcaggatagtgcagcagcctaataacctgcacctttctagctattctgaaacatcaaccaaggatggcctgacagttacatgttcaaagaggggaggagaaacatacatacaaaaccactccaactggctgcaaacagtgccaaagaaacctgatgctattatgttcaaattcgtcccaatcacctctcttcttactggtattcccggtagtggttacctcagccatgccatcaatttatatcttcgctataaacctgatcttcaagaattgcaatatttcttagagtttcaagtgcctctacaatgggcacctatgttcaatgagcttgtgcttgggcctcaaaagagaaaaggctcctacccttccatgcagttcagatttctcggccccaaactccatgttagcacttctcaggtatctagttctcagaaacctatagttggcctacggctatacttggagggcaggaagtgcaaccggctggccatccatgtccagcacctgtcaagtgccccaagcatgctggtcgactccatggcatcttcaatgtcggagtggcgcgagtcggaagacaccgacccgggctacatcgaggccatccagtggaagaactattcctgcgtctgcacctccgccatcaagtacaacccggagtggcacaagcgagcccccggcggtgtcttcatcgtcaccggcgcccagctcgtcgccaagggcacctggtccaagaaagtcctccacctgcgcctcctctacacccacatccccaactgctccatccagaggaccgagtggacgagggctccggcggcgtcccagaaggggagcttcctgacgaccatcagcacgacgctaagctcccccttcacgcagcgcgacacccaccagcagcacgcgccgaggcatgagcctgcgcagctgaactccggcgtgtaccccgacgggccgcctgtcccgctccggtcaaggaagctcctcaagttcgtggacatggcggaggtggtgaaggggccgcacgacgtcccggggcactggctggtgatcgccgccaagctcgtgaaggagggagggaagatcgggctccatgtcaagtttgcgctgctcggctatgacgggcagccgtcgcagggtgacagcttcgggagctgagctgagctgatctttgtacatagcaacagtggctgatctagattgcagggttttggaaagaggggcactaggataaggatttgttattgatttttttttctattttggtcgataggaagtgtatagaggcagataataaaccaatcggcgctgcgttgacaagctccatgaattttcgtgcttaaaaaaccaaaaaaaaaaactaggaactagtttgtaagtaggctctgtagttgtaaattatgagagaaaaatcattttctgaccgaaaaaaaaaaaaaaaaaaannnnnnnnnnnnnnnnnnnnnnnnnnnnnnnnnnnnnnnnnnnnnnnnnnnnnnnnnnnnnnnnnnnnnnnnnnnnnnnnnnnnn

SEQ ID NO: 19288 - DNA, 718 bp, Setaria italica
  misc_feature (661)..(718): n is a, c, g, or t
  Peptide Sequence Number=SeqID_85262
ccggatacgacacactcgtagtgaagggccggagatgggggcggatcagttcctgagcatatcggagggcgggctcggcggggaggcggtctactgcgcggtcatcctgtggctgtccgtggtgtcgtggatcatcttctcctgggtcggcggggacgaggacgggatgaggagggggaggaggcgccggggcagccgcgggagccccgtgttcgtcggcgccgcggggatctgcgacggcacggggccagggtgcagcggcggctacggcatctgcggaacctgcatcgactagtagcctagccgtgcctctactagtagttcgtctgaacatcagcgcgcgacgagcttgtacatgtcgtcgtcgatcgatgctcaagcccttgtgttgtgttgtggagtggcgtcgatcgaattggcgttgctctggatgctgacatgatcagagaaagaggctcccctttgtgaaggcaataagagggaggccggtctgtttcgatctttgctcgggttgcagaaactgagttcttagcttctccttttgcgttcctcaatctgcttgatagcttgatgctctgtaaatttctccgtgctccatttctttgcagtttaagctgcaaaagcacctacatatatgagatataatgttgaagtaccaacnnnnnnnnnnnnnnnnnnnnnnnnnnnnnnnnnnnnnnnnnnnnnnnnnnnnnnnnnn

SEQ ID NO: 19289 - DNA, 243 bp, Setaria italica
  misc_feature (132)..(132): n is a, c, g, or t
  Peptide Sequence Number=SeqID_85263
catggacggaggggtagtgccgcgtccacccgcggaataatagttggagatgctggtcgccacgtctgtggctcgccgcctgcgcccacgtgtaccgcgcgttcaaggcgctgagacagcaacatgattggnggcgacgccccgcggggcccgcacgtcagagtgcattcccatgatcccatccatttttcattttttgtctgagaagaagacaaaccaagatgcagcaggcattcgcatttg

SEQ ID NO: 19290 - DNA, 1330 bp, Setaria italica
  misc_feature (1264)..(1264): n is a, c, g, or t
  misc_feature (1278)..(1278): n is a, c, g, or t
  misc_feature (1313)..(1313): n is a, c, g, or t
  Peptide Sequence Number=SeqID_85264
tttacctttaaggttctaagaagcggaagcgccggccgcaccgatcgcccccctccctcgcggcggcggtggcggaggaggagatggggcgtggaggtgccaccggaggagaccaaccggtgcgtgcgcgggtgctgccgcagcgctgccatcccgctccatctcccgcccgcctccttctccctcgtctccccaatcgcgcgagggtccgagagcacggtgtacgaggctcggctgggcggcaaacgcgtcgcggccaagaagcccgtgcttgccacgtccgaggacctcgacaagttccactaccagctgcagctcctctgtgagttggatcacccagggttggcaaaactgatcgcagcacatgcaagccctccgaattacttgatgttctttgatttcttcgagcctccaaaccttgcagacaagattcatgtcgaggaatggagcccttctgtccagcaagtggtcgccattgccagtgatctagcaaaggctcttcagtacctgcacatccttggggtagttcacagagatataaaacctgcaaatattttgctagacaaagacctccatccacatctagcagattttggcttagccatgtttcagaaggatattaagtgtgtctcagttgagaactggaaatcatctggcaagcccactggtggtttccataaaaggaatatggttgggacactaatttacatggcaccagaaattttgagaaaggatatacatacagaaaaatctgatgtatatagctttgcagtatctatcaatgagcttcttactggtgtggtgccttacacagatctgcgagcagaagcacaggcacacactgttcttgaaatgacttacactgaacaacaacttacagcagcagtcgtttctcaaggattgcgccctgcacttgcccttccgaaatctggtgttccaccgactctattgtcacttatccaacgttgctgggatcgtgatcctgaaaagagaccatcatttgaaaatataattgatgagctaaatattatccaaaagcatttagtttcaagtgcttgtcttccaccatctcctgtgagcaagactcaaagtggcaatatagaagcacaccattatcttctttgctggtttgtgaatgccaactatgctaccatgttctcttgtttattgcaattttgttgtaaaattcatctgactacgggcaccgatcattctacagcatataacgtattccatgatgcccacagaaaaggtttttttttcncgaatacacagganagctgcgtatcattgtattaataggagaagaaagngccatacagacgaccct

SEQ ID NO: 19291 - DNA, 549 bp, Setaria italica
  Peptide Sequence Number=SeqID_85265
tggaagctggagtcaggttttgagcaggaacgtctacgtaccagcaaacagtcccctgattacaaggaaggcgaccttcctctcattgttgcaattgacttgcaaccgatggctccaatagaaggtgttatacaagtgcagggagacatcactaatgctcggacagccgaagtggttattaggcattttgatggattcaaagcagatttggtggtttgcgatggcgctcctgatgttactgggcttcatgatatggacgaatttgttcagtcccagcttatacttgcggcacttacgatcgtgactcatgtactcaaagttggtggaaaatttgttgcgaagatctttcggggtaaagatacgagtctcttgtactgccagctaaaattgttcttctcacaagttacatttgcgaagccgaaaagtagccggaactcaagcattgaggcgtttgcagtttgtgagaattattcacctcctgaagggttcaaaggaggaagatctttaccacctgctagagaaagtggggactccttcaggagctgacga

SEQ ID NO: 19292 - DNA, 407 bp, Setaria italica
  Peptide Sequence Number=SeqID_85266
ttaatgtattgctgcattgcacttaaaaaaaattatcagtaacattttagtttccaattcctgctggttgagctaggtgattctgtgtgaaatgtgaaagtgtgaaatgtctatagcacagcctgcagctgttcatacaaagcccagagaaccaatcctattatggtgtccctgaccaggcccttgatgagtgatgtaacccatgtatcagatgattctctaccgacaaggtcgcggaacctcaagtccccttgatcagatatcaacgcgtacacgatgccattcatgtgccccttccctacgactccgacgacagttttgctcttgttcactgctttgctcctcttcagtgaccatgcaaggaacatgtcgcgttcatgtatgagaggttgcagcagtgaaggata

SEQ ID NO: 19293 - DNA, 407 bp, Setaria italica
  Peptide Sequence Number=SeqID_85267
cttttaaggagcccatcaataatggcattgtatgtcaccactgtaggcataatgccctcattctccatctccaactgcaaagactcaacctttttctataaaaccccttttcaagcaatgcagtgataagtgggttgtaagtaaaggatgaagctgtcttggacaaccgcatgctgtcaaccagcctttgccgccttgtccagattaccttccctggtgaaccaactaatcatcacattacatgtaacatcattcagagagcaatcacctccctgggtctccatctccttcagcagcatgccagccttgtccttccttccctccttcaagtaagaatccagcaaagtgttgtaggtcacaatgcttggctcaatcccaagatggagcatctctgcatacacagcatg

SEQ ID NO: 19294 - DNA, 474 bp, Setaria italica
  Peptide Sequence Number=SeqID_85268
taaaggttaatgaagggtcttctgtcttctgggatcatgagttcatatattgtcttcctttgttggtctgcactccacagtgaaccagaagctgggaagtgccactctcatatgaaaattgcaaaggatggtgattgggctactattgttagcttcatcattgcaatttgttccattgtgatggccacattttctactggtatcgacaccaaatctttccaatttcggaatgatgaggttcaattggaagaggacaccccttacagctacgagattttccacatagtgtttgcaatgggagctatgtattttgcaatgctgttcattagctgggaactgaaccatccagcaagaaagtggagcatagatgttggatgggctagcacatgggtcaagatcatcaatgagtggttcgcggctagcatatacatttggaggttgatctccccagtcgtattgaggaatcaatttgtc

SEQ ID NO: 19295 - DNA, 393 bp, Setaria italica
  Peptide Sequence Number=SeqID_85269
cactgctaacagggtaggattcgtcatcctcatcttcgagaaggaattgattgatgtatgcaaggaccgcatcatcggcatcatcggcgctgtccagctctgttgtggttgttgatgccggactcggtgtggtgcagccaagcatgacccaggggtggcgatggatgagaactcacgggagggttgtggctgtggaatccatatgaagggaaatattgaacttgtgattgttgttggagggagaaattaatcatgtgaggggtgggcggatttggggtggacaactgatcaccaaaatcaagattatcacgagaaccagggtccatcataattccttgaagcttctatccacaagaaagcctatccgtgtcgcagtcacttataggttcatga

SEQ ID NO: 19296 - DNA, 570 bp, Setaria italica
  Peptide Sequence Number=SeqID_85270
cgcggtcgtcggctctgctccttgtcgatcgacgagtgctcgacggggagagccaccgacggcggcagcggcggcggctacctctccgacgacggcggtcgcggcggcgctgcgttgcgggagcggaagaagggcgtcccgtggagcgaggaggagcacaggctgttcttggaggggcttgataagctcggcaggggcgactggcgaggcatctcccggggcttcgtcaccacgaggacgcccacgcaggtcgccagccacgcgcagaagttcttcctcaggcagagcagcgccgggaagaagagcagcaccaagcgccggtccagcctcttcgacatggttcagaattgtgagagtggaagagatgtagtacttgtctctgatgcttcagacggcaaggccgccagcacctcaaattctgtgtctccaaaggcaccgcgcgatgtgtatcggaaggagtcgacggccattcatgagaggacgacgataaggccttcgtcagagagggattcagtttcagagacagttacggtgacgacggagcaagctcacggataccactgctccccg

SEQ ID NO: 19297 - DNA, 871 bp, Setaria italica
  Peptide Sequence Number=SeqID_85271
aggccttgagaggactggcttttcgttgtaagcctgcacaagcttcctctccgcagaactgagattcatgtcatctggttaaccaaccctgccaatattttcaatctttctctgaaagggactgttgagtccaatgggaaacccttaaccttttctatctcgtcgtttactagtctcttgatgctgtcatgaaactgaggtgaaatttctttctcaaagttgtcgttcagtttgaaatacagcactagattaattccttccccatcactgtcaccaaggaacatagcagcaggatatgtaggcatctgaatattcacgataagtagtgaaggaattttttcatttggctttacagatggaagctcaatatgctgggcaatgtgatgtattttccttggggacatgaatatgtcgacaccaaatggagtgtatggagaacaacctggagcaggagacttctttttgtccttgaaaaaactttcccctcgcagtttgaaggttgaaggctcaagcacagaccaacaaccttccgaaattttctcaccggcttgtggaaccaataatccagctcgtggacagatcaagtacctcctagaggaacatatttcagtagtttgctctccatcgaaagattgcctcttgaaagaaagcctgacaaccgctgatttcttcttttggccccgtggacttgctaccgccaatggttggaccttgttagcatgacgaggtgtgcacactggtgtcaaatttttgaagatgctttcatgttgcttctctccatctttgaaagactttaaggtattacatgcatcctcgcctcttctaagttttgtcagaatttttataccctcatttcgtgtctttgcttcat

SEQ ID NO: 19298 - DNA, 463 bp, Setaria italica
  Peptide Sequence Number=SeqID_85272
gtgcaggtggcgtcgctgcccgtgggccacttcatggcccgggtgctgccgcgcaccaggcaccgggcgcccaagctgctgggcggcggcgagtggagcctcaacccggggcccttcaacatgaaggagcacgtgctcatctccatcttcgccaacgccggcttcgccttcggcggcgggagcgcctacgccgtcgggatcatcgacatcatccgcgccttctaccaccgccacatctccttcttcaccgcctggctcctcgtcatcaccacgcaggtgctcggatacgggtgggcggggctgatgcgcaagtacgtggtggaaccagcgcacatgtggtggccgagcacgctcgtccaggtctccctcttccgggcactgcacgagaaggacgaagccagcaaaggttcgcgccagatctcccgctccaagttcttcttggtggcgctggcatgcagcttcg

SEQ ID NO: 19299 - DNA, 286 bp, Setaria italica
  Peptide Sequence Number=SeqID_85273
ccccgactcgcgcagctgcgacgaaaccctagcggcgaattcccccgccgggatcgaggattccaaggttccgatcgggggcgagcgcgggagccgcattccgggagcgggggatggcgacctgccgcaagatggcgcgcgtcgacgtcgccgagctcaagcagcgcctggttgaagcggctcggcaggcagcgggccggcaagtacttcgcgcacctcaccaggctgctgaatctgaagctcaccaaggtggagttcgacaagctgtgcttcgccaccataggca

SEQ ID NO: 19300 - DNA, 412 bp, Setaria italica
  Peptide Sequence Number=SeqID_85274
gccgccgcgccgccgtgcacgaaccgccgcagcacgacgcggagcagctcgccggcggcctcgaagagggagaacccgtggccctgccccgcgaacacggcgagctcggcgcgcctgctccccgatccggtcgaccagcatgtcgctgtcaccggcggcgacgagcacgggagggagggcgacggagtccagcgcggggctgcccggcccgaacgggttcgccagcgggtggtccctggtcgcccccgccggcagcgccagccgccacatctggtcttacagcgggagcgtcaggaacacgtcggatgggcacgacgcctccgacgccgttcgccgctcgccgcagaagtacggccacagcaggatgcacccggcgatgatgggcggggtcggcggcgaggctccccaaccg

SEQ ID NO: 19301 - DNA, 813 bp, Setaria italica
  Peptide Sequence Number=SeqID_85275
ttggtgcggacaccgtgttgccgtcagtccaaatccggcacgcggttgcctttccggaccgtgttctcctgatcctcaagaacgggtcgtcgctgccagctccggagcagtttgagtgtctgtactcccctgccaattcctcggagctgcgccaccaagccctcttggctgtgtccttgccagatggatccagcgtcgtccattgccctgctgagccatctggtgtggacgtctctctgtccctgtccctgtcacctccagtggcgccgctacaatgggacaggcttgtgtacaccgcacttgttgacagcagggacaactccaccgttgtgttcgctaaggggatgaacctccgtccaggccgtttgggtgtggcgtcacggtatcagtgcgtctttggccgggacctatcgaagccgaagcatgtgctcacctcccctgtgatttctgcagcacaggagattttcaggtgtgtgacaccagttcgcattcgccggtacctgaggatgtcaatggatgccaatggcaatggagacagtgatgacaaacctatgttggtctccatcaggactaagggcctgagggactctacacttccctcaattgctgaaccagagccacttcctcggtataagaggcatcgacggcaaaaggcacactcaatgtgtgtatgcaccatgctgcgaaaccaagcaaggttcctccaagaatggatcatctaccactcacatatcggtgtggagcggtggttcatctatgacaacaacagtgatgatgacattgagcaggtcctcaataccatggatccatcaa

SEQ ID NO: 19302 - DNA, 519 bp, Setaria italica
  Peptide Sequence Number=SeqID_85276
atgatggccaagttcttctttatgctaattcagtgaatgcaaagtaccagaccatcccatatccatggttggtcctttggtgagaaggtgaaggtgaatgctgtcttcatccgtgattcaaccggagtatcagactccatactgatcttatttggtggtgctgttgcaaaaggaagcatggctgggcacttgaagatgctcgatgggtacattgatttctttatggatcccagcctttccgaatgctacttgcaacttagagaagaacttgataaacttatacagaagaagcttgaagacccgaactttgacatccacaaggaaggcaagtacatcctatacgccgcgcaggagctcaccgccggcgacctatgcgaggggcggttcgtgttcgggcgcgagacgagccgggccaagctccagagccccgaggaggagggcaagagcagcctgatcaaggatgggatgaaccccaagagcctgctgcagacgctgctgatgcgcgcggggcacaccccg

SEQ ID NO: 19303 - DNA, 270 bp, Setaria italica
  Peptide Sequence Number=SeqID_85277
aatgaaactcaattcggcactcgagggtaactaagattaagatgcaacgggctattcaaaacagatctatcgtctattccgacataattaataacaattaatatgtcgtaaacagcaagatgatagaacagataaatatcaaccgatgcaagcttaatcaaggtgggataactggtgaataccgtagatcgagacagaagcgatgcgtcgtaagtcaaagatccaagatacttgataactggtagatgaaaccagacccaatgacagcga

SEQ ID NO: 19304 - DNA, 423 bp, Setaria italica
  Peptide Sequence Number=SeqID_85278
tttcatcctggcccgccatgtacgcgccaccagcgcctgtggctgcttgcttgtggcagggctcttccatcccttgcagcacatgcaagcttcggtgccaaatcatgaaccaagtgagagagatgtgtgctgatacggaaggtctcttttggcccttggggtgaatgggtggatgaagcagcgagcttccttgctgtgcttggcacggataaccttgattgcggccggaggtttcgtggtgaccgtggcaacgtcaattgcttggacgtgtggatgaagtttgactgcgtgaattgggtgtgcatctggctgattgcggttccaggcatagattgctttgcctgtatgctgctggttgcctgccttgttgtggtgctatgtaagcaatctttacttgtggatcaaccaagaaggccatggctt

SEQ ID NO: 19305 - DNA, 471 bp, Setaria italica
  Peptide Sequence Number=SeqID_85279
gcctttccaggggtaccaacaaggccttgctatgcacagcaggggtttggatgggcttgtcatctgaaacatcatgttttcccttcgtgttacttctagctggagttggatgcggcttatcatctgacagatccattaacacacaggtcttgggaggtgacaggtaccactgaagagtatcttgggcgtttcttgtacgatatgtattcttggtagtttgattgagcccataaatgtcataccttgacgccagatcctttgagacttcatcagatgattcagaacgtttgtaaccctgggttggtccattgctgtcaatgtcttccttacttgaaccctccggtattggagagaactgctgcttactagataatgctgtcttcaggcatgatctaggtagtgctcccatgctcttccgaattgagaaagtgcaaggcgaacagagcctgtcttctagtgagcccttgtttg

SEQ ID NO: 19306 - DNA, 764 bp, Setaria italica
  Peptide Sequence Number=SeqID_85280
actaaagagatgattgccaaatatattaccaccaatggatcaaagatagaaaacttgtgaaggcatatgttgataggcatcgtacagcatgagatccaagcttctaaatgttgaattactgctcgaccaagattggagcttagacttgatgtcgatgggagcttgagcctcatgtcccgccaatctggttgacctacgtttgtaggtgcaagaagtttttattggaaaaagattgagcattcttaattgacaacagatgcaaaagcccaaaaagtctcaggggagctgccataggaaagagcaattgatacttggtgcacacgatgcttgccaaagatttcaatgtggcgatggatggaaacttcagaatcctgcggttcagatggatatttgcatataaactggttgctcccaggatgctcaactaaattaaactttgtccacactctcatgtgctccattctcttgcagtgacgaggttgagtgaattgtacccatttaatcgtgctcattgatctggatggtatgtacaggcacactgtgcttcccaaagatttcaatgtggcaattgatggaaacttcagattcctgtggttcagatggatatttgcatataaacttttgctcccaggatgctcaactgaagtaaactttgtccacactctctcctgcagtgacggtccattctcctgcagtgacggggttgagtgaattgttagaatttagataattgaatgcgcattcttataaaatgcattaggagg

SEQ ID NO: 19307 - DNA, 1319 bp, Setaria italica
  Peptide Sequence Number=SeqID_85281
acctgcactactttcaagcagttcacttgacccttctatcatatcagctgggccactttctccaatcaaggatgaggtctgggaaacgtcagtgccttttgtaccttcttttagttttccaacacctccaggaagtccatatgacccattcgttgactgtattgaacctcctaaaggttgggaatacagataatctgaagtcgtcattggacgacttcagtatttcaagtcagcatacaaatccggatgtcatcactgataaatcactgaatcgcgatgacaagttaaccaggaatatgtctgccataggagcaaatggacctgcatgcttgattgcatctgatagaggacgcagctctagcctggacgttaataacagggtgaaagcttgtgacagaaaaaataatgtaggtagtagcgatgagaaagcaagagactttcgttttcatttggcagaacatataaaggacttgatcaaaccaatatggaaggaaggtaatctgagtaaagatgctcataaacaggtagtgaaaaaaagtgttgaaaaagttgttgattcaattgagccaaatcaagtaccaactactaaagagatgattgccaaatatattaccaccaatggatcaaagatagaaaaacttgtgaaggcatatgttgataggcatcgtacagcatgagatccaagcttctaaatgttgaattactgctcgaccaagattggagcttagacttgatgtcgatgggagcttgagcctcatgtcccgccaatctggttgacctacgtttgtaggtgcaagaagtttttattggtatggtagttgtttctgaataagatattttgttgcttgaacctggttggttttgtagacttcagtctgaactcccaaatagtaactgacatggtagacatttagtttatgtttgcatgttagcatctaatgcagctaaggacaagcctttttgcatgtctggataatctgtagaatatggatggtgcttactcttctccccttgcctggtgtaccatctccatttttttgtttggtcaattgttctttcgtatttggtgctgtaggatttgaaaagaagacatgttcttcaagtgctcttacatgattgtttgtctgttagatttactaagcataaaatagtttaatatggtgtaaagaaacaacattattagtgatatattaggccatatttttcattttcttagtacacgtgcacaattatagaacataatacaggaagagggcgatagcaggagcttatttgcaacctttcatagttctcaatatcataagtaaacaggttgggga

SEQ ID NO: 19308 - DNA, 1632 bp, Setaria italica
  Peptide Sequence Number=SeqID_85282
caggtagtttcccaaaaatgtgcagttgtaagattttgtacatgcgagatattcatatttccacctgccctgaatccaagggcaataactacgttggttacactaaaacgcatacaaaaattcaaacccaaaaccaccccaggaaagaaatgaaaataagctaactagagcagtttcatatgaaaagctagtgacatttctccagaaaaaattgaaggaactgtggtaaaatttatcaacgagcggtttaactcgtgaagtggcaagtccaaggtgtaaaaacaagtgtagtgcctaatgtgaagcatgtcgacccaaaaaatctcaagttttgctaaaaggttctggacaatgaattgatccttatgctatctgcgcaagaaacccatggcttggtatacgttgttgagggtaatgtccgctatctcagaagcttttcctgctcctttcaaaagaacattatctaaatagcctggatcagacattatctcctcataacgggcctggataggttgcaaatgctcgatcaaagcatctgtaagggtagtcttgaatgtcccccagttcatatcttggcactcgctaacaacttcctctttagtcttcccagtaataatctggtagatcgagagaagatttctgcattccggcctctctgggttgtcaaactctaagcctgggaatgagtcagttttgcagcgtttgatcttattcacaatcacatcttttgggtcaagaagattgatacgagactgatcagaaggagcagatttggacatcttggagagaccatcagttagggacataacacgagccccagctggaggaataagggcttcaggaaccttaaacagagaaccacctctccctcccaatttcttccactttcttccaccatagagattatttacacgctcagcaatttcacgagttaattccaaatgttgtgtctgatcttcaccaacaggtaccaagtcggactggtacaaaaggatgtcagaagccattagaacaggataagtcaaaagtgccaccccgacattttcatcaccagcgaatgacgcaccgccttgcgtgacttctctttgaactggatcattctgttgagccagccaataggagtagaagaactcaatagccacatcaactcaacatgagcacggacatgagactgtacaaaaattgatgccttggagctgtcaatgccacatgcaagatatattgcagcagtgcttcttgttgctttagatagctctggtgcatcatatggtaaagtaattgcatgcaggtccacaatgaaaaagaatgtctcgtataaatcctgaagtgcaacccaattcttaatagcaccaagataatttccaaggtgaaccattcctgttggctgtacaccagaaactactcttttcttcctcgcaggaggagcaggcgcctcctcggtggggtcggcagccgcttcgaccgcgctgcaattgagacgacggagagggtggatgcgagaagccagcagtcctcgggcgccagcgccactcctcgaggagaggagcggcgggcggtggaggacatgggcgagcagcgcgcggctcatggcgtcgtccccgtgctccgctcccctccggatttggctgcgcg

SEQ ID NO: 19309 - DNA, 248 bp, Setaria italica
  Peptide Sequence Number=SeqID_85283
tcgttccccgtcccggcacgcgccggccatctcgtggagcgtgagcgcgagttgcgcagcctcgcacgcgagccgtcgacggcgccgtttgtttcaccctttaccagcatactccctattccctctcttccccattatctcacagccgtggcagcatatacacatcaaaatgctcttcatctgctctcttcagtcccaacctggaatcgaatcgcctcttccctccgctccaggatggcgaatcaggg

SEQ ID NO: 19310 - DNA, 1340 bp, Setaria italica
  Peptide Sequence Number=SeqID_85284
cgacgggtggaaggcctacgacatgaaccctttcgacctggaccacaaccgcgacggcgtcatccagatgggcctcgccgagaaccaactgtcgctggacctgatcgaggagtggagcctgaaccacccggaggcgtccatctgcacggcgcagggcgcctcccagttccggaggatcgccaacttccaggactaccacggcctgccggagttcagagaggcgatggccaagttcatggggcaggtgaggggcgggaaggtgacgttcgaccccgaccgcgtcgtgatgagcggcggagcaaccggcgcgcaggacacgctcgccttctgcctcgcggaccccggcgacgcctacctcgtgccgacgccgtactacgcagctttcgaccgcgactgttgctggaggtcagggatcaagctgctgccgatcgagtgccacagctccaacggcttcgcgctcaccagggaggcgctcgtgtcggcgtacgagggcgcgcggggccagggcatccgcgtcaagggtatcctcatcaccaacccctccaacccgctgggcacaatcatgggccgcgacacgctggcgatgctcgccgagttcgccacggagcaccgcgtccacctcatctgcgacgagatctacgcggggtccgtgttcgccaagccggacttcgtgagcatcgccgaggtcgtggagcgcgacgtccccgggtgcaaccgcgacctcatccacatcgcctacagcctctccaaggacttcggcctcccggggttccgcgtcggcatcatctactcctacaacgacgctgtcgtggcgtgcgcgcgcaagatgtccagcttcggtctcgtctcctcccagacgcagtacttcctggcgaggatgctctcggacacggacttcatggcccggttcctcgccgagagcaagcggcggctggcggcgcggcacgagcgcttcacctcgggcctccgcgacgtcggcatcggctgcctgcccgggaacgcggggctcttctcgtggatggacctgcggggcatgctgcgggacaagacgcccgaggcggagctggagctgtggcgggtgatcatacacaaggtgaagctgaacgtgtcgcccggcacgtcgttccactgcggcgagcccgggtggttccgcgtctgccacgccaacatggacgacgagacaatggaggtcgcgcttggccgcatccgcagcttcgtgcagcagcagaagcagaaggccaaggccaagagctgggccgcaaggggacgcctccacctcagcctgccgcgccgaggaggtgccgtcgcttcgcacctcgcgctctccagcccaattagaa

SEQ ID NO: 19311 - DNA, 417 bp, Setaria italica
  Peptide Sequence Number=SeqID_85285
tcgcagactgtgcaggcccatcgaatgtctgaaccgtgacgacaggattctccacaaccttggggacggcgcctggattgacacggttgagcactttgcagaggacgagaccgttgcgcagtgccacgcagaactcctcctcggacggcctctccggcagggtctccaccgccgcgggctccatctgccgcagccatcgcgccgcctcgcacctccgtgaagcggcttcctcggccttgcgcagcgccattcccacgtcgtgcgctccggcggccctcatcacgccagcggcggccgtgccgaagtcgatcgcctcgtcgcaccgcctgacctcgccccttgcctcgaggatcgcacagctcgtctccgcgctcgctctggcaacgcgcaacggcagggacgaccggtccgcactcc

SEQ ID NO: 19312 - DNA, 1537 bp, Setaria italica
  Peptide Sequence Number=SeqID_85286
catgattaaatcatactttcgccatgctgacagaccgaacgtgtccttgacaccaaaaggcgatttcaatattgcatttgttacatagcatacaatcgcagggcatcagttcctaccaaaactcggctagtttcaggcttcccgccaatatcttgtgcctagttcatgatggagttccaagcccgaaaaaggttgttaggcaggagcacagtagactggtcacgactgcccgactgctatagaaaccaaccttttggcaatccatgcgtgatgcagcgaacaaggttggtagttagcattccaactttggctttacttgaacagagtatctattgcatactatccgtttagaagaacccttacgcagtattgatgtcatccaaatcagcataccatcaatcaagttgaacgttgatccattcaaattggaaactagacaggttgtacaggaaatgtgttccagaataccaacattgctattgaggctgcagttcaaagctagaccaacagttgagatgccgtctggtataactgatgaccacatgaagtttcccccttagcgaatatcaagtgcccacggatttcttgaggggtgctctcattaatctgagggactaaaaataaccaaggggattgaacatgttttagcattccaaatactccttcagatctagcatcaatgaactattccagtatatcggagaggaattgcattcagaaagtgttgaagcagctatctcagacgaaacaccctccagggcctcagctaaatctgaatcccaaaggcctaacctgcaagcctttctgtacacttcaaaacctgcagctttcagaccttctgagaagaaactatttagtgatgagctttccaagcttatttcttctaataactgcattgcagtatcagaattacggaatatcaaagcagagcatgtcctatccaacagcttgacctcaaaatcttctgagaagacctgatgtaagccaggaaggtaagattttaactccttggcagatttttccctgaagccccacaagaaaatgatattatcagtgctcacagtttttgcggtgtctggctcattagcaaagtcaacatcatcagagtcttcgaccatacagcttggataaaagatgttacagtactcttcaactgcagcacactgctcaccagattgtaactggcactcaggactgattttcaataaattacttagcttagcaaataactttgttattctcaggacgttttgctcattttttgttacactgctggtaacatcttgctgtggtattttaatctccattggcacaaagtattgtctttgtaagtaactgagagcagcttgtatattcttcgcttttctcaagggaccaatttgtctccacaagtggctgatatcaacaacattagagaagaccatttttaaagaacacataaattcatgcatgtttggtggaagaggcgcaacaaatttggagtgcatcattgtcagatcattcaagcaattgtatgatatgattggcttctgtgaag

SEQ ID NO: 19313 - DNA, 644 bp, Setaria italica
  misc_feature (608)..(644): n is a, c, g, or t
  Peptide Sequence Number=SeqID_85287
tttaccttaacttaagttacggttacggtacgtacggaccgacgaaacaacggccgcgcataccccggagtgctcgacggagaccagcaagatggcaagcagcggcgcggcgggcgccggcgccgggccggcgttctcgatgctggagagctggcttctcgacgacggcatgggccacagcgaggtggagctcatggccgatgtggtgccactaggggaccccagtgagttcttttaatcaagtccgcttacaagtacaaccaaaaagcaagttgatcaagtagctcgtagagatgcaagaacacaagaagaaattaatcgccggacgacgggttaggtgactagttaagcagacatgaacagactaaatgtctttgaattctcggcgatttagatcgagttgggtgtcgatctagtctgtttaatccccttttttatttcttttcgctgtttttttctctgatgttagagtttggaactgatcatgtaagcttatactaatgacaggttcctaaatggaccatccatgaggctggcagaaagaaagaagtgtacatcttaaaaaatctaaatatttagatgttatagatgctcttctaaaaaaaaannnnnnnnnnnnnnnnnnnnnnnnnnnnnnnnnnnnn

SEQ ID NO: 19314 - DNA, 1070 bp, Setaria italica
  Peptide Sequence Number=SeqID_85288
gctttattttaactggtcaatatgctcgcatgattatgtagctttgtttaacaatgtagtcttaagattttagttgatatatagttgatgacattaataatagatactctatactaaaacttaaattgaacccaccaaaaattttagaaaaggccaccaagagtatccacaggagccacttgtctgtagaagtttttattctctccctctactcaagccttgtgagtagttataagcaatcagtgctttctatagttttatgcatttcgttcatgtgataatatgaaacaaagaaaacaacaatggcatggccctatacctgcccaaggacttgctgctggcccagtgacccagtactgtgtagcgcatgtgaactgcagcagtgtcccttacctggctacttgcccgtggagtcttgtaaaaccttccatattgtaaaaataggatccgatctgttaagatccaatattaggtccatccttgaacgaaggaatccaatctgatctcatatctctttgccgccactgtattctccatgcctttgccgccacctcctctctctcacactgccggcttcctcttccttccggattcctggataaacctaggccgtgacatatgaagaaaaaaattacctcatagcatccctcttccatgttgcacatgtgtcctcctaggctccttaccatggtgctgcacctcctttacacaccttcagatatttgctgattatgcaaccctgaatactagtatatgtaatatactaaagtgcctggctttagagccctctcgtgtatcgtgaccccatgtgggcccacgtactgctcatgtgggacccatgtgggagctgttcaggtgggacccacgcacactcaggtgggacccacgcactattcaggtgggacccgtgcacattggttggtgggacccacggttcattaagtgggtcccgtgatctaaaaaaaattatgttttttccattatttgaaagaataaaatatatttaattatttccgatatataaaaacaataactaaactttgtacactacgttcacatgtggtagcccc

SEQ ID NO: 19315 - DNA, 1545 bp, Setaria italica
  Peptide Sequence Number=SeqID_85289
aatttctatcaatttgagtatgttaattagactgatagaaattacgcttagtgaacctatcatgtctgcactgggatgagatggcataaacatgttgtaacacaccttaagtaaccttgtgcctcatataactctgaaaaaatcgatccactcccagaaacaactcaggaagacagaagttttggcggctgttcaacagttgcatatatgcatctgtttggaaaatttgaaattctcggtgacaagaaacaacaaaattcatgcagtcccaatgtattaggatcacatgctatttgttgcttatggctggagtacccacatcatggcttcaaccatggaaagacgtccggtgatgagggtaaccgtgccgtcaacacttcacatcctgtctcagtcaccaaaagtgtatgttcaaattgtgcactccgtttaccatctgcagtcactgcagtccaatcatcaggccacagacgatcattccaaactcctgcattgatcattggttcgattgtaaatgtctgcccagctttcatgatgccaacagccttgtttcttgaataatgggggatgtttggggcacagtggaacagttctcctatgccatggccacaatatgatttcaccacagataagcctgacatggacgcatgtctatttatgatttctccaacctctcgaaacctaactccaggtttaactatagcaatagctttctccaagcactcataggtacaacgaacaagctgtttggaagcttcatcaacattgccaacaaaatatgtctcattcaaatcaccatgaacgcctttatagtatacagttacatcaacatttacaatgtcaccatcctcaagtttcctggcatctggaattccatggcaaataacttcattgacagacgtgcaacatgactttgggaagaaatggtaattcaatggagacggatatccacctctagcaattgtctcctcatggacgactctatcaatttcatctgttgtaatccctggttttatcactcgagcagctgcatctaaaacctctcttgcaatccgacatgtttctctcatcctttctatttgctcaggggtcttaatctctactcttttctgcaaatcactatctggttcaatcttgggaattccatcaagtgcccaatcaggcttctcaatttcatctggcaccacacgcgtctttgatattggatatggtctcaatggacctgtccattcaaaacgaggaagctgcaatgaacgtgaccgcccttttttcaaacaatacttccaaccttctggaggctgctgggatgctggtgcatttggctttgggtgaacagatttgtgggagctccacgctgccttaaaacaatcctgtgtgcagaaagcagcgccatcgcgcggcagcttcagttccgcgcacttggggcattgcaggagggcgggcttgccgcagcgagcgcaggagagcgacgactccgaggcccccttctccatcctagctgccggcggcggcggaagctagggttcaggcggcgcgtgcggcgga

SEQ ID NO: 19316 - DNA, 251 bp, Setaria italica
  Peptide Sequence Number=SeqID_85290
cgcgggtagctgcggcctgggtcagacgcggccgcggggtagtggcacctgccctccgggcccccgagccgccgcacgcctgtgctgccgcggccgcgcgcctcgttggccagctcggaggagacatcggcggcgccgaccgtggtgcgcagcgagaggctggaggcggggaacaggagcgcgacgagggcgacgccgaggcagacagaagccgccgcagtagaggaaggcctcgccatgcatggctctag

SEQ ID NO: 19317 - DNA, 390 bp, Setaria italica
  Peptide Sequence Number=SeqID_85291
catgccatcccctcgcatcgcctggtagatcttgctgccgtcgtgaactgcgcggaggaggtcgcgcgcggccccgagtgcgtcggcgagaggcaaggcgtcctggagctggtcctgctggaggaggggcgcaaggaggcggatgcggcgcgcgaggtcaccgcagaggcggcgcatgggcccgcgcggctccgggagcgcggcgatctccgccgccaaacgcgccggcatggcctccgccgcagcagccgtggtgtgggtgatggattggcggcggtgcgggaacgaaatcaatcaatctccaaccgagatccgatccgatgcaactgaattgacgacgaacgcggtggccaccgccgccgccctcaccaacctcccctcccctcccct

SEQ ID NO: 19318 - DNA, 548 bp, Setaria italica
  Peptide Sequence Number=SeqID_85292
aaaattattagctcatcattatcgttccaccgagatcaatgtaattccacatcatcaaggttcaagagcattcgagaataacaaaactttgcatcacattcatgtcagagcaaaactgaccaccaacacagtattcgtcggcaaatgtcctaatgtcattgctcatgctagaggtaaggcttcagacatggtagcccgtgagagtaaaccctctaccgacgatctcaccaaggcaggaccaagcatacaactcgatgccaaacaacgccgcgacgccagcatcctcaaccttcagactgcttctgtttttccacaagagcttcgcgctgtcaagctccttccagaatgactcgtaacgggcaggaaggctcgcgaggcgggtgtagaagagctgcttggagagctcctggcacttctggatggtgggcgggtcgacgacgtagtgcttgttcttctccatgagcgtcttgtggtacgcgcagccgtgcttggccgcgaacctcgtcgcctcgcacgccttggactgcagctgcgccagcttcgacccc

SEQ ID NO: 19319 - DNA, 754 bp, Setaria italica
  misc_feature (13)..(13): n is a, c, g, or t
  Peptide Sequence Number=SeqID_85293
ttttttttttttntttttttttgggggcagaaagaaagacacaaatggctcagcttgcaaggtactgcagcagatgcaattgacaaagaattacaagagcaccaaaatggacaatcgagcgagcaaattattgaggcaatgttgcaacgatgtgcccgtccttgctgacattcagcactagagaaactctttttaagaaacaaaattgtgaaagaaggcaggtatcatcgtcgtttcgacaagcatcagctagaagtatagatcataaagcaggtcttaaccagggaaatcattagaccttatagccggttatggtgaaccctctgccaacaatctcgcctacgcagaaccatgcataaagctcaactccaaataaagtcgcaatcccgaggtcctcgaccttgagatccttcctgttcttccatacctgcttgacaccatcaagctccttccagaatgcttcatagcggcctggtagacttgcgaggcgggtgtagaagagctgcttggagagctcctggcacttctcgacggtggggggctgcacgacgtactgcttgttcttctccatgagctccttgtagtaggagccgccgtgcttcgaggcgagctccgccgcacgcgccgcctgcgcgcgcagctgcgccagcctcgccgccatcgccgccggtcctaaacccttggtgaagcgccggggagaggtgcgggcgcgaggagatcgaggaggaggaggacggcgggcgagatggggagg

SEQ ID NO: 19320 - DNA, 535 bp, Setaria italica
  Peptide Sequence Number=SeqID_85294
gggccagataaaaaaacagtagcagacagatccatgcattcctcttggaagcatcttaaggacccagctttctcatctcgaggtgcctcacaccatagaaaaccaggtccggtgttaacatttttgtccagttccttgatgatgatgtcaacaagtttttccaaaatctctggaatagccctagcaagcttcagctgaacttttgcataggtgatgaacaaactcttcaaagcctgatcaagagttgccggccaacaatgaaatataaactcttgaactacatgatgaatctccacagatttgtatcccaagtttggcccatccttcagtaaaaaggtgttaatgcattccataagtttgcgggtcagctttccctcctcctctctaatatgtgaaaagattgcacaaaatccattaataacctcctccctcatgatatcaggttaatcacccggtgggttttcaagtagaacgtgaagtgttaatgtacaacggaaggattcatccttggagctcgcctggttgctgaattttg

SEQ ID NO: 19321 - DNA, 373 bp, Setaria italica
  Peptide Sequence Number=SeqID_85295
cgcggtgtcgtcttcccacttccctcccaccgcaaagctctcgcctgtctcctcgcctccctcccaactcaaaaacctctcagcccgacgtccccggctccgctcgcctcgcgccgatcaccaaagccatcacgtcccgctgcctctctctctccttctggaggcttccgtcggtggttttctccaagcgcctcgtggctcatctctcgcccgtcgagcgagcccgggagggccatcgcgcgccctgcgcgcctgggcttctcgtagcggcgacaggaccggcgaggttttccgttctcccgcgcgcgaggttttgaaacgccgcacgccacaaaatagctctgtgctggaatttgggggaattccagggcat

SEQ ID NO: 19322 - DNA, 645 bp, Setaria italica
  Peptide Sequence Number=SeqID_85296
aacaaacaagaagacgaatagttgcagttctagtatgcccccaagtggaagggtacctgttgtattgcagttattaacgtgcttagtcgtggtgtagatttctgaaggctttgtgccctgtgacgtcgataataagcaggatgaacaaaggactgatccttggttcaactcttctccattagggatgaatggtttccgttcactagtgttttgctccatgatgtattcaagcttggaaccatttgcatcaactgaagaggtagagctctctaacttaggcgggatttgcaagtctccgtgttgattgctggtaattaccacatgaattttttcagctgctatgtttattgctttcttaggaccctgacttgtgccctctaaatcctggcatccacctggggattgagctaaattctcaatgggttgatgcactttagtaccattggcatgcctttttgctgactcaacaagacttgactgcagagaagtagatgatccgactgctcctttcatacctgttgttttgccgtcatatggatccccaaatgttgagtcgcttgatgataatgatgcacgatgtcctcggtttgtctctggcgatggctgagattcctcttgttcatcggctagatctaccagagaagt

SEQ ID NO: 19323 - DNA, 658 bp, Setaria italica
  misc_feature (13)..(13): n is a, c, g, or t
  misc_feature (571)..(571): n is a, c, g, or t
  misc_feature (619)..(619): n is a, c, g, or t
  Peptide Sequence Number=SeqID_85297
gcttgaagctatnaggtgaccgtgagacaatgcaaccgatcatctctgcatccaacaaagatgcgtccaccaatcatcaaggtgatgaaaatatgtcgcctggaagatcaatggacgccaatccttggaccaattgctcatatttaacacctctgccagcttgctcctgcttagcatcagctctaatcctgatgacatggaccttcccagaactcgtgcagacacaagcaaatctctcagatggtccgaatgactctgatgttaacagctcatcaacaaaagcagatgcagtaattggatccccaacattgtatacccaaagaagggcaccagaagcaatatcgaaagagtataaactgccatcacggtaaggtataagcacctgatatgggagagtgggtgacaaacatgcaccagcaaaaataggaccaccaacagctgccttccaaataacagtgccttgtgagttcaatgcgataactaggccattcaccaagcaacaaataactgcatgttgcaagtgtagtaatcagcacaaaactgtcagtctgcacatagaagaaaaaaaatntatagcacactctatgttggctcagattggcatgaggtatgaaaaagntggcatatatattcagatcttgatataatgtcagaaaag

SEQ ID NO: 19324 - DNA, 238 bp, Setaria italica
  Peptide Sequence Number=SeqID_85298
caacaggacaggcaatcaagcacatcagtaattagggaggaaatgtcaaagcaagtacctgcagtgcgtctggtcccttgaggtcctcctccaacatactggaaatttcaaagccagagggcgtctcgaacagcactaagaacagcgctaagatcatggcgagctgcgaacacaagccaggcgaacttaagcaagcaggattacaagaaatatcgtgaggcgatcaattgcccattca

SEQ ID NO: 19325 - DNA, 248 bp, Setaria italica
  Peptide Sequence Number=SeqID_85299
aggggcagtctcatagagattggcatgcctagtgatgctcacacccgagtttttcatcagctgcaatgccctgtcgaatgtactgactctatcacccacattacttcccatagcaatcacaatctcttggtcagctgaacatctctcaagcgaacatttcgtaaacgaacgagccttgaatggaatagcatgtctagaagctctgaaaatgaatgtgctgggagcagccctccaaggtagttctttgc

SEQ ID NO: 19326 - DNA, 1102 bp, Setaria italica
  Peptide Sequence Number=SeqID_85300
cagaacaggaaccaatctctcaagttcttcgtttggagataatctctttgcaaagggcctggtagattgagcaccaatatcaattatatctgcaccttctgagattaataacttagcctgagaaatggcagccttcacttgttgaaacttgcctccatcactaaagctgtctggtgttagattaaggacccccatgacgagggttctctcataccaatcccacaaacgattcccaacaggcaatacccttttgatacaatctgttccaattatagattcacctccaagtttattccataatttaaagaaaccaccactgcactttgaaagagagtgccaacttgtttcgataccatcatcaccggatgcacctaacaggtctacaagaggtgctaaaacaaatggtctctcatggatgcgctcatgcggcacaattagagtctcactattgatctcgtagttaccgtatagaagtatgtctaaatcaataggccttgggccgtaccttattccactagtgcggcctatatccttctcaatttcctttagccttttaagaagctcatgcgcactgagcctagttgtgccccgaatggcagagttaagaaaccgtggctgatcggtcacataagcaggggcagtctcatagagattggcatgcctagtgatgctcacacccgagtttttcatcagctgcaatgccctgtcaaatgtgctgactctatcacccacattacttcccatagcaatcacgatctcttggtcagctgaacatctctcaagcgaacatttcgtaaacaaacgagccttgaatggaatagcatgcctagaagctctgtttgaagatcttgaaggataaacaagatcagacactgaaaatgaatgtgctgggagcagccctccaaggtagttctttgcaacaggatacatcttcttaagtgactccttagcatggaggagcatcgttgaaacaatgaagacgaacaaagcaagcgcttgaaatcaatttgtagtcttgtaagtctttcaccagaccatcaatccgtcactattttgtgttggaacaaggctgatatattcattttatttcttctaatgtatc

SEQ ID NO: 19327 - DNA, 3434 bp, Setaria italica
  Peptide Sequence Number=SeqID_85301
tgtagtaaacttcgagaaactcaagctcaccaatttcttcagaggaagccatggaaagtgcaatcggcagggtggctcctctggaagccgtcctgttcgacatcgacgggacgatggggatctccgaccccttccaccaccgggccacctccgagatgctcctcaaggtcggttacaacaacggcgtccccatcacgccggagttcggcatgaagcacatggccggccggagcaacgagcagatcggccgcttcctcttcccggactgggaccaggccaggctggacgccttcttcgccgagaaggaggagctcttcgccaggtacgccggcgaggggctcaaggagatcgccggcctcaccgcgctctgccactgggccgacgagcgcaggctcaagcgcgcggcggtgaccaacgcgcccagggccaacgccgagctcatgatctccatcctcggcctctcagacttcttcaagctcatcgtctccgccgaggactgcgggcgctccaagccctacccggacccctacctcagggcgctccacctgctcggcgcctcgccggaccacaccatcgtctttgaggactccaccgtcggggtgcaggccggtgttgcggccaggatgccggtgatcgccatcgccgacgagagccgggagggcaagctcaccgccgtcggcgcgagcctagtcatcagggactacacagatccaaagctctggtccgaattggacaaactggacaccaccaaacctttttttgcagaggccaatggagcataatatacatagcaatagctgtgcaacacactgaaatatttttccttgccatatttcatttcacttcacgcacaacacattcatgtgtgatgatgtatcttaaagcaagaccaaaattgccggtacaaataagcaagaccaaatttgattgcgagggatctcgcaagacctagctctctcgttctctaagttaacaacttcagaaatgggtatgcttgtggcggtgcaagaggcctgcagccatcttcgtgtatagtgacacggccgaagaaccacggaaagcatggtacatgcatacatttttcacaaggttctcatacacacaccaagacagacatggcgatccatcagtttgatgagtatctttttgacaatgcctcgtaatatttaattagctgttcagatactgatggcttaacctttgatagagcacgttcaaagtgtgagagctcaatcaaacaagaggaactcatggatgatgtcccgtgctcaacaaagtccagtctctcttccaatgctgccatcgctgcttcattgaccagtgatgcaaggtcggcaccagtgaggttgttgcactcctcacggcgtgctagtgcttccaaatcgacatcagatgagatgggcttgcttcgagcatgcgcttttaatattgagactctctcgtccgcaccaggtaaaggtacataatgttttttcccaaatctaccaggccgcagaacagcatcatctatcacatcaattctgtttgtagctcctatcacatagacaccttggcgttgatcggcaccatcaagttcaataagtaactgatttaggagacgctcaacaacccatcctccctctttccctctctttgttgtcaaagcatctacctcatcaaaaaataggatgcacggggaatttgtgcgtgcacgagtgaatattttcctcacttctgattcactctccccgacatacttgttcagtagctcaggccccttgatatgaataaaattagcccctgcctcatgtgccactgcttttgctattagtgttttcccgcaacctggaggtccaaacagcaggaagccagcttgcatattcactccaaatacctcgtaatcttcagggtgcttgatacatcggataatgcagcggtcaaactctttccttaatgaattaagacctccaacatcatcccatgtgacatcagggacagatgaaaatccttctcttctcaaggatggttgaaccatttttgttgcttcctcaaagtcgtacattgtaatatgtaggccctccacctcaccagcatcccaaggttgtctccaccagtcatgcttgctatttccattgtgttcatgataatactgagctcttcttttatcaattattctcttcattgctagattccctgctttatccactagtgccttcaagtcagcaccaacaaaacctggtgtggccctagctattttaaacaagtcaaaattgccttcaagtcgaagattctgaataagcatcttcagtatctgttttcgtgcattctcatctggaacaccaagggatatctctcgatcaaaccttcctggccgtcgcagagcttggtccacagcatcaggcctatttgtggctccaatgacaattacataaccaggtttcttttcagatgattctgcatccaaatcaccaccaccaggtccaatattctggtggaattgatccatgcatgtcatcaattgagtaactatccgccgctccatctctcgttgcagattctccctcttggatgcaattgcatctatctcatcaatgaatacaatcgagggagcagtcctgtaggccttctgaaacaatcccctgatattttcctcagaagctccagataccccagatacgacctccggggccgatatcttgtagaatggtacaccagtctcattggcaatggcatgtgcaagggtggtcttcccacaaccaggcggtccgtgcagcagcagcccagccacaggcctaaccccaaggcgctgcggcagctccggatggcacaggggcacaacaacttccatcatcagctcctctatcaccgcctccatcccgccgagatcggcgaacctcggccccttgtcccctcggacgattccttcagaggccatggcctccggcttagcatctccaccggcgccaccatcggacgtgatgaggcggcgcgccttctcagcggtctcctcaatctccagctgctggttagaggcggggttccgtttggccgtctgcgcggcgtagttggagcggatcacggacttggtgacgtcgtaggcaggggctggcggcgggtgggcgacctcgtcggagacggatgtggaggaggaggtgctggcgtgggcgtcgtggcggtggcggtggcggtggcggtggcgggaggcggaggagtcttctgcgtcgtcgtagtcgccgccgtcggaacctgagggggaggagggggagggtatcgaggagaggacgcggcggactaaggcagtgaaggggtccggcttctggcggcgtagctcggggtagtggacgcggagcgtgctggcgacgtcctcggccgaggcgccggcgccggcgaggccgccattcaatatgcggcggcggatcctcttctcgaagttgccagctccgccgggacgcggg

SEQ ID NO: 19328 - DNA, 374 bp, Setaria italica
  Peptide Sequence Number=SeqID_85302
gtcaaagtaagtatggtggagcatgcagatgcatcggttgacaaatcggtgctggagaagcttgtgcctcctagaaatctccgacaccttggtcttgatggttacatgagcgtagacttctctaggtggatgctggaccttccttcctacccacctcatcttaccaccatcgttcttttgaatctgaaagggtgcagccacctccctccacttgggcgcctgccaaatttgagagcattgtgcttggctagtatgcccaatctcaaaagggaattttatggggaccacggaagttgctggaagctaagaatgattcttttggagggaatggacaacttggcagggtggtggacaacgagaacgtctaatgaaga

SEQ ID NO: 19329 - DNA, 800 bp, Setaria italica
  Peptide Sequence Number=SeqID_85303
atttgactgattttacatccagccacttagacctagtacaaccaaacaattcaaacgggtctgtttttggggagcccttgtacgaatcagccacttgggtaacagctgcatctagggattatttccactctcttcacgactggtaaccttggtgctgacaaagggatatatacacttccctcaaccaaggaagaccatttacctgagcactgtgcacaaaaatgatcttccgttaggatatgttatcctttgccacaacattaaacccgctgctatcattagcccaaacttctcgagtgacagagtttcaacggcacaaaaccccattcaagttgttttttttttcagtggcacaaaacccgatccctgtttcttctgcacaggaagccatcatacccaaaggagccaccattacacccacctctgcatcttatatttttcataccacccagccaggagatgattgaaatcttacgagctgcttttgtagtttgaacttctattcgagctacgctgctctctcctcacattttctcttggcaaccttgccccttcaccacatttcgatacctcctgcaaagcttgcagcgaattggcagcaaagttctctaaagcttcaagaaccagcctcagatttacgtgcaagttacttgcctcaacacaatgggcctcatacaactgtacggtccgaggcacatgcagtctctgccggcttggtactagcgccagtttcttgtttagttcctcggcctccttattaatctcctgcgtcttcctctccaaaatcttgagccattttt

SEQ ID NO: 19330 - DNA, 680 bp, Setaria italica
  Peptide Sequence Number=SeqID_85304
gcagtttgatgatctgggcatcactaagaaaatggtggctccagtcattacatcaagtccgcaattgttgctgagaaaacctaacgagtttctgcagattgttttctttttcagggaaatgggttttgataaggaaacagtaggaaagattttgtgtcgttctcctgaaatatttgcttcaaatgtggaaagtaccctcaagaagaaaattgactttcttattgactttggtgtttccaaacatcatcttcctcgcatcattaggaagtatcctgagattttattgttggacataaatgatacactgctccccagaatgaactacctattggaggcgggtttgtctaagaaagacgtgcgctcaatgatctttagattttccccacttctaggttacagtatcgagcttgttatgaaaccaaagcttgagtttctgttaagaatcatgaaaaagccacttaaagcagttgtagaatatccaaggtacttcagttattcacttgaagggaggataaagccacggttttgggtactgcagagtagaaacatagactgtagtctgacagacatgcttgcaaaaaacgacgaactttttgctgaagagtacttgggaacaggaggattacttcagaaacctctacaatcaagcaaagtcagttgatttctagactaaaatgaag

SEQ ID NO: 19331 - DNA, 484 bp, Setaria italica
  Peptide Sequence Number=SeqID_85305
agacatttttatattgcaaacttagtgtacctcttaattgtgccatggtctagagttttctgcaagctgcaagcttttggtatcattattgctaatgttgtttccctacgtggatggttgtgccttttagtgatactttttgcaatcttggatgctagttattcattttggtcggtagcataatccacttgtacaactcctagtacttatttctgattcaaccactgccgtatgtttttctaaagtttaaccttgtgattttcgtttgtcaagtatgttaacaagatcttttttgtaagtgcttgatacatgtaactttaatttcaacgtttacagaatgaactacctattggaggcgggtttgtctaagaaagacgtgcgctcaatgatctttagattttccccacttctaggttacagtatcgagcttgttatgaaaccaaagcttgagtttctgttaagaatcatgaaaagccactttaaa

SEQ ID NO: 19332 - DNA, 236 bp, Setaria italica
  Peptide Sequence Number=SeqID_85306
aaaggaagaaactaatgcaacaacgtattgttgtgtatgagctagtatcctggagcaatgaattctatttcattctattgatccaaccaagcagtccacgggatagtgttgtaactggttaaccagtccaggtactaatatccaatcgtcctgacgtcctcatcaaatgtaggcaactgtgttccacgcaaataatgctacagcccaacaaaggtcaatgacaaattgataactac

SEQ ID NO: 19333 - DNA, 776 bp, Setaria italica
  Peptide Sequence Number=SeqID_85307
gttctgcgacgagtccaagtagcacccaccatccctccctaagacactaaccctacctacttccttccccttcttcttctccgcgtgatccagctgcttggtcccgcaggtgcaagcccatggatgccgaggattgtgaaccctacaccgacgtcttcttcatcaagttctcacaggtcagcaacgccaggtttgcaaagaggaagctcgatgagtctgtatttcttggcaacaggctccaggtgacctatgcacctcattttgagagccttcttgataccaaggagaaactggaagttaggagaaaagaagtccttggccgaataaaatcgtctgctggcagacctgaagggacttctcagtattctctagctcagggatcatctagtggaaaccaccatcagatgaatttcaataagagggaatatttgaagacaaatcatgcatctcatattgaagatcctcgtttcagtcatgtgccctctaacaaggattattttccatctgagtcaatgaacgcaactgtaaagctagtcagagagaagcttgataagatacaatctggtgatgataactccaatgctgcagctgcatccaagaaaccaagggtagataaccgcaggcgaatttgatataactggaaactgcagaacacccattgaaagttttggcttatttgttactctttatgtttgtccattttatatctcatttactattaggctgttagctatgtacttacaggagtgttgtattagtatatggttagtgtaaca

SEQ ID NO: 19334 - DNA, 402 bp, Setaria italica
  Peptide Sequence Number=SeqID_85308
ggaaacagaacataatttactggagaagcctcagtataatttgaatcgtatggtgatgacagtgatgctagccttgatctttggagcattgttctggaggcgtgcaaagatattaaacaatgagcaggatttattcaatgttcttggtgcaatgtatatgggggttatacaacttggtgtttataatgaacattcgattatatcattcagtacaacagagcgcattgtaatgtatcgtgagaaatttgcagggatgtactcttcctgggcgtactcattagcacaggctgcaatagagatcccttatgtcttcatccaagcaatactctatacattcatcacctacccgacaattggctattattggacagcatacaaactcttatggttcttctacaccta

SEQ ID NO: 19335 - DNA, 615 bp, Setaria italica
  Peptide Sequence Number=SeqID_85309
aaacaattcatcagcctagcactgacattttcgaggcatttgatgagcttattttaatgaaaaatggaggaaaaataatctacaacgggccaataggaaagcaatcttgcaaagtgattgagtactttgagaaaatttccggggtcccaaaggtagagagaaatagaaatcctgctacttggatgatggacataacatcgccatccatggaggttcaattcaatatagactttgcaagtacctaccaagaatcaccattgcatagggacaggcaagagcttgttaagcaactaagtagtccactacaaaattcagacggcctgtatttcacctatcgcttcccgcaaaatggatgggggcaatttaaagcttgtttatggaaacagaacataatttactggagaagccctcagtataatttgaatcgtatggtgatgacagtgatgctagccttgatctttggagcattgttctggaggcgtgcaaagatattaaacaatgagcaggatttattcaatgttcttggtgcaatgtatatgggggttatacaacttggtgtttataatgaacaattacgaattaataatacaattacaaagtaaacaaacaaagaaa

SEQ ID NO: 19336 - DNA, 400 bp, Setaria italica
  Peptide Sequence Number=SeqID_85310
taatctcaaaacaatgcctaaacaaaattactagggcttataaacggacaacgtatatcttgggcaccaccaaggatggggtggctcttctaatggcaggagcacatgggctccgccacggcgtggagggagtacatgatgatgaggaagtagacgacgagcgagacgaagccggagatgagcgcccccgccacgtggccgcagtaggcctgcacctgcgcgcagatgggcagccacccggcgtgcgcgttgccgttcttccccacgtccgatatcgctccggtggcagccaccgcgcctgtgagaagcatccccacgatcacgtcggtcaggagcactagtctggagacggtgctccctggccgcacgaggaggacgagcaggctgtaggcggaagcca

SEQ ID NO: 19337 - DNA, 283 bp, Setaria italica
  Peptide Sequence Number=SeqID_85311
ggcttatgaagttgacaaaactccttcatatttgatctaattcatgaaaggcctattatttttggtgaaatcatctaggattgaacgaattctttgctgtgactctaagaaatgagatccgaaaccctttcttctcaccataccagtaggttgtggatggtttgtgtgctgtgtggttcacccaccccccactaatccgacctaaccacccgtagttcaattaggttcttcagcgcacaacatcaatccccttcagttttaagaaggatcaagatcttcgtcc

SEQ ID NO: 19338 - DNA, 352 bp, Setaria italica
  Peptide Sequence Number=SeqID_85312
ttcttcagttccctgctctttctacgaatcagtaccactaagacgatttgcagcagcacggcaagcaatataacccctattcctatccctggaataactgtaatccggtaatgctgctgacgtttctgtggaagactcttgatctttggagctggaggagaatcaacagtgacatttggagaggatgctggagtagatgtgacagaagatggtcctggaaaggtggtgattccttggacaccaaagaagcaagtgacaatgtcatcgtatgaaagaataccctcttgagtcgcaagcgttacaaaaactgcattccggcacacactcagggcaacattatcatctgaaccga

SEQ ID NO: 19339 - DNA, 1815 bp, Setaria italica
  Peptide Sequence Number=SeqID_85313
ttaggttaaattaattagtcttgagggggagcggcggatacggtgggtggcctcggtccactttcctcatccccttccttccccgcagcagccgccgccgccgccggcgagaggaaccctagatcccaactccatggatcccaaccctagatccccttccttcctgtgggctcccgcccgcccctcctggctaatcctcgaccgcttcatgcaccgcaccgaccgggacgtggaggacgaagcggacggcacagagtcggagatctcctacacctgcaccgacaggcccatccgcgcctccatccgggtcgccgactctcccgcggtgtcccgcctgtacctcgactggccgagcaggccggagttcgaaggccgcctgcgggaggcatgcgtgatcgccgccgacaaccactccatcctcttcagggctatcgtgcccctggaggatccaatgacctgcaaggacaccgccagcttccccatcgacatgttcgtctactcggccttctcgtcgcctccgtcgctccatcggcttcgcacttgtttcatcggtggcgtcagcacccccgatgtggacatttactacaagccgtaccagcgcttgcagcagagaatcatggcggaggaccaaatcggcctcctgtgccacggcagcgaaggcgggttcacggtcgtggatttcaccaacttggacccggaaggcgagctctgcctgctgcaccaccctgcacttcctgctcctgcctcgcacaagaacactgaagaagaagaagcagactggatgattaagaaggtgcgggtacccccgggccccaattttcgccgttggatcactgacgccatcatccccctccatggacgcttcttgtgcttggttgacaactaccagggcatacttgttgttgacgtcctccgtgccagcgtcaagagcaccacaaatcagctgctccattacatcccgctgcctgacgaagctttgcaatctgaccgccgcccacatcccgatggagactgccctgacagagctcgatgtgtctgcgtcactgctgatttcacgctcaaactcgtctgcgttaccacccgtaaagccaaccgagcgcgctctcctttcacaataagatcatggacattgcctaacttctaccgaagtgggcaatggtacagaggtcacaccatggaggcagccgagttctggggtctttacaatggccagagccttccacgggtgaagccttggtatcctctggttagcttggtaaatccaaatgaattctgcttcctgttgaaggaggaccacaccacttactggataattgaagtcgacatggggaacaagatgctcaagttatccgccatctatatcaatgaagaggaagaagggtgcaccactgacgggcctagggctcgcaggatcatctttgatggacactccttcatccctagcggactctccgattacctgggcatggatgccatcaaaagtcgggaactaagtgaaatgatgcagaaggcaaagcagcgcagggtggcgcaaaagaagagtcagttggaagtggagcaagcataatcaaaggcagccaaatgccgtgcttgagcattgcttggtggtgacagtcgaggaagtgatctgctgccggactgattgaagacacaaactatcgtcttacaattatttcgagtagtatattattgccagtggcttgtgtttggtgtgatcggctttgaattatggtggtgcttgctgtttaagaactactaatttatcagctgtagcatgtgagcgaccagttggctatggttgtcttccaagaaaaa

SEQ ID NO: 19340 - DNA, 328 bp, Setaria italica
  Peptide Sequence Number=SeqID_85314
ctatcctcgacggctctgcgtcctcgccccgccctgctccgccgccgcttctcaatcgcatcgccgcccttccgcgcctccatcagatcgaggtgctatttcggtatttccaccgcagctgctcttctttctctccctctcgtcggcggctcggcgccgtcgccgtcctcagcgccccacctggaccggcgtggagcagagggacccaacccgtgcatgcgttgattccatctctgagtaagaagattgattaagatggctgcgcggagcacttccatggcctccgaggatgactatgagactagaaacaaaagagcaagtcgctgac

SEQ ID NO: 19341 - DNA, 445 bp, Setaria italica
  misc_feature (412)..(445): n is a, c, g, or t
  Peptide Sequence Number=SeqID_85315
aaaacaaaggactgctgcctcaccggattctagcggtgaaccatcttcctctggaacaatgaaaacagaaatctcctaagcttcgtaaattatccagctctgatctccggctgtttcttgtgcaccgagaagaaagtgatgttcagatgtgaggcctacttttatcataggaatgtaaatatgttaatacttaatagtcgcatcgctacctagattttgtttttgtgacaatgcagaaggaccatttggtcatcgtcatgcccttgctgttctggagctttgtcttctgtcgtgacagtggtagatgatgtttgtgatgagtattcgtacccatcttcatgtttgaattcgtttatattcaggcaacagttacgtaaatgctgctgtattttcgcaaaaacgcaaatgctgnnnnnnnnnnnnnnnnnnnnnnnnnnnnnnnnnn

SEQ ID NO: 19342 - DNA, 1341 bp, Setaria italica
  Peptide Sequence Number=SeqID_85316
tacagctactttccttagaaaaaccctgaaatgatgaccttgatcacatgacagggcaaaagagggttatacttccttgaaaacatgcttgtggcaccctgtctattaacttaagcgtcttatgcatttaaacttaagtgggaggactcaaataaaaagggtggtggtagtgtcatatttgtgtgtcttggcttacaggctatttgatacttaataagttcctcagcttgtagggcataaggtgaggtgcatgcctttagggtctgctcatcagtgactgaatcagttgtacacggcatgatggtttggatgttccaaactgcacagatgtttagcacaatggctggggtatacagtaacagtttgtgattgatatgcaatctgtttgggaaaaaataagattcgattccatgctgttttcttttttctataacgctgttctgttcttgaagctatgtgtccataaggttcatatgatgctaacttacatcattttctctctgtatcaactctcacgcctcgcgtctccgctccgccgtcgccggatcggccaccgccctccctgcggtttcaactgttcaccgaccaccgtcctccacgcctccatccgatcgaggcggtattccaccgtagctgctcccctctttcttcctctcgtcggcgccgtcgtggagcaggatccgatccgtgcccgcgttgattccatctcttgtcgagtgagaagatagattaagaatggctgcagggagcagttccatggcctccgaggatgactatgagactgaacaaaagaagcaagctgctgcagatgttcttttccactattcacagtttgttatggtctgcattggtgaggatgttcgccctactgatctcaggttacatcttatgaaggaagtttcaggaatgcccacttctctaaaggagcctcaacaggctgctgcctcaccagattctagtggtgaaccatcgtcctctggaacaatgaaaaccgaaatctcctaaattgcccagctctgatctcctgctgtttcttgtgcacggagaagaaagtaatgttcagatgacgagccctacttgtataataggaatgtacatatgttagcatcgcatggttacctatagttttttcttttgacaacgcataaggaaaacattggtcatcgccatgccctgctgttctgctgctttatcttctgtcgtgacaatctggtagtggtagatgatgtttgtgatagtatttgtacccatcttcatgtttgaattcatttttattcaaggcaacaatcgtgttgctgttgtatttattttttattagaaacgtaaatgctgtgatataaa

SEQ ID NO: 19343 - DNA, 254 bp, Setaria italica
  Peptide Sequence Number=SeqID_85317
ctacacctctcgcccatccaatccattccaccccagcgagagactgcaaaaactccaaagcagctgagcaatgtcacaggccaaggaggagagaagcgccacaaacagctcgcccgaaagccatggtactgatctcatatccaaacttccaatgagagagactccgtcagagccacaaattctgtacaagaacttctggtttcgacggatttttcttgagaggattatgctcctggaggcgaccttcaaggctc

SEQ ID NO: 19344 - DNA, 420 bp, Setaria italica
  Peptide Sequence Number=SeqID_85318
atgccttctggaatggaaggcattctcaattcaggttcagtaaaggtgattattcaccgacctattcaagggaaaaatagcagaaacattatgttccgaagcaaggaatgtgatagcagacactcttcttctacatggttatggagtgcactagagcaattaggtgctttggtctatttccaagaagacattccaaggcagagtacttgaggcaaagctcgttaccaggatgtaaaggcaggagtgggaaaaaatggctggattggtagttgtaacttgtaacatgtggtccaatgttgcaatcccccctttccccttttttttttttttttgtctgtgtaacactacaaagcgatgtaaaaggctgagaggtcacttcatcgatggaaaattaaggtctatgtgaattctgtcattttg

SEQ ID NO: 19345 - DNA, 286 bp, Setaria italica
  Peptide Sequence Number=SeqID_85319
tctttttctgactttggccttgcgccggcggtcattggggaggcctacatagcggtgctgtcccacttcggcaactcgcaactcctccgctaccaccggcccttgcctacccgtcgtctggactctggagcggagtagagcagataacggcaagtcggcaaccacaagcggtgcgagcaagagatcgagctgatcgagttcttgcacgagcttacttcgaggtaggagtattcaccatctactctctggtacggtctctcctgttggctcgttctagtttttctta

SEQ ID NO: 19346 - DNA, 2847 bp, Setaria italica
  Peptide Sequence Number=SeqID_85320
tttttcattcacaaacttttgcaagtaatgcactaatcatactgacacacatgacatatttacagaaactttcagattacagtactagtttgtacaaaacattatctaaacttctgcatatggacaagctttgcagaggctatacctccaaattattttataagcctgctagttgcctagtattcactagccaggcagtctgaggacctaataagcttcccccatgagctgctacagggtgcttagaggccctgatgttctgattattactagtatatcttactaagaaaaagccggttgtatttacttatcattcttgttctttgccctcccagtcgtgcagctaggatcattgtcgatgagcatgttcacgacttctctcattgtcggccgttcagatggaagctgagcagtacaaagaatagcaatattcaaggcctttatcatgtaatctgatgcgccgttgcttacttttggatcaacaacagctgctgggttttgctcagtcaaatgagacgaaacccaggagacaatgtccatttcaccgtcaaactgttgatcagttgggctacgcccagtaagcaactctagcagtacgatgccaaagctgtagacatcactcttctctgtcgcctttagagaatacgcaagttcaggagccatatagccatgggtaccagcaaagcagctaagtggtgaaccttccaccaatttagcaataccgaaatctgcaagcttagcttcatactcctcatccagaagtatgttggtcgactttatgtcccgatgaattatggccggggagcaatcatggtgaaggtacatgatgcccttcgcaacccctacagcaatccggcaccgcttgtcccaatcaagctcaggttgtccagctttgaactcacggcgaatagcatcatacaggttaccattcaccacatactcatagaccagaaaacttgatgctccaccagtcaaaaatgcattgagtttcagaatgttccgatggcgtatcttcccaagggtatttatctcactcttcaagaccttggcatcatcacccttccacaactccttcacagcaacagttccccttcccttgttcaattctagcctgtaaactttgccggtgcctccacagccaatcaaattctctccatccaagctgcatatttcctcagggttaagctctggaggatggaaggtctcaagaacccacttcaagtcagtgctgccgccactctcaatgtccccttttctattgaactcttcaagcttgtagttttcatagctcagacatgccaacccagacaggagaacaaccaaagatgtcactgtgaccagcacaagaaaaagacgtcttgttaagaagttgtgacggttgtcagaccattgacaaggtcttaaattggtgacgctttgcctccactcttctgaagtgtctgcaacacaaaggccaacattttcagagaatgcatcatctccagctatcattaagaactgcggagggactgggccggataattcattatgagagaaatcaatatcactcagcttcagtgactgcagaccttcaggaatgttaccagagatcatgttatgggatatattgagtgaattcagagtgacgagggagaccagtgtgtttggaatgcctccagtcaaagaattctctgcaagattcaggtcaaccatgctactgcacataccaatatctggtggtattggcccttccagtacattatgttccaaatgcaggtaagtcagctgcttgagatttccaatctgtttaggaatttggccagagaatctgttgtttgaagcaaccaacttctgcagctgggagagccttcccagctctactggaagctccccaatgaagttgttgttttgaacatacagctggttcagagtaactgaaaggcctatatcagaagatatgtccccaataaatccattatcagcaacatcaattatcacagcattaggcaatccccataagccaggaggaatactcccactgaattgattttgacttattctgaacctctgaagtgtcttgcaggaagaataagagccaggaaattcacctgaaaagttgtttgtcaaagccagtaagaactgaagcttgttgttttggcacaagaatcttggaaattcgccagaaaaataattctctgatatgtctattgtgttgagtggtgagaaccggccaaggttggcagggaactttcctgagaactgattttcataggttgagaatgactcaagaaattgcaggttccccagcccttcaggaagttcaccaaagaagttattgtggtatatatgaaatatcctcagcttcttcaggccaccaatctccttaggcagcatgccagtcagctgattgcgagacacatcaaattcagataacaaggttagagttgcaagctcttgaggaatttcaccagtcaagttgttttggtagagctcaatcttccataggttcctcattttggatattgcctttggaaatacaccggtaatctgattgcgtgagaagtccagtgtcccaagtgatgccaaatcaaagactgaagctggtatctctcccctaagattgcattgtcccaggaatagccatgttaaattcttcaggtctccaatgctttctggaacattaccttcatcgaagctgttctctcctaggcctaattcagttaggcctgataatttgctgacccatactgggaatgccccattaaaactatttgtggacacgtcaagaacttgtaggttgagcaatgctgaaagatcaggtaattggcctgttaaactgttcattgacagatttagaacctgaagatt

SEQ ID NO: 19347 - DNA, 615 bp, Setaria italica
  Peptide Sequence Number=SeqID_85321
tcaaatacaaaaaaggttatgctattttcataatggtggtaggttttattaaatggcccaacataatatgaacaagatacatgaaggcatctgacttttatcgccgatcggacgccactgattcagcagaaaatagatacttcacgcgagaaagaactgagtcatgcgctggatcatatggatgatccttcgatgggatctccagtatagcaggaacaggtttgttgtagccatctaccaagaaccttatcatgtttgcaacatattggctgatgagcacaattgcaatgtcctctcttgcggtgaactccttaaatgcatcttcaatttgtttaactgttgtttctgtagcatataatgacataaactccaagggttactcaaatactaattagtaagcgcacaggttgttaccatctaacaaaataagagtataaataaagcaaaagttattgctatgaaatcagcatttcgaataaattcatgaaacaatcacaaaatggcgagctgacgaataaaaatcagttgtcccaaaggtaaaactttcatcattacaaaaaggtatactagatgccaaaagaaaaacagaggtgtccattggtctattgtccaaga

SEQ ID NO: 19348 - DNA, 454 bp, Setaria italica
  Peptide Sequence Number=SeqID_85322
catatggatgatccttcgatgggatctccagtatagcaggaacaggtttgttgtagccatctaccaagaaccttatcatgtttgcaacctgacaaacacaaattaaacaattcagaaaatgaccaacgcatttcaattgttgcagaaatatgcacaatgcaaaagcttaaaatgttttcgatgcatttatagttcctatgtatcttactaaaaataggagccacagttctgcaaactgagcaagcacttcattaaaactaggcccaatgaaaggtttaagcagattgactaattgcacctgcagggacataaagctcagatgcaggtggaagttctagaaggccttgtaaacgcatgttgacacatttattcatgttgacaaaaagcacataatcaactaaccctaagggaattaggtttctttaataatggttgttgtgctctgtgctgcatt

SEQ ID NO: 19349 - DNA, 723 bp, Setaria italica
  Peptide Sequence Number=SeqID_85323
caacgtgggatttgcatgttattcaacagtcaagattacaatatgaatatgcagcgaagtgaagttactcaaaaaaattaccagtgaccgaatctcattcaaatacaaaaaaaggttatgctattttcataatggtggtaggttttattaaatggcccaacataatatgaacaagatacatgaaggcatctgacttttatcgccgatcggacgccactgattcagcagaaaatagatacttcacgcgagaaagaactgagtcatgcgctggatcatatggatgatccttcgatgggatctccagtatagcaggaacaggtttgttgtagccatctaccaagaaccttatcatgtttgcaacatattggctgatgagcacaattgcaatgtcctctcttgcggtgaactccttaaatgcatcttcaatttgtttaactgttgttttgttatcgacaataagataatttgttttcttcctgagatctacattgccaactccagccaacaaaaagccagtcaccgtgtcctcatcggcgatgatggcgattagcgcagagctgttggtcgggatgttggccctccccgccattgccgccgcctccctccttcctcacgaatcaggaatccacgagcgggcgtggagacggaaaatccggcgcgagatcgatcgatcaaacgacttgtcccgcggcgtggatggatcaacacgaagtactagaatac

SEQ ID NO: 19350 - DNA, 703 bp, Setaria italica
  Peptide Sequence Number=SeqID_85324
gtcttggtagtcagggcgaggccctgcgcgcgggcggcacgtcgctgacgctgttcaagaacgggtggcgcgtgctggacgccgtcggcgtcgccgacgagctccgcgccaagtacctccgcatccaggggatgaggatgcggtcgccggcggcgggcgggcgggacttgcgcgagttctccttcgaggaagaagcccccgggcaggaagtgcgagcggtggaaagaagagtgcttctcgagacccttgcttctaagctgccaccaggcacgatatcattctcatcgaaactgaaatcaattgcagagcaagggcctgatggcaccctgctggaactcgaggatgggagacaaattctctccaagattgtgatcggctgcgacggcgtgaactcgccgatcgcgaggtggatgggcttctcggagccccggtacgtcgggcacatggcgttccgggggctcgcggagtacgccgacggccagccgttcgagcccaaggtgaactacatctacggccgaggggtccgtgccggctttgtccccgtctcccctaccaaagtctactggttcatctgcttcaacagacaagatccaggtatattcacaccacaaatgctatgactccacagcgccagcatccgagcttcactaaataaaaaagaaacaagagaaaatgtctgcaattttgacacgaagataaaaag

SEQ ID NO: 19351 - DNA, 612 bp, Setaria italica
  Peptide Sequence Number=SeqID_85325
ttttttttttttttctcgggtgcatatgattgctcattctcaatttcttgatagcatacacttctaaaggcagtttcatatgtgaagcagataagaaaatacatcgataatacagatagaagcatagatttaaataaatcaaaatttacagaagagactaacagccgaaattcaggtttagatagaaatacttagcagaatgttaatacggaatacataataatgaaataagggttgaaattacaaaggaaccttcctgttacactcgcatgaaatgacttttgcagattgccctcgtttggtcttttctattcctcttttttctcccttagagatggtggtggtctgaccacaatgctcttcttccattgcctatcaagcttcctagacaatctcttgttgattccttgctcaatttcccgctctcttttcacagtcaacatacgagcaatcctcttgcgcatgcggcagaactcgctgttcttgaactcctggcgcgcggagcgcttgaggcggagcaggaagagctcccccttgaggtccacaacctcctcctccagctgctccgtcgtcatgccccggatctcctccagctcctgctctctcttcgcc

SEQ ID NO: 19352 - DNA, 2243 bp, Setaria italica
  Peptide Sequence Number=SeqID_85326
ttttttttttttttttaggtttttaagttatccatgtgttcagcactcagccgataccacatggatggatacatgtcattacattatattcactgtgccatagaaaaacaccaagttatgctgccctagtggtaaattttacattggcttacaaagaaacatcttgcagccaacaacagattcagaagcaatttaaagttcactagcagccacaggaggatactacagactaaaacccagccgggtacatttctccataacgccgggtgaaataaagggccacagacaagcttgaattattctacattcacaaatcactacaagttggagcgacaacccataatttgagaggggaggtcaaaaaagcagaggctcctggtacaattgttctgatagcacaagtacactgcgacgttggaatgatcccatatttttttatacatgaaaagaactaaacacgctaagaaaacaaatccaagttttctcaagacgctatctagtagtttctgtaactcatccagtctcctccctacagttattaacacctgaaaggggccccgagtcttgcccttaaactcgcagcaacagttttacatctgaacagagattatgatgggggttatccagatcaccagccttactacttcaaggagactatccatgttatgcaagggatgtgttgaaggtacaaaccagactgaaaatggatgctccatagtaccttcccttactgcaggttgccaccccttaaacaatctggacccaggttggtgtgtcagaccttggacctgcaattgtccggtagacatacatcgtctcggcggggctctcatctgtaagtgagtccaaggggcatgcacgtcgaggatcattcatgacctccacactaaggcgaggcatcttgcgtgcaagctgtcggcatgcgcccagggtcagtgagcacgacgacatccaaagggatcgcattgtctccagcttggcagcatttgccagcaagggcttatcaccgaatgggcagtccctgatctccagcttcttcaagctcttgcagcccgaaaggatgtaatgaaggcccaagtcgctgttcccagcaaaggcgattgagagcatctcgagacgatcagcatgtgccccgatggatttaaatacacggtctgtgagaaggcctgagacagaaagccgcctaaggcccttgcatgattccacaatggcactaaaacctgcatcaagaggctgatgcgtgatgtaatctggtgtatgtggctctatgatgcataggcggaagcaagtgaagttgggccggttctttgcgatggtaataagggcctcattggtcatccgtctgcagaagtagaggactgattccaacatcgggcaaccagcagagacatcaacaagacctctttcagtcaatgaaacctgctcagctgcatcgaaaggagaagaagggaagacccgcaactcctgcagtttattacaagatgatgccacagcagcaagaccgtggtcctcaattaaatccatcacccataagagttgcaaatttttgcatctgctaacgaattttatcagttcggggcctcgtacagtagcataactcagatttagtgatgtgaggccctcgcatacgcaataaaatgctggcaggtactctggaacagcatcccaagccccagaaagccttcttaggtttttacaaccagcaaatgctgcttcaagctttgaaaagagatccagatggtaatccgcagagaatcttcctgttccaagctctacaatctgaggagctttgcgaagaaggctagcaagcttgtcgagaggtatagaattgttgagcttgagagtcttgaggttgcgacatctggttactagtcgttcaagtacagttatattaacatccccctctaagcatgaaaaatttagagttaccaacgaagtgaaggattccggaaagagactgagccaatgaatagagcaatcctcaatctcattctcctgcaggtcaagttctcttagatttctgcagccggcggcaatggcagcgagccccgcggtgctgaatccctcgcaggagacgaggcgcagcacctggaagttcctgaaggaggccgcgatcatctcgaggcagtcgtcggtgacgaccatgcgcttgaagctgagctcctcgagcagcggccacccatcggcggcggcggcgacccatggcgcgtctagtcggtcggtctacccctattccgggtcgt

SEQ ID NO: 19353 - DNA, 422 bp, Setaria italica
  Peptide Sequence Number=SeqID_85327
cgctggtgtgctgcttcggcgcgccgcgttgggagttcgtgcccacggtgcgggtgtcggaccggcagatgcaccccgatcagtactccacgtggctgcacctgcaatgggagccgccggagttcgcgcgcgcgccgggtagcgcggcgagcaacgtggccatcgcgcacacccggctcggagggcgcgccgcggtgctgggcaaggtcggggacgacgacttcggccgcgagcttgtgtaccgtatgaactgcgagcgggtacagacacgcgccatcaagttcgacggcaaagcagccacggccatggcgcgcatgaaggtgagcttccgggaccgggaggatggcaagggcggcaccaaggacttagtaggaccgaagaacggtagtaagtagtcgtacttaagtaaccgtaaaggtaaa

SEQ ID NO: 19354 - DNA, 486 bp, Setaria italica
  Peptide Sequence Number=SeqID_85328
cctagacgtcatcgctaacctccgtggacgggagcgaagcccctgatccaacgcgccgccggccgccgccctacatccgtcgtcgccggttgggtggccagaaatggatattatgctgccttttaaagttggagacagagcagagtcaaggtccttctctcttggtttcaggggtgcatggttccgcagtaagataagccttatgtgtataaggcaaggtcatctggagtgtcttttggagtatctcgactttccagatgaaaagaagacatggactcggctatacaaagttccaccaggtagccgtaagcggaaatcaagtgagagtaggatgatcatggtaagacctacctttccacagtggtacctggagcatgaaaaacctaaagagctcccaaaaggccaatgttgtagcaattgtcagcagtccatggaaaagtaggtgacttggtggaatggtggtatactgattgttactggaccggg

SEQ ID NO: 19355 - DNA, 726 bp, Setaria italica
  misc_feature (679)..(679): n is a, c, g, or t
  Peptide Sequence Number=SeqID_85329
cttgaccctatgatcaacttcctcgctagttgggcaagccttttgggttggatcatggtgggttcttctttttctcaggttggcgctttgaaactctgtgactttgtgtttgcagtgatgaatatatatgtgaaggaaaggtccatggctttggtgtggcttctattatgagactaactgacaggggacaggaccatgagcttggtacatgcattggtggttatcaatattcagatttgatttttctggaccattgcttggtgcaccgtcatggcaaggatagtggactagtagttgggcaatcagatatatactacagtaccagctgctgaattgggcagagacatagttcagctttacgaaggtcttccatctgttgcagtgtcctctatcaattaatttggagataagctggtcgagcttgaccaaaacaatcatattgaatgatttgggagtgtatcttttattcaatgaaaaactcaaatactgcataatttggcgaaatctatgggtgttagccagcaagttgctgtttctcgcttctgaagattagcactcagattgtttcattgcatggtacacagttacattgtgagagattggatgattgttcaagaagaaatggagcaggagatattaagacatacactgcaaatctctaatctagcaaactgggttnttgtattgtacgatgtcttgatcgatgcagctctggtgttcgacaac

SEQ ID NO: 19356 - DNA, 447 bp, Setaria italica
  Peptide Sequence Number=SeqID_85330
gccagtgtggggatccaccttgagcgagggccccccgagcatgtgcttgtactgcgccggcatcagctccgagatggcaagagcgccgcacacagcgccggcggcctgcgccgggaaccggagcgcgacggcgaagagcgcctgattacctaccccctcctcctgcgtcagtttcgatctacttccgctgctcctgcacacaacaacgcaacagagcagagagagtgcgctgatggcgataggggcggcgctgcgggcggctgccgcggacgcggtggtgaccttcctgtgggtgctctgcgtctccacgctgggggcctcgacggcggcggtgacgtcctacctgaagttgcagggcgtccagtacgcgctcctgatcaccgtctccctcgtctccgtcctgctcttcgtcttcaacatcctctgcgacgcgctcggcggcgccag

SEQ ID NO: 19357 - DNA, 953 bp, Setaria italica
  Peptide Sequence Number=SeqID_85331
aatttctgttctattcaaagacacgatttctgattactgtcatgctaatcaatggtatgaacagagtcaccacattaatcaatttaacaacatgctggggaaattgaggtaattaaatacaagaggaactaagtctttcagtccctctatttctagcaattaatgttggtttcttccgatccagcgtccaccagaccaccaccaaatgattatcatcatgctttcttggccttgggcttaggtggcggtgccaggaacaaagccttgaagatccacgcagcaaggacagcgccaataaaggggcttatccagtacacatagaactgctcccacgtattgtgacgattgttgacatatgcccagccaaatgcattggctgggttcatagaagggccggtgtaggctgccccggagaggacgaggcaaacggtggagatggagatcatcaacgtcttgactatggggttgcgggggcccttgacgatgatccagagcacagccatggtgatgacgaaagtgagcactagttcagcgacagcgccagtgtggggatccaccttgagcgagggccccccgagcatgtgcttgtactgcgccggcatcagctccgagatggcaagagcgccgcacacagcgccggcggcctgcgccgggaaccggagcgcgacggcgaagagcgaggggctggtgactccggcggcgtagaaggcggcgatgcctgtggggttgaagctggcgccgccgagcgcgtcgcagaggatgttgaagacgaagagcaggacggagacgagggagacggtgatcaggagcgcgtactggacgccctgcaacttcaggtaggacgtcaccgccgccgtcgaggcccccagcgtggagacgcagagcacccacaggaaggtcaccaccgcgtccgcggcagccgcccgcagcgccgccctatcgccatcagcgca

SEQ ID NO: 19358 - DNA, 1256 bp, Setaria italica
  misc_feature (1)..(122): n is a, c, g, or t
  Peptide Sequence Number=SeqID_85332
nnnnnnnnnnnnnnnnnnnnnnnnnnnnnnnnnnnnnnnnnnnnnnnnnnnnnnnnnnnnnnnnnnnnnnnnnnnnnnnnnnnnnnnnnnnnnnnnnnnnnnnnnnnnnnnnnnnnnnnnnncctttaaattgtgttcaattatcaaggccacctcaggaacaggtaccattaatacagatttgggaggaaattattacaccgggcataactctaagaattattatgagaaaattagtacaaatgacaatcctggcgatcatagatagctaccgcctaccagtaatgacaacgctaacacatgccaaacagggatttgttcaagccactacagttcaaccagttagcctagagatcaaaatttcagttcgtcttccatgcaatttcagttgacctgaacatcctagtatcgaatagctttctacattgtgaaaggcggaaattcaacttcaaggtatatatgtaggcatcaactaacgatgcaatgtgatcctttcagaggatgtcattgttggatttgctttagcttttcttcttggatttcaaaatcttcaagcctcttcaaccaccgcaagcctagatcacatcccgcctcagctgcaatttgaaactgctccttcgctagctttatgggatcctgctgtgcagtccttttccgcatcttcccagttgatggactcttacctgagttgaacctggtaatcacttcaggcacttcagcacctttaagaagtaaggatccatatgcaatagcagctccagcatgtcccttttctgaagctctatggaaacaccacatcgcagaagctatatccctcttaacacagtctccagttagatatacagcgcctagaagatacaaagcgccagggtgcagctggtcaacagcttgctcgatgtaatggaaagcctgttgatcggactgaacgtggtcattctcaattcttaatcgacatccaagttcatactgtgcgtctggatcacccatatttgcagcttcaaccaacaaagcagcaccaactgccttacaagctccaggaacatgatacttgaaatgcatcttgcccagccaatatctcgcatgggtattatcattgtcaatctccagagcaagctcaaagttctccttagcaccccttagaagcgggatgaggcgcttgtcgttgtggtcggcgtagtcgatgacgcggtcgacctcctggagcgcgctccaccccttggctatcagctccatcgccttcttgttcctgtcgtgca

SEQ ID NO: 19359 - DNA, 725 bp, Setaria italica
  Peptide Sequence Number=SeqID_85333
ttcggtttcttatttccttagtaactaccctactttctattggttgttggtaggtctgaggccgcgcacgaagatgtccttgacgaagccgccccttcccacgccggacttgaccctgacggcggactccgtgttgatggcgatgttgtcctcagcgcgcacgtcgcggatgccgccagacatctcgctgcccagcgcgatcatggcgctcgtgggggagatgcaggtgagcctcctgatgatgatgtgctggctcggcatgttgaacttgatgccgtactcgtcccagccgctcttcacggcgatgcagtcatcgccggagacgatgtagcagtcctcgatcttgacatgcgaggaagaatctgggtcaatgccgtcagtatttggcgaatgcaccggcgcgagaatggtgacgccactgatcgtcacattagtgcagtaggtagggtggaggttccatgacggcgagtcgacgaaggtgacattagagatgatgatgttgttagagtagaggagctcaaggaggtagccacgggtgaactggagctccttggcgtggtacttgtcccaccagacttgcccctgcccgttgatagtcccatttttacctgtgattatgacgtcggtaagattggatcctgcaatgaaattgctgtatcttggacctggctcgtcccttcctctcccatacgatggcaggggtagtcttatttaaggggttctta

SEQ ID NO: 19360 - DNA, 1273 bp, Setaria italica
  Peptide Sequence Number=SeqID_85334
tttggaaacgatgtgtaaatgcatagccacacgcaaataagaacaatattttgatagaactatattatttcagctgcatttctctcacacacttgacactggttctctagactatcactgagctactaatctcttttggcaacctaccattaataggtacacttgggcaattcgtgcgggccgatgatgagctcttcctccgggaaggcgcacggtttgccttccgccccgagctccgggcacggcttgggcgtcacgtcgtaggtcacccccttgacgtcggtgcagttccattgcagcttcttggcgtccggggcgagccgcgccgtcacgttggatatgcagatgccggtgtaggggtcgttggggatgccctccatcctgccggccatggtcacgttctcggcgaacacgtcgctgtagttgatgccggtgacctcgggcatggcgtttgggtcggaggagttgtccgggtgctggccgtagttgccggtcatccagaacacccacttcatggtgtggaggctgaggccgcgcacgaagatgtccttgacgaagccgcccttcccacgccggacttgaccctgacggcggactccgtgttgatggcgatgttgtcctcagcgcgcacgtcgcggatgccgccagacatctcgctgcccagcgcgatcatggcgctcgtgggggagatgcaggtgagcctcctgatgatgatgtgctggctcggcatgttgaacttgatgccgtactcgtcccagccgctcttcacggcgatgcagtcatcgccggagacgatgtagcagtcctcgatcttgacatgcgaggaagaatctgcaaagacgacgcaagatcacaccacgttttcagggcatatgatgctctcgtaggcacagagggcaacactgaagagaatgcaattgcaaactgatatacctgggtcaatgccgtcagtatttggcgaatgcaccggcgcgagaatggtgacgccactgatcgtcacattagtgcagtaggtagggtggaggttccatgacggcgagtcgacgaaggtgacattagagatgatgatgttgttagagtagaggagctcaaggaggtagccacgggtgaactggagctccttggcgtggtacttgtcccaccagacttgcccctgcccgttgatagtcccatttttacctgtgattatgacgtcggtaagattggatcctgcaatgaaattgctgtatcttggacctggctcgtcccttcctctcccatacgatggcagggg

SEQ ID NO: 19361 - DNA, 524 bp, Setaria italica
  Peptide Sequence Number=SeqID_85335
gtcaagttgtcaggaacattctcggccggtccagcacgacgcactttcctcaaatcttcagggtacaatgttaaaaagatgtccagttcttaccaatatctggtcttttgggaagcaatatgaaggacaggatggataaaagcacttgtagttggtgggatggcccatgtctttttgaagttctggatcgcattgaagttcctttacgtgaccccaaaggtccagtaagaatgccaataattgataaatataaagatatgggcactgttgtaatgggaaagatggagtcaggcacgatcagagagggtgacagtttgttggttatgccaaacaagtcccatgtaaaagtcattggtataagcctggatgagagcaaagtgcgtcgtgctggaccggccgagaatgttcgtgtcaagttgtcaggaattgaagaggaggatataatggctggttttgtactttcaagttgttggttaattccggtttggttgtctttgttttactttgttaattttcttaacgtt

SEQ ID NO: 19362 - DNA, 462 bp, Setaria italica
  misc_feature (52)..(52): n is a, c, g, or t
  misc_feature (458)..(458): n is a, c, g, or t
  Peptide Sequence Number=SeqID_85336
cgttttttttttttttaggtttttttttttacgttttttttttgtttttttntttttttttttttttttttgatatctatttaatgtacttgcccacttggggtcatccaatgtttaacttcacacgaaaacttggtagttacaacattttaggcgcagaagtttggtacactcatccttgctgattttacaaactcgcatataaccataaaattatgcaacccatctaaatatagacggctatgcctaaatcgttgatgataggaccatccagaaatatgagaaggaagcaaaggataaagccgagaaagctggtacatggcttacattatggacacaaatgaggaagaacgggttaagggaagactgttgaagttggcagagctcactttgagacggaacacacaagattcacttattttagatgcaccgggtcaacaaaagttatgttccaaatntgat

SEQ ID NO: 19363 - DNA, 644 bp, Setaria italica
  misc_feature (635)..(635): n is a, c, g, or t
  Peptide Sequence Number=SeqID_85337
ggtgctgttactgaaagtacaaaaccagccattatatcctcctcttcaattcgtgtcaagttgtcaggaattgaagaggaggatataatggctggttttgtactttcaagtgttggtaatccggttggtgctgttactgaattcaacgctcagttgcagattctagagttgcttgacaatgctatttttactgctggctacaaagctgtgttgcatgtccactctgttgttgaggagtgtgagatcgttgagctcatagaggaaatcgacatgaagaaaaagaaagaagcagatcccaagaagaagaagccaaagaggaagcctctttttgtgaagaatggtgctgttgttgtttgccgtattcaggtaaataacttgatatgcgtagagaagttctctgatttccctcagcttggaaggtttacacttcgaactgaaggaaagacagtagctgtagggaaagttgttgaagttcctcctgctggcagcccaacattctgagcataagccaattttgaataggatggataaccatgaagcggacggtagacgaatactacttagaagaataacttttttaggaagaaagacgaagaattaggttagtaataaattttaataggttaataattaanaataggtta

SEQ ID NO: 19364 - DNA, 2103 bp, Setaria italica
  Peptide Sequence Number=SeqID_85338
gcggcaccaccctgctaatcagccaccgccccctccctcgctgccccaaaaatccaaatccgccgcacacataaaaccctagacgccagcgcccagcgcagcagcatctccccatcgccgccaccgcgcgctctcctcgaccctcgcctcgcgggatggagcacgacgcgcacaccgaggccccgccgcacgccgtcccgccgcccgaggacgccaccgtcgacgactgggcgcgcgaagatgcggagcccatggactccggcgccgccccaacggacgttgccgcggcggattccgccgctgatggccctcccgcgcccgcttccgaggctgaaggtgtcaaggatattcagtcatctcttcagtcattggagcttaaggcaaacgttgctgcacaagaagatgctcaggatgtcgaagatgaggtagaggaaacaaaacgacacttgaatgtggttttcattggccatgttgatgctgggaaatcaacttctggaggacagatattgtttttgagtggtcaagttgatgataggaccatccagaaatatgagaaggaagcaaaggataaaagccgagaaagctggtacatggcttacattatggacacaaatgaggaagaacgggttaagggaaagactgttgaagttggcagagctcactttgagacggaacacacaagattcactattttagatgcaccgggtcacaaaagttatgttccaaatatgataagtggtgcttctcaagctgacattggtgttctggtcatatctgctcgaaaaggtgaattcgaaactggttatgaaaaaggaggacagacccgtgaacatgtactacttgcaaaaactttaggtgttgctaagctggtagttgtaataaataagatggatgacccaactgttaaatggtctaaggaaaggtatgatgagattgaggcaaaaatggttcctttcctcaaatcttcagggtacaatgttaaaaaagatgtccagttcttaccaatatctggtcttttgggaagcaatatgaaggacaggatggataaaagcacttgtagttggtgggatggcccatgtctttttgaagttctggatcgcattgaagttcctttacgtgaccccaaaggtccagtaagaatgccaataattgataaatataaagatatgggcactgttgtaatgggaaagatggagtcaggcacgatcagagagggtgacagtttgttggttatgccaaacaagtcccatgtaaaagtcattggtataagcctggatgagagcaaagtgcgtcgtgctggaccggccgagaatgttcgtgtcaagttgtcaggaattgaagaggaggatataatggctggttttgtactttcaagtgttggtaatccggttggtgctgttactgaattcaacgctcagttgcagattctagagttgcttgacaatgctatttttactgctggctacaaagctgtgttgcatgtccactctgttgttgaggagtgtgagatcgttgagctcatagaggaaatcgacatgaagaaaaagaaagaagcagatcccaagaagaagaagccaaagaggaagcctctttttgtgaagaatggtgctgttgttgtttgccgtattcaggtaaataacttgatatgcgtagagaagttctctgatttccctcagcttggaaggtttacacttcgaactgaaggaaagacagtagctgtagggaaagttgttgaagttcctcctgctggcagcccaacattctgagcataagccaattttgaataggatggataaccatgaagcggcggtgcgatctcttgagatactttttttggagaagcgagattggttgtataattttatggttatatttagatgggttgaaatcatcaatgatttaggcatagccgtctatatttagatgggttgcataattttatggttatatgcgagtttgtaaaatcagcaaggatgagtgtaccaaacttctgcgcctaaaatgttgtaactaccaagttttcgtgtgaagttaaacattggatgaccccaagtgggcaagttacaattaacttaagaataatagacgaacttaccaaaaaaa

SEQ ID NO: 19365 - DNA, 735 bp, Setaria italica
  Peptide Sequence Number=SeqID_85339
cgcccgttctctagccaactcataacacgatctcgacctccaacctccgactcaaagcgccccctcttccttccctcgccgacgccagcggcggccatctagcaccaccgtggggggtccgccccccctgatcgcggccgccggccatggtgcacagcgcgtacgatgcggtcgagctggtggccggcgttccgggccgcatcgaggccgtggcctcccacgccgggaagctcctcgtcgcggcctccgactccgaaggcttcctccggggctccgattgctccctgcgcatctactccgcgccgggctcctccaccgaaggaggcggcgagatccggcgggatgggccgtacgcgctcgagcggcacgagcagcggttctggcggcgcccgcccttggccatggaggtcagcgccagccgcgacctcctgctctcgctctccgagtgggtcgcgcttcaccgcctccctgggctcgagaccgtcgccgtcgtctctaacaagacaaagggtgccaacgtctttgcttgggacgaccggcggggcctccttgcggtcggtcggcagaagcgcctcaccgtcttccgcctcgacagtgggcgagaatttgttgaagtgaaggaatttggagtaccagatattttgaaatcaatggcctggtgtggtgacaacatatgtcttggaattagaagggaatatatgataataaacagcatgaccggtgcactaacagaag

SEQ ID NO: 19366 - DNA, 386 bp, Setaria italica
  Peptide Sequence Number=SeqID_85340
ggggggttggtgcttgctgggccgtcttgatgaagcgcgcgggatcattgataagatgacaaagggaggggtatccagccagacctcgtcagttacaacacactgatcagcggctacagcatgaagggtgacattaaggatgctttgagggtcagggatgagatgatgaacaaggggttcaacccaacacttttgacatacaatgccctgatacaggggctgtgcaagaatggccagggagatgatgccgagaacctgatgaaagagatggtggagaagggcatcacccctgatgacagcacgtacatctcgctaattgagggacttaccactgaagatgagcgaacggctgcagcagatgctgcagaagcttgagcttgctaagg

SEQ ID NO: 19367 - DNA, 669 bp, Setaria italica
  Peptide Sequence Number=SeqID_85341
gtgaagccttaactctcttgaaagtattccctccgttccaattatagtcgtttagcttttctaggttcatagatatcattatagcatctagacataaactacaatctaagtgcataacaaaaattatgaacctagaaaaagctaaaaatgacctacaatttgtaacggagggagtagttgatacttacgtttgcccaataagaactgatagcagaagtttgaatacttttagtcaggtgtgtctcaaatgtctgtagcagaagttccgcatcaaattgtgccgtatgaaggagcgccaatagatatagcttcccgtcatcctcatacacaataccagtttagattaatctttcttcacttgatcagctgatttttgaggaagattgtatagaagcagcccgagcactaaggtcgcagccccaattacaaaaggagtgctcaaatttgttccttcaggtagaaatggcagaggcagtgacaggacatagatggtaagaggtactgctaaagttgatgttagtgaagcgaccaccgcagtagacatcttcaccagattaagagcagaaatgttgaaggccatgttcagagttatgtagagcagtggtagcaaaggagccccatggcactccttcagattccctccgatattcagaaagcatgcagcaccac

SEQ ID NO: 19368 - DNA, 1382 bp, Setaria italica
  Peptide Sequence Number=SeqID_85342
aagttgcacctgagctctgcagtcgagttgatctttatgagaaaagaaagcctatatttgatgaatacaacattgagaaggagatagacaatatcctttgcaaaagggtaccgctacaaaatggtggttctctggtcatagaacagactgaagctcttgtttcaattgatgtgaatggtggtcacagtatgtttggtcagggaacatcccaggaaaaagctattttagaagtcaatcttgaagctgcaaaacaaattgcccgtgagttgcgcttgagggatattggtggtattattgttgtggattttattgacatgacagatgattcaaacaaaaggctagtctatgaagaaatgaagaaagcagtggaaaaggatcggtcaacagttggtgtttcagaattatcaaaacttggtttgatggagataaccagaaaaagggttcgaccaagtgttacattcatgatcagtgagccttgcacatgctgccatggtactggtcgtgtagaagctcttgacacatccttttcaaagatagaacgtgaaatatgtcgacgccttgctgcctctcggcgaaaatcagaccctgagaaaccaaagtcatggccaagatttgtgcttagagtggatcatgagatgtgcacatatttgacatcggggaagaagacaaaactaggacttctgagtagctccctcaaagtgtggattttattgaagatcgccagaggtttctcccgtggagcttttgaattgctaccatactcagaggagaaggaaaatggtgaggagaaagaaacatcatcagagtcaccacagaaagagggaagccccgaaactctctgtgtttcctatcaagaagtggatgagccgtgcaaagcgagcgaagtgaacctcttaaaaacgtgacaattttattggcatgtgcccttccgggctattcacagattataataacaagagcaaaatcaagaagagggtgatgcatttgattcgcagagatcccagcatcagatatccagatgacctcctgaccaaattacatttgcagttttttttcagatctgtgatgcaaaatatctaggttttaggaaggaagagtagaatgagtattttggagggaaactagactatcagtatgccaggagcaggaggctctgggtttaggggagatcctagtggcgtagcttttccatgctttagagcagttaacttgctagaggcgattcccaatgatttttgtaattcattatcaagacccttattcaaacttttccagtaggcgtgcagtagaaatggattcattctgacatcggaaggcctgccgtctgcggtaggtccgaccatacgccattttcatttaaaattatgctgaagcttatgtga

SEQ ID NO: 19369 - DNA, 1131 bp, Setaria italica
  Peptide Sequence Number=SeqID_85343
caaattcccccaaacttgagttacggatcaagccagcaaaaagttgaaaaaaaaaactacgtggggaaatgctggattcagcagctctctcgcccagctcttgatgagcaatgcatcgccgtctattgatgtgcttcttcggcttcagtcgaagacggcgagcttgtcgtactccggcccggcgatggccttctccatgacggccctggggctgacgacgccgccgccgtcgaggaacagcttgagcaggttcttggagaacccactgacgagcgccacccccttctgcccggcctccaccggcacggccttggagtccctcaggttccagaacaccacctccggcacggcgccgccgtacccggcctccgtgaacttgcgcacgatcgcctcgtggtccgtctcccacggctccgccgacgcctggtcgaactccatgtcgctgaacacgagcacgcgcttcaccatccgctccggcgccagccgggcctccactgccacctcgaggatcttgtcgaacaccgcctggaagttggtgttcatgccccagtccatggtgcggacgaagctgatcttctcggcgagggtctcgccggcgatccggtggagctcggggcgctcgctgaaggtgatcacgcggccgcgccaggggtcgtcgctgagctcggacacgaggaggcccagttacacgcacacgtccatggggacgcccgacatgctgccggacacgtcgcacacggcgacgcagttggagagcctgccgagcgcgcgcatgtcgtcgaccatgcgctgccactgcaggtcggccacgccgccgtcgttctcttcgccgtcgtcgtcgccgagcgaggcgatgatctcgtgcgggagcagcgcgcccgcggcgatccgcttcttgccggacttgacgtcggcgaggtaggcgttgaagcgatcggcgtcgtgcttgagaaagaggtccttgtagttcttcatggcgacggaggcgacgcgcgtgtacaccaccgattcccacgcgcgcgccgatatgaacacctcggggagcttgagcgcgcggcggagcggcacgagcgccgccttccggagccgctcgcgcgcgcggtacgcgtagtgctcgtcggggaggtcggc

SEQ ID NO: 19370 - DNA, 1099 bp, Setaria italica
  Peptide Sequence Number=SeqID_85344
gccaaaaatgggcatgctcttgatgcaatggagctgttctgtgagatgcatcagcttggtttgtggcttgacaaggttgctatagccagtgttctgagtgcatcaagcagcatctgctctataagttttggggagcagatttttggtcttgctattgcacttggcctacagtctgaccatattgtagcctcctcgctcattgacctatactgcaaatgtggaaacttggccaatggatgcaggatctttgacggaattgataatcctgacgaagtcttgtggaattcaatgctgataggttatgcttctaatgggtatggatatgaggcactggaacttctgaagttgatgcaaagcaggggtgtgaaaccaagtgaacggacatttgttggtgtcctttctgcatgctgccattctgggcttgtggaagagggactcagatggtttgaccggatgaaggaagattttggtgtgagtccatcagctgagcattatgcatgtgtgactgacctgttagtccgtgcaggtcgactggatgaagcagttgagttcatagagaacatgcctttcaaagcggatgcgattagttggacttctattattggagggtgcaaagcccagggcaatgaggctttgctgcataaagtggcaaagaaactgatggaaacagaagtgtcaccgcattccagtttgtatgtgcagctgtcaagcacgcttgcagctcaaggggattgggctaaatcagcagaaattaggaacatgatgcgtgacagaagaatttcaaagaatgctggctacagttggatcgatagtgcatagaggaacttgccaatgacacctcccacctcccacatgcatctcggtccctttcttctgggcccttctctattggcttttgtttctacaatgcgttcttctgctaatcaggaagtggtaacaaataatactcctgctaaaattgtgcttttgatcatagttctatctgatcgtttgcttcttcttttttataataattttgttgtgttgcagtgacctacgagctactcagctttcagaggtacatcactacaatgctatcttctgctacctatctttctat

SEQ ID NO: 19371 - DNA, 380 bp, Setaria italica
  Peptide Sequence Number=SeqID_85345
acctgctggtagtactccacgatgaggctgttatacttttccccgaggaagcggagggcagcagggcggtcaggagtggcaatctccttcagccgcggagacaggacaagtgagttctctccttgatctccaaactcctccatgaagttgcgcagagcctcccctactcctgggaccaccacctcctgctgctgctgctcctgctccttctccacctcgcagctcgccgccgcgtcctcacctgcgggctgctgaggcgacggctgcggcgtggccggcatgggcgatggcggcgcgtcggttttcgaatctcctccggcagtgcatcggtctaggctcgcgggatccgcgcactccaacgcgccgcgctcctcgtcatc

SEQ ID NO: 19372 - DNA, 937 bp, Setaria italica
  misc_feature (930)..(937): n is a, c, g, or t
  Peptide Sequence Number=SeqID_85346
ggaaacggctaagcaatcctcatctttcccacaaacgagtcggccaagcgaacaaagagggaagctaagcaagcaagaactgaagcagccaaattgagataagaggcggaggaggaaggagccgctctggacaagatgatgtcgttgccggcctccacccacctgctcccctcggccgccgcggtatccctcctccctcgccgcgtctcccttcagctctcctacgccactgggtggagggcaggaagccgccgcccggcggtggtgcgcgcggccacggcggaggcggcggcgcccgcctacacgtccgactccctcatcctctacttcaaggcggagggcaccatggaagagagggctattcccaagatcaccgaatcactcgagggtatggagggggtcaaggacttggaggtgctcatcgaagaaggcattgcaagtgttgtgttaacaaaggagacaactgtacaagctacgggtgtggcatcgaacctggtggaagccatccagggagctgggttcaagctgcaaacactaagcctcagcttcaacgatttcgatgaggcaacagcaggagtaggaggtggtgtccaatccagcgagtgagctaatttgtgttgccctttgctgagccaaatgcatataactcgctctcatccttggtggttccttctgattttgtttagtttctgtaccctcttgccccttgccttgtaatttttgagcacggcctcataatttctagcaaattgtcaagaaagctatgattcttttttgtactgttgttttatcttgaatcacagctgttgtataagttaatctatggaacgttaatatttcaggttgaactagattagactaaaaaaaaaaacaaccagcatactaaagtaatgttcttcatttgcaaggtctaagaaaaaaaaaaaaaannnnnnnn

SEQ ID NO: 19373 - DNA, 331 bp, Setaria italica
  misc_feature (268)..(268): n is a, c, g, or t
  misc_feature (281)..(281): n is a, c, g, or t
  Peptide Sequence Number=SeqID_85347
cctatcaagtcacagtggcaaccatggtacctaaataatcaggttgctggaaggtttattgagtatgaaggattgaccctggccactgtcagaggagcaggtcatgatgtgccacaagacaagccagcagaggcgctagtgttaatcagttctttcctttcagacagaaaactgccaaccaaaaataactgatggctgaagaataaattgctgaacgagaagagtgaagaattactcatattggtacatttgcggaatgaatttttcngaaatgaaaaagnttacgttgtcggtaaatgattgtaactttaggatatctgtgggcaggtca

SEQ ID NO: 19374 - DNA, 349 bp, Setaria italica
  Peptide Sequence Number=SeqID_85348
acatcattgatggccaagttaagcgggttgaatcctatggattatttgtcacaattaggagcagtgaattggttggtctgtgccatgtatcagaactttctgatgagccagtccttgatattaactctcgctataaagctggtgatatggtcaaagccaagacccttccatgtacaagcattccaacagggaaatccttctgaggattttcaacgtattcatctgataaatttgacagagtaatcctagccccaacctgtatcccacggattgagaagatagaggatctgcttcctggaactgagattaacattcttcactaatttaaactaatttactttactaacta

SEQ ID NO: 19375 - DNA, 2190 bp, Setaria italica
  misc_feature (2143)..(2190): n is a, c, g, or t
  Peptide Sequence Number=SeqID_85349
aaattgtcgactcatgggtggcagaccccttgtctggattccatgagggtcaatttgtgaagtgcaaggtcctgtctgtaagccgctcatctgaaggatctcttcgagttgatctatcactccgctcatcaaacatacgcacagattctagcaattcaagactatttgatgaaggggcaacctgtatcccacggattgagaagatagaggatctgcttcctggaactgagattaagggctatgtgaagaatgttaatcccaaaggatgttttattatgctttctcgaatggttgaggctaggattactctgtcaaatttatcagatgaatacgttgaaaatcctcagaaggatttccctgttggaatgcttgtacatggaagggtcttgtctacggacccatcatcagggagagttgaggcgtcactcaggaagaacactggtagcaaattagaaaagccggatgatattaattatagtgatttacatgttggggacatcattgatggccaagttaagcgggttgaatcctatggattatttgtcacaattaggagcagtgaattggttggtctgtgccatgtatcagaactttctgatgagccagtccttgatattaactctcgctataaagctggtgatatggtcaaagccaaaattttgaagatcgatgagaagcggcaccgagtatcccttggaatgaagaaatcgtactttgattgtggtctgactgctggtacaaatgatgatgatgaaattgctcctatggacatcagcattgcctctcaggttgcaggatatcacaacaaagttcattccgcagcagaaccaagggcttctgtgctgcctcttcaggtctccttggatgaatctgaaggttctgacctagaggataatagtaatgaaggccatgaaattgccaatggatctgaagcaaatgctaaaaagagtgacaaacggttgaagaaggaagcaaggaaacaaagggaattagaaatcagtgccttggaggaaagggcattacagggagatataccgagaactccagatgattttgagaagttggtcaggagctcaccgaatagtagttttgtctggataaaatatatggcgtgtttgttagatcttgcagatgttgagaaagcacgtgcaatagcagagagggctttaaaaacaataatccccagagaagaggaggaaagacttaatgtttgggtagcatatttcaatctggaaaatgaatatgggagtccacgggaggatgctgtcaagaaggtattccaaagagccttgcaatactgtgatcacaaaaagttgcacttggcccttctcgcagtgtatgagaggactgagcagtacgaacttgcagatgaacttcttgatagaatgaccaaaagattcaaaacttcctgcaagatatggttatgccgtattcagtttgccctcaagcaaggcaaggatgttgagtacatcaaagctgttgtaaaccgtgcgcttctgagtttgccacagagaaagcgtataaaattcctctcgaagacagctattctagaattcaagtgtggggcgcctgaagaaggaaggtccagatttgaactaatcttacgggagtacccaaaaagaacagatctttggagtgtttatctagaccaagaaatccgccttggtgacatagaaattataaggggattatttgataaggctacttgtcttaccctacctccaaaaaagatgcagttcttgttcaagaagtaccttaagttcgagaagtcgctgggtgaagacaatgaaaggatccagcatgtgcagcagatagcaatgaaatatgttcagagttcactgccatccgaaagccacccctgaacttgagcggttgccaccactggcaatgcagtgtgcgagttgctcctctgatctttacttccaggagtcaaacgctgacatcaggcagaatcagaatcgctgcagacacaattttgctcgtgataggaacaagacagaatattaggaaaattcgctgttgtgatttgaggatcaatagctgtatccggtcggcatttagcatgcctattgaacatctttgtgaaaaacattaatgcaagtgctgattgcctgaaaggaaaggaaactacaattttggaatnnnnnnnnnnnnnnnnnnnnnnnnnnnnnnnnnnnnnnnnnnnnnnnn

SEQ ID NO: 19376 - DNA, 1690 bp, Setaria italica
  Peptide Sequence Number=SeqID_85350
tgctagagtaaaaatgttgccagtcagttcggagtcatatactcagcgtaaatgcagaaactgctagagtaaaactctcacttcaacagtcaatgtgctcctcaacggattcttcgtttattcaaggatactttcttttggatcagaagatttcggcattgaagtactcaagccatgattgggctcacgcttttggcattggtagcctagttgagggggaggtgggagcaatagaagaatatggtattgtccttaacttcaatgaccatccagatgttgttggtttaattgaacatcatcaactcagtgacagtactctagaagtggggtcttctgtgaagggccttgttttggatttatctgatggagttgttaacttatcccttaaaccagagctaattagtagtgtcagaattggtggaacaaagaagaaacgccaaaggcctacagttgcagacttggagcttcatgaggaagtgaatgcagttgtggagatagtcaaagagagctatgtggttctttcaatccccgagtataactatgcaattggttttgcatcactgatggattacaactcacaactgcttgccacccaccgctatgataatgggcaacgcattactgtggttgttggaaatatcccaagttctgacccgtctggaaggctcatcctactccctaaagcatcagcccaggattctggcctgtctggttctaaaagggctaagaaaaaatcagaatacaaagttgggtcacttgttgaagcagagataattgatatcaagccactagaactaatactgaaatttggtgccaatcttcatggaagaattcatattaccgaggttcttgaagaggattctgctgagcgtccctttagtaaactcagaatcgggcaaaagcttactgccagaattgttgcagaggctgaaccttctggaaagaatggcaaaaacttcaaatgggaattgtctattagaccgtctatgcttaagggtgagtttgaagaatcaactgctcataaagaagaatttaatcacaccacgaatgtggttgtgtgtggttatgtcgtcagagtggataaggaatgggtctggttaactgtatcaagaaatgttatggctcatttgtttattctggatagttcttctgaccccagtgaactaaaacagttccagcagcgctttagtgtaggccaagcagtaaaaggctgtgttattagtgtgaaccgggagaaaagattgcttagggtgaaagcacttgataaccaatgtgcacaacataatatagacaaaatacaacaatcagagtcctcgttggttgaacaaacaaaacaaggagatgtcattggtggacgtgttcaaaaaattctacctggtgttggtggacttgtcgttcagattggacctcatcttcatggaagggttcattatactgaaattgtcgactcatgggtggcagaccccttgtctggattccatgagggtcaatttgtgaagtgcaaggtcctgtctgtaagccgctcatctgaaggatctcttcgagttgatctatcactccgctcatcaaacatacgcacagattctagcaattcaagactatttgatgaaggggcaacctgtatcccacggattagaagaaagaattaagtaaggtaattacttaagtaactttaaccttaaggtaaaaa

SEQ ID NO: 19377 - DNA, 296 bp, Setaria italica
  Peptide Sequence Number=SeqID_85351
gaggagaggaggatggcgcgcgttggtggcggcagcggcgaagtagggcgagcgagccaaggagaggaggattgcgggcggcggcggcgatgcagggcgagcgaggagtaggcgagcgagcgagcggaagatctgtggacatgcatgtttgaaatagttatcatcatttttgttgttgagcgcgccactttttcttattttgaacgcatgctttcaatttataggcaagtttattattgtgcccatatgcaattatatagaaatactggtggtcatcattatttacctaaaaaaaa

SEQ ID NO: 19378 - DNA, 287 bp, Setaria italica
  Peptide Sequence Number=SeqID_85352
tttttttttttttttttttgttaggcatcatcactcgttcacgcacttaaataccaaagtaaagaaaatcaacagttcaagttccaagttacttgaagtacatttatacacgtgctcactgctcaatcaacgacctcatcgcctacccatgcacgcacacgcatgtagagaggacgtctacttgaagtagtatgggaggtcgagcacgtagaggaggaagtaggcccagaccacgccggagatgccgccgaagaagaagcctccggtgaacttggcccagccgtcgg

SEQ ID NO: 19379 - DNA, 992 bp, Setaria italica
  Peptide Sequence Number=SeqID_85353
gggtaccccgtaacttacctaacttacctaaacaacgccacagatcttctcacacacccccttgcaggatctaaagatcacaaactttaattgggccgatacaaggagacctcttctaccattttgcaggaaggaagagccctgttcgtgagagacaggcagaggtcgagatggctaccgcgtacgctcccatggcgagccaggtgatgaagagcggcttggtgcactcgaggcccaggggcctttcaggcgctgcgctgaccaggcggccccgcttcaccgtgaaggccatccagcctgagaagacaacgtaccaggtggtgcagcccatcaacggcgaccccttcatcggcagcctggagacgcccatcacctccagcccgctcatcgcctggtacctctccaacctcccggcctaccgcaccgccgtgagcccgctgctccgcggcatcgaggtcgggcttgcgcacggctacctcctcgtgggccccttcgccctcaccggcccgctccgcaacacgcccgtgcacggccaggcgggcgccctgggcgccgccgggctcgtcaccatcctcagcgtctgcctcaccatgtacggcgtcgcctccttcaacgagggcgacccgtccacggcgcccacgctcacgctcaccggccgcaagaaggaggccgacaagctgcagaccgccgacggctgggccaagttcaccggaggcttcttcttcggcggcatctccggcgtggtctgggcctacttcctcctctacgtgctcgacctcccatactacttcaagtagacgtcctctctacatgcgtgtgcgtgcatgggtaggcgatgaggtcgttgattgagcagtgagcacgtgtataaatgtacttcaagtaacttggaacttgaactgttgatttcttacttggatggagttaatttacttggggtataaaattaatgactaggtgttaaatttgtaactaaaaacgtaaagaacgta

SEQ ID NO: 19380 - DNA, 833 bp, Setaria italica
  misc_feature (777)..(833): n is a, c, g, or t
  Peptide Sequence Number=SeqID_85354
cgccgtgcccgaccttcctcgcactcgcggactcgccacgggccgccgcccaccaaacagcaagcacaagccgaaattcttcttcgctagctcgctcgccattctatttctgctgccaggcgacgacgcagagaagacgtccagaactccaggagcggccagcggagggagggaggagctaggactagaagagcccagggggagaagccatggccggcaggagcttcttgatccggtcccccaaggaggaggagtccgacgccgccgtcagagaggctgtatttctgggagcgaggaatgctgcaatagctggttctgtggtagcggttcccacgttgatcggctgccgtgtccttccttgggctaaggctaatctcaactacaccgcacaagcactcatcatatctgcagcctgcatcgctggcttcttcatcactgctgacaaaaccattctacggaacgcaagacaaaacaccatcgggaagcttgacaagtcaacttgatgcagatctgtagctgtgacggttgaccgatttcagtgttcagctacacaagccaatttgtgctgtaaagatctgcttgcctgatggactcaacctgtgtatgcagttttatcccattttaattttgaataaaaatggggctacgggtatatgcctgtgtaatgtggaatatgaggcttgcatctgtagtcagtggttgtaaggctgttcagtaaaatgctatatgttgtttgttgccccacaagttcgacatttctgctgttcttcgatattnnnnnnnnnnnnnnnnnnnnnnnnnnnnnnnnnnnnnnnnnnnnnnnnnnnnnnnnn

SEQ ID NO: 19381 - DNA, 358 bp, Setaria italica
  Peptide Sequence Number=SeqID_85355
cggcgggcagcgcgtcgccgtcctgcggcgccttccacagcacggtggacatggactggaagaagccattcttggtgatgctggggccgacgcacgtgttccccatcgcggcgggcgggccgaccgccgccgaatcttcaccgggcgcctcgccgggatcggatccaaggaacagctcccaactcctccgcgctggcttagatcacgtcacgtcgtggatatacacgcctcctcctccgacataaggaaatgggcaaatggcccccttttttgggcagcagatcagcaaagccgcgggaaaccacggaaagcggagatcgaatccgagttatcggagtcaacgggaggcaaagagcga

SEQ ID NO: 19382 - DNA, 1126 bp, Setaria italica
  Peptide Sequence Number=SeqID_85356
taacaacgagcagtttgctttccgtcttcgtcctgtctttgccagttgccagtcgccacccgcgtcgtcgtttccgtcggcgtgtgaaaccctagcgaggcgatctcaagaggccagcggcgatgtgggggtaccagaaggcgccggacctcgaggccggcgggtcggagctgctgtacccggggatgacggagagccccgacctgcggtgggcgttcgtccgcaagatctatgtcatcctctccgtccagctcgccatgacggctctcgtctccgccttcgtcgtcaaggtgcccgctatctccttgttcttcgtctcctccaacgccgggatcgcgctctacatcttcctcctcatcctgcccttcatcgtgctgtgccctctgcactactaccaccagaagcatccggttaatctgctgctgctcggcctcttcaccgtcgccatcagcttcgccgtcggcatgacatgcgccttcaccagtggaaaagtcattttggaggctgcaattcttacagcagtggtggtgatcagcttaactgcttacactttctgggctgcaaagaggggccacgacttcaacttccttggacccttcctgtttgctgctctcatggtgctcatggtgttttcactagtccagatctttttcccactgggcaagatctctgtgatgatatatggtggactggcgtcgcttatcttcagtggctacatcatctatgacacggacaatatcatcaagcgctacacatatgatgaatacatatgggctgcagtttcactctacctcgacgtcatcaacctgttcctgtctctgctgcaagtgctgagggcagcggatagttgagcttgccaagctttctcttgagaacgtacatttgtgcatatcacaaattccatgaatgctcatgggtactccaatttctaagtagattctgtcgttgctaccgtagttaaaacgttgtgtatggaaccaccaaaactgtttaccagcttctgaaaagatgaaatgcagttttatttctatgcacgatcagagtatgaatgccggtgtgctgcactgtgtaaaacgacctgattttttgtttattttattttcatcttctttggtgaagcaaaaaa

SEQ ID NO: 19383 - DNA, 454 bp, Setaria italica
  Peptide Sequence Number=SeqID_85357
ccgtggtcggaggtgaagagcccctccctgttcagcaggtccacgtagtacttgttgtcaaaggtgttgggggtccggatgtcgttgacggtggtgttggtggcgccctcgacggggcaggtgagccgcagctggccggcgaaccactggttgagggtggggtcctgcgtcgggaacagccgcttctcgaaggacccgcagtgggcgatgccgacggtgtgcccgccggagagcgccacgaggtcggtcacgtccaggttgatcttggccaggaacgacaccagcgtcggcaccttggacgtcggcggcggtagcgcgccgaggatggcgtcctccgacgccggtgccaggccgtcgcgccggcccaggggcaccttgtacgccgggccgccacccaggaccacggagtcgcgggcggcgagggtgacgatgtcggcgcaggagacgacgcggc

SEQ ID NO: 19384 - DNA, 813 bp, Setaria italica
  Peptide Sequence Number=SeqID_85358
gacgctacgaggtgggctgagaaaagttggaagtttctgcgcgttgctttggaggtcgcggaaggtgctcggatctaggtttccgggccccggatcgctgccatggacgccaccggccccggcgtctgcgtctggggcgggcgtggagacctccgggtcggcggagaagccggtgaagcggatgatgaagaccccctatcagctcgaggtcctggagaagacctatgcggtggagcagtacccgtccgaggctatgcggttggagctgtcggagaagatagggctgtcggacaggcagctgcaaatgtggttctgccaccgccggctcaaggatcgcaagccaccatcgaagcggcagcggcgggaggaagaggctgcactagcgccagtgatgcctccactgccagtgttaccaacaccggcaataccactggcaagcagtgaccttatggtgggcactcctgggatgtacaatgaaccactgcacccagctcactcacgaaggggtgccggacggtcctcagcagtgcccaggatctccatgccggatattgggaggaggtattatgagccgacaccaattatgatggcacaaccggtggtgccatcggtgcagctcacgccatctgagctccatgtgattcattctgtggagtcacagcttggggaaccactgagggaggatggtcccgtgcttggcactgattttgatcccgttcctcctggtgcctttggtgcacccattgttccggagcaacaaagcagcctgtgcgatcttatgatacaagatatttctaggcatgatccgaagct

SEQ ID NO: 19385 - DNA, 291 bp, Setaria italica
  Peptide Sequence Number=SeqID_85359
cgaaaaccctcggaaaagggaagggaaaagaaggagggccgcggcatggacacgcacatcggcaagttcatggactcggtgggctccatcttccgcggcggcgacgtcctcccctggtgcgacagcgacatcatcgccggttttgagagggagattgctgacgccacaaatgaagaacagaaaaatgatagccttatgagattctcatgggcgcttgttcactctagacagcctgaagatgtcaaccggggcatcgcaatgcttcaagcttcattggacaggcctagcacg

SEQ ID NO: 19386 - DNA, 727 bp, Setaria italica
  Peptide Sequence Number=SeqID_85360
aggaagaaattaagaactaagaaacgaaccaaacaaaaatagaaagaaacaagaaaaaatgatagccttatgagattctcatgggcgcttgttcactctagacagcctgaagatgtcaaccggggcatcgcaatgcttcaagcttcattggacaggcctagcagcccgctgcaaacaagggagaagctctatttgttggctgttggacattacagaactggggattatacaagaagccgacagcttttggaaagatgcttagagattcaacctgactggaggcaagccctgactttgcagcggcttgttgaagaaaaaaccagaagagatggtatgattggcatggctatcatcactggcgcctttggacttgtggggcttgttgctggtggtataattgctgctgcctcgtcctcgtcatcttcatccaggaagaaatgaggatctcttgtgtgaagtgataagaaatcaagatgggcaaaaacttgatgacaagtcggacatcacttttgtgcttcttgtgaagggacgcttttttggagtgtgagaccagccttgcattgtgtgttcaaacgagagttatgtattgttaataacatgatagttgtcagtagagggtgaggcactgtgaatcggagtatcggattgttgtacacttgctgcagaacatgctgtcaccatataataagagaatttcataataaaccctgaaggagaatttaaaaaa

SEQ ID NO: 19387 - DNA, 775 bp, Setaria italica
  Peptide Sequence Number=SeqID_85361
cagtgagaagaaaatcaagatcacttgcttgtagtccatggagagcattgtttctggtctgctgcagtttactttctagaagcagcaaaccttgcagccattctgtttggagatgatgagcggagtcggtagcttcagcatcagactttttctgtaggagtttagaagattttatttcttccaactcttgtttcagattggaacattccgttcttagcaacgatacttcagtagtgagctgattccgagacataagttcaacggcaacctgttgggcaaggccttgtgtctcagtgcctaatttgtcggtaacatgctccagagatgttgcttctgtcttaagctgagagaaagctgactcagccacctccaatctggttctgagccggttattctcatcatgagcagcagctagatctttatcagcagagtactcaggactccagccatgagtccagtcactgctcccctgtggtgaaaggtgtttaccccgatgagctcctttctctggtgtaggactttgactggtaggacaaagaggtaggtcacctgagctcctaaagctactgatttcatgtgaaccatatggatcattcttttcagtaaaaatgccatctgaagtatgtgacgaattttcatagtcttcagttgaccctgcagaatcttctaccgacgggtaccccagagaagtttcttttagcttaatccttgcattaaccttatcagtgccaatgtctgatgaggccgcagcaacttcagcaggatcatgacttct

SEQ ID NO: 19388 - DNA, 479 bp, Setaria italica
  misc_feature (405)..(405): n is a, c, g, or t
  Peptide Sequence Number=SeqID_85362
tttttttagcaagccaagtgattaagattataacagtgctatcacgtaagaagtaatgatagtccaatcattgaatactgtagctagatagcaaccctttcaaagcacaacaacgctacctgatgctttcgtcaattaactgaactgctagaccagagttgcctgacctgcttgtgtgctgcgctgttgacctgtgccaaaactatctggtgactgtgccgtgctacttgatgggccaggaaggaaaaatggcctgctggcctcctgtctctcacgccttgggccgcgagctgctttggcagcaaactgggctgctgactccagcacgctggcctgggccgctggctcctgctgggctgccgcgatgcacccaacctgctactgccttgcctgggccaagttcgnggcttggctcgccacccactgctgcactgtcgcgggcctgctcgctgctctggctgctgtgcgtgcttcctcct

SEQ ID NO: 19389 - DNA, 209 bp, Setaria italica
  Peptide Sequence Number=SeqID_85363
tcacgaacccgatgtagatgacggtcagaaagttgcaggaccaggtggatgatttcttctacaacatgctgggcctgctccagaaccagtaccagaagctgggcctgctccagaaccagtaccagaagctcggcaatggcgtccgcagcaagggcaagttcaggaagagcgactagttcgattcgatttgtatacatgtatatatactt

SEQ ID NO: 19390 - DNA, 791 bp, Setaria italica
  Peptide Sequence Number=SeqID_85364
gacgtgctgctgtggcggaacagaagatctcgtcgagcgtgctgggcgtggcgacgctggtgtgggtcttcttcgagtggctcgactaccacttccttgaccatcgtcagcttcgcgatcgtggtcggcatggccgcgcagttcggctggtccatgttcgcctcgaaccgccccgcgtcgagctgccggaggagctgttcgcgaacgccggcaaggccgccggcgcccaggtgaacaaggccctgggcatgctccaggacatttcctctgagagagacctgagccggttcctcatagtgatcgccgcgctcttcgcggccgcgatcgtcgggagcttctgcaactttctgaccgtcatctacatcggtaatgcagagagtcctgtgatctctcgcttcacccttatcagacactttggatctgaagattcacggcgcttcaccttctgcgtttcagggttcgtgagcgcgcacactctgccggtgctgtacgagaagtaccaggaccaggtggatgatttcttctacaacatgctgggcctgctccagaaccagtaccagaagctcggcaatggcgtccgcagcaagggcaagttcaggaagagcgactagttcgattcgatttgtatacaagtatatatacatgtacagtatttgtacgcctgtcctagcagatcgcctcatggcatgtaatctggcataattccagcatctcagcactgatttcctcagcagagagtgtctgtcaaactcgatgttctgtacagttgatcatcaactactttacaatgc

SEQ ID NO: 19391 - DNA, 1108 bp, Setaria italica
  misc_feature (1078)..(1108): n is a, c, g, or t
  Peptide Sequence Number=SeqID_85365
cagttctctacctcgccattgaacgagcaatctccaatagcttcgcagctcaccctgatcatcccagaagatcaagcgctccattcagtaattttttatccaagaggactctgaaaaagaaaagatggcagagcgttcagagaacgcgtcgggggacatgatgagcaacatcatggaggccatcgccgagaacctccccaacaagaagtcggtcaagttcgacgacggcgagggctccatctccgaccaggccaggaagctgttcggcggcggcggcggcggccagggcaacaagaagtctctccaccacttctttggcggcgggaagtccgccgacgtgctgctgtggcggaacaagaagatctcgtcgagcgtgctgggcgtggcgacgctggtgtgggtcttcttcgagtggctcgactaccacttcctgaccatcgtcagcttcgcgatcgtggtcggcatggccgcgcagttcggctggtccatgttcgcctcgaacccgccccgcgtcgagctgccggaggagctgttcgcgaacgccggcaaggccgccggcgcccaggtgaacaaggccctgggcatgctccaggacatttcctgtgggagagacctgaggcggttcctcatagtgatcgccgcgctcttcgcggccgcgatcgtcgggagcttctgcaactttctgaccgtcatctacatcgggttcgtgagcgcgcacactctgccggtgctgtacgagaagtaccaggaccaggtggatgatttcttctacaacatgctgggcctgctccagaaccagtaccagaagctcggcaatggcgtccgcagcaagggcaagttcaggaagagcgactagttcgattcgatttgtatacaagtatatatacatgtacagtatttgtacgcctgtcctagcagatcgcctcatggcatgtaatctggcataattccagcatctcagcactgatttcctcagcagagagtgtctgtcaaactcgatgttctgtacagttgatcatcaactacttttacaatgcaataagccaatagtgcttagcttcggactcgaaaaaaaaannnnnnnnnnnnnnnnnnnnnnnnnnnnnnn

SEQ ID NO: 19392 - DNA, 1300 bp, Setaria italica
  Peptide Sequence Number=SeqID_85366
ctttgttctgtaaatgtgctgttaaattatcatagatcactttaacatgtacaaagtaaaccatggactgcacagtgaccattgatgtttgcgatactagatgaaatagatgctacaagcctgcatcctctttcagctgatccgtagttcgctggataccatgctccaaccaaattatatccttattacagggcctttgtacagacctctcgcaacaacaaagccatcggggggctgatggtcctccaactcctccaaccagacaacttgtgagctatctatctcagcaggcaaaacaacaggtggttgattcactagagacttccggaagtaagaacaatgccgcccgtcctcagcagagtatggtggagaaaggacatcgaagagagcacaaggtgtgatggctctgaaagtatggatgttaccccctctattagggtaaagaatgctcgtctctggtgcagtcatttcacgatctctgacaagctttgctggtcttgcttgtaattgatcaattggatgatcaggtacatcaatccaatcataagattcagcatgcaatcttccataaagaagcttgctaagtacagtcattccaggatgattatgaagtggaataactgaagaaggtggcatacaaaatatacccatagagaaactttcacattcatgaatgtgcaaatatttgattggagtggcgaactggttagccccattacgtcctcgtctcccatttgatgagcgtgttgaactattccaattgcgtgcaatttgtgcttcattatctaggccaacatctaaaggccttatctcctctaacagtgcacggactctctcaagtgcctcttcagatatgggtccgtctggagagaatgatactttacacgcattcgagagattctttatttttggcatcttgcacttcaatgtattcttgaaaagataccaattatcaaacttcttaaagctctactttattccgcaaccgaaagactgatcaacagattgttggagcacaggttgcctatccttgcacctagaagccggctgagtagggtgttctcttgttgcaggccgctatcctctttcctttaccgccttaccggcggtggtcactcgcccgccgctccgtctcctagatagggttagcgtcacagcgcacgcacgcacggtaccgaggcgacgcacgcacgctaccttggggggtcggcacttgggcagtcgactgagtcgctgctggagtatggtgggctgggcagttgggaagacacacaaacgggtgcagatccccctcaccgca

SEQ ID NO: 19393 - DNA, 473 bp, Setaria italica
  Peptide Sequence Number=SeqID_85367
cacggagagttcttaaggtggtatttcctctgaagttcttgacggaaaatgccagtgtacgtagcacataaccaccaactaaacaccaaaccttctccaatcagaaatgatgcccttggatccgcaccatgaaatattgctgtcagaattgccagcgtgatccctccttccacaaacacagcatggcagacgcaaggagttgtccatgggatgtcctctctaagagcctcaacgttgcgtccaaacagcacgcaaggacaaaacaatccagttcggcctagtgtcacaataaacagacaatttgacagttaaatactgtttcaccagataccctcttctcaaacaagcattccagacatagccactcatgtaaatgggcatagagagaaatgaagcaccatgcccccaaattttggatgtgattcccgactgctcaattatccaaactcgagcatttcattgattatgcactt

SEQ ID NO: 19394 - DNA, 1044 bp, Setaria italica
  misc_feature (1)..(11): n is a, c, g, or t
  Peptide Sequence Number=SeqID_85368
nnnnnnnnnnncaggcggctagctcttggattcgattaacctatgcacgagcagcacaggtgctcaaaataaaactagtccgtccagtatacattaatttgagagagtacagaaccaatagctggatcaactcctctgttatcaccaacttccttgggtcctcacattcataagaaattaaccacatgctcactcggatcagtttcacgctacccatcctagtactcctgatcctagtacacctacagagggatgacctcaatgtcatcgtgctcggtctttgctgcttcatgctcggcattcgctgctccattctccgggaccgcaggagcacggttctctgacatgctcatctcttgcactggaggtgggttcacaaccgtcatgggcacagcattgttctctgcgagccgacccctcctctcgcgatgctcctggcagtttgcacaccagtgcaagcagcagtggaccatgcatgggtcgcacggagagttcttaaggtggtatttcctctgaagttcttgacggaaaatgccagtgtacgtagcacataaccaccaactaaacaccaaaccttctccaatcagaaatgatgcccttggatccgcaccatgaaatattgctgtcagaattgccagcgtgatccctccttccacaaacacagcatggcagacgcaaggagttgtccatgggatgtcctctctaagagcctcaacgttgcgtccaaacagcacgcaaggacaaaacaatccagttcggcaggtttcggggtcgtcggtgcatccgaagattccggtagtccagggctcgtcggcgggcggttcgtagctctcgggcaggacctggccgcactcgctgcacctccggccttcgagctgcgggacgtggactggctggttgagctcgccggggcggatgtcctcggtgggggcgtcctggtccttggtgagcttgacgtagcgagacgggtggctgctggtggcgtcctccgccatggccgccaccgcctgactatccgagatcgacgacgacgacgaggtaatt

SEQ ID NO: 19395 - DNA, 285 bp, Setaria italica
  Peptide Sequence Number=SeqID_85369
ttgtcgagtttaattactttcaaatttaagttcatgatgctgtgtagaaaaggaacttggtttcaggatcttgttcatctggatgtgtgtgcgattgcacttgcatgtttgggtaattggttgggcaggttcagcaaattgtccgcaaggaggagtgggatgtgttcatgagtttcttacggaaaccattaccagcaacttttaggatcaacgccagttgccagttctataaagatatctgctcaaagttggaaaatgactttaggcaatctttggagagtgagc

SEQ ID NO: 19396 - DNA, 2127 bp, Setaria italica
  Peptide Sequence Number=SeqID_85370
gtttctaaagacatgagagtgaggttggtaacataactaggcaagaggctgttagcatttagtaccgacggggagtgggatgtgttcatgagtttcttacggaaaccattaccagcaacttttaggatcaacgccagttgccagttctataaagatatctgctcaaagttggaaaatgactttaggcaatctttggagagtgagcaatgagtatggagaagatgctatcaggcccttgccttggtatccaggcaatcttgcatggcatctgaatttctctcggaaagaactgaggaaaaatctggcactcgagaggttccaccattgtttctgaatgtacaacctgatcaccatattcttgatatgtgtgctgctccaggctctaaaacttttcagttacttgaaatgattcaccaatcaaaagaaccagggctacttccaggagcgttggtgatggccaacgatctcaatgtgcaaagatgcgacctccttatccataatacaaagagaatgtgtactgccaacctaatagtaacaaaccatgaagcacaaaactttcccaattgttctcttgcaaaggattattcagaagcttataaggacaactgcaaatcacaaaggttagaattcgaccgcgtactttgtgatgttccctgtagtggtgatgggacaattcgcaagggtcatgatatgtactagtgcgactgagtcggagaggggaaccaacttcatcttctgcaagtaaatattgctatgcgtggtattgcattacttaaagtgggtggaaggatggtctattcaacctgttcaatgaatcctgttgaaaatgaagctgtcatagctgagctccttcgaagaaatggaaagtctgttgaactacttgatgtttctagtgagctgcctgaattggtccggcgtcctgggcttagcacttggaaggtacaagatcgaggatcttggtttcagactcatgatgatgttccacatgataggaagaatgtagtattgccgagcatgtttccttcaagtaatatcactgaggaaagccatgctgtatgtggttatgttgaaataaatacagataataggggcagcttctcaagaaattgcgacatcgaagaaacaagcaacattaatcatgatatggatggagtttctaccgatcccactaggaatctagattgcacatctaacattgtgaattcaaaatttccactgcatcggtgcatgaggattgttcctcatgaccaaaacagcggggcatttttcatcgccgttcttcataaattgtctcccttgaatggcagtcagatacagggcactaaggttcagcacacacttgggaaaggcaggatcaagcaacttcacaaagaacctgagccagaaacaagaccatgtgaaactattttgacatgtcaacagaacaatgttcttgaagttgatgatgctgaactgctgggtaggcgacagaatttaagcggggacaaccaaacttcaaaggataagaactcaactgaagttgaaatggttttcaatgatgtaaaaagtggtcgagaagaatcaggagacataatgaagttgcaaaaacagagcaggcggaaaggggttgatcctgtgttattttttaaagatgaactggtgataaagagtataaaatccttctttggcatcaaggaatcattcccactcgaaggccatctggtgactagaagcactgataatgccaggagaatgtattacatatcaaaatcagttaaagaaatcgtggagctgaatgaagaagttggtgagcagcttaagattgcttcgcttggcgtaaagatgtttgaaaggcatagatcaaaggatggctgttcatgtgcatataggttgtcttatgagggtttatcactacttctcccatacatcagcacgcggatattatatgcatctccactggatttccaccgcctattacaatacagaaccatcaactttgctcattttgtcgactccagatttggggaggaagctgcatccatgatgcccggttgctgtgttgttgtgttacttgaagggcatgagaatgcagattctattttgaaggatcccaccacaattgctatcgtttgctggagagggaagggg

SEQ ID NO: 19397 - DNA, 640 bp, Setaria italica
  Peptide Sequence Number=SeqID_85371
gatgtatgggagaagtagtgataaaccctcataagacaacctatatgcatctccactggatttccaccgcctattacaatacagaaccatcaactttgctcattttgtcgactccagatttggggaggaagctgcatccatgatgcccggttgctgtgttgttgtgttacttgaagggcatgagaatgcagattctattttgaaggatcccaccacaattgctatcgtttgctggagagggaaggggacaatgaatgtcatggtttctccaccggataggacggatctgctggaaagaatggcatatcgctttgggattaaagcctctgcagtggaagatgagaagttgctatcacaaggttaatggatttgaccagggaagatggtagcatcatgagaatctgagatcgataatcaagaacctctagctagaagtgaaatatcatatccggagcttctgcagcatagggtgtccgagtaaatagaggtgacgcggtaacttagggtgtgtttggttggttgtatcatttgattcatgtatgaaatgattcaaaataataatgatcattttgtttggttgggtgaattggaccaactcatctagaatgaggccatcctacttaatacattattactaact

SEQ ID NO: 19398 - DNA, 462 bp, Setaria italica
  misc_feature (420)..(462): n is a, c, g, or t
  Peptide Sequence Number=SeqID_85372
tgaggttgcgaccaatggcaatgtgctcctgatcaggtacaaggggaaacccggcaacccgacctccccgtccccggcgagctcgctggacgtccgcctgctgcttccctccggctacgagaatcccacgacgatggaggccgagctcacgtttggagcgctgctggtgaccgtcgccaagcccaagcaagcacccagtccgatacccatcagaacgtcggactagctgatccacctggtgtgtgtgcaaggccagtaagtaaagatgcatgcgtcggtaatttaagaaatattgtcctcccaaatgatcatgtatgtgctcatcttctgtcgtatgtgcaacaatgcacaagtactatagcttgtatgaccttgccaatcaataaaatcatcttgcaagtttaaaaaaaaaaaaaaaannnnnnnnnnnnnnnnnnnnnnnnnnnnnnnnnnnnnnnnnnn

SEQ ID NO: 19399 - DNA, 479 bp, Setaria italica
  Peptide Sequence Number=SeqID_85373
gagagactcaatcttgcaggaaatacagtttgtggaattacctactcgattgacaatgactaatcttaagtatttaaccttaaccataaccaattacaaggaaacatcagcgatgtattttccagcctttatagttttgacagatgtggatctctcctttaattctcttacgggtgatcttccacaaagtttcactggattgtcaagcctgaaacatttgtatgaaaggatgcctgtgcatttattttcatctcctatacacatctcattagaactttttttgcattaacccatccttttttttctcagatatttgcagaacaatcaatttactggttatatcaatgtcctagcgaatctcccccttgaagctctgaatgttgcgaacaaccgtttcactggttggattcctagtcaacttaagaagataaacagtatacagactgacggaaattcttggagcacaggaccagcgccac

SEQ ID NO: 19400 - DNA, 554 bp, Setaria italica
  Peptide Sequence Number=SeqID_85374
taaacaaaaaagaaaaaagaacaaaataaataaaacaaacctaataaaaggacgaactagtttaattcagttgcagatctacaggtggcaacagacagcttcagcttcgacaaccttgttggagagggtacttttggacgtgtttacagggcacagttcaatgatggaaaggttctggccatcaagaaattagacagcactgtgatgccattccaatcatctgatgactttgctgaactggtctctaatatctcaaaattgcaccatccaaatctaaatgagcttgtgggctattgtatggaacacgggcaacacttgcttgtgtatgatttccacaggaatggatcgcttcatgatctacttcacctttcagacgattacagcaagccacttagttggaattctcgtgtcaagatcgcactcggctctgcccgtgcactagagtatcttcatgaaatatgttctccatccatcatccataagaatttcaagtcatcaaacatttttgtcttggtacttcggtaatttctaattcctactattgttttcagatg

SEQ ID NO: 19401 - DNA, 1110 bp, Setaria italica
  Peptide Sequence Number=SeqID_85375
tttttttagtattaatttaacaagactactaagaacccaggtcagagcagtcacttgtgcggtgggcgaccccccagctgcatgacattgacgcgttggacaggatggttgatcctgcactcaagggtctatacccagccaaatctctatctcgatttgctgatgtgctcgcactatgtgtccagcctgaacctgaattcaggccaccaatgtcagaggtggtgcaagcactggttcgacttgtgcagagggcaaacatgacaaagagaatgctcgatggagatacttctcgccgaccagatgaccaagaccaagatttcatatgatggaagaagaacccgatcctttctgttacatctcaggttgtatttattccattcgactagtgccagaagagagataagtggaagaagaaaacagaggagtttgtcagcttcgccagtacataatcacaggtttttcttggtaacaaaggagttgtgttctatggttgatggttgtattgtgtcaagaaaaacagtaccttgatcttagattaatgcattctattgtattctttggctagattatattcaaatgcacctgataaacagaactatggtgtcaagttctctgaatgttaaaataatcaagtactctcagtactgctgcatcagctgaaacaagatgcataataatctgaaatcagtgcaactttggtgggtgtgatctggaatctgttctaccaaatctcttcacatttagcattcccttattaagaagatatgcataaacactagtttcgagctgaacagatgctgtcccatttgttatctgaaaacaccaccaccttaaggctcatgcaggtcagacggtctgagccgtccgtatgatgcgactatccacacgcttcaacctcattagagactccacgtgtgctctcagtgcatgcctttctcccaacctgcaaacagaatcgatcagattctcactcagtttcctgctttgacattgcccagccaagaagaccaaatctcgcaatccccacagcactcttacctggtgatctcggcgcgccacctcgcctgatctacgatctgagagaacggcattgagctgctgagaagatga

SEQ ID NO: 19402 - DNA, 2488 bp, Setaria italica
  misc_feature (2469)..(2469): n is a, c, g, or t
  misc_feature (2483)..(2483): n is a, c, g, or t
  Peptide Sequence Number=SeqID_85376
gtgcacacgcacacgcgcacaattcatatccgggggttgaagagcggcgccacgatctgttaaaaaggatcgtaattcagtcggatttggaggcgccgagtacacaagggagctcctcccggtttcgctaggggggaggaccggaggagagcattgccgcgcgagatggcgaggaggaggaggggaggcggtggcgggacggtgggcgcgccatggctggtgctgctgctcctgggatgctgcggcggcggcatttggccacgcggacggatcttcgctgctgccgacacggaccccagcgatcttaatgtcctcaatacactctttactagtctgaattctcctgggcagctcaatggttggcaggcaaatggtggtgatccttgtggccagtcatggaagggcatcacttgctcaggatcaggggtcactaaaatcctattgtcgaacttgggactctccggaaatttggcctacaacatgaataacttgggttcattagttgagcttgacatgagccaaaacagtcttggtggtgggagccaaatacagtacaatcttccctatatgaagcttgagagactcaatcttgcaggaaatcagtttggtggaaatttaccctactcgatttcgacaatgactaatcttaagtatttaaaccttaaccataaccaattacaaggaaacatcagcgatgtattttccagcctttatagtttgacagatgtggatctctcctttaattctcttacgggtgatcttccacaaagtttcactggattgtcaagcctgaaacatttatatttgcagaacaatcaatttactggttatatcaatgtcctagcgaatctcccccttgaagctctgaatgttgcgaacaaccgtttcactggttggattcctagtcaacttaagaagataaacagtatacagactgacggaaattcttggagcacaggaccagcgccaccgccacctccatatacagcgccgcctcctccgaaccgtaggaacagcccagatggttcatcaagttctggtggaaaatctgggataggtggtggaggtgtggctggaattatcatatcattgctggttgttggagcagttgttgcgttctttctaataaaaagaagaaaacgcaaagctgctaaggcagaacactatgaacagcaccagccattcacttcctttccctcaaacgaaattaaagacatgaagcctattgatgagtctaccacagtagacatagagtctttggcttcacctgcttccattagtctgaaaccgcccccgaagatagaacgccacaaatcgtttgatgatgatgatttttcaaacaggcctgttgcaaagaaaagcaatataacacctataaaggcgactgtttattcagttgcagatctacaggtggcaacagacagcttcagcttcgacaaccttgttggagagggtacttttggacgtgtttacagggcacagttcaatgatggaaaggttctggccatcaagaaattagacagcactgtgatgccattccaatcatctgatgactttgctgaactggtctctaatatctcaaaattgcaccatccaaatctaaatgagcttgtgggctattgtatggaacacgggcaacacttgcttgtgtatgatttccacaggaatggatcgcttcatgatctacttcacctttcagacgattacagcaagccacttagttggaattctcgtgtcaagatcgcactcggctctgcccgtgcactagagtatcttcatgaaatatgttctccatccatcatccataagaatttcaagtcatcaaacattttgctggactcggaattcaatccacatgtttcagatgctggacttgcaagctttattcctgatgctgaattccaggcagcagaacaaagtgcgggatacactgccccagaggtggacatgaccggtcagtacaccctcaaaagtgatgtctacagctttggagttgtcatgcttgagctattgacgggacggagaccatttgacagctctagacccaggtcagagcagtcacttgtgcggtgggcgaccccccagctgcatgacattgacgcgttggacaggatggttgatcctgcactcaagggtctatacccagccaaatctctatctcgatttgctgatgtgctcgcactatgtgtccagcctgaacctgaattcaggccaccaatgtcagaggtggtgcaagcactggttcgacttgtgcagagggcaaacatgacaaagagaatgctcgatggagatacttctcgccgaccagatgaccaagaccaagatttcatatgatggaagaagaacccgatcctttctgttacatctcaaaggtaaggaaacaaataagaaaaccggtaaacaaaagtaaaacaaaaaccctaaaacaaaaaaaagtaaaagaaaaataaaagtaaaactaaaaacaanattagaattataanaataa

SEQ ID NO: 19403 - DNA, 1557 bp, Setaria italica
  Peptide Sequence Number=SeqID_85377
gtccttctaacatagatagacccatttccagtatgaaagatgctttgtctttgagttcttcattgtctgatgtggtgtggcctttagctggcatattgaaggatcatgcttttttgtttgggaactcagccttcttgattcaattcttgatttatgcatgcatgagatgtcatcttctgttgagcatagtattaacgccaatcaactttacctgactcttaaaaagaagcttgcaatccatgtggaaaacaagttttccggtatataacagaaaggattgctccttcactcatcctaagtttagatgaagaaattagtgctttactacagctgggtcaaggaagaagagaatcagatcaacctaaaagagattttgctgccgttggaagggttgcattaatgcttgaggaatattgtaatgctcacgagacagctagaactacccggactgccgtttcgctaatgaaaaagcaattgaatgagctcaccgaggctctgcgcaaaaccattttggaaacagttcaggttgaatggctacatgatctttcatctccccatgtgcaaaaggcaaaggttttgtcacaaaatatccttagcgatgataagttcatctctttgattttaaatctgagcagaagcaacatgttagataagatccagtcttcggtctcgttgataacaaggtcaattgaattcctgcaagcttgtgaaagcatttctatttcagctgaaggacaacttgagagagcaatgggatgggcctgtgctggtacaaatacttctggtgcaggtggttcaaccgcaaagggttcaggaattccccctgaatttcatggtcatctgttgaaaaggaggaaattgcttcaagtggttcaaaaagaggcatctgatcttgttaagttgtgcacatctgttttggagtttgaagcatccagagatggactttacttcattcctgaggataaagcttcccgaacaatctatggacaaaggcagggcctggcagcaaagtttcgtgaatctcctgacacgtctagacgcagcatatcattcctttatatgtgcagaacaggagtggaaagttggccaagtcaacctggaaactgctggaaaaggcttgttttcagcaaacaaccaggtttctgtagtctctgtaaaagcaaaatctgcactagttaatctacaggatgctcttgtagccatgtatgaacatgcttgtgaagtaagtgcattgctatctggattcaaacatgtatcacaggatcgcactgccttgacttctgaatgtggttccttgctcgacgaggttttggctatagcagatgggttgcatgatgtgtacgctctggggaaggaagctgctgcagtgcacagttcccttatgaccaatctttctaaggcaaatgcaactttatttccacttgaagcatgtctatctgctgatgtaactattatgtctgaagcaatttcaaaggaaagggaagaacaatgccagtatgccccttattcatggaaaggcattattccaatcttataacattaaaattagggaagctt

SEQ ID NO: 19404 - DNA, 1356 bp, Setaria italica
  Peptide Sequence Number=SeqID_85378
aattaccttcagggatcagttcattggttcagttgcagtacctggatttgtataacacaaacatcaggtccctgccaagggagctgggatctctagcaactctgcggttcttgcttctctcgcatatgccactggagatgatcccgagtggtgttatatgcagcctcacaatgttacaagtcttgtacatggatctcagctatggagattggaaggttggcacaagtggaaatggtgttgattttcaggagctcgagaacctgcgtaggctcagggcactagacatcacaatacaatcacctgaggccctggagcggctgtctcggtcatttcgtcttgctggttccacaagaaatctactgataaagacctgttctagcatgacaaagatagagcttcctatgagccacctctggaagaacatgactaatctgaagagagtgtggattgtgagctgcagcaacttagcggaggtaataattgatgtcaccaaagaaactgttggcagcaatgcactaccccgtgccatcttgcaagctcgggctgaacttgtagatgaagagcagcccatccttccaaccctgcatgatatcatccttcagggactccataaggtaaagatcatctacaaaggcggatgcatacagaatctatcatcattgttcatctggtattgccatggcctggaagagcttattactgtcggtgaagagcaagacattgcggcaggtgacggagaacaagcttcgggagcatctagagttatcacacccttccctaacctcagagaactgtatctccatggcctggcaaagttcaggaggctgagcagcaatacatgtacgctgcacttcccggcgctggagagcctgaagattatcgagtgcccgaatctgaagaagctgaaactttctgctggagggcttaatgtgatacaatgctcaagggaatggtgggatggactggagtgggatgatgaggaagtcagagcttcatatgaggacctgttccgcccattgcactaaattcagttctggttactagaggttctgttcttttagagattggtcattccccattcatacaaaagattgcctgaatttagagattgctagtctgcagtgagtgtaatcttgcttatctgatcatttgtgtagttcaggatttcagggctgtgttgttcatcttgtctgaaaatgcaagttgggtgattctagttttttgcacagcccatgttctgcacttatgtctcatgtatggccgcaggaaactagcgaatgtaactactgagcatttcaaaacagtatgacttatagatgtcatcatttctctgtttctgccttctcggagaaacca

SEQ ID NO: 19405 - DNA, 535 bp, Setaria italica
  Peptide Sequence Number=SeqID_85379
cattctacaacgattcgagacatcgttctgccactgattacagtaaacctatacttgattggcttcagaattccggtgatgaggtagctgagaagtgggatgccataacatcgggtgttttgaagaaacggcagaaggatttactgaggggtttgaatatttctaacgtgcccgaatttaaatctgaaagaatgcaaacaactcgcttctctgacctgcacttccggcctggtgctgggtacctctactgccatcagggtagctgcaatcacaggatcgtgataagggacatgaggttgatccaccaggatgactcgcaggaccaggcagattaccctctccagacgttccagttgcagaagcgcttgcagaagtgctcggtgtgccagatctaccctgccaccaagatgacggtcgacgacaagtgggcgctgaacaacccctgctacttctgcatcaaatgctactacctcctgcactacaaggaggacaacacgctgcttatgagcacactgtatatgatttcatccaagag

SEQ ID NO: 19406 - DNA, 517 bp, Setaria italica
  misc_feature (1)..(35): n is a, c, g, or t
  Peptide Sequence Number=SeqID_85380
nnnnnnnnnnnnnnnnnnnnnnnnnnnnnnnnnnnaacgcgaaaacaccaagattcattgtcacactcttcacttcttttttacggttccattacattagtaacaactcttattcgacaaaataaacaattcctcaaaaaagggcacaaactgatttctttcttttcagcagtcacacaaaattacatttgtaaactttgaggtatagcttatgtgtacagaggattacaaagaaacaagataaggtggcgacacaactgctggctttgttgttcaaacaacctcccaaatggaataaattacaccacagctggcacacgctttttaaaataagtcacatgttgcatctgtacatgacaatatgttatttgcacttctattacgtagcctgttgcaaaaggaagtccccaaggacggagcttgcgctgttgtcctaagggctacgttcagcactggagctgtttgcgttcctctcattttccatagcttcttgatgttcgctacattgtagaggatg

SEQ ID NO: 19407 - DNA, 1678 bp, Setaria italica
  Peptide Sequence Number=SeqID_85381
acagctccagtgctgaacgtagcccttaggacaacagcgcaagctcctgcgctgttgtcctaagggctacgttcagcactggagctgtttgcgttcctctcattttccatagcttcttgatgttcgctacattgaactccacattcatcatttccatcaaatacttttgtgtcgctctgcccttgtgaatgtgaaacattcagatgtgccttaggatttgggttttgttctttgttctctttcccagcatcagagggcattttgattcttggtgcccacagatgatttttcgtgggacgttcacccttggcaatgaccgttcttgctctggggctatcgaatctcttagcaaccctagtcttctctgcagattctgcttctgaattaggttgcttcaacactttccctgctattgacggccttggttgagatattggccttctcctatcaatggcttcaggtgaggatggttgaggtgacactctggctgtgttgggttgtcttggttgagatgttgatctcttggtagtgacttttttgttaatatcctttgtagatgagttggatatttcatttctcatgtcatgttcgagtgacttcagcctccttttgagtttgtcattaagttgggcttcaatctttgcagatttctctgctattgttatcttgtcacgcagtcgttgtatctctccctgcaagagccttcgttcttcaagccatctcttgacaggcatcaacttatcagagtcgtctttccattcgttcgccgctgtcgatgcaacacgattgacataaaccttggctcgtgctagctccctctcaagagttttcttttcctcattcaacttggcagcctgattctgatagaagtgcactgcattggcaacctcaccagtctcaagaattgactcctcaagctcactaatggtatgcgtgagcttctcaacctccaataccttctgcctgttagccttttctaacaatttgttctcttcatggtatatctccatctgtttcttcagttcgatgttctggttctgaacatcctctacaatcagtgccctctcaagtgcgctacgcaaaatattccctgcttcgacaagcgccacctccttcaactttacatgccgttctagcgccttcttgtcatcctggagaactgcaatctcatgtctgtactttcttatgtctgactccaagggtgcgatgatggcgtcgaagggaactgattcctcgtctttttgggaagagtggatccttcttagtgttgcctctgcagcgaactgtgcagaaagtgcttctttacgctcattgcttagtcgtttcacatccaaattcttttgctcaagctgtttttccaaacttctcatcttctcgtcctgtttctttagttccttgctcagttcagcaatagccttgtccttcagagcttcggtcaccttcaagcctttgatttcactgtatgcatgtcccagctctcgctccttttctctgaggagattctccagccgattgagctcgtcgacgacgggatcagagtggcaatggccatggaacatctccttgccatgatcaacctctcccaagctacccatctctttctccccccacaatgctaataaggaaggcttggccacaagctagctatagctctggctgctatagcgctagcagtttc

SEQ ID NO: 19408 - DNA, 193 bp, Setaria italica
  Peptide Sequence Number=SeqID_85382
gtggcgggcgcgtggccgcaaccgaacgtgccggcgttgtgcctgcccgggagcgcagggaaccttcacctgagccggctgcgcacgtcgctgagcgcgcgcagcatggcggcggacgagctgctcgcctcggcggactacgacgggctcgtcgggtcgccagcctcggtgcgttcggcgaggggaaagacgc

SEQ ID NO: 19409 - DNA, 241 bp, Setaria italica
  Peptide Sequence Number=SeqID_85383
tgcattaactggtttgggaaatgttcaagatgtagaagaggacagtcaaggatacccattgccacctatcatttcttgcatttcaggcattaagtcgctttgcacagatataagcatgtccgatttcgttctccattgcttgtattatgacacctttctgttgttgcttcattttaatctgcaggatctggagtcaggtctgtatcttgtggcaacgccaattggtaaccttgaagattat

SEQ ID NO: 19410 - DNA, 582 bp, Setaria italica
  Peptide Sequence Number=SeqID_85384
agctgatatatcagcagcggccctgccttgaaggtgcgcgtttcgttctctcgtgtgcgtgggcgttgatggcgtcgtcaacggcgtactcgcggccgtccaagccgccgggaccggtggccggcgaccggagagggccgcggcttgccaaggaactcggcaggatcgagcccaagaagttgggcatcgggctggtggccggctgctgccttgcgctgctcacctacctgtcctttgccaggctcttcgccatctactcgccggttttcgatagctcggccttggtgttgaagaacgcgccgccggcaacgacgacggtgccggcaacagaggccccgccggtgcagccaaagaccgaagtggagcagaaagatgttactgaccctgaggtggaccccaacttggccaacttaccagaggccacaagaaaggaagaactgaaggaggccccggcgacgaagccagctgctgccgctacggaggccaagatcacgtgcgacgagaacggcgttgacgagggcttcccgtacgcgcgcccgccggtgtgcgagctcgccggcgacatccggatcagtccgaagg

SEQ ID NO: 19411 - DNA, 462 bp, Setaria italica
  Peptide Sequence Number=SeqID_85385
gccaggtaagaaatcgtgttgtttttccctcttctaggacctgacagcactctgttgtgcccgtttaattatgattcccaaaaaataacttgataagcttgaattcgtatctcgatgctgtttaattagttcgtataccatacgttttaatcaagacacatacacatgagtcctctgtacttgtgttttcttcagctgctgccgctacggaggccaagatcacgtgcgacgagaacggcgttgacgagggcttcccgtacgcgcgcccgccggtgtgcgagctcgccggcgacatccggatcagtccgaaggagaaaaccatgtacttcgttaacccgtcgggcgctggccccttcgacgccaacggggagaagaagattcgcccgttcgcccgcaaggacgccttcctcctcccgggtgttgtggaggtcacgatcaagtccgtctcctcggccgaggccg

SEQ ID NO: 19412 - DNA, 452 bp, Setaria italica
  Peptide Sequence Number=SeqID_85386
aaatgcttcagccatagcgcttcctctccttggatcttctttctcctagcgcgttcttgctcttcttctccttccctttcccccgtgctctctcttttgactccctcctctagttggagagcattgtgtcactggatccctgaggtgctgctgcagggttcgatatgacgtcgacggcgtactcgcggccgtcgaagctgccgggcggcgtcgagcggcggctgccgcctcggctcatgcggggcctcacgtccaagatcgaacccaagaagctcggcgtcggcctcatcgccggctgctgcctcgcgctcctcacctacgtctccctcgccaagctcttcgcaatctactcccctgtattcgccagcacggccaacacgtccgccatgctgcagaactcgccgccgtcgtcgcccaagccgtccgtgccggagacggaggccatcccgccg

SEQ ID NO: 19413 - DNA, 594 bp, Setaria italica
  Peptide Sequence Number=SeqID_85387
gcaggcacgtccgcgccggcctccgccaccgtaacgttgaacccgagctccgtcgcggccgtgcctgcgttcgcggcgcaggtgaacgcggcggacgtgctcctggcggtgcacgggccgggctgacgaaccagatcttcctgccgacgaacggcgtggtggtgcagatcgtgccgtgggggaagatggactggatggcgaccaacttctacgggcagccggcgcgcgacatgcgcctccggtacgtggagtactacgtctcggaggaggagacgacgctcaaggacaaataccccagggaccactacgtgttcaaggacccaatgcgcatccacggccagggttggccggcgatcgccgagatcatcatgaagcaggatgtcatggtcaacatgacaaggttcaagccgttcttgctcaaggcgctcgacgagttgcaggagtaggagacggctgattcccctttggttggctgctttcggttccatttgtgtggttgggtggggacaattcggataggccagcacagatacggtacacgggagctttcattgatttttctctctcggtcatttaaatcaacttaattgttta

SEQ ID NO: 19414 - DNA, 522 bp, Setaria italica
  misc_feature (502)..(502): n is a, c, g, or t
  Peptide Sequence Number=SeqID_85388
tacaaagtttacaacgaccacgccgctgctgaagaagctctccaactacgacgtgatcaacttcgacaaggacgaggaggtgcactgcttccgggccggccacctcgggatgtaccgcgaccgcgacctcatcatctccccgcacccgacgcgcaacccgcacaactacaccatggtcgactacaaccggttcctccgccgcgccttcggtctgccgcgcgacgccccggcggtgctcggtgaggagaccgccgccaagcccaagatgctcatcatcgagcgcaagggcacgcggaagctgctcaacctgcgggaggtgtcgtcgatgtgcgaggcgctcggcttcgcggtgaccgtggcggaggccggcgcggacgtgcgccgcttcgcggagcgcgtgaacgcggccgacgtgctcctggcggtgcacggtgccgggctgacgaaccagatcttcctgccgacgggcgccgtgctggtgcagatcgtgccgtgggggaanatggactggatggcgaccaa

SEQ ID NO: 19415 - DNA, 2066 bp, Setaria italica
  Peptide Sequence Number=SeqID_85389
gtaggtagtcccggtctattgtcggtccccggtattgtcttgtattctattcttcccggttaaaggggtttttaaccctaaacgaacgaacggggtgtagacgaagactagtgtctccctcgccaagctcttcgcaatctatcccctgtattcgccagcacggccaacacgtccgccatgctgcagaactcgccgccgtcgtcgcccaagccgtccgtgccggagacggaggccatcccgccgcaagaaacgctagccggtggcggcagcagaggtgacgccgtggatctgccggaggtggcggggtccgaggagcccggcttgccggaagcagtaacgaggaaggagatgtcggcgggggcgggttctgacgagcccggcttgccggaggcgctaagcagaaagggcgacggcgagaatgcggcggcggcctcggagccaaagccatctcccaagaaagaggaaggggagcagaggcccaatggcggcgcggcagctgcagcggcagcgtcgtcgggcgaaggcaagatgacttgcgacgagaatggcgtggacgaggggttcccgtacgcgcggccgaccgtgtgcgagctgtccggcgacatccgggtgagcccgaagcagaagaccgtgtacctggtgaacccctctagcgccggcggcttcgacgagagcggcgagaagcggctccgcccctacgcccgcaaggacgagttcctcctccctgccgtgacggaggtgaccgtgaagtccgtcccctccgcggcggcggcgccggagtgcacgaagcggcacgccgtgccagccgtggtgttctccaacgccgggtacacggacaacttcttccacgacatgacggacgcgatggtgccgctgttcctgacggcggggcacctcaagggcgaggtgcagctgctgatcaccaactacaagccgtggtgggtgcagaagtacacgccgctgctccagaagctctccaactacgacccgatcaacttcgacgaggacgacggcgtgcactgcttcccggcggggttcgtcggcctgtaccgggaccgcgacctgatcctctccccgcacccgacccgcaacccgcgcaactacaccatggtcgacttcaaccggttcgtccgcggcgctctggcgctgccccgggagcggccggcggtgctcggtgaggagcccggcatgcggccccggatgctgatcatctcccgggccgggacgcggaagctgctgaacctcgacgaggtggccgcggccgcgacggagctcgggttcaacgttacggtggcggaggccggcgcggacgtgcctgcgttcgcggcgcaggtgaacgcggcggacgtgctcctggcggtgcacggggccgggctgacgaaccagatcttcctgccgacgaacggcgtggtggtgcagatcgtgccgtgggggaagatggactggatggcgaccaacttctacgggcagccggcgaaggacatgaagctccggtacctggagtactacgtcggggaggaggagacgagcctcaaggacaagtacccaagggatcacacggtgttcaaggaccccatggcgctccacaagcaggggtggcaggcgctcgccgggatcgtcatgaagcaggacgtcagcgtcaacctcaccaggttccggccgttcctgctgcaggcgctggacaagctgcaggagtaggaagggattcagaaagcgaccaaccaacgggaatgagctgcagccagtgggcacccggcacatacgcatagaggagcagagcagagctcaatcaaaatggggggaaattgaggaggctactactagagaggaaggaaatcaatgcaaggatcttttccttggtagatcgaagtgacttgaggtggcttcaaattggtaaattggtttgtgttttggtttgtaacaacttggatagtgcactacatacactacacacggaaatgttatgtttcattctttttttaccttaacttcacttggcattctagtggagtgttattttgtctagacatgaaatgtgatcatattgtccataagttaatcgagcc

SEQ ID NO: 19416 - DNA, 248 bp, Setaria italica
  Peptide Sequence Number=SeqID_85390
tgaaattcctgatgcgcaaaataggagtaaaggtttaatgttactttggcaagacgatagccactttgagtaagaaccaatgacatcgccaaatgatttgtataccaagaacagacttccatccagttcaactggagttctgctggacagaatgttcacaaaatgcattatcattgaaaaatcgaaggagctttcatcttgtaaaattgtatcagcaaccatgctaagtgcatacatcctaacttcta

SEQ ID NO: 19417 - DNA, 232 bp, Setaria italica
  Peptide Sequence Number=SeqID_85391
ggttggcctgcgaccccatgaggggaggaggcgtaggagccgcaggcatctagcgccatgcacagcgcaacagcacgggccgagtttgtgcacgtagattcgtaggcctcgtcgatcgtgtcgtctggcgattaagctaagatagcaatgctctgcactgcatgtagctagctacgcacgcccttggtttttagggtgcttcaatttgctactttggccaaaaaaaaaaaaa

SEQ ID NO: 19418 - DNA, 243 bp, Setaria italica
  Peptide Sequence Number=SeqID_85392
gggggaacctctcctccgcgctcgcctcctcccgccgctgcgtacggctgctcgcgctcgcggcgcgcgccaatgcgcacctccaggccggcaaccacgggctctacctcgccctgcgcgccgtcgacgccatcgaccgtgatctcgcctcggggcccgagccgctgccgctccccacgcttcgtcgcatgctgctcagcgtcgtccctgcggtgcgcgcccatgccgagcgcgagatctccg

SEQ ID NO: 19419 - DNA, 886 bp, Setaria italica
  Peptide Sequence Number=SeqID_85393
catctggtcaaatagcctgcaggcctcttccaccagacgagcttggaaaagaccatgtaaaacagtagtgtagcacacagcatcaagagcacaattttcacgtacagcctccctcaaaattcttaaggccataaggttccggccctgtctaacaaggatacagaggatggttgcatggacatatgaatttgattcaggatctctcatagcagtactgcggtagaaattgattgcatggtttaccatttccaattggcaaaggctatgcaataaactgacgtaagtgtagctgtctggcctgatgttcttttcaatcatatcaaagtagaactggatggcatctgttggaaaacctgacttgcataaagcactcagcactgaattgcagaccacaagatcataagaagtatctgagtgccgaatcaagctaggaatcctgggaagaagcctttcataagatgacaattgtaagacccgaactaaactagataaagtgtaagcatctggctgtatctgtctcccatgaatttgcatgtaaatgtccagggcgtcatcatatctccttgccttgaccatgcagtccatcagaacgttgtacataacaatgtctgggctgcagccagcagacaccatggatcccagaagctcgctggccaggtcatgcatcccagctcgcaagaaacctttgagcaggggtgtgtaagtgatcaccgtgggaggagaaccagaacccaccatctttgccagaatcctataagcatcgtctagtctcccctcgcgacacagacgagcaatcatgcatgtccacatggccgaggtgagctggcaaccagaaacatgcgcgaaagacagtagccgccgaagctcagacatggtcccaacctta

SEQ ID NO: 19420 - DNA, 244 bp, Setaria italica
  Peptide Sequence Number=SeqID_85394
gttgttctgcctctgttccaattggtattatacctgctggatctgataactcacttgtttggacagtcttgggtgtcaaggatccaatatctgcagcattgtcaattgtcaggggaggtcttacacctattgatgttttttctgttgaatggattcaaagtgggattatgcattatggcacaaccgtatcatattttggttttgttagtgatggtaacatattcaacacttcagaccattttac

SEQ ID NO: 19421 - DNA, 413 bp, Setaria italica
  Peptide Sequence Number=SeqID_85395
aaccaatgaattttcaggactattcctgatatgtggtgtcagtcatagaatgctgaagttattgaccttttatgtgcgaagaaatgtatgtcatcatgcttgttaacacattctgcatgttttgagtatctcaggaacttaggtatggtttaataacaagtgctagccacagcttgcaggtttcaagatggaagtgataaaaactacacatgctggtcatgcaaaatctcttgtatcaactattgattttagtacctgtccagatggtatatgcaatttcacatcttgtatgcgtgggtggtgatggaattgtaaacgaggttctcaacggtcttctgtgcagagatgatcaaaatgtgtctgcctctgttccaattgacaatgctgcagatattggatccttgacacccaag

SEQ ID NO: 19422 - DNA, 3305 bp, Setaria italica
  misc_feature (3266)..(3305): n is a, c, g, or t
  Peptide Sequence Number=SeqID_85396
tccttcgggtcggctagcctccgcggtccgcgcccacggtcgtctccgaccactgcgagctagggtttggcttccccgcctaatcgagctcggggatttggcccccctgcggcgggaggtctcggctaggctcggcccccggttccatccgatttggctcagtcatgcctcatgagtgggcttctcattagcttccccaagtgatgctttgtatctctatgttttttccgaacatgtaacatcccccgatgttatccatgtaccggatatacctttagaagtcagagatgcagaagtctgaccatcatgagcagaaacttacttcaccaagagggctaatccataaaatacttcgtcgtacaaatagcaggcgttctcccactgcagcagagcaacaaacttctcctgtatctccagaaacaagcaacgcaatattttcaaagcaaaaggatcctgatgatgtcatcaatgatccagaaaaggcgagcacacatagtatcagaattgaagatgagaaatctgatttgcttggatatgaggtttattctgggaagcttacattagataacagagctagaagtgcatcaagtgaacagtctggatcagggtctagtggcaattgctttgatgctaggctcagcactgaagcccttatatggggttctaacgtccttaagcttgaggatattgtatctgtatcatataattctggtctccggtatttcacggtgcattcatgccctcttgaaaaaagatccagtggactctcctgctttatgaagcctagaagaacccaaaaggacttgaagttcctatccccttctccacatgaggcctttcggtgggttaatagttttgcagaccagcaatgctatgttaacctgttgcctcaccccatggcatctagcaagaagcattcttctgaacttattccatttgatgccatgcttgatccttatgttaaatctcggtctccaccaaggatacttgtcatcttgaatcctagatctgggcatggtagatctagcaaagtttttcatggaaaagtggaaccaatatttaagcttgcaggtttcaagatggaagtgataaaaactacacatgctggtcatgcaaaatctcttgtatcaactattgattttagtacctgtccagatggtattgtatgcgtgggtggtgatggaattgtaaacgaggttctcaacggtcttctgtgcagagatgatcaaaatgtgtctgcctctgttccaattggtattatacctgctggatctgataactcacttgtttggacagtcttgggtgtcaaggatccaatatctgcagcattgtcaattgtcaggggaggtcttacacctattgatgttttttctgttgaatggattcaaagtgggattatgcattatggcacaaccgtatcatattttggttttgttagtgatgttctggcactctcagagaaataccagaagcgttttggacctctccgttactttgtagctggttttctcaaattcctgtgtttaccaaagtacagttttgaagtggagtatcttccaatatcagatgccaatggtgctgagcataaaattttggtaggacaagaaaaggttgatgcatcagatctttatgatgatgtagttcggagatcgagagcagaatgtttaccgcgtgcctcaagtttatctagcattgattcaataatgtctacaggaatcatgtctggggcagagctggaggtttgtagtcctcgtgcaaacaacgaaccttctgagcttgttcgtgcgcttgacccaaaatcaaagcgcctatcattaggtagagcgagtacatttaaagaaccagaagaagtgctccatccccagtctcatggtacatctactcccagctggcgtagatccaaatcaaagtcaaggactgaaaaggcatggccaggcttgactagtacgaacgatgcaaaatcctctaaggttaacacggcacatgacaaagaggacacatcgtcaacaatttctgatcctggacctgtgtgggattcaggaccaaagtgggacgcagagcctaaatgggataatcagcctaactgggaacctgagacttcaattgaactccatagtcctcaagaggacattgagcttggtctgactaaggagcttgtaccaagcttagatgagagatggacagttaggaaaggacgttatcttggtgtactggtgtgcaaccattcatgcaagactgtgcagagtctgagctctcaggttgttgctcccaaggctgaatatgatgacaattgtttggacttgctgttggttggtggaagtggaagactcagattactgagattttttgtgcttttgcagtttggaaagcatatatctcttccaaatgtagaatatgtaaaggtgaagtctgtgaggctcaaggcaggcccaaatacacatgacggatgtggtattgatggtgaactactccatgtcaaggggcaagttcgctgtagtttgttgcctcaacaatgtcaattgatcggcaggccagccaaaaaccctgtacagtagctgtaaatacattactctgcagactcagtctgcagctctgagatcgggccagaatcttgcacctgtacaagcggcgaactgtggaattttgtccacatccacacatccgcaattatattcagaagtcagagcatccttgctgacactcagctccagagatgtacatttgtggttgataagcaagaaggtgctgggtgggtgctatttatccagatgtaaagccaaggcctatctcagacaacagcctgttgcgcacctattggtttcaccttttctcttgtctgatatctaatacatctactatagagccatccagatgagtgtacttgggtccagaacatagtgttccacctcctccaccccggtggtgtgtacggttgtttggaggtccctgatgccgcccacttgatgctcattacccccattatagggacaacacctccagcgccgtgtccttgatcagcttgttgtgtttgcaaagtgtgaataagactatataggcctgttggattcccagtacagttgtagggtttcagcagaaagggacggacgatatttgtggcaccggtgccgcaactttttcatgtgtgtaactcttgttctttgtgatgtattgtgtagtgatttgtaaacgttgtttgccatacgagttggaattccttatatgtgctgttcaaaacaggataatagtagcgtagcttctggttaacnnnnnnnnnnnnnnnnnnnnnnnnnnnnnnnnnnnnnnnn

SEQ ID NO: 19423 - DNA, 1536 bp, Setaria italica
  misc_feature (1499)..(1536): n is a, c, g, or t
  Peptide Sequence Number=SeqID_85397
cacgccacaagacatctccgacgaagcttcgcgcgtcctccgcctcccctctcaaagcgccgccacgaccccgcaagccaccacgggcaacgcgatggcttcccgcgccagcaccgcctccggcggtggcggcggcggcggcgtccttgccaaggtgagggccgccgccagcctctccagccgatcgcagccgcggcaggagctgggatcctcctcccgggccccagctcccggggccgcgttcgaccccttcgacgtcgatgccgacccgccgtcacaactggagctgacgcctgaacaggtcgggcactgcagcgatgcgctcgcgcacttcgagaagaggaagaggcggagtgacttgtcagaagagttcggaagcctctcggacatgggactgatgaaaaggattagtgtggctcattatcctgttaatagggaaaagaatcgctatattgatgtcttaccatttgatgataccggggtaaaactgaaatccacaacaaccagtttgacttcaaacaatgattacatcaatgcaagcttcataaaggctactgagggcaacagaagagttgcaacatttatttgtactcaaggtcccctagtgaacacatttgaggatttttgggaaatggtctatcaatatcagtgccctgcaattgtcatggtcactcaattcgatagtgttaagtgtgataagtatctcccactgcacaatgggcgaggagcatatggaaaatataatgttaagattatgaaaaaagaaaagataaccatcaattatggctgcgcaacgtgcaggtgcaaaacaaggagtcaggcaaggtccattctgtactccatatagaatatcctgattggcccgaccatggagtgccaaccaatactgatgctgtacgacaaatctggaagcgactacatcacattccaacagaacatcctatagttgtacattgcagtgcaggtattggaagaactggtacttacatcaccatccatactgcaattgagagaatcctccttggtgacaaaaggtcttatgatattgttgaaactgtaaagaatttcagatcccaacgacctggaatggtccaaactgagcaacaatacaaattctgctatcaggtgattgctgatgagctgaaatatctgctaaactcagaccattgaggaagaaccaagcgctctgtttttcatccgtggacctctgattactccaatgccggacttgtgcatacagcattttgttgggtgcataccttcttgcaaatgggtccattgcaggaagaccgcgatgacaccttcattatgtcactatttttctattgtcgttagtcgaatgaaaatattagctagaggaggtttacaagattggactgctcggtgcctgtaattccactgcagtttgaatcattctttaatctccctcaactcaacgaattggtatcttggacgagtccagtacaaatgttggttgtaccttgttggactaaaaaacnnnnnnnnnnnnnnnnnnnnnnnnnnnnnnnnnnnnnn

SEQ ID NO: 19424 - DNA, 254 bp, Setaria italica
  Peptide Sequence Number=SeqID_85398
taatactctaattagtatcaaacatccgatatgacgagtgctaaagtttagcatgggtatccaacaccgcttatagactctctgacgacgatcgttaacccggtcacccgaaaatggtccagacaggaaccgtctagaacgcccgttgacgtgtgcgatcagatcagagcagctgatggccaatcaccagctgagcaacactgcttcttcttcttctcccatgctccctttctctcttaacgttaatggccgcc

SEQ ID NO: 19425 - DNA, 353 bp, Setaria italica
  Peptide Sequence Number=SeqID_85399
tttttgcgcaccaacagccaaccaactttccgttacgagcacagcgcacccgggatcgagttcgagttcgagtcgaccgatggcgagttcgaattacatgcacggacaggtgacaggtaccgaaagttcggagctactacatttatatgcacttatatctacatcaccattcatcgccatgtacccgcagagctaaccgatccatcgcggaccgatcgatcggccacggccaccgcttgattgatcgatcgatcgatcaactccaccctgtttgattatactcatctaatcaccacatcacagtggccttaaaactactggagtgctatcgatccttgcacatgcaggtgact

SEQ ID NO: 19426 - DNA, 457 bp, Setaria italica
  Peptide Sequence Number=SeqID_85400
aactacaaacaacgcttcacaaagtcaaggacgcagctttgagttcctttgcaacacaatcaccaatatggaggaaaggaaccgagcaaccctgtgaaatctcatcatgccaggcatgtaagaactggcatggcataacaatgcaacatgctccagattgctccaagaagagcctcttctgccttaacttcccaagagtaatactagagtcagaagtgagcaggtttccagatgacaatagctctttcttgatgaatggatcattgcagatgacgaatggaggtgcctcttctccatctctggtactccaacacacaaatttctctaaaaatctgagagaggaagtggaagatgctcccattactccagcagtgcctgatggatgacaagttgcactgtaaggtccacttcttgaagctgaggagctcgcatccaaattctttggttcggagggatc

SEQ ID NO: 19427 - DNA, 332 bp, Setaria italica
  Peptide Sequence Number=SeqID_85401
cggggcatcgatggaacacagaaaagcgtcagcgagccggtggcaattggggatggcgtcgggcggtggcggcggattgatgcggtggcgatttgggacggcgtcgggcggtggcgacagaggggatcgaagagaggggaggcggcgctcagggaaagaagtgaggaaaagccaggaaggatccaagagcctaggatcgccagcaacttccgagagatgttcgtgggtgggatctaccaatcgatcgtagggcgatccatcttccctcaccgtcttttgacgctgacggatggcgctaattcagtttagcgtgggacgaagcgagcggacgg

SEQ ID NO: 19428 - DNA, 423 bp, Setaria italica
  Peptide Sequence Number=SeqID_85402
tgttgcaatttctaacatacaggcctcaattgcaatttcaccacctgtacatgttcagtagtactgaccccaactgaaagccatcatcaggagtcaagctgacctgccaccaactttctttacccatgaattagacatcacctctgatacaatcaaatcatgaagtccaatagtccatacaccatacacatgactacttccaaacaacaaattccttgaaaatgcaatccattactctctctcttttcctatcttcttttttcaattaaactgttgcagataagaatattcagacattcagtcgtataaccttttagcatggcacagccaacctaagcagcaggcaggtcttattaacaggaatatcaacactttgctaacgttctgaatattaacttgacatcagaagttccagctgtcaac

SEQ ID NO: 19429 - DNA, 2277 bp, Setaria italica
  Peptide Sequence Number=SeqID_85403
agttttttttgtttttttttttttcttttctaaacgagattattaacgtttctcatttgtatgggtaacataaaaactttccaacatgaaatccaaacatccatgattatgttcatatgaaacgctaaacctaaataaaatcattatttatccggcaaccactttttccgagctccttcaatagcctcttcccgcatccttgtcaactcatcaaccaaatgtttgtactgagcttcaatcaaaacaagctccccgttcagcacatcttgattatcagcattagaaattgatgaaccactgctggccaactccaagcaaggtgatgcttgatctatatggaaaatcgacctcgacccatcacccaaaacatggctgaactctagcttattgattccctctttgtacccaccacagtccatagtaacataatcctctgctccataatcgctcacacttttggaactcccaggaagttgcacagaaatgaccgaaccttcagagccctgtgatcctcctaggttggttgcacttgagacagaatcaagataaccatttgatgatacgttcacatcttttggatgcatcataccatcaactagtgcataatcagggaccaactctgatagttcctggtgggaagtgattacaagctcactttcagactgcctacatacgtataagtttggtgctgcatcatttactggcctccaaccaggaacaagattcgctaccaaaaggtcgataaaatcagcaatgaaagtaacatcgcagtctgctaactccaattgttcaaccatttctgcggctacagacatagctgtatcagaatccaggtagaagagaaaatggatattccttgcatgaccagacaaatcagcaattcgcagaaccagtgagactgagttgttatcaagtttctcgccctttagctttagttctgtatttttgttagttctagtgaactccaggactggtgtatgtggagcaacacaaccattctccttgcctgaactagcagaggtggattcacaagtgtcaacatccatttgcaaagacaatagaggaatatctactgctttgggtgctggagatgaaaactttgtgctagcaggtccatgtgtagtatcagggcaaagaaatgggtcttgcaggagttgtttggcagacgacctctcagaagcacgaaccaaacatttttcaatgaactgttttacttgaggatcagcaattttagccaatgcagcaggtttaacacctgtggatactttcttaaaaatctgggccggattcgtgcattcactgtatggatattcaagagtaaagatctccaacaggcacattccaaatgagtatatatcaacaagttcgtcataactctcatcataaagctcaggtgccatgaattccggagtgccaataacactcctcgctctagttgtttgcattactgtggctagtccaagatctccaatcttaacttctccgtgatttccattaacaaaaatgttatcacacttcaggtctctgtggatgattggaggttggtggctatgcaggtaatccaacccatgaagaatctgcctcgcccaattctttattgccttcaagttaacacgtgggtgtttctgacggtaatgcctgagacttccagatgtgaacagctctgtgatgacattaattgttttattatggtcatcaatccaggaataataaaacttcattacatttccatgcttgagagacttcagaagatggacttccgtgtagagcctatcaaggttatctggacattgcattacctcatctatgttgatctgattccatgcaacctctatgccttcaacctcatcaaatgccttgtaaacagtcttgaaagctcctctccccagaatcacattgtagcgcatgtatcgcccggttggatctacctccgcgtattcagcatcgagcacctcatccccaccaccaaacacctccattctggatcagccccaacgagcaaatgaatctacgagcaagagagaggggaagcggagagagaaggaccagcgagatcgccggagtaggcggcggtcggcgcgcggctgctacgccctgggcgcggcagcaggagaggaagaggtggcgggtgccgggcgttcagtgaagggctcggagaacggggcgtacgacggccgcatgcggaggcagcgtcggctgcgcagcgacgacgtcgggttcgcccgtcccgcaacgcccatggcccggcacccggcggaggatacgcggcagacgcag

SEQ ID NO: 19430 - DNA, 782 bp, Setaria italica
  misc_feature (777)..(782): n is a, c, g, or t
  Peptide Sequence Number=SeqID_85404
ggtaaattgacagagaaagcgagggtttcttcgggttctttcggggcgggggggctttatccaggaacacttccggcggcgaccacttggtgcccggggaggcgatcgatccgtcaccatgtcgtcggagaaggaggcggcgctcgccgccgtgcccaacgacagccccaccatatttgacaagatcatcaaaaaggaaataccatctactgtggtttatgaagatgagaaggtcttggctttcagagacataaaccctcaagccccaacacacatcctaatcattcccaaagtcaaggatggattaactggcctttcgaaggcagaagagaggcatgttgagatacttggctatctcctctatgttgccaaagtaattgcgaagcaggaaggactcgaagatggctaccgtgttgtcatcaatgatggccctaaaggatgtcaatctgtttaccacatccacgttcatctccttggaggcaggcagatgaactggcccgcaggctaaagaatctcttgctgatcagtccccgctggctaatgatatggcaaggattgacgtttcgtctctatcgaataattcctgtaatccccataagatttagcgtgttgaactttcactgtatttgtggaattactggaaccatcctgctgtgatttatgggcaggaaacttggatgttggaatcatggattggcctgcccttgttgatcagctcattgagattgtctttgcccttaaaagaaaaaaactaaagaagaactagaccaaaggacnnnnnn

SEQ ID NO: 19431 - DNA, 367 bp, Setaria italica
  Peptide Sequence Number=SeqID_85405
tacaattgatcctgatgcttttggaattatggcctattatctgatgcagacacctgagacaaaggcagcgggtgatgctgttggatttggatctgcctttctctttgcctgcgtgtttggtatcaggttgtacaatagccgtaaactggtgccatctggccttcttctagccctttctcttggtgccttgggtgtcttttactctgcttacttgcaagacaaggtctaaaccaatttggtttagtgacttgaggatcctgtacgttctgaagctttccttttttttttgataaagattctgaagcttccttgaaggtttgctggctcttttagacgtacaacattaatttggacctactgtcggtgc

SEQ ID NO: 19432 - DNA, 323 bp, Setaria italica
  Peptide Sequence Number=SeqID_85406
ccctcagatatagtacaatgaagttgcatttcctatctgaatatctgcgaggaaatctgtgcaatgcattggtgaagcatgattctagtgtcaataaacagatgggccaaattattgtcagtgaagctgtgtcagaatatgcagaagttaactctagttcatcttctcaatcagtttcagattttctatgcaatgctagtatccccatgaatatttttgaaattgcatgtcagagaatattgaactagcctaccgtcaaatatccttcatgcgaccttctcgagatacaaggacatgctagcatgcagcgcagagaaatccgt

SEQ ID NO: 19433 - DNA, 1435 bp, Setaria italica
  misc_feature (1)..(27): n is a, c, g, or t
  Peptide Sequence Number=SeqID_85407
nnnnnnnnnnnnnnnnnnnnnnnnnnnagtctaatgactgatgtattacaaatcgagcaatatgttacatacatgaattagatttccacatgataagagcaaaatccaatcaaggcatacacggtaaattccaggccagccaaccaccggcacgtattatgtactgtttgcaaatatgtacatgctttttccagcaagaatcctccaaacaataatgcttctgtcctcctgattctgaaccaaccaatccagaaatacacctgcaaccctgcaattggcacaaccacgcttcaccgcccgctccacgctgccaggacgccatggaacacctcggccacgaggtcccgctccgccgtctgcaggaacgcgctgaggtcgtcgtgcatctcgtacaccttcctgaagtccaccaggaacctcaggcacccgcccttgagcctcggcagccggtacaggtgcgccgtctgcagccgctccagcacgttgcccgtgtcgatgtcctccagcaggctctcgtggcaggtctccttcaggtcggccatgtcgtacttgtcggcggcgcggaggagcgcgagccggttcgccaggaactcctcgctgcgcaggtcgccgtagatgtagttgaggaaggcgtggcaggcgtccagggacatgtcggggatgtccacggcggagagctccttctccctgaggtcgtgcgagaacatgctccggaacaccggggagcgcgccgccaggatggcgcggtgggcgcggacgctgccgtccgccgcgttgatcgtgatgtcggtgaggatgtcgtcgtgcagcatccgggcaagggcggacagagcggtgttgtctgaagactgcttaatctgctgggaggcccagattgaggccggttcaccaccagatggatcagcgatcttcaggtcaagaaactctatctcaatgacaaatctgcccgtaacgctactatcaatcgcccacacaaaaccttcgtgtttcagctgcttgtcaaaaattcctgggtggattatagtctgttgattaggtggaagagatatgagaagtttggtgacaaaggaagctattggggctgagtggccgttcttggcagaatttgaattctctgcaaagagcttaacacaagtttgcttgttgtttctctccacagataggtaccagttccagaggccgatgcggaaggggagggacttgcggtaggtgtagcaggggagcgcgtcgacgcgccattgcgcgagcctgggcgccgcctccacgcgcgcgccgtcggtcatgggcccccacgtcgccgccaccgccgccaccacctcattgacgcagcccagcagccccagcgcctcccccgcctccttccccaggttgccctcccctccccccggcacagccccctcatgtacagccgccaatcgccaagaactcgaccgct

SEQ ID NO: 19434 - DNA, 312 bp, Setaria italica
  Peptide Sequence Number=SeqID_85408
tccgttccgccagagccagagcgaggagtgaaccgcacgcgccatgtccgacgagtcgccgccgccggcgcaggccgccgagaagagccagcccgcggagcaggctactggcggctggggcggatggggcctcaacatcttctccgagatctcccgcaacgcggtggaggttgctaagagtgccatcgccgacattcagcagccgcctgagcaggacacggggacccgacagccgggggagaaggataagggagaagggaacccaggggggaggaggaggagggagagacgcaaggcggctctggaaaagct

SEQ ID NO: 19435 - DNA, 381 bp, Setaria italica
  Peptide Sequence Number=SeqID_85409
tggtgtgtctgggagaatttggaggtgaaagatggctgcttgcagtttaaaaactacatctttgattccttcttgctgtgtctgcgttagaattatggctattttgtttgcaagttaggatatggcatagtggacttacaagtttgttatgaagttctatcataattccgtaatttatacccaagtctgaactcccgcgtgaccacgatgaatagccaggaggatcctaaacttggaaattaagctacctcctcgatcttttagtgggttttcagtcagccagcaagtcagagaatttgctaactttgtgttcttatattgctgtgctgttgatgatccatactataaggggttaaatattacagtattgcagaaaatgga

SEQ ID NO: 19436 - DNA, 441 bp, Setaria italica
  Peptide Sequence Number=SeqID_85410
accaattccagacttcctttggtgaccaagccagaacatttcagttcccatcgacaggttcggagtaacactctgaatataatttgcaccatagaatgcattgtttccaatttggaattgtgctcgatagtcacttcccttgtagtcaaagttaaacatcccttgggagtaatgcgcctcttgggtaagctgtgcatttactttcagtgtaagattttctgttaaatcacatttcacacgagcattaagccttccatcagtcatcaccctcccaatgagcattaactacagatagtttcatacacaatagcaaaatgagttaagaaatacatcaacatgacaggtgccacaataatattgaatgccatggaacaaacctttggatctaaaaaattggcaccaaactcatttagtgctgttggaactttagtaaacttttaa

SEQ ID NO: 19437 - DNA, 1656 bp, Setaria italica
  Peptide Sequence Number=SeqID_85411
gcaaaaatgtatcgttccagccgataagcaagaggggtaatttatacgactacattatcttagagccacagcaactcgacaaaaagctctgagcctctgtagcaccgaatgaatgaaaacaaatcataacgccattagcacgataataataacatgctatactaattgctctgacttagcatggctgaacagaagcgcgaggacttaaaatatggcaaatggtcagaagctttgaaccgtaaaatctccagtggctcgtgcaagatactggtatggcagaaccgtaagatgatggtacaggacatgcctagcatggagggctggtggtgacttatcactcaaccgatacaaacattatttgaacaccgttcaactagttccatcaagatgaacaaagaatcacggcacccatgctcacgttatcaagcagctaaaaattccgaaccaccaatacacagaaagagaaactctgtaaagtagcaagtgattactcgtattttccccaaggcacaagggcaagaacctgctcactcaaaattgaggcctgaagtgtcgtaacatccaatgcaaagccagctgtgtaagcatctcaggtgcacccacagccattgtttttagcataattactctcctacggtcattccaaaaccaaacttgtaattcttcttacaatggtcaatctcagcagaaagaaggaagttgacacccatgttcaatctctcctccaagtatgcagcaacaacaccatttgagtcgattttgcctcttagacggcactgcctaagcaagtaatcataaccaaagctggtagttacgtcttttgacatgtggttatacatgaagtcagatgcgagggaaaccttctcagaaactttctggacataacttaaggcaactattccggtgcttgcgacttgtagagtacccaccattttatccgtattatagcgagaggcaaaaccaattccagacttcctttggtgaccaagccagaacatttcagttcccatcgacaggttcggagtaacactctgaatataatttgcaccatagaatgcattgtttccaatttggaattgtgctcgatagtcacttcccttgtagtcaaagttaaacatcccttgggagtaatgcgcctcttgggtaagctgtgcatttactttcagtgtaagattttctgttaaatcacatttcacacgagcattaagccttccatcagtcatcaccctcccaatgagcattaactttggatctaaaaaattggcaccaaactcataatgtgcagttggaactttaatagtttcagttgactgggctggaacttctatggagcccattaaaacactgtggctaagagaaaacttttgattcaacccttttgtaaagtcaaacctcaatccttcgaagagttcaggcttcaaagacatgagggcctcgcgctggatctcctcgaagggcaccgggcaggggaggttgaggtagtcaaccttctccaccttcttctcctcgccatccggcttcggcgggaggatcccggcgagcccgggcccatacggcggcgcgcccgcctgggcctgcgctgggggaggcggcggcggcacagcagcggaggcggcggatcccatggcggcggaaccctaggtcggaggttctggg

SEQ ID NO: 19438 - DNA, 439 bp, Setaria italica
  Peptide Sequence Number=SeqID_85412
atcagaactatttactaccaacctcaatggtaatgtgatgggtgctgtagagacttgcatggagacgttccacaggtttcataagtatcttaaccattcccatcctctaatccgtgctcattttgaccctgatgcttgtggctgggcatttggtatgaatgtgctcgatcttattgaatggaggaacaagaatgtgacaggtatatatcattattggcaggagcgcaatgctgatcataccctatggaagcttggatctttgccaccttgggtcttcttgctttctatggtttggttgaagcattggatcccaaatggcatgtcttgggacttggctacactactgtggatcctgctactatcaaggaaggggcagtactgcattacaatggaaatatgaagccatggctcaaaattggaatggagaagtacaagggct

SEQ ID NO: 19439 - DNA, 1715 bp, Setaria italica
  Peptide Sequence Number=SeqID_85413
acttatatacgaccgacttacaaaaggaaggaccaaataaacctagcaagtttgcggcggagcttagtgcccaggtacggcgggcacagagcatcctcgcgcacgctgcagcccacgggggcaaggtaatggagcaggaagcagagaaggcgatcagggatatgtctgtgctgctcttccaggcgcagcaattacggtatgatagtggcatcacaatcatgaagttgaaaggacagattcagtccctagaggagaagtcgaaggctgaggcggagaagagcacaaaatatgggcagattgctgctgaggaactccctaaggggctttactgcctcggtgtccggttaaccatggaatggttcaagagtcccgagcttcagaggaagttttctgatcggagcccagcagttcagagaaacctaagggataacagcctatatcatttttgtgtcttctcagacaacatccttgctgtttcggttgttgttaattctacagctataaactcaaagcaccctgaaaagattgtttttcacctagtgaccgatgagttaaactatgctccaatgagggcgtggtttgccatgaatgactacagaggggtcactgtggagatacaaaaggtggaggactttacctggctcaatgcatcatatgttcctgttcttaaacagctgcagaacgctgctacacaaaagttctacttctctggaagtggtagtcgtggaacaccaattaaattcaggaacccaaagtacctatccatgcttaaccacttgaggttttacattccagaaatatatcctgaattgcagaaggtggtatttcttgatgatgatattgttgttcagaaggacttatcagaactatttactaccaacctcaatggtaatgtgatgggtgctgtagagacttgcatggagacgttccacaggctaatcattattggcaggagcgcaatgctgatcataccctatggaagcttggatctttgccacctgggcttcttgctttctatggtttggttgaagcactggatcccaaatggcatgtcttgggacttggctacactactgtggatcctgctactatcaaggaaggggcagtactgcattacaatggaaatatgaagccatggctcaaaattggaatggagaagtacaagggcttttgggatagctatgtggactattcacaccctttgattcagcaatgcttcatgcgttgattgctgtgtatcaacattagacatttttgtaatctccctcgtagaaatgttccaagtgcatgctacactgccacacggaaacattctacttagaccagttggcttcgctctcaagttataatctccgacgaaacatcggtggctgtttatggcatctgtaattgatgaagcacaacaattacatgtacctccagccacaggtaaacagcacaagagctaagattgtgttgcagtagactgctacttgaaccacatccactacttacattcataacttgcaaccaccaatgtaattttttattttttattttttgggtgagacagcacagaatggatatgatgtagaattgattcaaaattcttgaggtgttacaagttttgagttacatatccataattattggatgttaagacagcaaaccttttcctgtttatttatacatcttgataagtaaagttggcacatctcattttcagcttctagctt

SEQ ID NO: 19440 - DNA, 461 bp, Setaria italica
  Peptide Sequence Number=SeqID_85414
atgtgctgaagccctgttcattgttatcttcgagaagtatcgagaggatgccgcatatactgctgctgggcatgtttattatgaactttcaaactacctcaatttttaatgaatggttccatggatctctatctattgaagtttcaaatcgtcaccccaatatgcgtatcattcgtaggaaaattgcattgctacttgggcaatggatttctgagatcaagggtgacactcggaaattggtctacctacgctttggttggattgctgcaggataatgatatagctgttaggatttgtttgagtgtcttcccacatgttggacaatgagtttcaagttgatagaagacgttcaagaatttgattcaaaggtgcaagtgttgaacttcatttcagttcttcttgaacatgctggagacaagattattccatttgcgagtcaactatcaacaatttttccaaga

SEQ ID NO: 19441 - DNA, 501 bp, Setaria italica
  misc_feature (496)..(496): n is a, c, g, or t
  Peptide Sequence Number=SeqID_85415
acaaagggtagaacaactcggaaattggtctaccacgctttggttggattgctgcaggataatgatatagctgttaggctagcagcatgctcttctctgtgctatctttttcaagaatccagtttttctgaactagatttgtttgagtgtcttcccacatgttggacaatgagtttcaagttgatagaagacgttcaagaatttgattcaaaggtgcaagtgttgaacttcatttcagttcttcttgaacatgctggagacaagattattccatttgcgagtcaactatcacaatttttccagatgatatgggacgaatctgcgggtgaaagcttgctacagattcaattgctaacagctctgagaacttttgttcttcgcttggattccagtcacctctttcttaccacgtgcttatcctatcctccaaagtgtattaatattgacagccctgatgctcttaatcttcttgaggacagtgttctgttatgggaancaacg

SEQ ID NO: 19442 - DNA, 617 bp, Setaria italica
  Peptide Sequence Number=SeqID_85416
tacctggtgaccgagtcgtgttgctttgcaacattttagtaaggagatacttcatttacacatcaaaagatttggaagagtggtcagagaatcctgagtcctttcaccatgagcagaatttggttcagtggactgagaaaaaacggccatgtgctgaagccctgttcattgttatcttcgagaagtatcgagagctactagctccagtagttgtttctgttcttcgtgaagctatggctgtttctccaccacaagaaactgatgttactgctggaatgcttttaaaggatgccgcatatactgctgctgggcatgtttattatgaactttcaaactacctcaattttaatgaatggttccatggatctctatctattgaagtttcaaatcgtcaccccaatatgcgtatcattcgtaggaaaattgcattgctacttgggcaatggatttctgagatcaagggtgacactcggaaattggtctaccacgctttggttggattgctgcaggataatgatatagctgttagggtatgttctacttctgcctctgtgatcccttggcgttatgagtgtgtacctgtacgactattgttttaattacttattcatcctgtt

SEQ ID NO: 19443 - DNA, 1622 bp, Setaria italica
  Peptide Sequence Number=SeqID_85417
ttcccgacgaaacctcccgttcctccgcgaccccgcgaggcctccgccgccgtccgatccctccccatcgccgccgttcaatccccatcaggagaggaggcgattcaagcggcttggcccaagaatttgggggctccgggatctcggttcctgatcggtagttgtgtgggcgccggatccagcggccgtcatcatggttgtcgatacggtcagcgcgagcacctccattattgcgccccacctgttcgaccagaggtccaggggcccccacccgccccctccgccggacgttccatgtcgtcgcctgccgccccctgcccaccgccttcgcgggccgccgtctcgtggcccggggcaccaggcagccgtcgccgcggctcgcggactggtcggtcaaggcgctggctatgggggtcacaaaggaggctagccctcgcagggagtaccgggggatccccggggacggcggcgacatgggggatgttggggtcaccaacccggccccgtccttgcctccgcggaacagggcagatgaccccaagctgcacaacccgctgctccgtctcgagcggatgggctgtgggtggctcggcgtcatcttcgagtgggagggggtcattgttgaggatgatgccgaattggaaaggcaggcgtggttgaccctgtcacaggaggaggggaagtcaccacctccggcctttgtgttgaagagagttgaagggatgaagaacgagcaggcgatttctgaggttctctgctggtctcgagacccttcggagctgaggagattggcctcacgaaaggaggagatacactccagcctccgtggcggctccttttaccagatgaggaatggttccagggagtttatgagcacgcttgccaattacaagatccctattgccgtggccaccacacgcccacggaaggttatcgaagaagccatcgaagctgttggtgcgcggagcttctttgatgctgttgtggcagcagaggatgtttatcggggcaaacctgaccctgaaatgttcctgtatgctgctcagctcctcagtttcatcccagagaggtgcatcgtgtttgggaactccaactcaacggtggaagccgcccatgatgcccgcatgaagtgtgtcgcggttgcaagcaggcacaaaatctatgagcttagtgctgcagaccttgtggtgaagcaactggacgagctatctgttgttgacttgaagaacctcactgatatcgagtctccagagtttggcatggaacctgaaccagagatggaggaggaggaagaagtgtcccgaccatcatcgtcagtgggtgtagatgatatattctggtaagaggctagattgtacatttgattgattcctctcctgcacagatgtattattgtcaactgttgtagcgatcaggaagaagggcttatcatccttctaatcagtagaatgtgatatgtaaaaatgttgtttagagctcacacactgtatatattactcagaaagaaagcagggaactgaatatatcaatcaggacatttgaaactgcagttcctgaaaatatgtataacaccacaatgtttctatcgttaaatcagtattccaggtgctactgttctatta

SEQ ID NO: 19444 - DNA, 222 bp, Setaria italica
  Peptide Sequence Number=SeqID_85418
agtccctacttggaaagtagtgatatcctacttttgggtcggttggttattgatcttcacattttacaaggcacaaggactctctgttggtgcttcattggttgaggaagacaaacttgagctcgcgacatctctccttgcaaaggcaaaggaaaagggtgtctcccttatgttgccaaccgatgttgtcattgctgataagtttgcccctgatgctaacag

SEQ ID NO: 19445 - DNA, 362 bp, Setaria italica
  Peptide Sequence Number=SeqID_85419
agtccctacttggaaagtagtgatatcctacttttgggtcggtggtatgatcttcacattttactaaggcacaaggacgtctctgttggtgcttcattggttgaggaagacaaacttgagctcgcgacatctctccttgcaaaggcaaaggaaaagggtgtctcccttatgttgccaaccgatgttgtcattgctgataagtttgcccctgatgctaacagccagattgttccagcatctgcgattcctgatggttggatggggctggacattggtccagattctgttgcttcgttcaatgcagccctggatacaacccagacagtcatctggaatgggcccatgggttgtttttgtaattc

SEQ ID NO: 19446 - DNA, 612 bp, Setaria italica
  Peptide Sequence Number=SeqID_85420
agaagagcgtgggcgacctcgccgccgcggacctcgaggggaagcgcgtgctcgtgcgcgccgacctcaacgtgcccctcgacgacaggcagaacatcaccgacgacactcgcgtccgcgccgccatccccacaatcaagcacctcgttaccaatggcgccaaggtcatcctctgcagtcatctgggtcgtcctaagggtgttactgccaagtttagcttagcaccccttgtaccaaggttgtctgaacttctaggtatacaggtgcaaaaggcagatgatgttattggtccagaagttgagaaattggtgtctgaactaccaaacggtagcattttactccttgaaaatgttagattctacaaggaggaagagaagaacgacccagagtttgcgaagaagcttgcctccctagcagatctttatgtaaacgatgcctttggaactgctcacagagcacatgcgtcaactgagggagttaccaagttcttgaagccctcagttgcagggtttcttttgcagaaggagcttgattaccttgtaggcgctgtttcaaatcctaaaccaccatttgctgccattgttggtggctccaaagtatcgtctaagatcg

SEQ ID NO: 19447 - DNA, 1494 bp, Setaria italica
  Peptide Sequence Number=SeqID_85421
tcttcttgtagtacagtgcctgtcagtcagtaggtgagtgaggtcagtgagcgaggggcaggggaaggaagggggagaaggagatggggaagggatgtcaagggagcggcgtggcggcggccggcgaggtggaggagaacatggcggcgtggctggtcgccaagaacaccctcaagatcatgcccttcaagcttccgcccctcggcccccatgacgtccgtgtgcgcatgaaggcagtggggatctgcggcagcgacgtgcactacctcagggagatgcgcatcgcgcacttcgtggtgaaggagccgatggtgatcgggcacgagtgcgcgggcgtgatcgaggaggttggcgctggcgtgaagcacctgtccgccggcgaccgcgtggcgctggagcccggcgtgagctgctggcggtgccgccactgccgcggcggtcgctacaacctgtgcgaggacatgaagttcttcgccacccctcccgtgcacggctcgctggcgcaccagatcgtgcacccggcggacctgtgcttcaagctccccgacagcgtgtccctggaggaaggcgccatgtgcgagcccctcagcgtgggcgtccacgcgtgccgccgcgccggtgtcgggccggagacggcggtgctcgtgatgggcgcggggcccattggcctcgtcgcgctcctcgccgcgcgggccttcggcgcgccgcgcgtggcgatcgtggacgtggacgagcaccggctctccgtggcgcggtccctcggcgcggacgcggcggtgcgggtgtcgccgaggccggacgacgtgggggaggaggtggagcggatccgggcggcgttgggcggcgcggagatcgacgtgaccctggactgcgccgggttcagcaagacggtggcgacggcgctgggggcgacgcgccccggggggaaggtgtgcctggtggggatggggcacaacgagatgacggtgccactgacgtcggcggcggtccgggaggtggacgtggtgggcgtgttccggtacaaggacacctggccgctctgcatcgagttcctccgcagcggcaaggtggacgtgaagccgctcatcacccaccgcttcgggttctcgcagcgggaggtcgaggaggcgttcgaggtcagcgcgcgcggccgcgacgccatcaaggtcatgttcaacctctaggccgcggccgccaccgccgccgccggcggctgcgcataaaataaagtactttaccggtggcgagtatatgccatggcgttggattggattggaataaccatccgtggctttgttgctgctttcgctgtggctggttgtttgttgctgtctggtcggtctgactgagggagggctttcaaatgaactggaacgggctgtccaattttttgttgggccaaacgtcgcctctaattcacaagaatgggcttcaagtccggaaagcccgttccgcaaagatatccagcctatgggcctttccttagagcttcgg

SEQ ID NO: 19448 - DNA, 474 bp, Setaria italica
  Peptide Sequence Number=SeqID_85422
cgccattccgccgcgggaaaccctaaccctagctcccgcaccgccacgggaggacgcgggagcgccggggccgcgcggcgccgccgatcccgatccagacgccgtcgcgccgaggccgcgctgatcgagtctctggaggaataaaggacgggcacaacttcagattgtttgcagcagcttgagtttatagttttaccagctcagagtgaacttctgggcagtgtagttgtggttttatcttcctcagcatagaagcaaaagggatttatagctgcttatatttctatatgatatgaaagtttgggatctgtccactgcaaacaggctactctctcacgggcactagacccttatagggacactccaggaatgtcacagtttcaccctactcagcatgcgggtgagaacgattttcagatgtggcaacagcagatgatgttcaagcaattgcaggagtttcagaggcagcaacaa

SEQ ID NO: 19449 - DNA, 370 bp, Setaria italica
  misc_feature (354)..(354): n is a, c, g, or t
  Peptide Sequence Number=SeqID_85423
ggaggagtctggaggggattaagcttgtggagtgcaaggcgtatttaaggaagaatggtcttagccaagttggggacctagccacttgtgtagacagaatagtgcttcattggaggtttaaagatggagatccagagagaatttatccacggtcatcgttctgtatcaactgtaaaggtgatgtctgtaggggcgatgctgtcctattcaaacagaaggtgtatgagaagagtggaaaaaggcatgcgaaatgtatagggaagcgtatagtagctggcaaagtcattaaggaaagttatggtaaagaaagcagcaacacactttcacgattcaagtgttttggagcaaaagggngtttggggaaaattta

SEQ ID NO: 19450 - DNA, 216 bp, Setaria italica
  Peptide Sequence Number=SeqID_85424
cactggagagcccaagccacacaggtcctttgcacgatctgtgctcttcgatccatccatgagtctgtagactcttcttgtgcatcatcgatcacctggcctcagaacccttcattatcctgagcttcttgcacgaagagatgaacatgctgcaaacagttaagcgagtcacagttaggcttctgtccactcacgcatcttcagatctgaaaagag

SEQ ID NO: 19451 - DNA, 850 bp, Setaria italica
  Peptide Sequence Number=SeqID_85425
cgcaactcaaaaacatggcagctagctaaggtatatacacagttcatagatctttcgccctctggattcagaaacgaccatctctgtacagcactggagagcccaagccacacaggtcctttgcacgatctgtgctcttcgatccatccatgagtctgtagactcttcttgtgcatcatcgatcacctggcctcagaacccttcattatcctgagcttcttgcacgaagagatgaacatgtcccagggcacgtctccgacgagcatgaggtcgccgtccttgtcctcgtaggcgagggcgtgctggtggtcgccgccgccctccgcggcggcgaaggacttggtgaagagggcgtccagcgcctccctaagctccctataccccttgtacatccggaggtccaccttcctgaggtacggcgccccgtccatgctcactttcacatacaggccccctccctgctgctgctgctcggccttcttcaccgccgcggcctggaaggtgttcttcctgtacgccctcaccggcggccaccccaccacttgcgctttggcaggtgcggcggcgtcgtggtcgtcgccggtggcggccgggctggtgccggagtcctcgctcctggtgtcgtcgagcgcgcgcttagcgccgacggagggtgatgccttcttcggcctgtcgtcgctgctgctggttccgggaaggccgaggcggagctcggtggcgctgaggttgtcggcgtcgatctccatgggagtaaagaagagaaggtgccggctggtgtttcttggcagagagagagagagagagagagagagagagagagagagagagagagagagagagagagagagag

SEQ ID NO: 19452 - DNA, 928 bp, Setaria italica
  Peptide Sequence Number=SeqID_85426
tgtatgcgctttgacgcacccaagctcatcctttggcttggggatccaaccagtagaacaaaaataataaaaagaagaaaaaaaaaagaaagctcatgacatgctgtctggccctcagatagatcttctcattgtctcgctgaacccaggcctgtggcttcagatctcttcatgatcctcagcttcttgcaagtgctagtgaacatctcgaacggcacgtctccgacgagcatgaggtcgccgtccttgtcctcgtaggtgacggcgaactcggacaggttggcaccgccgctgttggaggagacgaacatggcctccagggcctcgcggagctccctgtagcccttgtacatcctcaggtccaccttcctcaggtagggggcgccgtccatgctcactttcacgaaggagccggtggtggtgcttgcggccgcggacggtgcggcggcgttgctgctggccggcgccgcctcctctttggtcgccttgctgatctgcttgctgctcgccttgaagcagctcttccggtaggacctcaccggtggccaacctacgacgggggccttggctgcaggaggtgctgcctcggcatcatgcttgctggcctcctcggcggcggcggcgtcctccacagcgtcggtggtggtgcgcttcttgcccctaggcgtcgacggcgccgacggcaccgccgccttcatcatctggggctggctgtcgtcggctgtgcccggcaggccaagcctgagctcggtggccatgaggtctcccacgacggtttccatctcccaacttttgagtaagctagcccggcaacgacgacggcgaggtagtctttctccggttgcggctgcctctgcgtctctaacacgtctgtcacgagttggaggagttgctcgctgatgagaatgagatgagatgaggtggtgtg

SEQ ID NO: 19453 - DNA, 1566 bp, Setaria italica
  Peptide Sequence Number=SeqID_85427
caaagtgtccactttatagtttataagcacacaaagagagaggcctttggagaggaaaatgaccaaacttaagtcaaatctctcatttttcttttcctatttttttactagccttcgctcatacaaaacgcaactcaaaaacatggcagctagctaaggtatatacacagttcatagatctttcgccctctggattcagaaacgaccatctctgtacagcactggagagcccaagccacacaggtcctttgcacgatctgtgctcttcgatccatccatgagtctgtagactcttcttgtgtcattgctcaccccaaaattgaaatattgtcgatagataaactcatcagagaggggaaaacagaaaacagccctgttttcccctgcgcttacagtagtagtaaccaagcactggtagatataacttaaaagtgatgatctttggctttgtacaaacacacatggagatgtcaactcgaacctccactccttttgtgttgctaacacctagtagtagtgaaaaagaagaagaaaatagaaacaaagtgaccacacatccacgcatgcatgctctttgatgcacaaagctccctctcctccttccatgctcccacttctcttctcgatgttgcaatcttttgcctctcttcatcccatgatatgatgttgtgttagttgaagatcgagccagacaaggggagatgcatggtaaaacacttgtccatgccttggagattccaacccaaaaagaacaaaagaatctgctcacgcacaagacacatgcatcttgcaacctcagttgttcttcactgaccccaggcctcttgcctcggatcccttcatgatcctcaacctcttgcaggtgctgatgaacatgtcgaagggcacgtctccgacgagcatgaggtcgccgtccttgtcctcgtaggtgacggcgaagtcggaggggttgacggccggcgcgtcggcggcgccgccggagaagccgaggaacatggcctccagggcctccctgagctcgcggtagcccttgtacatcttgaggtccaccttcctcaggtaaggggctccgtccatgctcaccttgacaaacagcgcgctgccagcaccggcggcgggcggggccttctcctccggcgccggcgccggcttggtcttggtggcgctgctgcttgactgctggaagcagctcttcctgtaggacctcaccggcggccatcccaccacctgagccttggcggccggcggcgcggtctcgccatcgcgcttcttggcggcctcctcggcgccggtgttcccctcgcgcttcttgcctctgggagtcgacggcggcgtcggcagcgccttctcctcggtgcccggcaggccgagcctcagctccgtcgccttcaggcagctgtcgacgtcggcggccacgacctccatctcttcctagttcctcctcgaccgtaaacctccctccctcctccaacaagctttcgacgatggatgaagacgaagctgtttgagctgcgcccttatctttttctagctcgatgagtcgttgaagctgagttgtgtgagctg

SEQ ID NO: 19454 - DNA, 654 bp, Setaria italica
  Peptide Sequence Number=SeqID_85428
ggccgtgctccgcggcggccagcgctgcggccaccttccacgtgtccgctgcggcggcgctcccgtttgcagcctgatgcgccgccgccgccagcgccgcggtcgtgacaccgccggcgccaccgtcggcgggggcgatggcggcgacctcgtcgtccttcttgcgtcgcgcgagctcgcccggcaggagcgtgttgctggccatgatcttgtcgacgtcgtagcgcgtgatgtcgaagttggtgacggcgttgaggccccggaactttgatcgccgccacgtcgtacgcctccgccgcctcctcctgcgtgctgaatgtgccgaggtagaggtccttgttgccggagacgcggccgatgcgcgcctgccaccgcccgtgctggtgatgccttgtgactcctctgtacatcgacgcgccgcgagagaaaccgctgctcttcctcctgaggtgcgccacgtactcctgcctcgtcatgttcttcatctcctccagctcctcctggtagtcctccagcgggaagttgatgtgcgtggaggggccccagtacttgagcgccgccaggtcgtaggctctcgccgccttctcctccatgtcgtacccgccgagataaacttgcctgcccttcctggtctggccttccttcttgcagctg

SEQ ID NO: 19455 - DNA, 258 bp, Setaria italica
  Peptide Sequence Number=SeqID_85429
cgcgcccactcaccaccaccaccgcatcgcagctttcttcgttgctcgcctcgcctcctcgccgccgcggccacccgagcatcccctgctctcagccgctgccttccgccgcctccgcagaccctcgtctcgcctcgccgcacccgccctcctcctctcgcgtcctcggcggacctcgccgtcagcggatccggccggcggggtgccgttgtgcgctggccctgcagcgcgcgggcagcagtggagcggagggccccc

SEQ ID NO: 19456 - DNA, 521 bp, Setaria italica
  Peptide Sequence Number=SeqID_85430
gtttcgagaatccagagacagtgagcaccatcctcatgaggcgtaacccgcatttcatctgtggatcaagggtcctcgttaaaccctacagagagaaatccaagtgcatagaacggatgcatgtggacaagatgaagccgatgcactactgccctactcgcttcttcgagattgatccggacttttatcccggtaatgaccaagtaacctgtacattttacaattcacaatcaattaatcaataatacacatgctctcaaatgaactttgctcgctccagatgaatatgaggcttcaagcaggatggtgagaaagcaattggcagagaagcgcgagaggctgatcgagctcgagaggaagcgcttcggaggggttaggcttaaaccattgccacatcagtttgcctacttcgattgcagcattgaggatgtaaatcccctcaattgcctcccagcagattccaaagatgccgacctgattgtgccggactcattggagatcgtctcccgagccaagctcca

SEQ ID NO: 19457 - DNA, 357 bp, Setaria italica
  Peptide Sequence Number=SeqID_85431
aagatcatacaaatagttatactataactagaagatatccagcagcgccacttagaagtgtgtcctcagccaattgcgtttattttatacaacgcaagtttggatttaaccaagtctcatctgcatgattcacaacaacaaaaaatttcctctgaggttgagcagagcaccatactaatatttaccccagaaaagatcaggcatttttttaaggtttcatgaatggaaaaaataatcttaaggggatatttatagcacttgcttattcgccacacaagctgatattctaaggaagatagatgctggaatccacaattgctcacaccccaagggagcaattgctagtctaaggtacta

SEQ ID NO: 19458 - DNA, 318 bp, Setaria italica
  Peptide Sequence Number=SeqID_85432
ccagcgcagcagctccgtgcgcagtttggtggagaaccaggaactgttgggatcacaaggattccatcatccttgacaagagcatcaagtgcagccttgaattcagtcctcagaacatgaaactcctccatgggtccagcttctgatgtaatggccccgtgtacccgctctcggatgcctgggcctaggttaggctttacagtgttgacccattctgcatgattggctttgaattcggacctttggaggcatcccacgacatatgaaatggcagatagagcaggtacagaaggtgattcgcttttcgagaagttgctt

SEQ ID NO: 19459 - DNA, 965 bp, Setaria italica
  Peptide Sequence Number=SeqID_85433
attgtggaataataagaggttttccatgatctgtgttgctttttgtttaaattggtaaaacacccaattgcctctgatggtgtaacagggaaatcagtcagtacaccatcaacagagaacacaccattatcaatgaacgtcagacattctgctaagggatcgtagctgtagttgtaactgatcataaagtcatttgcaaaatcagcggcataaatttccaacccagctttatgagcatcattgacaactgaagtgtgcggctgcagataattatctgccgaagtaggccaaatatagctctttgggacaagtatcccggatgcaaatgtcttgacaaatgtaagaaacaacaacatggaaccatacgtctggttcatagatggttcgagagtgctctcatcaagatagcggaacacaagctttgtctttttgctaactcttccaagtacgctggtgaggaagctcacttcaggtgatgagatataattgacaacaacacgcttagatacagaaatgatataattcctcatgcttagattgaactggctgtaaaacctgtcatgctgaacattgagccaaattccaggaggtttgaatttggaccgcacatcttcgacagcaagtggtggatagaaatttgaatcaaatctgggtgaccgggaagcgattgactggatgagagacacttgtccaagctcagtgttattgtagtctacagagaaccatcctgatgtaggcacgccattgacaaggtagctcttctgaccctgtgcatagatatctgcaatatttgtgcagttgtccatctttatgtccggcaggcacaagccaacctcatccttggttagccgaacatcacagtatagcactgtatccggcgagctagaatactgcacaaatccataagcatctgggcttgaatcaggaacagccctgaaaatccaccttggctacgattgctggag

SEQ ID NO: 19460 - DNA, 265 bp, Setaria italica
  Peptide Sequence Number=SeqID_85434
caaccgcaacaaaccaaacccagccgcagctctccacgcctaaccctactcctccatccaatctcccctgccccgccgccctcgatccggcgggttcctctctccccggcgcagcgccgccatggatttgttggcgtctttggttgccgaggagcggtggctgttccccgcgttcctcgtgatgtacgccgccatctactgcgtcggccagctcgtcgtgttccggcggtgggcgccacggcagcggctggacggcgccagctgt

SEQ ID NO: 19461 - DNA, 263 bp, Setaria italica
  Peptide Sequence Number=SeqID_85435
cggccctcgctcgccccttatcccatcgtacccgccacacggcgcgccaccagtggcgccgcggatgcgcctcatctccccggcggccacctcgcgcggtttagatttccctgggcccccctcgcggtaccgtcacatatttttggcgcctcttcttctgcgcccctctcctcccgaaccgcagataccaccgagtcggcagctgaacacaagcaacaagcaagtgatccatggcggctcaggctctcctctccggccggcag

SEQ ID NO: 19462 - DNA, 1314 bp, Setaria italica
  misc_feature (1)..(35): n is a, c, g, or t
  Peptide Sequence Number=SeqID_85436
nnnnnnnnnnnnnnnnnnnnnnnnnnnnnnnnnnncctttttcgaagaatcgatcgatgaaaagctagcaacaaccatggaaaacgcatacggatcggaattgaactagactgagcaaaaaaaaaaaaattaatcaacacatatatatatatatatatgaacaattcacaataatcattattggtggagacagagcatccttgacgtttgctccgtatcatccttccatcttctttccctcgacgatcaatctttccctttccttccactcaaagatcccaacaaacgaaccaaccagctagctagctcatgaattggagcgatcatcactacctcgcttaatttaccgcagcctatccctacacatttgccaaccgaataataagcttcagtaaaatccatttctgcacggactaacttgagagaatttcgtgcaaataaaatagctgatgatggatcgagagaacgtcctaaaagtaccggagggaggaggaatcaagcaacgacgaaacaagaattgaagcaaccgaactagacgtcgaccgcgcaggcggctgcctgctggaagcggaagtatccggtgccgccgccggtgttggcgccgtagctgcccttgccctcgttgacggtgagcagcgcggggcagttgacgcggaggtggtagtggccggagatccaggagccgaccttccaccggacccagccgtcgacacggacgtcgatgaggacgtacccggcggtctcgtcctgcgcgagcgcgacggcgagaggctgcgggagctggacgctgtccatggactgcaggaacggggaccagacggactggtcgccgtggccctggtacccgacggggaggcgcgtgggcacggtgatggccacgtccttgtactgcgcgtacacgtccacctcgtcgtagtagacgccgacgcggtcgttgacgttcctggcggcgacggtggcctgcatggtggtgaagaggtaggtggacgccggcggggtcacgttgaggcacagcaccgacaggtcctgcaggtagaaccggggcttatgggggcggagcaccagccacacgatgagcaccacgaagaggaccagcaggacgaacgccaggagggcgccgcagagcttgcggtacaaccggtggcggtcgcactcgcaacccttgtgcccgccgcagtccttcaccgtcatggctctgcttcttgggcgcggcacctctctagcaaaggctgtggttgagggatggagaagagagagcagagcgagcttctgtgttctgtgaatgggagagaaaagaaaagggatgaccagagg

SEQ ID NO: 19463 - DNA, 358 bp, Setaria italica
  Peptide Sequence Number=SeqID_85437
aaataaattagttaggaaccctttcctttctttctaacttacatgtatgtgtaggtcacctttttttaggaaaatggaaaagctgtacgcgtttggtgctcacttgctactgttttatagattgcggaggagcgccgttcctgcctttgctgtttatagtggtgaatatggcgttcaatatcgcactcctcaatttggtgaagctgtcatctgcccttgttgcttcccttacttcaacttcagcagtgccaatatcaatctacatcctttcacttcctttgccctacatacctcatggtgcagagctaagcacgcctttcatcattggtgctgtggtattgctgatgggtctgattct

SEQ ID NO: 19464 - DNA, 429 bp, Setaria italica
  Peptide Sequence Number=SeqID_85438
gttttatagattgcggaggagcgccgttcctgcctttgctgtttatagtggtgaatatggcgttcaatatcgcactcctcaatttggtgaagctgtcatctgcccttgttgcttcccttacttcaacttcagcagagctaagcacgcctttcatcattggtgctgtggtattgctgatgggtctgattctgtataacctcccacaattgtcgttgaaacagtcgaaggctgattgaaagctgaagtggaatgctccagatgactggttacagaaagtttactgattttagtttttagtgaaatcgacttccactgaactatacggaccatataaccattcagatttgtaattatgtctgttaccgtaatgagggcaagcagcacgtgttcggcgtaggaccatgaatacttcccctggagtctgcaagt

SEQ ID NO: 19465 - DNA, 1249 bp, Setaria italica
  Peptide Sequence Number=SeqID_85439
gcgtaccctttcttcctcgcccagctcaccaccttcgggtacgtcgccgtgtacttctcgatactctatgccaggcaccgcgcgggggtggtgacccgggatatgctggcgctccccaagcgccgcttcgttgccatcgggttgctggaggcgctcggagtcgcttcgggcatgtccgctggagccatgctgcctggacctgctattcccatactatcccagtcattcctggtgtggcagcttatcttctctgccatgctcttgggaaggacctacactgtgagacaaataattggttgcctcctagtaatttctggtgtgattcttgctgttgcaagtggagcgaatgagggtcagtttctgtctggagtccagttaatttggccaacactgatgatcacttcatctgcatttcaagctggtgcatctattctgaaggaggctgttttcattgatggtgcaaaacgtcttaaggggaagcgtccagacatctttgtggttaattcatttggatctggattccaggccctttttgtctttcttcttcttccatttctttctaacttgaggggaattaagtttgctgagcttcctggttatctaaatggtggtgctgagtgcttcttaaatgttggggaaagtccgattgattgcggaggagcgccgttcctgcctttgctgtttatagtggtgaatatggcgttcaatatcgcactcctcaatttggtgaagctgtcatctgcccttgttgcttcccttacttcaacttcagcagtgccaatatcaatctacatcctttcacttcctttgccctacatacctcatggtgcagagctaagcacgcctttcatcattggtgctgtggtattgctgatgggtctgattctgtataacctcccagaattgtcgttgaaacagtcgaaggctgattgaaagctgaagtggaatgctccagatgactggttacagaaagtttactgattttagtttttagtgaaatcgacttccactgaactatacggaccatataaccattcagatttgtaattatgtctgttaccgtaatgagggcaagcagcacgtgttcggcgtaggaccatgaatacttcccctggagtctgcaagtgctctctgattctatatttctataggaggtgaattcaatgaaatcagtgctaatagtgatactggagttcaatgaaatctttcatgtacataccagcaattgctgttgcactcttaacagtca

SEQ ID NO: 19466 - DNA, 667 bp, Setaria italica
  Peptide Sequence Number=SeqID_85440
gatccgcaaggccccgtccgtccacctcgctcgacacgcctcgccttccgctgcttcccgccccaaccacctcggcgtcagatcccgctgctcccctctccggctccccgcgcggcggcgtgtcctctccgagatctcgacatggatacggtcgagaagatcgtcgaggacttcgcctcggacatcgccatgagtcccttctcctccggcacacgtctccgggatatgatacgcgcgatacgcgcgtgcaagacggcggcggaggagcgcgcggtggtgcggcgggagtgcgcggcgatacgcacggctatcagcgagaatgagccgcagctacggcacaggaacatggccaagctcatgttcatccacatgctcggctaccccacccatttcgcccagatggagtgcctcaagctcatcgccgccgcgggcttccccgagaagcgcatcggctacctcggactcatgctgctgctcgacgagcggcaggaggtccttatgctcgtcaccaactccctcaagcaagatcttaaccactcgaaccagttcattgtggggcttgcactctgcgcccttggcaacatatgttctgctgaaatggctcgcgatctggcacctgaagtggagaggctgttgcaaaatagggatcctaatacaaagaagaagg

SEQ ID NO: 19467 - DNA, 283 bp, Setaria italica
  Peptide Sequence Number=SeqID_85441
atccttatcaaattcaagactaggaggatacatagaacataaggcaaaacactgtttgagatgatatggcaagtgttgataacttatctgcaaacttgccaagataatgtccgtgtttctgttaccttcaagaatctgcatgtcacttaatatgctttcccactgttctctctgtccattagtgtcagacaaaagcaccccaagagacttggctgctaacggggaacctcggcagtttgcgccaaccctctgtaccaatacaaactaccaagaatactaatta

SEQ ID NO: 19468 - DNA, 1329 bp, Setaria italica
  Peptide Sequence Number=SeqID_85442
ttttcttactagtagtaattccagaatgttgctgacatagtccttcgtgatccttctgagaggaaactcgttgttgtatctgcaatgtctaaagtcaccgacatgatgtacaatcttgtgaacaaggctcaatcaagggatgattcttacatcactgtgcttgatgaagtttttgaaaagcatatgggaacagcaaaggacttgcttgcaggagaagaccttgcaagattcctgtctcagttgcatgcagacatcagtaaccttaaagcaatgcttcgtgccatatatatagccgggcatgcaacagagtcattctctgattttgttgttggccatggagagttatggtctgcacaaatgttgtcatatgcgataaagaagtctggaacgccttgcagttggatggatacaagagaaattctagttgtaaatccatcaggatccaaccaggtagatcctgactatttggaatctgaaaaacgacttgaaaaatggtttgctcgaggtccagctgagacaataattgctactggtttcattgcgagtacacctgacaacatcccgacaactttgaaaagagatggaagtgatttctctgcagccataattggttcccttgttaaggctcgtcaagtgaccatctggaccgatgttgatggggtatttagtgcagatcccagaaaagttagtgaagctgtgatcttaagcacattgtcatatcaggaggcctgggagatgtcgtatttcggggcaaatgtcttgcatccgcgtaccattatacctgtgatgaaatacaatattcctattgttataaggaacatattcaatacttctgcccctggaactatgatctgtcagcagcctgcgaatgaaaatggtgatttggatgcttgtgtcaaagcttttgcaactatagataaactagctctggttaatgttgaagggacaggaatggctggtgtcccaggcacagcaagtgccatatttggtgctgtgaaggatgttggagcgaatgttgtcatgatatcgcaggctagcagtgaacactccgtatgctttgctgttccagaaaaggaagttgcatctgtgtcggcagccttgcatgttaggttccgtgaagcattggcagcagggaggctatctaaggttgaagtcattcataattgtagcatccttgctgctgttggcctgaggatggcaagtacacctggagtcagtgcaaccctttttgatgcacttgctaaggctaatattaatgtaagggcaatagctcaaggttgcagtgagtacaacattacagttgtattgaagcaagaagactgtgtaacg

SEQ ID NO: 19469 - DNA, 341 bp, Setaria italica
  Peptide Sequence Number=SeqID_85443
acctagcatgtcagcaaccatcttcatccgtgtcgtcacgatgatcctgctctcttgcttcccatgctgcaggggagctagtagcttcttccacctctccccgttctcccacgtgcccatctccttgtcatcccaaacatcatccaagataagcaagaacctcctccctgcaacagaagaagccagcaaattttgcaacctatcaaaattcagaatcccatcatagtccaccttccaatcagtagcggcctgcagtatctccctagtaagcctcacatcatccacaggactcgaggcacacacccacatccggggataaaagtgctcttgaatgaccacat

SEQ ID NO: 19470 - DNA, 543 bp, Setaria italica
  Peptide Sequence Number=SeqID_85444
ttcctacctaagtcttggtttgtactagtaagtctagtaaagtagtccttccggtccttgatttcgagctgcagcctctcctgtcttccagtggttttcaaatgaccagcgagactgaggggcctgatctccactggatgaaccggagttgctgcggggccgttctttcctgaagtcctcaaacttatgcgccaaggcgtcctcgtcgagaattcccttggctttgcttgccaaagtttgccacaatccaagcttgggctcgtttatggttttgaacgatgtgtaactgtatgatgaagcagattcctgaggataggagctccggtgatcgtcggcggcgccctgcttccggcgataggccatggggatcggggaggctttcacacagcacagcaagccacgccgccagagaagagaatctcaatcaagcaaccgacttttgatgaaatcggcgatccgtcgtggccgtggtggtggtgatggcctggcgactcttgattctccctcctccagggaaaaggaggaaaaaaggtggaaggctgg

SEQ ID NO: 19471 - DNA, 348 bp, Setaria italica
  Peptide Sequence Number=SeqID_85445
cccgccgtcgctgccttctgctgcagcgggcggccgccatggcgcggcgccacgggtggcaactccccgcccacaccctgcaggtggtggctataacagtgtacttcttgctttgtatagcattctatgctttcttctctccatttcttgggaaggatttatatcaatatatcgctgtgggtgtttatagttttctggccttatccgtgctgattctatatgttagatgtactgcgattgatccggctgaccctggcatcctgatttccatggatggcacactaatttataaatcagaagcacatgtagacactcaagatgaagctggcaagtcaggattgaggaatg

SEQ ID NO: 19472 - DNA, 400 bp, Setaria italica
  Peptide Sequence Number=SeqID_85446
accgagccaaccgcgaacctccgcggggactcgtaggccgccttggtcctgaggctgctcatcagcgagccgagctgcgacgtgaactgctccggccccgtcgcgttccgccagttccacgcggagaacaccaccgacgtgtccaagtcgccgaagaagcttgtgttggagtgccgcagcttgcacttgtcgtagatgaacatggcgttcttctggacggagcagttgatgtcgctggccatgtcctgcaccaggccatcgaggcacacgcggcagtccgacgcgttgacgtcggcgcggcactgcgcgaggccgtacgcctgctggccgggcgcggcgccggtggcgttctcggcgaacccggaggtcgaggccgcggcggcggggagggaggagagga

SEQ ID NO: 19473 - DNA, 395 bp, Setaria italica
  Peptide Sequence Number=SeqID_85447
gcttctggaccttcgtctgcgtctcctgcagcggcatccaccgtgagttcacgcaccgtgtgaaatccgtctccatgtccacgttcagcacgcaagaggtcgaggctctccagaagggtgggaaccagcgagccagagaatcgttcctgaaggattttgatacccagaaaatgaggctacctgatagcagcaacattggcaatcttagggaattcataaaagctgtttatgtggagagaaggtatgctggtgggaggttttctgaaaggcctccaagagataaacagaaccaaaaggcccatgaagaagaacatagaagggcaagctcctaccattcattttcacagagcccaccttatgattaccagtatgaagagcaacgcaatgggaaacaa

SEQ ID NO: 19474 - DNA, 436 bp, Setaria italica
  Peptide Sequence Number=SeqID_85448
aggactagaaagcaaatgcttttgcttccagtgcagtagtagcgtatgcctgtttttctagctgctgctttcctttgtgttgtgccattcagttaactcgctaaaggacgaatttcagcataagttaactcgcatttgacgagtgaaatgatgtttctttgcacttggagctggaaatcctggaatcatcttcgattttgttttgtaaaacttcctttttatcgtgccttgacggctgtattggggaatggttcagctctgtttgtctggcaattgtttgtgtagcagcagcctcataatcgttgcagctcatcgcctatcgggtgaggagagcgcggcaggctacctgatagcagcaacattggcaatcttagggaattcataaaagctgcttacgtggagagaaggtatgctggtgggaggttttcgtgaaagg

SEQ ID NO: 19475 - DNA, 404 bp, Setaria italica
  Peptide Sequence Number=SeqID_85449
ggcagcagtaccccatgtggatgtgcatgtccatcctgccagggcgaagaagtgccggatcaagccgctccttgtagtttgttgtgaagataatgattctctcctccccactggttgaccaaaggccatcgacaaagttgagtagcccagatagtgtcacctgattagcagtggcatgagacacatcagcatttcaaaagaaagctatggaaccaggacagggcactatgatttcgggtatcttaccttgtcctctgaaggactggatttggtaccatcctgaccttcgtctgcccgctgttgcagatcaatggagcagtcgatatcctctatgacaaggattgaccggttggtcatcccgatgagcaacctccgaagcgtttgattccaattcacctccgtca

SEQ ID NO: 19476 - DNA, 977 bp, Setaria italica
  Peptide Sequence Number=SeqID_85450
ccaaaaaatgatctcttattaatatcaaaacaatacatttttggctgatattttctggtactaatatatgatatgcacactacatgggcatcattctttgcctgcatcgttcagattttgatcgcctgagatgtcttgttccgtcatcatttctttcctgtcctctttggcttcatggaccacattctcacctttgctatccttggcatcgctcctctttgccttgaggaactggataaggccctcaagtgcgatatcggtgtcatcgttcctcataagcacctctgccacctctgctggagtcaccatcacctctttgatcaactcttctatctcagggtatctgtcatggtcgctgatggcgtggtagttggaggccaggattctgaacgactctgggcagcagtaccccatgtggatgtgcatgtccatcctgccagggcgaagaagtgccggatcaagccgctccttgtagtttgttgtgaagataatgattctctcctccccactggttgaccaaaggccatcgacaaagttgagtagcccagatagtgtcaccttgtcctctgaaggactggatttggtaccatcctgaccttcgtctgcccgctgttgcagatcaatggagcagtcgatatcctctatgacaaggattgaccggttggtcatcccgatgagcaacctccgaagcgttgaattccaattcacctccgtcagctcgagatcatagacgtcgaacttgaggtagttggccatggctgcaatcaggctggacttgccggtcccaggcgggccatacaggaggtacccccgtttccacgccttgccaatcctcttgtagtactccttcctcttgacaaacctctcgaggtcatccatgaccgactgcttcatcttgtggtccatggcgagcgtggtgaaggtggacgggtggtggaggtcgatggcaaaccaggactcaccttcgttcataatta

SEQ ID NO: 19477 - DNA, 336 bp, Setaria italica
  Peptide Sequence Number=SeqID_85451
tcggtctagtattagtaaattaaagggtaaggcagctgggacgcaggagcatccgaggggagagacgagagaaacgtagctaagtttgcacgcggttacacagtgacaactactgatctgactacatacttatgtgccttacagtacacaaagtgacgcaaataaagaagccaactagttactgctttgatcccgtcgcggtggtgcagacggcgaggcaggcgaggtagaagatggccgagtccgcggcgtcgccccggccgtcgccgccggagcagaggtagccgcgcttgaagcggcggcggccctgctgctcgctgcaccgcagcacctgcg

SEQ ID NO: 19478 - DNA, 1100 bp, Setaria italica
  misc_feature (1042)..(1042): n is a, c, g, or t
  misc_feature (1050)..(1050): n is a, c, g, or t
  Peptide Sequence Number=SeqID_85452
ctcccttcctccgcacttcctccgatcgtctcgcctgcggcgccggcgaccgtcgggcagcggccatgcgggtggcacccaaggtgctcgtcctcgtccgcgacaccgcaggatacggcgcagccatcgccgacgctctccgcccgccgccggggctcacgagggagtcctcgcccttagagctccccctcggaaagtacggcctcgacggcgagaaggcgtccgtcgagctcctgagcttctccgattccagtggctctcctcaggtgactatttttgttgtgccagattataagccccctcttgcggcttgtgctatgaatgaggtcttagaactgatttcttctgaagctacctccactgagcaagttttgattgtcccattcatcacaagatcatcaagctatcatcatggaatggaaaatgcaacaaaagcatcacctgtacttcatggtgctgaaataggggcaacaactgactttactcacttgtttgttgatgggactactaaacctcctacatccttgcaaatacgtactgaaccaatattgtgtttgctggaaatggtgcgcgtgttgaagatgcctacagttctttttgttgcttctggtgggcagcagcaaggcaaaagctctacagtttctgatcttgagatactgcaatgcgtaggggagcacttggccaggcacaccaacttggagttcagcaaagaatccattctggagagagggatcgaaaaatcaccaatcattcaggaaccctggcgcgagttatatgggtgacaaaattcttgcatgttggcaccctttggtcttagcttagtcggccatacatgctttgagtgaattgtgtggtgtttttggtgctggaatcatgatagttctggtttctcactctctgttaaagtctgtaatagttcatatagctccaccggcagttgaacttgtagactctggatctctgatgtttaccctgcagttgaacacgaaaggaacattcctagaaaacagtgttcggagttcaggtaacttaagcttacaanaaaaaaanaaaaaaaaaactaaaaagaagaactagaccaaaggacacacagggatagg

SEQ ID NO: 19479 - DNA, 378 bp, Setaria italica
  Peptide Sequence Number=SeqID_85453
cggctctacgcggccacggtccttgggttcctgctcctgctgtgggtggacacggggctcgtcccggaggccgcggcgagggggttcgggcccaagctgtcgccggaggccgtggcgagggtcggggccgaggcgcgactagcgcctggcggcctagaacacaagctccgcgtcctggagcgcagggtcgggcagctcgtcggcggcgagagggccgccaactgcagctcgcaagactccgtctggcgactccaccagaacgatcagcacgtgttccactggcgctgcacggtgcacaagtccgtggcggaggaggtcagcgtctgggggagccctctccgcacctccggtctcctgccggccacgctctcggcgcgg

SEQ ID NO: 19480 - DNA, 253 bp, Setaria italica
  Peptide Sequence Number=SeqID_85454
tgtccactggactgatacagaagagatatttatcatacaacccaagaggtaaatcatcaacaatagcagcaaccttcagcatatcttcacattcagcaataaaatagtctggagatagtttagccttctccaagaaacgttccagtatagggtggaaaaagtcagttccatgcaatcgtgaatataaagataataaatcgaatgttgggaaaagtccagcacgctctataatgggggaaggtgacttcagaga

SEQ ID NO: 19481 - DNA, 479 bp, Setaria italica
  misc_feature (475)..(479): n is a, c, g, or t
  Peptide Sequence Number=SeqID_85455
gagagagcactgaagcagctgaggagatccatggtgccccacgcgcggcctctcccgaagttcgacagaccgttccggccgcagaaatcgatgaagcaggtgactcgtccgaagtccccgcagcttcaggtggacgagcgaggcgcgaggaggcatgccttcatcagatgatcccctccagctctgttcgtagttgtacttctgtacacactgcttgttgttttcttctttctttgacggccaagatcattccctatcttgccgtcgatctgttgtcatgggctactatgattctttctatgcggggtgctgatcttgtcagtcaacacagctgacactgctcctgtagggaggacaagataggatcggtgactgccgttgggtttgtagattgtgtgtgtgtgtctgtgtatttatgatctcgatgattacacttattccctttataggaaaaataaaaaaaaaaaaaaaaaannnnn

SEQ ID NO: 19482 - DNA, 336 bp, Setaria italica
  Peptide Sequence Number=SeqID_85456
ttctgcaagcaccagtaaggttctaccatggaaacgccgtcccgtgaaacgctgctgaggaagatagatggtgctttaaaggatggcaatgtcgaagaggcactgcaatcattcggaaattacaagaagcttcacggtcttcctgagccgcgggtactgaatagcgtgatcgtgtcgctgtcttacatgtctagtcggaggtggcttcagagggcatttgacttggttctctcagttcatcaaattaacagcaacgttctcaactgtggctcactgatgaggctagcgttggctcttgcgagagatcagatgcctgttccagcctccatggtcctg

SEQ ID NO: 19483 - DNA, 426 bp, Setaria italica
  Peptide Sequence Number=SeqID_85457
cgggatggtatgttcatataatatagttcttaatctaagtggtagtcttataatatagtgaaacctccatcttccttcttttagattcagtctcatcgtcatccccgcgataggtcgagggaatggtacattgtgttgccctctcatctttttcgttggaggagagtgtagacgagacatctacagcttcttgggactccataacacatgtatcagcaatctctgttgtggtaagagaaccagacagatttctttcaagaacttcactatgcacatcttggaagtggtcatttggagccattgcccgtgaggtttctgtgttatgaccaggctttgaaccaaagttctcagagccatcagcttgcaaatcattgacatgtgacgacgggacacttggccggcggttgggaggtggcaaagggtgac

SEQ ID NO: 19484 - DNA, 1271 bp, Setaria italica
  Peptide Sequence Number=SeqID_85458
aagctcaacaacggcctcgccctcacccccgccagaatgggggtggaacagctggaatttcttcgcctgcaacatcaacgagacggtcatccgcgagacaggttccaccgcgggctccatctcctcctcatttctcgcttgtcaaatccgcagttccgttactctagtttttcaattgttgcaaaatgcctccttcaaaaaaaaattgttgcaaaatctaagcccaattcgtagtgtttccttatttggtgcgccgcccactgctcgaagtagatttaggtaggtgaaggattgctgttggatagacgtgtgggattaatgaggttcactgttcaagtggcatgtttgcagctgacgcgctggtgtcgacgggactggccgaattgggctacaactatgtaaatattgatgactgctggtccaatgtgaaaagaggaaagaaggatcaattgctacctgatccaaagactttcccttcaggcatcaaagctcttgcagactatgtgcacggaaaaggtttaaaacttggcatatactcagatgctgggaaatttacttgtcaagttcgacctggatcactctatcatgaaaatgatgatgccatgctctttgcttcatggggtgttgactacctgaagtatgacaactgctacaatttgggaataaagcctcagaagagatatcctcctatgcgggatgctcttaattcaactggccgccaaaatattctactctttgtgtgagtggggtgagtatgatccagcactgtgggctggaaaagttggcaatagttggcgtacaacaggtgacataacggatacatggaaaaggtgacatgctctttccaggaaaaagagagagagagataacattagctatgttgatgtgatctcaaactgacttatatatgtatctggtgaaaacaagcatgacagacattgctgataagaataacaagtgggcatcatatgctggacctggtggttggaatgacccagatatgctggaggtagggaatggtggcatgacctttgctgagtatcactcacattttagcatctgggctctcatgaaggcccctctattaattggctgtgatgtcagaaatctgacttcagaaacattggaaaatattgagcaacaaagaagttattcaagtaaaccaagatacctcttggagttcaaggaagaagaatttaggagaaggaaatatggatgccgcgaggtgtgggctcggcccctgtctggaaatcggcttgctgttgctttag

SEQ ID NO: 19485 - DNA, 1864 bp, Setaria italica
  misc_feature (1824)..(1864): n is a, c, g, or t
  Peptide Sequence Number=SeqID_85459
tcttaccaagtcttcggctttagggtttttcagtgggagaagaagggagatggcggcggcggacgtggagtaccgttgcttcgtcggcggcctcgcatgggccaccgacagcgagtccctccagcttgccttcgcctcctacggcgacgttgtcgactccaaggtcatcaccgaccgggagactgggaggtcccgcgggttcggcttcgtcaccttctccactgagcagtcgatgctcgaagccatcgagaacatgaacggcaaggagctcgacggccgccgcgcatccagccgctcgccaccgccacgctgcgccgcctctacgacacctccaactacggcaagctgcagctcaacaacggcctcgccctcaccccgcagatggggtggaacagctggaatttcttcgcctgcaacatcaacgagacggtcatccgcgagacagctgacgcgctggtgtcgacgggactggccgaattgggctacaactatgtaaatattgatgactgctggtccaatgtgaaaagaggaaagaaggatcaattgctacctgatccaaagactttcccttcaggcatcaaagctcttgcagactatgtgcacggaaaaggtttaaaacttggcatatactcagatgctgggaaatttacttgtcaagttcgacctggatcactctatcatgaaaatgatgatgccatgctctttgcttcatggggtgttgactacctgaagtatgacaactgctacaatttgggaataaagcctcagaagagatatcctcctatgcgggatgctcttaattcaactggccgccaaatattctactctttgtgtgagtggggtgagtatgatccagcactgtgggctggaaaagttggcaatagttggcgtacaacaggtgacataacggatacatggaaaagcatgacagacattgctgataagaataacaagtgggcatcatatgctggacctggtggttggaatgacccagatatgctggaggtagggaatggtggcatgacctttgctgagtatcactcacattttagcatctgggctctcatgaaggcccctctattaattggctgtgatgtcagaaatctgacttcagaaacattggaaatattgagcaacaaagaagttattcaagtaaaccaagatcctcttggagttcaaggaagaagaattttaggagaaggaaaatatggatgccgcgaggtgtgggctggccccctgtctggaaatcggcttgctgttgctttatggaaccgttgttcggaggctgctaatattacaatgaaattgccagcagtaggccttgacgggtcagctgcctattccgtcagagatctgtggaagcacgaaactctctcagaaaatgttattggaacttttggcgctcaagttgaggtgcatgacaccaagatgtacattttctctccggccgtcagtgtagcttcaatttgatgggaacgggtgaaggctggacgacagcacgctttatcccagtatatattacggcaataaacaccatcagtgttccactccgccttgtttcccaacctggggagtacatacaaagtgggccatgtaaagtttcattagcagcctgggtgtaaatctgctggcgtcgggagtctcgccgccatttttcagttgtgtgctgtacatgatgttgtaaggttggtttgcttcttgtacgtggctcagccgttggcacattactctcgaatgtgttactgcgtaaaaaactgaattcgaaccacagggcgctggagactcaaacgttaaaaaaggacgaaggcacacgagggagtaggnnnnnnnnnnnnnnnnnnnnnnnnnnnnnnnnnnnnnnnnn

SEQ ID NO: 19486 - DNA, 436 bp, Setaria italica
  Peptide Sequence Number=SeqID_85460
gccgcacctccgctgctcgccgcgcctgctccaatccaagaccccgaacgcgaaccctctccgccgtgtgccgctcgcccggcctcgaagctcgaaccttggaggggccagggcggcagcaaccctctgcgccaaccttcgccgccgccgccgccatactcaccgcaggatggggaagcgcaagcccatgccttccgccgcctctcgaggagccaagagccggccaaagaggccaaggtccgggaagcagggagctgagttgcgggaggagaatccccaactgtcagagcacgacgatgaaaccatagatactgaatctatagcagcggaggctattcaacatgagaaaaaatccaataggagcgttcaaagcatagcgcagagtgatgaagatgacacagaagatgagcacgactcttctagtggtgatgcaccg

SEQ ID NO: 19487 - DNA, 348 bp, Setaria italica
  Peptide Sequence Number=SeqID_85461
ggatacttcgccgcccccgccgaagccgcgcctccacgtctccgccgccgtccccccacctgagtccccgtccgactccgtgtggtgtgggcgccagcggtctcggcgctcacgagatggcccgcggtctgcggctcctctcccgcgcggtggagaggctgcggccgctgcttgtccaggggccgccgacgaggggcttctccgccttcgtgcgcgagccgctccacgtctgcgtcgtcggtagcggccctgcagggttctacaccgccgacaggatgctgaagagtcatgaaggagcacaagttgatataattgataggatccccacaccatttggcctagttcgtt

SEQ ID NO: 19488 - DNA, 316 bp, Setaria italica
  misc_feature (277)..(316): n is a, c, g, or t
  Peptide Sequence Number=SeqID_85462
gggcggccggggcggagccaggagttctggaatggaaagcgtagtagcacggtaacgcataggttttttaacggttgggtgcacgtgtgcatgcgttgcttcgtgtagaaaacgaggtgtaaatgtagggtggtgatagatgagtgtcgatggatggagtgcgtacgtagtgcctgtaattgttcgtcaggggttgaggattgcaccccctgtgctccgaggctgtaattcctttgtttcttccttttgattcgatttacatttgggcttggccttnnnnnnnnnnnnnnnnnnnnnnnnnnnnnnnnnnnnnnnn

SEQ ID NO: 19489 - DNA, 254 bp, Setaria italica
  Peptide Sequence Number=SeqID_85463
gtacatgtaaatgctcgcagaaattactagtagagattataagcatgttcgaccaagaacaaaaaggatgctgttgagaaagcaggatttggttctttacttaagcttaaggacatagagattcgacgcgagctatgcaaggagattgcggacagtttcgacttagacaaagaagaattcaacattcaagaaaagaaggtgaaaatatccatcaaagatgttgatcatatactaggccttccatcccaaggcga

SEQ ID NO: 19490 - DNA, 247 bp, Setaria italica
  Peptide Sequence Number=SeqID_85464
ccctctctctcctctctctctttgcattgtgtcactctagaccaggtcgtaggtaactagcaattgaggtcttaaattcttgctcgaggtgaagcaaggcacgctgatgcaggagctgaatcgcgaggtgccttgagggtcttgccaaggcttgcgaggttccattttgcttccacccctgagcttgcagttgcgtttgagtgcacctctgaggcttctgattggccctcgcgctccgtacttaaag

SEQ ID NO: 19491 - DNA, 909 bp, Setaria italica
  Peptide Sequence Number=SeqID_85465
tccctccccgttgcttcagttcgtccactccccgttcccccatatctaatcctggaccgaccgacctgcaagcagcagcgagaggagaggagggaggatatatacatagccaaggaggggagactctttcgagacgaccaggaaggaggaggaggatgccttccagagcgatgaaccggctgttcgtcgagtcgtcgtcgtcgtcctccggcagcggcggatgcagggaggccgcgccggccgcggcggtgctctgcgccccgaggccgcgcagggcccaggtccatccttgcagcgccgacctcatccttggcccgccgcccttcctgctcagcagcaagaagagcaaggagggaggcaagaccaagtcagcggaggcggaggtggacggcgatgaggacgggggctgggcgctgttcggcgggtcgccgccggcgcgcgcggacaacccgctcgtgcacgacccccacttcctgctcaaccagcgccaccccgtggactcgtcgccgttggagctcgggatttttgaccaccagagccgcagcaactacagccaccaccgccccacgtatattagcagcagcagcagtaacagcagcagcagcagttttgccccgtcgttcgcgccgaccgtgaggatccaggggttcgacgtcgccgcgtgccggagctcccacagcaacggcggcggccgcgtgctgtccgcccgcgcctgagcgcgaggcggtgacggaggagctccggtaagccggggcgccgccggacccaggggggaagacctcgaatcttgtacagttttcgccggcagaccgtctttgttcgtttagctttacttacttacgtcttacgttgttgtttttgttggttattattactagttcttaacggtttttttaatttttaaacttt

SEQ ID NO: 19492 - DNA, 1236 bp, Setaria italica
  misc_feature (1)..(26): n is a, c, g, or t
  Peptide Sequence Number=SeqID_85466
nnnnnnnnnnnnnnnnnnnnnnnnnnatcaccattttcagataaaactcaaaagatcatattcacataggttgaacgttctcgagttttgtcaccgtacatgacttcacaagacctaaaaagaaactaagcttctcagacgcgaaaatgcagagctaacagctgcttatgctcgcactaaaacatacagtactctctaaaaggtgaaccccgggcaacctagtcattggcaactaactcttcgcttctgttttctaccctctgcagaacaagtttcttctgcggagcaaggcctttggcaattgccgcagaactcacatccacgaggatggtgtcgtcttccttgaaatcacccttcagcacaccaagggcaatctcgttctccaccatctgctgaatcactctcttgacaggcctcgcaccatagttcgggtcgaagccaagagaccccagaagctccacggcctctggtgtgtattggagacgaatcttctgttgtttcagccggttcttgacccggttcaactggatctccacaatgtggttgatctcacttgtgtccagtggttggaacacgatgtactcatctatcctgttcaagaactcaggtctaaatgtttgtcgggccatctcgataacctgcttcttcattatctcatacaccgcctccttgctgtctgtggtgtttctaagcgtgtccaggatcaatggtgatccaatgtttgaggtcatgatgatgacacagttagtgaagctaacagtcctgccctgtgaatcagttattcttccatcatccaacagctgcaacaagatgttgaagacatcctggtgcgctttctcaatttcatcgaagagaacaaccgaataaggccggcggcgaacagattcagtcaattgccccccttcctcataaccgacatatccaggtggggcaccaaccaaacgggagacagcatgcttttccatgtactcactcatatcaattcggattagggcattctcagtgttgaaaaggaattcagccagtgtcttacccagctcagtctttccgacacctgtaggtcccataaacatgaagcttgctatcggacggttggggtctgataggcctgccctagaacgacggatggcgttggccactgacttgactgcaatgtcttggccaataaccctcttgtggagtacatcttccagcagcagtagcttttccctttcagactgttgaaggttcgacact

SEQ ID NO: 19493 - DNA, 578 bp, Setaria italica
  Peptide Sequence Number=SeqID_85467
ataaagaaaccgtgtacataacatgatgaatatgtaatcaagaattccgcatccatcgcaccaaccaaacgggagacagcatgcttttccatgtactcactcatatcaattcggattagggcattctcagtgttgaaaaggaattcagccagtgtcttacccagctcagtctttccgacacctgtaggtcccataaacatgaagcttgctatcggacggttggggtctgataggcctgccctagaacgacggatggcgttggccactgacttgactgcaatgtcttggccaataaccctcttgtggagtacatcttccagcagcagtagcttttccctttcagactgttgaaggttcgacactggaataccagtccatttgctcacaatctcagcaatgtcaacatcagtcacctcttctcgaagcatcgacttccctgattgctggaattcaacaagtttattctcagcctcttccaactgtttttgcagtgacagaagtgttccatacttgagctcagcagcacgacttaaatcatattctctctcagcagcctcaatctccaagttcaccctgtc

SEQ ID NO: 19494 - DNA, 1570 bp, Setaria italica
  misc_feature (1487)..(1570): n is a, c, g, or t
  Peptide Sequence Number=SeqID_85468
ctccttccttccttccttcccaccagcctcaagaaaagggccgaggcgaggcaaggcaaaggccaagccgtcccctccctcctcctccccgttcgcttcagttcgtccactccccgttcccccactatctaatcctggaccgaccgacctgcaagcagcagcgagaggagaggagggagatatatacatagccaaggaggggagactctttcgagacgaccaggaaggaggaggaggatgccttccagagcgatgaaccggctgttcgtcgagtcgtcgtcgtcgtcctccggcagcggcggatgcagggaggccgcgccggccgcggcggtgctctgcgccccgaggccgcgcagggcccaggtccatccttgcagcgccgacctcatccttggcccgccgcccttcctgctcagcagcaagaaggtactgggtcaaatccacaccaaccaacccctgttcttcctcctaccttgcaaaaaaatcgcttcttttcccccttcgtgctcgtgttctcttgcaaagatctcatctttccctctgttgttatcgcagagcaaggagggaggcaagaccaagtcagcggaggcggaggtggacggcgatgaggacgggggctgggcgctgttcggcgggtcgccgccggcgcgcgcggacaacccgctcgtgcacgacccccacttcctgctcaaccagcgccaccccgtggactcgtcgccgttggagctcgggatttttgaccaccagagccgcagcaactacagccaccaccgccccacgtatattagcagcagcagcagtaacagcagcagcagcagttttgccccgtcgttcgcgccgaccgtgaggatccaggggttcgacgtcgccgcgtgccggagctcccacagcaacggcggcggccgcgtgctgtccgcccgcgcctgagcgcgaggcggtgacggaggagctccggtaagccggggcgccgccggacccaggggggaagacctcgaatcttgtacagttttcgccggcagaccgtcttgttcgttagcttactactacgctacgtgtgttttgtggtatatacagcaacggtttttattaacagcagatcagtcagaatagggagccgcgagagagatctcgctaagaagaagagtagattgatgatcaccgatacacagcagggagggtcaaagggagagagagatgaattttttttcttattattttttttcctcagcaaggttttctcgtcttgtgttgtaaactagcatcctcttgttcgtcctgtagatatcaatcagttcgtgttctagttgaggagtccgttcctgggatggtgatgaaaaaaagatgcttttgcttgcttaagcaagccgtgaagctacctccgccatgtaaaccatggttgtatgtataaagaaaccgtgtacataacatgatgaatatgtaatcaagaattccgcatccatcaaaaaaactactcacactgagtcggnnnnnnnnnnnnnnnnnnnnnnnnnnnnnnnnnnnnnnnnnnnnnnnnnnnnnnnnnnnnnnnnnnnnnnnnnnnnnnnnnnnn

SEQ ID NO: 19495 - DNA, 387 bp, Setaria italica
  Peptide Sequence Number=SeqID_85469
aggaacacggtaggctactcgttagcatacaaaaatataacccgtaaacaggatcacttgcgagtagatgatcatagattataccttcgctcatcacgcgtcgcaacgaaaatcttaacgaagcgcgagtggtcgatccgatcgacgtcgaggaagtagtcgtacaatctaacaaagtgcgcaactgagcaacacttctacagcaatccacacgtacaggatgggacgacgaaccggagcatgctagcactccacggcacgtactcgaagatccccgctatcaacctttgatccgggagggaggactgcaacagcgcaccaagcaggtgcatgcggcggggcagtggcagcgcaccaggcaggtggattagcccttgggttaatcta

SEQ ID NO: 19496 - DNA, 298 bp, Setaria italica
  Peptide Sequence Number=SeqID_85470
attgagcgtacagcccctacaccagcagtccagcagagctaccgaaatggcctcgaagccatccgctacttccctgctcctcctcggcacggctctcctggccgcgacggtttgcgccctggcccagatgccgccggagacggagacgacgacggagaataatccagacatcaagaggtgcattagtgcagcatccgatttcctctcaggtatcccgctggcccctgggaccatacaggccgcagtccgtggactgaagccggtagaggtcgcccagtgcgtctgccttgtcgtcgcg

SEQ ID NO: 19497 - DNA, 1718 bp, Setaria italica
  misc_feature (1677)..(1718): n is a, c, g, or t
  Peptide Sequence Number=SeqID_85471
gatggccaaataaatgcagaagttgacagttccatggaaaatagcacagtgcccttagctgagaggcaagatggcatggaatcatcagatactgctgagaaatggtccaagaaagttggagaacttgacgtaaatgacgtcccaagtgtgacttctgatgaatacttacccgagattatgccaatgaggaaaggtgaaaaccggtttgtagttagtaagaagaaagaccgctcgctgacatcaccacagttcaaaaggcgcagtttacttgagcatgctgacaattctgattttgtcccatttgtcccatttcctcctgattactttgccaagaaagataagccggtggagaatactgcagcgacaggaatagtgtcagaaggttctccaacatctgaaaagcgcttggaaacaaatgcttcatcaggaaagtacggaaacagctcgaatacttcacaagtggtgggtagtcagcccaaaggcaacgtggataatgagaactggaacagaaataactctcagcaaaactcaagttctggtggttatggtcaaagcaacaactatcagcatcactcacaatctcatggggcacaatcttggcctagtgatactgcaaatacttttacttggaacacaggctactcccatgggaactttaaggagagcagaggtgactctacttacaatggagctagctctgcacaacaaccttataattcaggttataacagcaacagcaattcttggagcagtgagaacaataacagcaacactgcttggactggcaacagcaattataacaacgatagtgcttggagcggcaacaaccattataacaacaataatgcttggagtggtaatacttcgtatagcaacagcagcagtacttggaacggcaatggcagctataacaacaatacttggagaagcagtcacagttataacaacaatgcaacatggagcaacagcagccacagtgcgtggagcagtagtaacagcaataaccagcgtgactcatttgctgacaatagcaatgctgccagcatcagcgattccatgaaccctaatcagacaattcacaactcaggttatggaggaagctcaaatagagattacactggaaaaagcttagaaggatctgctgtgaaggatcctgatcctctggacatgtctgaggaagccaaggcagagagatggttcaggagagcagcccagataaaggacatctccgagcttgccaacattccagacgaggacttccctgagataatgccgatgaggaagggggtgaacagattcgtggtgagcaagaggaagactccattggagaggaggttaacatctccgcaatacagaaggaacctgccaattgtcagttctgaaccggagaaagatgccagctgaaaactcaagcatcatgactgggtgcataacaccagtgtattctttgacaccaaattgtgacaataaaccagtgatcagaaatagaaaccatgaaaaaagctcaggaaagttttctgtaaggtaaaaattttgtccgcaatggcaaggggtttgctggattttgcttgttacgtgtaccctatacgaatgtgtgttgtactaataccttcaacactgaacccgtggatgacacttatcgaagttttggcttgtttgaggtaccactaaaaaaannnnnnnnnnnnnnnnnnnnnnnnnnnnnnnnnnnnnnnnnn

SEQ ID NO: 19498 - DNA, 398 bp, Setaria italica
  misc_feature (340)..(340): n is a, c, g, or t
  misc_feature (394)..(394): n is a, c, g, or t
  Peptide Sequence Number=SeqID_85472
gcgctcttcgcttcgcttcgcctcacctcctccccgtgctccctgctttctgccgcagcgcgctccttccctctgtcgcagcgcgctcttgccctctttccccagctcacgcggcctccgtccccgcgccaccgcctccacttggcgccgccgcctccttacgcgctccttccctcggtgggcacccgaagcgtagccgggattctcaaccgctacgcaccgcggagctcgaccactcgtcggagccgcctttctccggggtaccttcttcgctactttcccacctggagtgtagctggtttggttgtgtgtatcggggggagggattggatggccaacngcgagtatgagtacgtcaagagggaattcgagttcgatcgccgcctccctcctntaac

SEQ ID NO: 19499 - DNA, 316 bp, Setaria italica
  Peptide Sequence Number=SeqID_85473
cgacaagcccgcgacgggcgccgccctccgcacgctccgcgctcacgccgccgagacccgcgtcgtccggtacccggtcggcggcggggacaagctccacctgctcaccgccggagacgacgcgctcctcacctactgggacgtgccctcggagacgcccgtcttcaccgtccccgccgcccacaaggactacatccgtggcggtgcggcctccccggccgaccacaacatcttcgccaccggctcctatgaccgcagcgtcaaattgtgggatgcccgcacggggaacgctggcccgtctttgtccttctcccag

SEQ ID NO: 19500 - DNA, 482 bp, Setaria italica
  Peptide Sequence Number=SeqID_85474
ggtttccggtttgttccgtccgagcgctgggctcgccgcgggccgccgccgccaccgcaccacggcgtcccccgagatatttgggtgaggctacagtgaaaatacagttatttgaaaggagtctctggagtttttgaaaggaggttcacaatggagttctcaaagcaagggcagtcacccatgcccaacaacttgggatctcaaccggtgccctcttcaaatgtccaatctaatcaaccagagtatgcatccgtgttttatccatcattacctggtgactggggttcacagccgatgttctctgtgggagcttcagtaccagtcagctcatattatattgtccccatgagtcaacaatcagtccaagtaggtgcttccaggccagaggttgcacgtccgttgggggcgcaacctttacaagtagagtgtcattgaggccgccacagcaagtgctaatattcaaacatctttaccagcaatgg

SEQ ID NO: 19501 - DNA, 3211 bp, Setaria italica
  Peptide Sequence Number=SeqID_85475
ttttttgttttttctttttaagggtttcttagttctacccatgcccaacaacttgggatctcaaccggtgccctcttcaaatgtccaatctaatcaaccagagtatgcatccgtgttttatccatcattacctggtgactggggttcacagccgatgttctctgtgggagcttcagtaccagtcagctcatattatattgtccccatgagtcaacaatcagtccaagtaggtgcttccaggccagaggttgcacgtccgttgggggcgcaacctttactaagtagagtgtcattgaggccgccacagcaagtgctaaatattcaaacatctttaccagcaatggttggatcacaaccctcaccgtccactgcaggcaggaaatcacaacaggcagttgcttctccaaaggttcaaatgctgaaatctccatcgttccagtcatctaataaacgttctgcccagaaggagccaccatcaaaggtccaacctcagcaacttgaatctgtgaggtccaagttcagggagtcacttgctgcagcactgagtttggattctgatcaacagaataagtgtcaatctcctgataatgtgcaacctgatgggtctgcagataagtcaaagccggcaggagatgctgtacaggatccagtggcaaccacatcaaaagatgcgagcacagcgaattcagatgtagccataactgtagctcccaagagatgtgagggagatgggaagttaagcagtgatttaatttcgaacatgatcacaagtgtaaatgatgacatgcagcaacagtcaaatcttgtttcttctgaagatgaattattgggtcaatgtatggttacagatgaacttttgcaaggtcacggacttagttgggtttctgatcttgatgctgggatttctgaacctaatgtacaatctaatttaaaaaggccgcgaacttctgatgtggaacctggggctacagaatctctggtagagtctgagtcaaaaagaacaaagtctgcagatgcattagcaaaagataaggaaatacttaatcaaaaggctgaaagtttggcatttagaattgaagaggagctgtttaaactgtttggtggagtaaataagaagtacaaggaaaagggtaggtctcttttgtttaacttgaaagacaaaagcaatcctgagctaagagagagggttttgtctggagatattgcacctaaacgcctctgttcgatgactgcggaggaactcgcctctaaggaactctcagagtggcggttggccaaggctgaagagcttgcacagatggttgtccttccgaataccgaggttgatcctcggcgtttggttagaaaaactcacaaaggagagttccaagttgaagtagaagaaccagatggtatctcagtggaggttgagcttgggagtaaccttactaatattccatcaaaagctgtagaagatcagaccaagtctaatgtaaaagcaagtgtggatggtaaagaaggtgttcaagaaaaagataaagcatctgatagcacttcacaggatgaggatggtaggacaggcaacaatgatatgtctggtgatctagaatatattgataatgagaaagcagatctcatgcaggaacttattttggatgacgtgaaggacacggaaaatcttccaccaattccttcattagatgaattcatgcagggcttagattccgagccaccttttgttgatctctcagttgggactcctcaagaagatggcaatgacagtgaggaacctgacaccaccttggagcccgaggaactaccagggacagaagataaagcttctacaccagagaagtctgcatctgaatctgataagccatcagcacaggataacaatgagcccaagttagagtcaccaggacatgcagcagttccaaattcagatctgactgaaccacgtgatggagagccgagcaaatcctcccctggtaaagatgaagccacgaaaacagctactgataatgtctctaatcctgattctattcttcaaactaaggcaaccaatattcctatgatacgtgagagcatatgggagggtgcaatccaactgactgtctcttcactctctaatgtttttgccttcttcaaaagtggtgaaaagccattattaaaagattggcgtagttttgttgagatcaaggggagagttaaacttaatgcttttcaagagtttgttgaacagcttcccaaatctagaagccgtgctataatgataactgagttgtgttggaaggagggttctccggagagtggtcgccaacatatcctgcagactatcgatgcatatgtttcagatgaaagagtaggattagctgaacctgcagaaggaatagagctgtacctgtgccctcctcacgggaaaactgtggagattctctctcggcacttgccaaaggagcaccaggagggccttgctgttccaggatcatccttcatcggagtcgtcgtgtggcggaggcccaacgttcctagggtgccaacctcccaccacaggcatgatggttccaggaggcagtcaatcctaaggaaaccacaggttacaaacccggccgctaggccctccctgcctcctaactcatatggtgcgccgccaggctttcccaaccagcgccatcaccgcgaagaggaagatgtaactgatgatgtccctccgggctttggccctggtgttgctagggatgaggacgatcttcctgaatttaattttgttaactcgtcacaccctgctgctaatgtaaccgcgcatgcctacaagtcccggcagcatgtgccacctcccccctctgctcgcccagcagagcagatgagggagctggttcagaagtatggtaaaagatcatctgttcaagcccaccgctgggatgacgacgatgacgatgacataccagagtggaacccatcccaggccaccacccaccaccagcttaccaggcagccgccactgcccgccaccccacagcaactgccgttgcctccaccacctcccgtcgtccagcagatgcacccgtaccagcagcaacagcagcagcagtaccatatcccaagtgcagtgcagcctcaggtgcccatctcttcgctgcccatgcctacctccggacccagcagcagcagcagcctatgcaacagctccattgcagcagcagcagcagctccagtctgggcaagcatggca

SEQ ID NO: 19502 - DNA, 408 bp, Setaria italica
  Peptide Sequence Number=SeqID_85476
tcggcaatattactattcataacatttattgttgatttcagttcgttttcttagagctttaacactagactgtgccttctctaactcattcaagtacatggaattttctgatactagtctttctttttcttctgctgcattattacgctccttgtctagattgttcattagctctgcggcctcgactttcaggccatctatctccaaccccagttgctggagttttctttcagctgaatgattttctgtgatcaaggattcattttcagcggtgatttctgcaatggctgccttcagttgaaagcactcaacatctaaattctgatgaagtgctttcaggttatcatgctcaaccaatagcatcaagttatcattcttcagcttctggttttcttccaacaaggtctg

SEQ ID NO: 19503 - DNA, 406 bp, Setaria italica
  Peptide Sequence Number=SeqID_85477
gcaaagcaaagcaaagcatagcaagaaatggccggctccgacagcgtccgccggatgccatccctgccgtggacggtgagcatccaaacggccgcttacgcaatcgcgcaccgcctggacggcagcatccggcgctccctcttctccatcggcgacctcaagaaggctccacgccccaacgcctcggaggtccgttccgccgacatcaccatcgacgcctcccgcggcatctcggcgcgcgtgttctccccctgacggccgccggagacaccaccccgctccccgtcgtcgtcttcttccacggcggcgggttcgcgctcttctccgccgcgtcccgcccctacgacacgctctgccgccgcctctgccgcggggtgggcgccgtcgtcgtgtccgtcaactaccg

SEQ ID NO: 19504 - DNA, 530 bp, Setaria italica
  Peptide Sequence Number=SeqID_85478
cgactgctgaatataagccttctttcgtcagtcggctttacgtgcagcttcacgattctgagccagccttctgattgtctttggatcaagagtttttccagactttgtagtggaacttgtagccatgttcttgtgctgaatctcctcctgctgctgctgtgaaccttgatcgaactggctcgccatgttgtgtgctgctccgtgctggtctgaggagtggttgctattgttcttgctgctgctctccgagtcttctgtgctgtctgccgtcaaatttgagccctccttgggtgtgtgaagagacctcataggccaagctgggaagatgtccagtgtaggaggtggcctagctgtagccgttgcagctgcagcaggagcagcagtgggaaagggcgtgggatgagctgcggaggtggttgcagcttgagttcttctgagtgaggcaacctgatgcatgaaagcctcttccagctctccaaaataggtagctccttcttgatcaaagaaatttggagtggcgctggcgacgg

SEQ ID NO: 19505 - DNA, 876 bp, Setaria italica
  Peptide Sequence Number=SeqID_85479
agtacaagactaggacaagctaagcctcccccaactcagagtcgtcgtcgtcagaggctcagattcgcgcccacccggccaccatggcgttctgggagccctgcttcggcaaggacaacgagtgcagcaactgcgactgcggctggaagacattcgccatctgggccggcatcatcctcgtcctgtgcgccgtcatcatcgtcctcgtcatcgccttcgccgtcaagttcccgcccaaggccacggccgacgacgccgtgctctcgcggttcgcgctggcgccggggagccccgcggccaactccaccatctcctacaacatcacggccacggtgtcgctgcggaaccccaacattcaccgggccatcgcctacgggcccctcgctgtgtccttctccttcaacggctcccgcttcgacgagtccggcaccatcccggccttcgaccacaagccgcgcaagacggccacggtccgcgtcaccgtcggcggcgtcgacaagcccgtcaagctcaccgcggacggcgtgaaggagttccgcagcgacaacgacacgggcaagttcggcgtggagatgcggctggacaccacgctgcagtacaaggggcgcagcgccaagtgcccgctcgtcgtcgtctgcccgctccagctgcagctcgtcgacccggacgtcgcagccaccgcgtttcagaggaccaagtgcaccatcctcagggccaagaagtccggatgctagctcgatttcttctgctgccttcctgtgtaattcttcgagaattctttcttttccccctgagattgttgctgtgtgtgcttaattggaagactatttgttcgtagcggtgcggaattcggtttgatgtgtgatttccaaaggt

SEQ ID NO: 19506 - DNA, 288 bp, Setaria italica
  Peptide Sequence Number=SeqID_85480
gcctggaagacggagagctggacgacgagctgttgcgcccactcgccgtacatggcccgggccaggggcacgccgacgacgagcgagttggtaagcgtggagagggagaagctggtgatggaccagccggcggcggagccggcgcccttggcggcggcgaaccgggcccagacggcgatgacggcgacgatgaccgccttggagatgacgtcggcggcgacggcgcggtagttgacctggaacgggtccgtgtgcagcgtgaactcgaaggtgaagaagggcagcgcg

SEQ ID NO: 19507 - DNA, 267 bp, Setaria italica
  Peptide Sequence Number=SeqID_85481
ccatacccaatgccctccaaaccctagcccacagcccctccccgctggcggccatgccggatctgagcacagtctacctccctcctttccccgaactctccgtcgacgccgcgggggacctcgccgacgaccacgccggggatgccgccgccgccgccgcatcgatcgacgcggcgcccgcgtccgcgtcttcgcctgcctctgtggacggcggcggcggcccctcatgcttccaatggaatgtcgatggagcggccgtgtccgcta

SEQ ID NO: 19508 - DNA, 483 bp, Setaria italica
  Peptide Sequence Number=SeqID_85482
ttcgttagtaacgtcccgccccgccggccccgtgtccctaaccttttctgttccggtggtcgatcgcccaacgttgtacacttcacagcagccgaagcccaaaaggagcaagttcctaggcatcaattccatcctcccctgctggacggcaccaacgacgatggcgggcagggcatggcggccggtgctcgccggcgcttggctcctgctgctgctgctgctgctcccgtcggcttccgccgtccgccggagcgacttcccggtgtctttcctcttcggcaccgccacttcctcgtaccagatcgaaggcgcgtaccttgagggcaacaaaagtttaagcaactgggatgtgttcactcatgcaccaggaagaatcaaagatggaagcgccggggatatcgcggatgatcactaccaccgttacgatgaagatgttgagctcatgaattctctgggacgtaaaacgaaacctaaaaacaaaaa

SEQ ID NO: 19509 - DNA, 912 bp, Setaria italica
  misc_feature (843)..(843): n is a, c, g, or t
  misc_feature (853)..(853): n is a, c, g, or t
  Peptide Sequence Number=SeqID_85483
tcttggtcggtcttgtaacgggtctacttggtccttctcggttccatggtttgttgatccaatagtctacggcgactacccgccggagatgcggcaggtcctgggctcccggctgccgactttctcgccggaggagagaaggaagctgggttacaagctggacttcatcgggataaaccactacacgaccctgtacgccagggactgcatgttctcgtcaggctgtccgttggggcaggggacccagcatgcgctagcggccgtcaccggagaaaggaacggagtccccatcggaccaccgacagggaggccaatgttctacgtcgtgcctgacggcatcgagaagatggtcacctacatcatgaggagatacaacaatctgccaatgttcgtcaccgaaaatggctatccagatggtggagaagctggtcatgaccatgccaaagatttgcttcacgaccagggtaggatacagtaccttgatggctacctcaccaaagttgccaaagctataagggacggagctgatgttcgtggctacttcgtctggtctctcatggacaatttcgaatggctctatggatacaccctccggtacggactgtactacgttgactaccaaacactggaaagaaagcccaagtcatccgcgctgtggtacaaacggttcctccaaagttttcaacatgaagctcaataaagtgtgcgacggctggacatgctggctcttcgatttatgaaaagaagagcatgatctttgtgtagattaattattcctgaataaaatgccaccacagttgccaaataattattgtcacctcccgagaaacaaaaaaaaaaaanaaaaaaaaanaaaaaaaaaaactaaaaaagaagaactagaccaaaggacaacaacaagggaagtaagga

SEQ ID NO: 19510 - DNA, 1833 bp, Setaria italica
  Peptide Sequence Number=SeqID_85484
ccaaggccatcgagtggttcgtggacgagaagagcacggggttctctacttctcttatcattttggtgtgcctttcacctgagacacatggcaggcaaggcatggcggcagttggtcgccgttgcttcgctcctgtcagtcctgtggcttctcccatgggcttccgccgtccgccggagcgacttcccggtgtcgttcctcttcggcaccgccacttcctcgtaccagatcgaaggtgcatacctcgagggcaacaaaagtttaagcaattgggatgtgttcacccaccaaccagggagaatcaaggatagaagcaccggggacatcgcggatgatcactaccatcgtttcgaggacgatgttgagctgatgcactcgctcggcacaaacgcctacaggttctctatatcatgggccaggattcttccaagagggagattcggcagagtgaacctagcaggcatcgcgttctacgacgaactcatcgattcactcctgcacaaagggatagaaccattcgtgacgctgacccactacgacatcccgcaagagctggaggacaggtacgggtcgtggctcagcgacgagatccagcgagacttcggctacttcgccgacgtgtgcttcgcggcgttcggcgaccgcgtcaagtactggaccaccttcaacgagcccaacgtggctgtccgcaagggctacatgctcggcacgtacccgccggcccggtgctcaccgccgtacggctcctgcgcccgcggcgactccggcgccgagccctacctcgccacccacaacgtcgtcctgtcccacgccaccgccgtcgagatttacaagaggaagtaccagagcgagcagaagggcttgatcggcatcgtcatgtccaccacctggttcaagccgatgacggacgcaccagtggaccggctggcgactgaacgggcgctggccttcgacgtcccatggtttcttgatccaatagtctacggcgactacccaccggagatgcggcagatcctgggctccaggctgccggccttctcgccggacgagagaaggaagctgggttacaagctggacttcatcggcgtcaaccactacaccaccctgtacgccagggactgcatgttttcaccaggctgcccactggggcaggagacccagcacgcgctggcggccgtcaccggagagaggaacgggctccccgtcggacctccaacagcgatgccgacgttctacgttgtccctgaagggatagagaagattgtcacctacatcatgaagagatacaacaatctgcccatgttcatcaccgaaaatggttacgcacaaggcggagatggctatgcccatgtcgaagactggcttgacgaccagggcaggatagagtaccttgatggttacctcacaaaacttgccaaagttatcagggatggagctgatgtccgtggctacttcgtctggtctctcatcgacaatttcgaatggctctatgggtacactctccggtttggacttcactacgttgactaccaaacgcaggaaagaaagcccaagtcgtccgcgctgtggtaccaacggttcctccaaagtctgcttgaagctcagtagaggaatatattgccttatttctaaaatcttgaaaagtgtgtgaccggacatcctggtagtagctcttcatcaatttatgaaaacgaagagcttgatcttgtataaactgattaatcatgaatagaataaaatgtcccgactgtcaacagtcggcatatttcgtacaggaaagaaaaaggatagattcacgtccagtgggcgccagttaccaaggacacacaggga

SEQ ID NO: 19511 - DNA, 439 bp, Setaria italica
  Peptide Sequence Number=SeqID_85485
cgccgcccccgcgctccggtccggccccagcacccgcgcagtcgcgctctccggtgtaagaactcatgttgcggctgttgagcaagctgctgtacaagatgctacaaagttggaagctcctgtcgttattgttactggtgcttcaaggggaatcggaaaagccactgcattagctcttggaaaagcaggttgcaaggtcttggtgaactatgcccgatcttcaaaggaggctgaagaagtctccaaagagattgaagcatctggaggccaggccattacctttggaggagatgtttccaaagaagctgacgttgaaactatgataaaaacagcagttgacacatggggaactattgatgtactggtaaataatgcaggaatcacaagggacacattgttgatgagaatgaagaaatcacagtggcaagatgtaattgat

SEQ ID NO: 19512 - DNA, 680 bp, Setaria italica
  Peptide Sequence Number=SeqID_85486
ctctttgagcatgcataccgtggtctatctgctagcttaatctcacggcaatcccggcaccaccagattgccatttcgtagatgatagatcttcgctttctttcaaccggcggatgaatgcccggcacctaactattttgatataaccggcccacatgatggcatcttataacacatgcatgcataccgaacactcctttttatttgtttactacggctgatagatcataaccatgctcatcaggtgctacttttgcacctcgccgtggtgtgacccggcaaccacacttatatgagtagcgtgggctgctcctttcgtcgtctgaacagcgaaatgttgctgggtggttgcgttgcgtgctaggtgttcgttgcttaggatgcacacatggcacgctcgttcaaagaaaatgatagcctaactggagcgccaaagagacggggtcttttatagagacatttgttgagacagcaaccaacgtttggtggcttcttccgttctggtctgcaattctcttggcttggacatacgtagctgtcgtgtttggtccatacttagctgtacatacatgattacatggctgatatcaatcattcagttaccatgataccatggttaagcatgtgaatgaactatcccattcagttacctatccgcatctattgagcgcattgacccc

SEQ ID NO: 19513 - DNA, 467 bp, Setaria italica
  misc_feature (1)..(58): n is a, c, g, or t
  Peptide Sequence Number=SeqID_85487
nnnnnnnnnnnnnnnnnnnnnnnnnnnnnnnnnnnnnnnnnnnnnnnnnnnnnnnnnnagtaacataagcatccactgtgctagcatgattcaagggcgtttttcttcagtgctacaaagaaagctcttttaagtttgcgcagatataaaaatagattgatcgctacaattcgctacaacaaactccaatttgagctgctccaatgttctcggggtggcggaagcagaatgtgacaacagtattgcaacccatgctacacatatatatatatatatactccacctccatcaatggaggtgcaaggaagaaaaatgacagagcagattaagctctgaatctctattttggtggtcctcgcagacgattttgactcccacagcaagatcgagttttatcataccggtataatcctcaaacttattcatcttcagggtgtgcctccttggggatttggttattccaaccc

SEQ ID NO: 19514 - DNA, 302 bp, Setaria italica
  misc_feature (29)..(29): n is a, c, g, or t
  misc_feature (43)..(43): n is a, c, g, or t
  Peptide Sequence Number=SeqID_85488
ccctcgttgtcgtgtctctagtttttttntttttttttttttnttttttgtaaacggacaaagcacacaaatttaagtttattaatgaatgaagtcaaccatttgctttgacatgcatggagtttggtaaataatctcttaatcgtacacagatgcttatttatgccgagtatacatgaatattgcccagggataacattataacatggactagacattgtatgccgactgttccccaaaaggccagaaggaaccattcatactgtaggaatcttcagcctgttgagtaattagagggacat

SEQ ID NO: 19515 - DNA, 312 bp, Setaria italica
  Peptide Sequence Number=SeqID_85489
cggggctatggcatcttgacatggtcccgcgggcaaacctgcatcctgcactgcgttttataatctgccttttgctgctgattaattaggaactcatgattaacattcccatggttgataattcagtttagccaggcgtgaagcatgcgcgcggcgtgtcacgcgttgataggctagtagtggagcagattagatagctaaatggatctcagctactagtagtatgcggtcatcatctgataaaacgcacgggcaatacttttcgtgtccttatattttgttgtcctatgtcctatgctaaagtcgctgcca

SEQ ID NO: 19516 - DNA, 398 bp, Setaria italica
  Peptide Sequence Number=SeqID_85490
agtaaatagtaagagcagttatcaggttgcgttttccagtgcaggccatcagcaagcttcatgagggagacctgcagagtttggtggatcgacagttacatggtgacttcgacttggaagaggctgaaagggtttgcaaagttgcattttggtgcatccaagacaatgaatgtgatcggccgacaatgggtgaagtagtccgtgttcttgagggccttcaggagctcaatatgcccccgatgccaagactacttgcagctataacggaacgctctgatgcagcttcaatgtaataattgcagttgatgtttatttttgtttcagcaaatttggaagttgtattttggagctgaaggaattaaaaggacaagcttgcaatatctaattgaagttttttg

SEQ ID NO: 19517 - DNA, 121 bp, Setaria italica
  Peptide Sequence Number=SeqID_85491
gcgcgagcatgagttcctccaagcacttcatttcaacgccatccgcggcgaggatggcaggatggccaacatgtccgtccccgagggagagcacgatggggacggacatgttggccatcct

SEQ ID NO: 19518 - DNA, 190 bp, Setaria italica
  Peptide Sequence Number=SeqID_85492
ctggtggtctagcctgatggagaggccatctgttcagaaggttgcggctctgcaagatggtgacttgtgcatctgggaatcgcgtgcaatttgcaagtatgcagcccgtaaaaacaaacctgagctgttgaaggaaggcaatctcgtggagtcagcaatggtggatgtttggatggaggtgtactgatta

SEQ ID NO: 19519 - DNA, 262 bp, Setaria italica
  misc_feature (59)..(59): n is a, c, g, or t
  Peptide Sequence Number=SeqID_85493
tctgggggggctctcgcggttcttggcaagagtgcgcatctttgttccagagatgaacnggaaatcatctttccttgatggatcgagaaatccattttcttttgttttgtgtcatatgcagccactctgaatggaaggatgttgagccatcccacagccaaaagggacctttatgatgctgatcatggaaagaaggttttgagcatggctcctgggcttgagaggctcaacatccttccattcagagtggctgcatatgaaa

SEQ ID NO: 19520 - DNA, 526 bp, Setaria italica
  Peptide Sequence Number=SeqID_85494
cgcctccttgatatgggttacaaaaaccctgttcttctgctccatccactggggggattcacaaaagcagatgacgagcacgcacctagccaagaacaccgcatcctctcagaatagcagggacaaagaagcagagagaataagagggcagagagaaaaggggggaaaatgatgtagctaggaaagctaaattagtagtagctgctagttaagatacctagagatatatatatctcggaccatcaagcctcaattccccacaagagctcacaccatctgcgtcgtcttcctcctcgcgctcagctccacgggtcgagcgagcatgaggtccagccggcagtgggagccgaaggcgcgcacccttttctcctatctgtgcggcggccttccaccaagctcatttcccctgtcgccgcacattggccaggtactcctcctagagctcgccctgaactccatccggaggaaggggacggtggtgggaatcaagaagggcttggtgccggctgcgtcttcagagagtgag

SEQ ID NO: 19521 - DNA, 586 bp, Setaria italica
  Peptide Sequence Number=SeqID_85495
cgaggagagagaatcccaggaagaacccagggagggtagagaggaaggtcgggttcgggtagggccatggctccgatgaagctgtacggcgcgacgatttcgtggaacgtgacgaggtgcgcggtggcgctggaggaggccggcgccgagtacgagatcgtgcccatcaacttcgccaccgccgagcacaagagccccgagcacctcgcccgcaacccatttggtcaggttccagctttgcaagatggtgacttgtgcatctggggtatgatcctatctcgtggagatccttttgagttgtttcttgtacattgttgttgtcactatttgtttatttggtactattacccgtttcataacatatgacgaggttagcacttcaaagttttccttttaaaaaagaaaaggtatctcagccttttctaagcacatgggttgttcagagaccttgactaaaagaagccaacaactttcaaacattcctaaatatgaaaaatactgtctgattgcaaaatgtcgttgtgccataggaactacttgtaacgcacttcaatattttttggaccagtccaatgatgataatttt

SEQ ID NO: 19522 - DNA, 1218 bp, Setaria italica
  Peptide Sequence Number=SeqID_85496
cggccggcgcgcggcgctgcggcgggaggcggcgtcgctgccgcaccgggtgcgcctcggccgcgtcgagaaggagtgggtccacgtcctcagcgaagggtggggccagcccgctgcaagggttcatgcgcgagcatgagttcctccaagcacttcatttcaacgccatccgcggcgaggatggcaggatggccaacatgtccgtccccatcgtgctctcccgtcggggacgcgcagcgacgggccatcctcgctgacggcgccacgcgcgtcgcgctcgtcgacgaccgcgaccgccccatcgccgtgttgagcgacattgagatctacaagcacaataaggaagaaagaattgcaaggacatgggggacaactgcacctggattaccttatgttgaggaggcaattaccaatgctggtgactggttgattggaggggacttggaggttatagaaccgatcaagtacaatgatggtcttgatcagtatcgcctgtctccggcacagctgcgcgaagagtttgccaggcgtaatgctgatgctgtatttgcctttcagcttcgcaatcctgtacacaatgggcatgctttgcttatgaccgacacacgcaaacgcctccttgatatgggttacaaaaaccctgttcttctgctccatccactggggggattcacaaaagcagatgacgtacctcttagttggagaatgaagcagcatgagaaggttcttgaggaaggtgtcctcaacccagaatcaactgttgttgcaatcttcccctctccaatgcattatgctgggccaactgaagtgcagtggcatgctaaggctcgtattaatgctggtgcaaatttctacattgttggaagggaccctgcgggtatgagccatcccacagccaaaagggacctttatgatgctgatcatggaaagaaggttttgagcatggctcctgggcttgagaggctcaacatccttccattcagagtggctgcatatgacacaaaacaaaagaaaatggatttcttcgatccatcaaggaaagatgatttcctgttcatctctggaacaaagatgcgcactcttgccaagaaccgcgagacgccccccagattggttttatgtgtccaggtggctggaaggtcctcgtggaatactatgacagcttggtgccatcagagggcagcagcaagctccgcgagccagtcgcagcctagaagc

SEQ ID NO: 19523 - DNA, 540 bp, Setaria italica
  Peptide Sequence Number=SeqID_85497
aacatagcgacgacattgtacatctactaccaaaaaaacgagcagtttaccagaaggcaacaataacatagactcgtttcaatggaggcacaccataattgatgtacaaagtttcaactctggcgtcaaaaagtctcaatcaaggcatcagcagttcacatgcaaggaaagggtaaggacttgattgaaactacgccggtggttgtcgcctcctttttggtcggatgcggtcctcttcaaaatccattattcctccagattcagagagaaagtcgtcatgcccccgtaagtcgatgtctgccttgattgattttttggcttcttccactctgtcttcaaattctttctggtgcttcttgttcacctcactcattgtgtcagcccacttgattttctcctgaatttgatgcaacaggctatctgatgttcccagccagtcagacaaggtgtctatcatgttggtcagctgatcaggtgtaagatctctcccagctgcgaattgtacctcaaagcaccttctcaactgatccagcttgcctc

SEQ ID NO: 19524 - DNA, 625 bp, Setaria italica
  misc_feature (614)..(625): n is a, c, g, or t
  Peptide Sequence Number=SeqID_85498
caagaagtggaacgccgttgcgctgtgggcatgggatatcgtcgtcgacaactgcgccatctgccgcaaccacatcatggatctatgcatcgagtgccaggcgaaccaggccagcgccacgagcgaggagtgcaccgtcgcttggggtgtctgtaatcatgcttttcacttccactgcatcagcaggtggcttaagactcgccaagtgtgcccattagataacagtgagtgggagttccagaaatatggccactaaggcctgggctacccttgtgtgctgttggagcttgtttctggctactgctgctgcaacccaagtgtttttgtctgccaaacagctccatcttttgctgctttcaatgcttgcatctaccgccccctcaattatcgctggtagtacgtccatcctgggattgtatttggatgattcatagagaggacatcatatagtaggtcctttttatcaatgttatgtgaatctgcataagtgatcttgagttgtgctgtggtaccattttaaaagtcgattgcttttaattgcttctacctcgtccttaaaatccgtgttttccttatctcgcttgggatgaagtgggtcagctatctttggggannnnnnnnnnnn

SEQ ID NO: 19525 - DNA, 571 bp, Setaria italica
  Peptide Sequence Number=SeqID_85499
ccttcgcagctgcaggtggatccgttcgccacgatccactagcaggtgctggtggatcgtggcgaacggatcgagctggaactgcgggttgttcagtacagccttcagatgagcagcttcccgtagcactaaagtctgccttgacttgcagttcagctttacttcggtcttctgctccggtgcagctggttcgggaaggaactcggagagcgctgagagatcatatgctttcagtttcttctggcgatgactctggttctgtttcttactgatagtcttcttagcatttaaggaagtaacagcatcttttacttttgtgtaaaagctgagcttcttttccagtttttgcttagatttgagctcagacttcttagacgacccagtcatatcggggcgaggcggaggaacgagccggggaggaggggaagacgacgccgatgcgccggcggctacgacgaagtgtagcgggcactggaggcggctgaggaagacgagaagttagcgaccggcggcggcggcagctgagggaacgaagggaggcgtctcgatggcggcggcggtgtcttttttt

SEQ ID NO: 19526 - DNA, 240 bp, Setaria italica
  Peptide Sequence Number=SeqID_85500
ctttgattgggaacatcctcacttctgccgtcaactgaagtcaccatgggagatgtaggaagagtcccttcatctcgtccaacaatctggaagccaagaaacttcccataccatagaacagcttcttctatcttctcccacagtgccgcatcttcattactctttgcttcaagtggttcaagtgcttgaagttgctcagatatgactgcggtgcgtttatccctcttgtccctcagatct

SEQ ID NO: 19527 - DNA, 850 bp, Setaria italica
  Peptide Sequence Number=SeqID_85501
tttttaagtaacctaaagtaacttaacaaaccaacaactaccctactaggaataattacaactaagaccggtctagagatagacagtcaatttgccctggaacgtagggaacggcgcaaactgccaggagatgctgctgatagggctgtggcttctctcttagcgggaagagactgcctcttgttcttgcttcgggaatggctttgattgggaacatcctcacttctgccgtcaactgaagtcaccatgggagatgtaggaagagtcccttcatggcagaagattcatggcagaagactggaatttctctctgatgatccttagaaacttgactacatgatcactcaaattcaaatccttcaccagttcctcaacatccttgatgtgcggatcacattcaagcaagttatatctatctttgtcaaaatttatgcaaaatgagtattccttctctggactttgcgggtcaatcttgttgaaaacaaacttcacaccttcatctcgtccaacaatctggaagccaagaaacttcccataccatagaacagcttcttctatcttctcccacagtgccgcatcttcattactctttgcttcaagtggttcaagtgcttgaagttgctcagatatgactgcggtgcgtttatccctcttgtccctcagatctgcaaccaagttaccgagcccctcgaccatagcagtggcatctgaaatcgactcggtggtgagtttgccctttgattccttgcacgatttactggagggagttttgtagttcggtagtaggaggtcgcgcaactgatccttgagtccttttagctgctctcgggtgccttggcgcgggaaggtc

SEQ ID NO: 19528 - DNA, 812 bp, Setaria italica
  Peptide Sequence Number=SeqID_85502
catagagtggccaaagtgtatactcacccaaacacatactagggcaattaggcatgcatgagtagtaggcccctctgttgtacttggggatacactattatagtatcatcaaacaatcaaggaaacgcccacatgcaaattcagaaaaccaaggagtagctttctactcatggttgtgtaaatctcaatgacatttaccatatacaaacagcattaaccagaacacaactcatgaactcatccactagagcagagtataagaaaacatttacaggccgagttagccactctgcccagccaaccaagccactcatccactacggcagaatcaccacactatatcaggtatcagctaatcactcggttccttctaggcttgtaccaaatcacaggcagaagatgaggaggattcatcagcttgtccaggtcagaatctgcttcgtttgccagctcaccacactccctctggatattcactagccggtctagagatagacagtcaatttgccctggaacgtagggaacggcgcaaactgccaggagatgctgctgatagggctgtggcttctctcttagcgggaagagactgcctcttgttcttgcttcgggaatggctttgattgggaacatcctcacttctgccgtcaactgaagtcaccatgggagatgtaggaagagtccctgaggaatgcagtgacagaaattaaaagataaaatttgaaaaaaagtacagaatcgtgcactttaatctggggttgtacagaagttcattccataatgggaaagaaaagtgagacctggttttaaattgg

SEQ ID NO: 19529 - DNA, 346 bp, Setaria italica
  Peptide Sequence Number=SeqID_85503
cacctcgatgcctcgtgctccataaccaacagccacaggcacccccgcggtctagaactctagacacaggcggacaccctcctcccgcactcgcccgttgccaccgccactttttccccgccgggggaggaggagccggaggagcatgcgggtgggttttcaccgcgggccgcaaggaaaggaaggaggaggaggaggacctgctgctgctgctgctgctgcgcctgcgccgcgcgcatcgcgacgagccgccccgcgctggcacccacgccaaaaaggcgaagattctcgcgcgcccccgtccctccaccacctcccgctgtagccggtaggaggaggtagcccg

SEQ ID NO: 19530 - DNA, 186 bp, Setaria italica
  Peptide Sequence Number=SeqID_85504
cacgtccccagtccccacacacgcaccagcagaacccagcgcaaccgatggcgtcgctcaccatgatggcgtccttcgcggccgtggcggcggccgcgccctcccgccgcggcagcttcgccgtggccagggccgccagcctcgcagcgggctcctgctggcagcggtcgaccctggcggccctgg

SEQ ID NO: 19531 - DNA, 1178 bp, Setaria italica
  Peptide Sequence Number=SeqID_85505
gatgtggtatggagttccaggaaaggatgccgtgaatttggaggtagcaatgaggaaacatctacctgagttgtttgaggagcaacctgatttgcttcacaacctggttactcaattctcaccatcattgcttaaatctgaaggagtacctgtctaccgttgtgttcagcatgagggagagtttgtactgacattcccacgggcataccatgctggtttcaattgtggtttcaactgtgcggaagctgttaatgtggcaccgttagattggttaccaattgggcaggatgctgttgagctttatcgtgaacaggctcggaaaataactatttcacatgataagctgttgcttggggctgcaagagaagcaataagagctcagtgggatatcctattcctcaagagaaatactgctgataatttgaggtggaaaagcatgtgtggacctgatagcaccatatgcaagtcgctgaaggcacgaattgagatggagtttagcacaaagaaaacatatatgctctccatctcaatctaggaaaatggaggctgaatttgattctactgatagggagtgtgcattgtgctactatgatttgcatctttctgcttctggctgtccatgttccccagagaaatatgcttgcctggtacatgcaaagcagctttgctcatgtgactgggacaaaagatttttctattccgttatgatgtcaatgagctaaatatcttagctgatgcttggtgggaagttaagtgccattcacaggtggggtgtctctcatcttggattaagtttgagttcatgtgttaaacaagaaaaagaccaagatctgaagacacttagcagagcaactgatggacccagaaggtcctacatgtcacaggcatcaacagtattgttgtcaccttcactggtttgcaatgaacagaaaagcagtggaaataagatgctgaactcaggttgttcagaaatcaatactgcttgtccttctgcagaacaactaaaatcggcaaatgtttcaccacaaaaggagccatgggtgaagaatgatttagcatgtacactaaataatggtgtcagccaattacaatataatggagggcctggtggacacaaaaactcagcactaggcttgccaattccttctggtgtatcattttcttccaatgttgcgacg

SEQ ID NO: 19532 - DNA, 516 bp, Setaria italica
  Peptide Sequence Number=SeqID_85506
gcggaaggcgtcctcggcgtcggcgacgcggagcccgatggcgcgcaccgcgaggccgtggtcggccgcgaagctccgcgcggcgggcgcggaaaaggacggcagggatgcggttgcggcgtcgacgccgtgcgcgtatggcgcggtgaagaggaacgcgagggagcccgagcggagcaggagcgaggcgtgcgcggagttccccgtggagaggtcggaccgcgcggcgagcggcgcgccgagcccgaaggagaagcggccggcggcggacgtggcgtcggcgcaccagagctcgacgtggtggaacgacagcgtgtggaagcggtcggagcgcgggttgacgcggacgaagccgcggtggccgacgaggcggaacgccgcctgatcccccgctgccggcgccgcggcggcgcccggtgcggcggcggcgggggtcggggtcgggggcatggcgcgtggctctcggagggtgtgggggcgtggtggcgtcgtctgcttgcagcagttgcgcttggc

SEQ ID NO: 19533 - DNA, 502 bp, Setaria italica
  Peptide Sequence Number=SeqID_85507
gttttgaacaggctttcatttgctcaaacagttgaaaatatctttgcactgtctttcttagtgaaagatggtagggtggaaataaatatagacgataacgggcatcatatagtacgcccaagaaatgcacctgctgctagtgacgtagcctcaggagatgtctcctacagccattttgtctttagatttgatttcaaggactggaagcttatgaaagaattagtctcagagggtgaagaactgttgcctcacaggacctcccagggtgctacctgcactgaagagaatgatcagccaaatctggaggcatgtgcgcaaagaacgccgatcagaaaactcacccggaaccgaggcttggtcttgcaagaacaggtagtccaggaaacacccgaggagaaccaaacgtccaagcgcaagcgccttttcagagatcaggactgacctagcaattgcttggcatgagcattgtaccctagaaatttgcttggctattgtagtcggt

SEQ ID NO: 19534 - DNA, 1544 bp, Setaria italica
  Peptide Sequence Number=SeqID_85508
gcgggggcgccgctgggttcctgttccttcctcgggaagatttcaaatccccgctgccctcctccactcctctgctcggccgcctccgaaaaaaattcgcgcatcccgccggcgcgctctccgattcgcgccccccatctccttcccttccccatccgatcgctcgtggcctcctgcggttagagctgggactcggggcctagggtttggagcggttggttgggccaaccacagatggcggggcgcagggggagagcagtggcgagcggcaggggatggcggagcggcggatgctgcggtcgcggtacctcgccatgaagaaccgcatcagcgatgagcgggatgagatggccagggtggattcggacaagttcacggccatcatctcgcaggtggagtgcctgcacgagctcgtgcagagacctagggagcaaatagctgatgcagaagctctgcttgacattgccagcacattggtgacttcggtgaggtcccagtcaagtgaaggaatcaccccttctgattttataacagctttgctgaagaaatttggagagcaagagagcccagatgatgaggccacctccttgcgctggggagatcttggactttctgtttcacatgccttcaggcctgtgcctggatgctgcaccatgcttggacccatgaatacagaagtaaaacagcgaaaggtttcgactgttagtagaaaacgaactgcacggccaacagaaaacactcgtcctgaagagcttgctgattcttcagaggaagtaaagacagacactgacaggaatgtgctggtaatatttgataccctgaggcggaagaagagtgcaaggctggaaaaccttgttttgaacaggctttcatttgctcaaacagttgaaaatatctttgcactgtctttcttagtgaaagatggtagggtggaaataaatatagacgataacgggcatcatatagtacgcccaagaaatgcacctgctgctagtgacgtagcctcaggagatgtctcctacagccattttgtctttagatttgatttcaaggactggaaggacctcccagggtgctacctgcactgaagagaatgatcagccaaatctggaggcatgtgcgcaaagaacgccgatcagaaaactcacccggaaccgaggcttggtcttgcaagaacaggtagtccaggaaacacccgaggagaaccaaacgtccaagcgcaagcgccttttcagagatcaggactgacctagcaattgcttggcatgagcattgtaccctagaaattgcttggcatgagcggtgtgggcaggcagcctgccttattttgtatgtacaaatgttaggtttgtaggacggttgtgccatgccatgttgtcgtagcacagctcgtgcttctctgagaagtagaggtgtaactaaatttcagtcgtttcaacttccattgacatccttcaaccatagaacggtctttgtagatcagacatgacgcgtcgacgtttatgtagatgcatcagaggctgatgatgattacaaaaaaaaaa

SEQ ID NO: 19535 - DNA, 245 bp, Setaria italica
  Peptide Sequence Number=SeqID_85509
tttgctttgctgaccaatgtgggaagtgggctgtaaggcctattcagtttcgcatatgggcttgggcttgttggtgccagtgagcccagagcccacgcgaatcacccggggacactggagcatcatcaaacggcgagtagaactggagcaagcgagggcacaacacagcgacactctggggtggaatttgcttactcaatttgcaaattttgcacttgctccacaaatccacatccacatttcta

SEQ ID NO: 19536 - DNA, 287 bp, Setaria italica
  Peptide Sequence Number=SeqID_85510
cgcgtcgatttcacgcgccgcttcccccaaatcgacacccaccccctcccccgaacgcgcagacacaaatccattcccatccggacgcaagacctagcagccgaaggcgatggcgcggccgaggggtaagaagcgcacggcggcccaggcggcggccactgactcgagcaagccgggcgccgccgccgccggtgattcgaccaagccggaggccgcggcgaaggagccggccgctcgggggcgggggaggcgccccaatgcgccgcccaagcccaaggccgagacgg

SEQ ID NO: 19537 - DNA, 487 bp, Setaria italica
  Peptide Sequence Number=SeqID_85511
ctgaggcttctccaggctctcgagttccaccctccgtccaaaactcaaaaggtgttcatcgtcactttgttctctatggcctcatggaatatttgagaaaaagccttgaccgtcaattctctgctgatgaggttttgcaactattggaccgtttctttaacctagaaatgctgaaaccagaggatgatgagaaggacaacttcagccaaggggaagaattttccttgccagagagctttttcaacaaggaagaataatagcaagtaactcataaatgcttcacaatgtcgtcgaaggtactttgagtatcttctggaagagaaatcaggatggtggttcctagtgactcccacttcctggtagtcattgtctaggacatccgttgctagtagacacatttgctcagatgtgttcatgtttactgacttgtatagcttttgttgactctagggtatccaatcaatggaactgcgcggttggttccaaa

SEQ ID NO: 19538 - DNA, 985 bp, Setaria italica
  Peptide Sequence Number=SeqID_85512
gccgtttatacacgcctccccacaccaacaccttcctctccgtcctccgctcgccgtcccctccccaccgattcggagctcagcgaattcggacacaacgcggcgcggcggtgccggcccctcccctccgcgaacgaatcgaacgccgctcctccgctccccggcccggcgaaatggaaggtgcggtcgtgaggagggtgatcccttcggacaacagctgcctcttcaatgccgtgggttacgtgatggaacacaaccggaataaggcttctgagctgagacaggttatagcagcaacagttgctagtgatcctgcaaagttcaatgaagtgtttcttggcaaaccaaatgaagcgtattgtgcttggattttggatcctgagaagtggggaggagccattgagctatctattctatcggcatattatgggcgtgaaattgctgcatatgacattcagaccacccgttgtgatctgtatggtcaggagaagaattatagcgaaagggtgatgctcatttatgatgggttgcattatgatgctctggctatgtcaccagctgaaggagcaccagaagaatttgaccagacaattttccctgtcaaccataaccgttctattggtccagcagaaggccttgccatcaatttagtgaaggaggcgcagaggaagaggagctatactgacactgcaaacttcactctgcgctgcggggtgtgccagattggcgtcatcggtcaaaaggaggctgttgaacatgcgcaagccactggccatgtcaacttccaagaatacaaatgacaaaagacagactagttctgttgttgtaaacctatcatttgttctaattgatgatctttttctgttggatatggttggcacattgtatcacaatgtatttttacatgaaaaacacaataaatgttacatttgttccggataatgtagatattgccagccaatcatggttaacaaaaaaaaaaaaa

SEQ ID NO: 19539 - DNA, 266 bp, Setaria italica
  Peptide Sequence Number=SeqID_85513
aaccaccaatgacaaaccctttgagcacttgaagttacctctggatccttttacccgatgccatgcctatttcagacttgcgccgttaccagtgatgatgcggtcactcttgatgaatgagttcctggctcgtagatgttgatgctggcgacgagaagctgcttcttgccaagatgtctcccattgtcttggccgccaacgggagcccgccgcaggtctgaaggatctcctgtttcatgctgttaacagtggcgaggtcgtacccg

SEQ ID NO: 19540 - DNA, 259 bp, Setaria italica
  Peptide Sequence Number=SeqID_85514
gagaggaataaggtacagtactagcacctcacgatgaagaaggaggaggacctcgagtcgccgctgctgtccgacggcgagccggcgccggcggactccaagggcaacgcgtacgcgctcgtctgcaccctcctcgcctccctcacctccatcatctacggctacaatcgcggcgtgatgagcggggcgcagaagttcgtgcaggcggacctgggcgtcacgtacgggcagctggaggtgctcatcggcgccaccagcg

SEQ ID NO: 19541 - DNA, 782 bp, Setaria italica
  Peptide Sequence Number=SeqID_85515
acaatagaatttagaagtttagtttacccaagaaaatagtactcaacagccacatgacaggctggggggtcaaaagcaatttcagaaggagaataggtgaaggcaagtatgttaaaactgaagctgcacatcaacagacataagaagtacaactggttatgacccgcattttaccctggtggcattttttatggcactcggtgaagctacttacgatacatctgcaaagttgaaaaaaagtgcgactgattatcacaacaagaagtacataagttttattagaaaacttgaatggaggatttagaaaaataaatgcggtggtcatgaacttacaatgttaatgtgtgcgagcttggtcttgttctgttctgactcgcaccactgctgcagtttcttgtcattccgatcaataactagctgctggaggttggtgagctgttgtatacatgaaggcaaagacgagtaatcatgagtgttttgagagaggagatgttgctgagccattctggcagtgctgatatgctgcgacaatatttcaactcgagtgactgaagggaggagagttgttgtatgctctccggcaagctcatcagatttgaacagaacgagaaattcaacttccggagggcagggaagtggtgaaacagcctgaaactctggtgctggcttgtcgtgctgatagtcaagctggtggtgtggttggagtagagttgcagcgatggctgctggtttgtaccacctccagtgaagatataacatggtcgatttctgatattatgaaa

SEQ ID NO: 19542 - DNA, 509 bp, Setaria italica
  Peptide Sequence Number=SeqID_85516
gaactgataggactgatcattcagtagcaccatgatgggctaaagttcaacaactgtgcagaagtccaggatcgctgcattctgtgtcatacacctaaactgattttctctggggagaaatcataccatctcaggatctcagctgcaccttattgtgcatatgaaggcaatagataataaattctggtacattgaaaaatgattgatgatcttttaattaatttgatattttctgatgaaatgtaatctgtgccattgagacactaggtggaaaattcagctaaacaggtgtaaaacacagtaaattatcatcacttgattatagatgcggtccacatgtggtagtttttcgcgaacgtttcatgtgatactagttagaacacaacaaatattacttgtttgtatactgatacattttttaaaaagatattatgataattttttgaatgaagcattcttaattttttggcgttgcctttcatgtttttaacagaactactcacactgag

SEQ ID NO: 19543 - DNA, 3124 bp, Setaria italica
  misc_feature (3099)..(3124): n is a, c, g, or t
  Peptide Sequence Number=SeqID_85517
cgcgcgaggacaacttcatcgacgactcggccatcgaggacgaggatgaggatgatgaggacgacgacggcggcgcgaggccgaggaagaagggaggcggcggggtgcgagggttcttcgatgaggaggcccaggttgacgaggacgaggaggaggaggaggaaggcgagggcgaggacgattttatcaatgatgctggggccgatattcctgacgaggatgttgttagggtcgcaagacgtcattctatgcctatgagggatgaagatgaggacattgatgagattgagagacaagtacgggagagatatgcaagatccactcatattgagtatggtgaagaagctgcagaagtggaacagcaagctttattgccctccgtgaaggatcctaaactatggatggtcaaatgtgcgattggacatgagagagagaccgcgatttgtctgatgcaaaagtacattgataggtcagatcttcagataaagtctgtcgtggcgttggatcatctaaaaaattatatttatgttgaagcagaaaaggaagcccatgtcaaagaggcttgtaaaggtctacgaaatatttatgcttcagcaaaaataacattagttccaataaaagaaatggcagatgtcctctctgttgagagcaaatctgttgatctttcacgggattcttgggtccgaatgaagttgggcatatacaaaggtgaccttgctaaggttgttgatgttgacaatgtacgccaaagagtagatgtaaagctgatccctagagtagatctacaagctctggctagtaaactggaagggagagaggctgtaaagaagaaagcatttgtcccaccacctcgattcttcaatatcgatgaggcgagggagatgcacattcgagtggaacggaggcgggataaagaatctggggagtactttgagtgggttgataatctgaagttcaaagatggtttcttgtacaaatcagtctccactaaatcaatccacacaaataatattcagccgacattcgatgaacttgagaaatttaggaagcctggtgatgacatgaatggcgatgtggctagcttgtccactctttttgcaaacaggaaaaaaggacacttcatgaagggtgatgccgtcatagttattaaaggcgatttgaaaaatctggaggggtgggttgagaaagtagaggatgaaacagttcacatcaggccaaaaatatctgatcttccgaaaacattagccttcaacgagaaggagctttgcaaatatttcaaacctggtgaccatgtcaaggtgatctcaggtgttcaagaaggagctactggcatggttgttaaagtggaaggacatgtcttgatcattttgtctgacacaactaaagaacatatccgcgtgtttgccgatcatgttgtcgaaagctctgaaattaccacaggaattaccagaattggtgattatgaactgcatgatcttgtccttttggacaacttgtcatttggggtaattataagggtggaagctgaagcatttcaggttctgaaaggagtgccagatagacctgaagttgtacttgtgaaattaagagaaataaaaagcaaaattgatcggcgtgcttcagcgaaagataggtcaaataatattatctcagcaaaggatgttgtaagggttgttgaaggagcatgcaaggggaagcaaggacctgtggaacacatacacaaggggatactgtttatctatgacaggcatcaccttgaacatgcaggctttatttgtgcaaaagcacaatcttgccttcttgttggtggatcgactggtggccgtcgaggaaatggcatggacacagcagatgcacggcttggtgctttgaggtctccagcaagcattttgcaatctccaggaagactgcccccaagaggacctcacatgaattttggtggaaggtttggaggtggtcgtggtggtagagggcatgatgccttggtgggtaaatgtatcaaaattaagtctggtccttacaaggggtaccgcggccgtgtcaaagaggtgactggtgcacttgtacgtgtggaacttgattcgttgatgaagattgtcacagttaaaagagatgatattgctgacacacctactgttgcgacaccattccgtgaacctcgatattcattgggtggtgaaacaccgatgcacccgtctcgaacaccacaccatgcttatcagactccaatgcgggaccctggagcaacaccaatacacgatgggatgcggactcctatgcgtagtcgagcctgggctcctatgagtcctccgagggataattgggaagatggaaatcctgctacttggggcagcagtccagcctaccagccaggaactccaccagctcggccatacgaagcccctacaccaggatcagggtgggcaaacactccaggagttagtttcaatgatgctccaactcctagagagaactatgcaaatgctccgagtccatacgtgccttccacacctgttggtcaaccgatgactccaaattctgctgcgtatcttccgggtactcctggtggtcagccaatgactccaggcaatgtgggaatggatataatgtcccccataataggtggtgagggtgaaggtacatggctgttgccagatgttttggtcaatgtgttgaggggaggcgacgatggtcccggtgtcgtcagggaagtacttggggacggatcttgccgagttgcactcgggtcgtcaggcaacggcgacatggtgactgtccttccgaacgagctcgaggtcatcaggccaaagaagagcgacaggatcaagatactgaatggcaatttccgcgggtacacaggaaaactcataggcatagatggttctgacggaatagtgaagctggacgacacatacgaagttaagatattagatatggtgattttggccaaactggcgacttgaaatgtatgtatattttgtaacgtgtccatcatataacataatgttgtaacgatgcccttgttcgcaataaaactttttgtggcttatatttccgtagtattattccagactctgtcacccaacaaactaaaagagnnnnnnnnnnnnnnnnnnnnnnnnnn

SEQ ID NO: 19544 - DNA, 426 bp, Setaria italica
  Peptide Sequence Number=SeqID_85518
caaatatggcaagttggcaaccccaattaatcaaccgagaaagtctcttggacagtcaataatctacctagtggcaaatggtccttcacagccaatgtgagatagtcagcacatatcacaattaacaataggacaataaatgtacagcattccttagtacacactatgcagcagtaagcacaccaaaaggtccacatatgttgtattacagtattgtaatgactctactatgggaacaagcatccaatcaacagatatgatgtgcacaaaaatgcatgaacatatgacctttctaacaagatcatacctgaaacatgatcctgacaccatgaactatgttcttctcctagagtggttggcagacactgatgacccctcaaataaagcagatagctggctctccaaatcttccggttgtgttatttt

SEQ ID NO: 19545 - DNA, 221 bp, Setaria italica
  Peptide Sequence Number=SeqID_85519
aacattgtgccaatggtttgagcactccaacattggtctgtgatgtgaattgacgttctgtaaggcgagatccaatggtgatgcagcttatatggagtaatgcattgcagtcttgctgatgtatttggacaatatggctggaaaaaagtaaaagtatagcattgttctgttgatgagagaacaactcagaatgttgttgccagtttatagctagtagtgtt

SEQ ID NO: 19546 - DNA, 561 bp, Setaria italica
  Peptide Sequence Number=SeqID_85520
taaataaagaaaaaaagaaaataaaaagaaattcaaggcaatgcatatgcacctttagaggaaaaagaaaaagacaattaaatctaagttggttaaaaagcttaaaaatgcaattcctttagagcaaactttaaacgcttgaaatgctctaattatgagggagtaaataaatatacaaataaaattttagccttgcaagggtttggggtctggaatttaatgtactagtggtccatcaattttcttgtttgtttattattactcggtagtgtgtgcggtgtgcctgagtcaactcccaagcggtcgcgaacagcggaagtagggcagatcacattgatggctcaaggcgatggaagccatacgaaacacctcgagttgccggagaaggacggaccccatgcgccgcaggctgcagctcggcgatgccaacaaccgcggctacagagattcatagcgaacactcaaacagtacagcaattcacaaggacacacagctacagcaagccagcaacaagcacaaacagccataaagaccgcccatccctaccgtactaccggaca

SEQ ID NO: 19547 - DNA, 305 bp, Setaria italica
  Peptide Sequence Number=SeqID_85521
ttccgggtgaagacaagcacctcgaggcacgaaagctcaggagagaggtacagagatagaggggaaggcagggcagggtgagctgagggaggccatgaagtccaaccggaacctgtcgaggggggaggggaggaggctggggaacgtggcactcatagccttcatgctgggatccctcctgctgctgtccctcatcagggtcaggttctccccgattggcaaaacaggggaggccatcaaagcagaggagcagcaggaaatgaggaaagagagcatcaagatggagacccttgatgagactgcag

SEQ ID NO: 19548 - DNA, 290 bp, Setaria italica
  Peptide Sequence Number=SeqID_85522
tggctacagcccctctgccgagcaacagcgccagcaacccaagagcgatggatccgacgatgggtgacagcttggagtgcctctgggattgcctcgacgttgaagggttgcagagcttgaacatcggggccgacggggacaacgcggtggccggcggccagcaccacgacggctactccagcgccccggacgccggctccaactcctccgtggcggcggcagcagcggggtcggacggcagcaggccaggcaacaacaacgtcattgtcacggagcagcgccgccgccgg

SEQ ID NO: 19549 - DNA, 482 bp, Setaria italica
  Peptide Sequence Number=SeqID_85523
ggagaagaggagacttgcccgcaccgcaccaccccttctcccctccccctcccccttcccggagagcgagatgagggagctggcctcctccttcgcggccgccgccagtgcttcctcctctgcctccgcgccgctgctcgggggctggtggaacgacgtcaacgagtcacccgagtggcagcacgcggccttcttctccctctccgcagcatacgccctcgtctccgccgtcgcactggtacgcccgtccgacccacctctttggcctttggggccacaaaaaaatatttgatgcttgatccgaagctgctcttcgccgattgattcgtgcggtgctaccctgctgcaaaaatccaatccaatccaacccaacctctgctgccgctcttcctccgagcgggggagcagcgttccaattcgagaaatcagattgcggattcgctcctctctgacggccccatctacccctatcccttgcagat

SEQ ID NO: 19550 - DNA, 320 bp, Setaria italica
  Peptide Sequence Number=SeqID_85524
ctcatcaggatccagcgccgggtgcccgagctcggatggaccacgcagaagatcttccacctcatgaacttccttgtcaatggggttcgtgctctcgtcttcggcttccatgtccatgtcttcctcctccgcacaaaagtatataagctggtgctactagatctctctagttaatggggtggtattgtgccgatacccgcttgggaggaagcttccgtaggacgaacaggactagcgcagaaggcaatatctccgtcagcgtatagtagaacaagtctaggattggatggtccaaaacctccagagatacatcccgatca

SEQ ID NO: 19551 - DNA, 999 bp, Setaria italica
  Peptide Sequence Number=SeqID_85525
gcagcatacgccctcgtctccgccgtcgcactgattcagctcatcaggatccagcgccgggtgcccgagctcggatggaccacgcagaagatcttccacctcatgaacttccttgtcaatggggttcgtgctctcgtcttcggcttccatgtccatgtcttcctcctccgcaacaaaagtatatggagaagaggagacttgcccgcaccgcaccaccccttctccccctcccccctcccccttcccggagagcgagatgagggagctggcctcctccttcgcggccgccgccagtgcttcctcctctgcctccgcgccgctgctcgggggctggtggaacgacgtcaacgagtcacccgagtggcagcacgcggccttcttctccctctccgcagcatacgccctcgtctccgccgtcgcactgattcagctcatcaggatccagcgccgggtgcccgagctcggatggaccacgcagaagatcttccacctcatgaacttccttgtcaatggggttcgtgctctcgtcttcggcttccatgtccatgtcttcctcctccgcacaaaagtatataagctggtgctactagatctccccggtttgctcttcttctccacatacactctactcgtgctcttctgggcagaaatttaccatcaggccaggagtctcccaacagacaagctaaggcctgcatacattgccgttaacagcatcatatatgtcgttcaggtttgcatatggatatacctcggaataaatgataatgccgcggttgagctggccagcaaactcttcattgtagctgtctcctttgtcgcgcttcttggcttttcagtatatggtggaaggttatttttcttgctgagacgtttccctattgaatcaaaggggcggcaaaagaagctttatgaggttgggactgtgacagcaatttgcgtaacctgcttcctgataagatgtgacgtggtggcattatctgcatttgatcgggatgt

SEQ ID NO: 19552 - DNA, 1807 bp, Setaria italica
  misc_feature (1)..(60): n is a, c, g, or t
  Peptide Sequence Number=SeqID_85526
nnnnnnnnnnnnnnnnnnnnnnnnnnnnnnnnnnnnnnnnnnnnnnnnnnnnnnnnnnnncctttggtctagctagttcttttttttttttttttttgttagcagaaaatttagtaaccacgtttcaactcagcattagaagctgtatctaacggagcaagctgtattacagtatgtagtagcagaaacaagtagaccattcacattcagtggtctagtataacaaagctggtaagaaaacaatgacaacgctctgaaatttacatgacactatagtgattatgaccctctgttttgatctagtgcatcgacgaaaaagaatcatctatatataggacaagcagcaaaagaattacgtgtgagaagcgatcacacagcctggagcttctgctcatccactgattccaaaggaagaactgcaggttcccatgaagagggctcatcaaggtgcatctttgcatactcgctcaccagcccgttcctctcctcccacatgatggctttcctctcctcctcagccctctctaccttgtctttcgccatcgaggtcatgtcacctgccgccttagttaccataccaaatgcgctggttaaccaggaggcaccagctgagacatattggttactcaagatggcagagcctgcaatgctggctttctgctcagcagcagccaaagcagatttagtgagttctgagacctggtaccgttcatccacctccttgaccttgctgccaacaatggctcggcccagattgatcttttcactcaggccatactggcggtctatagatgcgaccgtagcagtagcattggacaggatattgtgacgctcgtcaaaggattttgctaagttgagagcatccttgctgaggacaaagcccttggccaacatgctgctgacaacatcttctgccttcctgactgtagattcagtagtggggcttgctcccgataattgtttgagcgcttcaggaggcagctgatagttctcagctggagttatgatgacagcacgatcaacaattgttgccccccgagagaagaacagcagtgtctgctccctgtgagtctttaaatgtgacataagcaagctgtgaccattcggattcactttgcatttcaacatattctatatccccggagaaactaaagaactctgttatctctcttttcacagcatttaacgaaaggttgctaacttttactgttcgcattgcattaggtgacattagaatcaacacatttcagccctcctgaaagtccaaacattccagagttcaagctgaaaaaggacaaattgcaggcagctgtcaaatcgaatggactgaattactaaaaggtgtttactgtagtatccaaccaaattgggtcagtcgattatggcaatggcgcagaacgcctggtacatcagtgccagtgaggcaacagctaccagagaaaagagtaaggcagcgtactaccagccaaagggagaacagggtaattgggaattaacaattgcgaggggtttagagaaatgcactctgtgaaccttgccagagtgtcattttgagaagaaattttttaaggcagtaggcaaaatataaactctagataaattttggtgccgttttagccctagagggttcgcgtatttctaaaagtttcccaataagatcttgtgctgcctaaaatgctcaacagtttaacatgggaaaacatattgaatatagttcttagcaaacaacgtaacagctaacaaagctacaataagctgacaagaaggaacatgtacctgccaaccacttatcttaaagaatatttca

SEQ ID NO: 19553 - DNA, 1610 bp, Setaria italica
  misc_feature (1)..(67): n is a, c, g, or t
  Peptide Sequence Number=SeqID_85527
nnnnnnnnnnnnnnnnnnnnnnnnnnnnnnnnnnnnnnnnnnnnnnnnnnnnnnnnnnnnnnnnnnnagttttcaactcttctgggataagaaggcgaaaaaacaccaagaacgtaacagtgcattagtacagaaacaaatgtctcagctacctcactccactcagcacaggattcagctaattgactaacaagctaggtgtacaaaaggagccagcataagcttagcacagaccagaacaaagttagccctgctcgatcatttacaattttctacgggactgaaagatagtagacagtgcatatgcccaggacaggctgaaagcaaaacaggcgcaaacagaaggcgccaccaacttgtcaggccatgccgctcaagatttcaaccagctcatttttcttcatctttgagtagcctttgattcctcgcgactttgcaagttccctcagttctgcaaccttcaaagagcttagatcagaactttcctcagcactattatcatgcgattcatcagtatctgtaacatcagcaatttccaaagaaggttcgggatactcctcatttaagtcctcagtatcagattcatcatctgaaatagcatcaaagtcatccaaagaaatattttctgaggatattacagaatcaggttcatacggagaaactgagtcaggctcatctgtagctgtcctctcatcaagaactgtcttagattgttgtacagcatcagcgacattactagcgatagacttgcgatcggcatctgcattggtaacaggatggaatttaactccaggaacaggagatcttcgcctgaaatttgaagctggccttttgaagggtgctgaaggaggcttcttctgctcttcctgggtgtcactttttgtgccaaagatggttgagctttgtctatttccagaatcactgcttctcctagtcagatcaaaattctgttctttgtcgtcactgctcttccttctttggtccacagagtgtttcctaagcaacttaagaagggaatcaacgctgcccctctcaccctgcacttttgcaggttcaggcttcttgtcttctctgctttttcccctagcgcgtagttgtgcttgaacccttttgaagagctccacaatctccttctctctttcccctggagctgatgtggcttgaggacgagaattgcttgccaaagagattggcggtccatttttggagaacatgatatcactatcaaattcatcaatgctctcagaatcatctttatcctggtatggcttacctttccccctggaagacccccctttttgttgtcgtgatatatccgaattccttggcctatggttgttggggctcgcactacataccaaagacaccctcattggccccaacataggtgatgtgcccatgaaacaagctcctggaggaactctgcaatctccatgatgtacaggtaaggttcctctgcctgagaccccgcggtggtggaggagggcgggggccgcggcggacattccttcgtgggggcggcccgcccggagcgtccaggccggcgacggcggcggaggtgaagcggcgacctggcttggggcagagcgatttggtggtggtggcaggtg

SEQ ID NO: 19554 - DNA, 1099 bp, Setaria italica
  Peptide Sequence Number=SeqID_85528
ccgccgccgccgccgccgcccacgcgtccccgtccacccgcaccggcgccgaatccgacgacgacgagtccaagccctcctccgcctccgcggcctccgccgccgcgcagaccggccgtgaggcgttccacaaggttgtgcatagctgggcgtccaagaagttcatgaccggatgtgtaatcctcttcccgattgcagttacattctatgtgacatggtggttctttcgctttgtggatggatttttctctccaatatatgctcatctgggaatcaatatatttggacttggttttgtaacttcaatagctttcatttttgtggttggtgtgttcatgtcatcttggcttggggcatctattctcggtctcggagagtggttcataaaacgaatgccatttgttcgtcatatctataatgcatctaagcaaatcagtgctgccatttcacctgatcaaaacaagcatgcattcaaggaattggtcatcattaggcacccgagaattggtgaatatgcatttggatttatcacttcagaagttctacttcagggttattctagtgaagagcagatgtgctgtgtttatgttccaacgaaccatttgtatattggggacatatttctagtcagctcgagcgatgtgattagaccaaacatctctgtccgtgaaggcattgaaattgttgtctcagggggcatgtcaatgcctcaagtgttatcaatcctggaaagcgagccaaatcagttgagcaggatcagatccacccgaagctgagatgactttatatttgtaattctgtgttccagagtccttgcttgtttctgtaagtacaagagtaggttctggtagaatgtacagtttcctgggtggaatgcaaaatctgtctttagatgcatacaagcagttactcacctgaatgcacccacttgtatggtagtatcagcttcttgagaaatctaacttattagcagtcccatttgaagtagaattgacctgtgttgagtggtcaggtctggccgtagaagaattttccttacagtttgcgggggaggatttgggttcgtctttttgcactttgggtcaaacttgatgtactc

SEQ ID NO: 19555 - DNA, 274 bp, Setaria italica
  Peptide Sequence Number=SeqID_85529
ggtgtgaccgcgtgaggccgacgcgcgacaccgacccctagggtttgcgccgtctcgtcgccgatcgaaccggcagctcgccgccgtcgacgccgcgatgcagaggtacgggctgcagctgcgcacgaagccggcggcgtcctcgtcgtcgcgcgcgccgccgccgccggcgcggcccctggcggccttcgccgacgacgatgacgacgatgttgaggccgagatcctccgccaggccgccaaaaagcgcgccctccagaaggtggaggagcag

SEQ ID NO: 19556 - DNA, 344 bp, Setaria italica
  Peptide Sequence Number=SeqID_85530
cagataacccggcaaatgatatctctatctcataaaaatcccgaaatacaccaaaaaaaggaacaaattcatcttcattgccagtaacaacttgcctaatcatccaggaaccacagcataaccaacttaacctcttgctgagaatgtttcccatgctagtttgaaaaagaaaggaactaaaatagacacgtccggaaaggaggccacttaatctgacagatgattctccaatacgaaaagaagcccatacgtggtgcactaatcatgacaatacatggcaaggcattggaagtttgccgagacacgcaacaagttacctagtcctaaactgatttatttaattt

SEQ ID NO: 19557 - DNA, 280 bp, Setaria italica
  Peptide Sequence Number=SeqID_85531
aaaaattaaaaaattaagggtttcaattaacgaataaggacaataaactaatatccatgcttatagtagaagtggccatcatgagaaaagacagtcaccttgggagtgggacagtatccatgcggatcaacatggtgtgggacttatgggtggagcggtagacattattatctaataaattttttagtggctgagtgaaagattcttacccctctggggtcaaactacatgcgcattgaacctatgggttcttttatttgtcgatataatttccctttgt

SEQ ID NO: 19558 - DNA, 430 bp, Setaria italica
  Peptide Sequence Number=SeqID_85532
ccggaaaagtgctagaacagaagaacatgcgcgcagatctggagatccggagctccagatctgcacgaacaagcacggatcaggagagatcaaatacgctagagtactaaataacacaataacaatactagtgagcagatctgtagaaagaatgcgctacaaaagaaacgcggcaattatacaatggcaacccacatcactgtctcatcaactctcaatccctatctcccctctcacacgcacgcacgcacggacgctagatcagatctgacgagccctagactaaaaccccgaatggaatgagcaaacccaaaacgaagacgaacaataaatagcggtaggcggcgcgacgtcgagcggaggcggcggcggcggccatgtcatgtcacaccggatcggcggccatctcagaagaaggccgcggcggctg

SEQ ID NO: 19559 - DNA, 1154 bp, Setaria italica
  Peptide Sequence Number=SeqID_85533
agttgttgttcgtacggcaaacgcgtttggactttggagagcgaggggagggggaaggagcgagcgagcgagcggtggccatggcggagcagcacaaggaggagtcggtgctggagaagctctcggacaagctccacggccgcggaggcgggtcctcgtcgtcgtcgtcggactcggacgacgagcgctcgtcggcgacgaccgccgtgaaggccaagatctaccgcctcttcggccgcgagaagcccgtccactccgtcctcggcggcggcaagcccgctgatctgtttctatggaggaacaagaggatttctggtggggtgcttgcgggcgcgactgccatctggctgctgtttgaggtcatggactaccacctcctcaccctgctgtgccactgcctcatcctcacccttgccatcctgttcctctggtccaatgccaccactttcatcaacaagtcccctcctaacatccctgaggtgaagattccagaggacctggctgtgaatgttgcgcgttcgctgagatatgagatcaacaggggctttgctaccttgaggggaatcggccaaggccatgacctgaagaagtttctgattgtggttgcaggactgtggatcctttccgttcttgggagctgctgcaatttcctcaccttgtcctatatagtctttatggttttgtacactgtgccggttctgtatgagaagcatgaggataaggttgatgcttttggagagaagaccatggtcgagttgaagaaatactacgccatctttgacgagaaatgcctatcaaagattccgaagggcccgtcaagagacaagaagcagcattagaagagtagaatcagggaagggtctgtgcgctgatttatcatctctgtcaatcactacatgtgggttttgaaggatggttttagttccatgtctccatgtgatggtaaatacctacatgttcctgttctagtgtggtcagtagttgcgatgtgctaaattatgcaagcttacgctttactgtggttcttcaatctgaaactccatgttgtcttacctgcccagacttagggctatgatgaaatggttcttcgttatttttgtcaaaaaaaaaaaaaacagtttggtccaatcacgtgaatgcatgcagtgtttgtt

SEQ ID NO: 19560 - DNA, 403 bp, Setaria italica
  Peptide Sequence Number=SeqID_85534
gtagagcaaacacgtttttattgcaactgcacaaaggtagggtgcggtttcaacttatactgtatcacatcacatgtacagcagcacatttggcgttgcaataccttagcaagttacagctacacagacagggttgcaactgaagcgagaaacacggtgatgaacacagtgccagcagccatgcctctggacctcgtggcgcccgctgcatgcagcagttgtgggagcttatacccggcgccggccggcgccgttgcggcggcaggagaatcctcggccggttccggtgacgcacccgacgcgtctggatcagccgccgccgtgctcgacgacggttcttcggttgcaggcgtggtggctgccggagtcgtcgtcgtctcggacggaggcgaagcagatccct

SEQ ID NO: 19561 - DNA, 1636 bp, Setaria italica
  Peptide Sequence Number=SeqID_85535
ggatgggtgctccgtcacacgtgggtcatgtggccagtgtcgcaccaggcgcggtgcggcaccgccgcagagaatttttttccgccgctgacctcgcgcacgtgcccgtctcgaggactctggagtggggcgtggtgtacctgaagacacagcagcggcagcggctccgctccaagtacaatcccggccccagcagccgcgacgccaccaccggagccccgagcgctgcgcttccggggagagagatggccgccgcctccactgcctacgccgacgccgacgccggcgcggggatcaggtcggagttcctccaggtcctgcgcagccgccgccgcgacctccaagtgcctctctcggtggagcaagggagtccagtgaagaacccgatgtatcaaaaacctctggggcccaatgaggcggtggcaatggaatcgtgcccaaggaaagaggtggagaacttcaaggagaagctggttgaagaaaatttctacttaattagtgagctaggtgaacaaggacgtgtacctgtacttctgctgaaacttaatgaccccgtccctaaaagaaaaccagttattgtattcttgcacagctcttacaaatgcaaagaatggctgcgcccactgcttgaggcatatgcctccaggggttacatttgtgttgctattgactctcgctatcatggtgaacgggccagcagtgagaccacttacatagatgcactgaaatcagcttggcggaatggggatacaatgccttttatttttgacacggtgtgggacctgataaaacttggagaccaccttagcgagagggaggatgtcgatccctgtaggattgggattaccggtgaatctcttggaggaatgcatgcatggtttgctgcttttgtggacacacgatatagtgtcattgttcctataattggtgttcagggattccgatgggccattgataataacaagtggcaggctagagcaaatagcatcaaacctttatttgaagaagcaagaattgatctaggaaagagcgaaatagacacagaagttgttgaaaaggtttgggaaaagatagcaccgggtctggactcgcaatttgatgccccccattcacttcgtttgattgcaccacggccgctgctccttctaaatggtgctgaagaccctcgatgcccaattgctggtttagaagagcctagttcaagagctgctaaggcttatgaagaatctggttctgctgagaagttcatgttcattgcagagcccggaatcggccatcgaatgacagtaaacatggtgaaggaagcgagcgattggtttgatcgcttcctctggtgagtcctgcatcaatgcgacaagcaattgtcacctcatcctctaccacacttcatgaagggagggataggacagtccaataccacaaagtaccccctaataatttccctccttttttctatcgcattttgccgaatgtgactggcatctatccaagttcattaatatcactcaatttctacttgtataccttgattattgccagccgggcaaatatgaaaaagggatgccaacaccataaacattaactcaatagacagaatgagaggaagtaccagtttagtaacaaaaaaaaaaaaaaa

SEQ ID NO: 19562 - DNA, 458 bp, Setaria italica
  Peptide Sequence Number=SeqID_85536
ctccaacttttataactgaagaaactctgacctttttctccaccttgattgatgatgtcgatgctttggtcttgtcgtatcgaaaatcctcaatgtcaggtacaataccagcctgcttcttaggatgctccccattttcttcaagctcttgctttacccttttcctcttaacagaaggtgattcaggcttggaaatgtcaaatgaaatactggattcacgtttcacttctcgtacaactgggttgaggtcggcgcggactagcctggcggaggcggcggagcgggtggtgcgcatggcggccggcgagaggcgaatgcgggagaggaggagagcgaggggcatccgtgcccgcgccgctaagctagggttttagctgcgagcgggtcttgctcgtcgttcggtttccccatctttgttgggtttggagatttcttgttttcctcgcgttttgtaaact

SEQ ID NO: 19563 - DNA, 676 bp, Setaria italica
  Peptide Sequence Number=SeqID_85537
ttttttttgttttgtttttgtcctaaaaattcccactgcattgcattgcaaactgacatgttccggttagcagaaactcgactacacctcatctcagtcttccttgtgtgcctacgacaactacagaaccacatcttacccctactgcattacatcgcattgcatttgctgagatcgggtaccagagcccggacagaattcacaagtggcggcacacagaatgttctgaataactagacgatcagtaagtaggtcagcaggacccgtccaccttcagacgtttggtcacctccagctgctgctgcgaggggacggcgaggccttcttttcacgaggagatggcaaggccttcttttcctcaacatattgggcgaatcttaccctcggtccagggatcctgcagtgggagtttagatccacgaacatctgctggcaacgttctctggccacctcttccacctgagaagcccgtttgcaagctgcttgtgtcgactcctgttggccagcaggcttctccaccagactcctaaggcttgctacctccttcaataagttacatattatatcatctgcttcttgcatctgcttcctagagaactcaaaagctcggtcagcacgtagacgaaacgtacagcagtctaagcacatgcagatgcccttgcaccccctacgtgtg

SEQ ID NO: 19564 - DNA, 268 bp, Setaria italica
  misc_feature (224)..(224): n is a, c, g, or t
  Peptide Sequence Number=SeqID_85538
gattatttcatatttttttgtcttgacatcagtcagctatggtttctgcgtgtaactgatcgatcgatcgggctcataacgatagcatctagcagtaactgagctttccaaggaaaattaccagcgcccccgaatagcagattcataatctctacgtagaacctgaaactatgatggcagaaaatcgtagctcgagctcagtttttcgtgtgcaagcaaaactnttttttttaatttcaagcaggggaggttgaacctgttgccttgt

SEQ ID NO: 19565 - DNA, 397 bp, Setaria italica
  Peptide Sequence Number=SeqID_85539
cattgaatctgaagaagttaggatctcctcctgccgaacgcagcatggatatttcagctctggagaaggcattgagatttattaatataagaaaagatggtcttccagctgctgtccactctattgtgatcagcgcaccttcaggaacagcacgtactcatagatttgctacccagaccgtagagcttcctgctcaagaaggagaaagagtgaccatttccttggcagccccatccaatgtttatcgtgaaatgggtcccctcaagatttctgcacgctcacaaggatttaaaccaggagaacctatgtgtctcactaatcacatcaatgggcaagtctcaaagttgctaagagctccatcaaagaatgaaggattcgtttttcgttagcccatatt

SEQ ID NO: 19566 - DNA, 469 bp, Setaria italica
  Peptide Sequence Number=SeqID_85540
tggagaaaagctcaggaagctctggattccaaggaaataaaaatatcaaatgctactagttctaccatgttacccacccaagggaaacggaacctgttaaaaatgtcaaagaaagaagtgatcacaatgatggacttctcagtcttggagtcagctactagcaagtttaatgagaagaatatcttgggcaaaggtggttttggctgtgtatatagggcttgccttgataaaagtagtgttgcagctgtcaagaaactcaactgttgtagggaggaagtcgagaaagaatttgagaatgagctggatttccttgggaaaattcggcatcccaacgtgatatctgtgctgggatattgcattcatgaagataccaggctgcttgtttatgagctaatgcaaaatggttctcttgaaacacaactacatggaccgtaccgtggatcagcattaagttggcacattcgcttga

SEQ ID NO: 19567 - DNA, 938 bp, Setaria italica
  Peptide Sequence Number=SeqID_85541
aggtcttggagttggaatctaatgaaggaaagtcaaatgatgacttggaagaggataattctgggcctctacaggacactcctgattcatgggacagattattcaaggagcagatgcagcacattattcaattgtgggatctctgccatgtatctatcattcataggacacagttctacctgttattcaggggagatagggctgatcagatatacatcgaagttgaagtaagaagactgacatggttgcaacaacactttgctgaggtcggtgatgcaagccctgcagctggtgatgacactgcagtttcgcttgtctccagtatcaaggcattgaggaatgagcgggaatttcttgcaagaaggatggggtcaaggctaacagatgaagagcgggagcgcctcttcattaaatggcaggtccccctcgacgctaagcagagaaagctgcagcttgtgaacaagctctggactgacccgaacgatcaggtgcacatcgaggagagcgcggatctggtggcccggctggttggattctgtgagggtggcaacatcagcaaagagatgtttgagctcaactttgcagtccccacaagtaggaagccgtggctggtgggctggcaacccatttcaaacatgatcagggagaaaactcaactttggtaagcagatggaagtatctagcccctttaaaataaggagcaaaaagattatacatttcatgacggtcagttgaactctggacttgttgatcaaggggggaagtgtctgatcttccgggtggtcaagaccagaagcgatctcatacccttcttgtagatggtgaattcatgtagtggtgcctctttcttcggaaaagtgtagagagaatttgaatgttctcgcattctttattgtgtagaccgatgccaagagaagctcacatgtttctttctaaaa

SEQ ID NO: 19568 - DNA, 388 bp, Setaria italica
  Peptide Sequence Number=SeqID_85542
aaagtagaaccttaatggacattggacaacaacccatttcaggaagaattattgcctactgtgcgacatgacaattcaaagctcctagcaattacactaaaatggacaaggactagcactcatacactaatatatagtaagcactgggagcttacgccaatttgtcacaaaggcagcactgaaagcatgtgcgagcatacagtttcctatcgccagcagcatgctttaattgccacataggagaaagctagttcattaagcaaagaaactgtaagagacagtgcatgttctccacatggttgcacctcttttatccaagaaattgaacatcatatattcagcaataaatctggagtaacataagactatattagcgggtaagctcaat

SEQ ID NO: 19569 - DNA, 446 bp, Setaria italica
  Peptide Sequence Number=SeqID_85543
ctctacttctcaaccctatcaggtaataaaatatacagggaaaaaattccaaaaatgcaagcaatcaaactcaacgttgcctctgcatgatgcgcgattaagaaccgcaacagggagtcagagaccaaaagagaaaaaaaaaacaaaagcaggatgaacgagaagaaggggggtgggggtggtatcatgagggtgctcacaagctgtatgtcctgccgcgagaccttgcggacgtcctcccctcccggcatggctgacgctcctcgcgtcccctctgcactaaatctcccttgaaccggaggggagcagatggagcgggatacgatagacggggggtgtgcttgcgggtgtgatcgggtcccagaggcggtggcggagaagaagggggtggtggagggggacgaaggcgacggctccggcgatcaggtgggggcgcagccaggccg

SEQ ID NO: 19570 - DNA, 1466 bp, Setaria italica
  misc_feature (1)..(5): n is a, c, g, or t
  Peptide Sequence Number=SeqID_85544
nnnnnttttttttttttttgtaacaaacaagaaacattgcagatataatatgtgcaacaggaacaagtcaagggtaactctgacaacgactttagagcttccaccacagctaatgctagcttaaacgaacaaatgcagattactaccacaatattatcagcgacgatacaaacatggacttttttgcatccttcaatggcagattatttggtctaacaaggtctcatgcaagttatccatgcttgttgcctaaaaagcacaaaacctaaaaccgaagaagaaacagtttctgccaaatcagctagttccctgaccacaatggttgatatttttctgcccaaaatagtatgtacagatggcacatcacttcttaacctcatgcagtaccatcacaggctgattaatcacttccaaaatcttcataattaacaccctcagatattgtatctagccgcctatttcctatttctgcatgttctccagcagctgactctgggaagttatttgcctcggaaggaatgaaaggggatcggccataattctctagtatttctgcactttggctgaaatcctctgtcaaatccgaaaaactgaaattacgaggaatctggctcaagaaaccatatgaagatgaatccatgtccataattggatcacctaattgtggtccattcaactcagagctgctaaaggatcctcctgatacatctccaaccgactgctctaggaacacattctcattgccgaatccaaaatctgagttgctcgagtagccagactctgtctttattgttgctccattgtgtccattaaactgcccaacggttgaattatgtgctgctagcaggcttgatgaagcatccatgccactaggaaggccatgaacaactttactgggatacataaattggtcacttgaagaggcaccatttactataccattagaacctccattatgcaacaagctatcttgcattgcagcactggggatagtgtctggcagaaaggacacattttggttcaatgtgctagagtttgagccattaggagcagtaggaggcatagaaggtactccagaaggatgatctttactcataatctgatactgctgctcaaggagcttattgaaggccactatttgattcataagcattagcctcacatagtatgccttaaaaaactcacgattctcttcctcaagtttctgccagacaagttcagtgaaactaggttctatttttgcctgcaaagatagagtatcaaccacttctttctgattcatatagagctgaaggcaacgttcgatgagattctggacaagctgtatgtcctgccgcgagaccttgcggacgtcctcccctcccggcatggctgacgctcctcgcgtcccctctgcactaaatctccctgcgacgccaagaccaaagacaaaaactaaaacaaaacaaaaatagaataaaaataac

SEQ ID NO: 19571 - DNA, 376 bp, Setaria italica
  Peptide Sequence Number=SeqID_85545
attctgctgttatcccaaatactgtatcacttgtaccaaggctaatggcaagatcaccaggagtattcagagttaaacctacagaagatgcaagggtaataaagaaatcatggaaccattttcatgcccattttccagctacacagaagatcacaaatgtcagctgcttatgtaagaagcactagtcaagcacacctgcaaggctattaggattgtctccagaccactgaatcaccaaacagttcttatcaaactgaaacctgaaaatacataatgtcttttaagtaactacaaaatggtagtgcaaataatctacatagcatcggtcattaggatgtacttttcttattcagctagcttgtcagttcacattaac

SEQ ID NO: 19572 - DNA, 2061 bp, Setaria italica
  Peptide Sequence Number=SeqID_85546
ggggttttcaagtttatgtaaagcaatgcactgggtttataaagaaccaacaactctgacactttctagtattattatcacctaagagagttggcacaagagatgataatcgcaattattcacaattattcgtgcctatgaacacggtatgatcctgagtcccggcatgttcagcaatgcttcagaactttccgatgccctatgccctatgcccgcccaatcgtctccaccaggcgtctctcgatctccatcctcttcctcatcagcagggtgtacttctttaggagctccctgtcctcctccttgtctccagccggcactgcaagcttcgagccaagggaggtcttctccaggttgccctcgtacaagcacgagatgggaacgaagcttcctccagcgttgcacagccacccgtgggcggctctcagtgctgcacccagtgaggccgaatcaggtctctgaacagtgaagacagggcagccaaagatttgtgcaagtgccctgaggatgctctcattggaggatgccccaccagttgctatgatccgcttgggagggttcggcatgccaaatctctctgcatggcctcgcatcgacaacatttgaccttcaatgatggcacggacctcagatggtggatcaaattctgacaattcacgctctatcagattgtcagatgaggcatcatcaaggttttcgaccatgtaccgatggaagcccactggaagaggtggcaggatttcatggtctttgtagtagaatcctaactttccgccatttagagggggagttttctccagatagttgttgaaaacatcccatgatttctctgcacatcgatttcgcacatcttctctggtcaaggagccatttttgtagcatagcatcaccatgtaaccatcaggctcaacagggttagggaaaacatgcccttcaagacttggtttagcttctgctgttatcccaaatactgtatcacttgtaccaaggctaatggcaagatcaccaggagtattcagagttaaacctgcaaggctattaggattgtctccagaccactgaatcaccaaacagttcttatcaaactgaaacctttctacaaaataagtagcaatccggccagcagccgaatatgctggtgctagatttccaagctttgcttcaagtccaggagcagttgcctctaaaacagtctttgaccaggtcctctggtttatatccatcaagttcatcccagcaccatcagtttcgtcaatacttgcatagcttccaacaaggattgatgccatgaaagagctcaccaaagatattctctcggtatcttcataaacattgggttctgtttgatagatcttccgtatctggggaccagtgaatctctcgtaggcacgagatcctgtcagttttgctaactccaatgcacctcccactgcattctctaattctctgcattgcttagttgtgctactgtccatccatattggtgagttcgttgtagaaaaggcatccttgagctgcggtgacaagctcttactgggatccaaggaggaaagaactgcttggctgcccttcttccaataaacactgccatgttgctgcccactccctgagacagccacaaccttactgaagtttatctttggttttagcttctcaagcagcagctccaaagcttcgacccacataatagttggtgaaaatatgtggccatcgtcagtggaatctctgtacaccccaccttcagttttgtagtgcggcaattcagagtcaaaattaacaatttcagaagctactattgctaactcattgttgagcacagtagctttcagtgactgagtggaactgtcgaatccgaggaagagagatccctccgggagggagcctcgccccgccatggctgccgtctctcgtcccccgagaaattcgcccaagcaagagcgatggggaaggcgaagacgacagacgactgcgctgcggatcaaaacctggagagaggtatggtataaataccggcgatctagagaatagaaaggaaagtaaggaaaactaaaggaaacgaaa

SEQ ID NO: 19573 - DNA, 383 bp, Setaria italica
  Peptide Sequence Number=SeqID_85547
ctgtcttgcttgcacggattgctctttgttttgtctggtataatgatttgttggattgctccgagagttagttgttttgttctggtctcgccctttcttgtatttcaagaaatcaaatcccaaccttcctttctaggacggattctccaatccgtccaccctcctccgacaagtgagagaggcattcgtggttggggagggattggtttgctgctggtggagtgccgcctatcctaaaatgtttggtccgccccttgttcctggggttggaaagtagcgtcaatttgggactttgcttggtgatagtgtttgatacctgagcctggagaaattgctcttgaaggtgcgtatgttcagtacccatgtaattgttttttgagacc

SEQ ID NO: 19574 - DNA, 271 bp, Setaria italica
  Peptide Sequence Number=SeqID_85548
ggcgcggagctgctcgtaggtgaaggacgggcggtggtagtccgggtccaggtaccccggcgtcccctgcggcgccgtgcagcacacgagctcgcgggcggtccccgtggagcacgcgtccggcggcgccaggagccgcgagaggccgaagtcgccaaggcgggcgcgcatgtcggcctccacgaagatgttggacgaggtgacgtcgcggtgcacgacggcgggcttcacgccgaagtggaggtactcgagcgccgacgcgatctgggac

SEQ ID NO: 19575 - DNA, 1511 bp, Setaria italica
  Peptide Sequence Number=SeqID_85549
cagtcaccccacccacccacccaccgccttctcctctttctttcctccgcgttgttcttgttcgtctcggcttccggtcgctgattccgcggcgaagattcccggtggcggtgcttgttgttcgctcgctcgctcgtgtgttcgcgtgcatggggctcgacgtggcggagatcgggatgggcctggatctggggctggacctcaagctcttcgccgcgcggagcgccggtgggatggcggcggcagcggccaagggcgcgccggcggggatcgaggcctgcatcaggagcctcgaggaggagcgccggaagatcgaggtgttcaggcgcgagctcccgctctgcgtccgcctcctcgccgacgtgatcgaggagttgaaggacgaggccgcgaagagaggcgaggatttggagttggagatgaaggcggacgacggcgacaagaagaaatggatgagcaccgcgcagctctgggtggactctgacgccaaatccaagtccgagaaagagaaacggagtgagatgacctcgccggagcccaagttgctcggtagccccatgccgatacgggctgttccggcggtggcccccccgcccgccaccgtgcttcagaggggatgacaacgctgccagcactgtcgggctgcctggtctgtcgttgctgccaccggctgcaaaaacaatcgatctctccggcccctgccgttgatgagcaccggcagaacgccaccgcaagattttctgcccccatgtcaccatctggccctgcactcaacttgcatgctcagactcagcaacagcagcagcaggcgaggaaggcgaggcggtgctggtcgccggagcttcaccggcagtttgttgctgccttgcaccaactcggcggcccacaagttgctactccgaagcagatcagggaggtgatgcaagtggacgggctcacaaacgacgaagtgaaaagccatctccagaagtaccggctgcacaacagaagatcgcccggcgtggctccggtgagccagtcgattatgctggtgggtggcctatgggttcctcaagagcaaaccagctcacagtcagggtctcctcagggcccccttcagttctctgggtcagggatggccgtctctgcagccaccgtcggtggcgacggcagcagcagcgacgaagatgacaagtctgatgaaagctatagccggaaatgattgtaaggtttgcgttcgcgaaagatcggttgagagtgtagagatagcatcgcggctttgcgcatcggtggcagtaacagattcatcagtcagggagaggctgtgcagccaggccatgcatacagggagattgggtggtgagcgcccaagagatgaactgatcatgagttgggttgttgtcatatatgtacatgaaaagctgataccagttttcatgaggcctattgactttagtttccgggcagatccaaattttcgccctgagaattatatacatgcgacattcaacaaaaaaaaaaaaaaaaaaaaa

SEQ ID NO: 19576 - DNA, 411 bp, Setaria italica
  misc_feature (390)..(390): n is a, c, g, or t
  Peptide Sequence Number=SeqID_85550
gtttcttcacacatccttccctcaaataggttaacttctcatatttgaaatcatggttgctcaagaacatgatttctgaaaaatggtcacggactctttcatcattgcaaacatgtgcgacaagggtactcttgccaactttgctggggccaacaaccggcaggacctccaattcttcagcaccattaggttgtgtgtgcaataggaagttgagaacaaggtatgcttccatctggcggccaaacatgcacttgcccagcagtaggtgcatgctataaggctggcggtacaggtgagggtagctcgtcaagaacagaaccagctctttcatatcaatgatcatagtgctcaaattgtcaagggcatcttccagttgttctaaaatctgtntctttctctttgaagaacata

SEQ ID NO: 19577 - DNA, 373 bp, Setaria italica
  Peptide Sequence Number=SeqID_85551
gcaccttcctgacggtgagcaggtgcgtggtgacgagcttcctggcctgccgccagtgctcgccgtagggggcgaagccgacgctcgacgacccgtagacgaggctgtcgacgagcgtcgacgccggccgcgaggcgaagacgtggtcgtgcgtccgcatgaccgccctcgccgcgcgcggggacgacacgacgaggttcgggacggtgccgaggcggaggagcatgaggccgccgccgtgcttggcggcgaggtcgcggagggagacgtgcgggtggttgccgacctggagcaggttgccgatgacggggagccccggaggcgaaggcgggagaagcttcgtctgcttccggctttgattggccgcgatgtg

SEQ ID NO: 19578 - DNA, 1558 bp, Setaria italica
  Peptide Sequence Number=SeqID_85552
agatattaccttgagtggggagcatgtaagagaaggaatgacatgtgtcatttcagtgaaggtccctagtccagaatttgaaggtcaaacaaagacaaggttgggaaatccagaagtacggagaatagttgaacaatctgttcaagaaaacttgacggagtacttagagcttcatccagatgttctggattcaatcctatcaaagtcccttaatgctctcaaggctgccttggcagctaagcgagctagagaattagtgaggacaaagagcgtgttgaaatcttcttcactccctggaaaactagctgattgtgcatcaactaatcctgaagaatctgaaatcttcatcgttgaaggtgattctgcaggcggcagtgcaaagcagggacgggataggagatttcaggctattttgcctctaaggggtaaaattctcaacattgaaagaaaggatgaagcagccttgtacaaaaatgaagagatccaaaatcttatccttgctcttggactaggagtgaagggtgaggattttaagaaggaagctcttcggtatcataagatagttattctaactgatgctgatgttgatggtgcacatatccggactctcctccttactttcttcttcagatatcagagagcactatttgatgaaggttgcatctacgttggtgtacctcctctttataaggttgagcgtgggaaacaagcacattattgctatgatgatgctgatcttaaaaagatagttaacaccttccctgcaaatgcatcatatcatatccagaggtttaaaggtttgggtgagatgatgcctgcgcaattatgggaaactacaatggatcctgagaggcggctgttaaagcagcttaaggttgaggatgctgctgaggccaatgttgtcttctcatcactaatgggtacccgggtcgaatataggaagcaactgatccagaatgctgcaagcatgatcaacatagatcaacttgacatttgagtgcattgagtaaggctgaccccttcttgtatgatagaagatccacccgaccaagcatagaagacttggttcttcaccagcaatttatttggtgctagtgtagcagtaaaagtaggctagaactggaatccggatggcagcggcttgcctgatttcctggttcttccgacacatttgtggtagtcctgtgatgtgtaatccattttggcctggcggagattacttggggagtttggggacgttccagtcatggattaaggtagctgacacattgccacggatacggtgtagcagactttcaccttgtgaaatttgcggtggattattcattatgctgcgtctcggtctcgccaattctttggttgcactgatgacatatcaattggttacccaaaacatttcaaacgattagttagtatgtacggagttctggacaggaggttttgtctcacagttcggaattttggcaattttgaagggactatgggaattgtaacattcttcctgtgagttaaacttttggttgcattgcattgtcatgcaacgaagagaacatcgctt

SEQ ID NO: 19579 - DNA, 325 bp, Setaria italica
  Peptide Sequence Number=SeqID_85553
ccgaggcacgctgccattgtagggctccctgatgaatttgactgggccaatctcaaaggcgaggccactgaagacggtacagtggtcgccgccggtgagccagaggaggagcgggtcacggcggggatcatcctccgactcgatgaagtagtagaacagctccgccccattcttctcgtccacgttcacgtaccctgtttccaggcggaaagggagagcaccctcgtatcccgggaggctatctacaaggttccgctccgcggcggacgcgatgttgaagaggcagaggaagacgagcagaatggccatgagaggctagcgtaat

SEQ ID NO: 19580 - DNA, 366 bp, Setaria italica
  Peptide Sequence Number=SeqID_85554
gcagcagctctatggttcattgtggctgcacgtaaacgccaatcgcatcaagatacgttttgctacgcacaaagaagcccacaacgctgtggttgtcttccactgggacggtgaaaggggttccatctcctagaccgtaaggcccgcatgtcctgacgttggtgacaaaggtaagggacgctatgaccttgcacgagcgatagaggccaacagttccggaaattcccttgacgaactcagagggcccaagttggatagtttcagaatttcgtcccgaaccaccccatgggcccgcggtgcgcttctgaccagcttggtcgacgtatgagaatgcaatcgcatcaataaccacaccgctctgcactg

SEQ ID NO: 19581 - DNA, 333 bp, Setaria italica
  Peptide Sequence Number=SeqID_85555
ggcgtcctaagccgtcatcggcctggaaaccggcacaagcttgcctgcaccctgttccctacagcacactgccgacccagagcagtcggagcagccacctgagataggccccaaccgggccggccctccagccagtggcgcggcggcggcgcatccctaccccgacacggacgccgggaggcagcggcgaaaggagaggatgagtccccacccgggctgcacatccggcggtgggagaagcagatccagccgggggagcgcggatccggcctctggcgaccgtcgacgagaccagcgcgtagaggcccccgtgacgctgcagctcgtcggagt

SEQ ID NO: 19582 - DNA, 435 bp, Setaria italica
  Peptide Sequence Number=SeqID_85556
caccaccaccagaaacaaaaacaactttgggaggaaaaaataatacagcaaaaccctaagatctccctcccccctccggcattgccggctggggtgcgcctttctatgagcgcaggcccccagtggtgagggacgcacgggggcgatggccaacgccgccgccgtcatcacgaccccggcgcccggcgttgccgcggcggcagagcccgccggctggctcatggacgagcgcgacggcttcatctcctggctgcgcggcgagttcgcggccgccaacgccatcatcgacctcctcgtcgtccacctccgcagcgtcgccgacccgggcgagtacgaccacgtcgccgccgccgtgcagcagcgccgccaccactgggcgcccgtgatccacatgcagcagttcttccccgtcgccgacgtcgccttcgcgctcca

SEQ ID NO: 19583 - DNA, 383 bp, Setaria italica
  Peptide Sequence Number=SeqID_85557
cgccgcgcatcacgcgggccagcgacgcggccgaggcggccgcgtccgcggcgagaccggccgccacccgcttcttgttcgcgtcgtcgatgccgtccgacgccacgatcgcggcgagcaccctcgttgccgcctccacgccctccacgccgacctcctcatcgcctctcctccggagtaccgacgcgaccgtctcggcggcgcggccggcgcccacgagcgcgttcttttcgaagtcgtcgacatcgtcgtcggacaggtaggccgccagctcgcgggagggccggggaggggtcggcaccggcgtcggaggccgccacctggcggacgaggctgggcgggggaggaagtccgcgccgaggaagcggcggcgggtgggggag

SEQ ID NO: 19584 - DNA, 254 bp, Setaria italica
  Peptide Sequence Number=SeqID_85558
ggcgcgcccggagagggccccctcaacgtccggaggccactcgtggtgttcaaggacgggttccggacccggcagtactgcctgatagagtgctcggacatctgcaaccggatccaggacgggaaggatggaccatgagccgtccgtgacagagctacatacatgtaaatctccaagttactactgaaacaagttcttctatctgaggactatatgtgcagcaattcagataacgcacggacgcagcaatggaa

SEQ ID NO: 19585 - DNA, 605 bp, Setaria italica
  Peptide Sequence Number=SeqID_85559
tcttaaatagcttggcatggcgagcgcgctggagacactctgcggccaggcgtacggcgcgaagaagtaccacatgatgggggtgtacatgcagcgttcatggatcgttctcttggtgtgcgccgtgctgctgacaccgatgtacttcttcgccgaggacgtcctcctgctaacggggcagccaccggagctgtcggccatggcggggcaggtctccgtatggttcatccctctgcacttctcccttgccttcctcttcccgctgcaacgattcttgcagtgccagaggaagaacctcgtcaacgccgtcgcggccgccgcggcgctctgcatccacctcttcatcagctggcttttcgtctctaagctccagttcgggctcgtcggcgtcgcgctcacgctcggcttctcgtggtgggcgatcaccgtgatgcttttcgtctatgtcacgtgcggcggttgcccggagacttggcatggcttcacggtggaggcgttcgccggattggggggagttcgtcaagctgtcagctgcctctggtgtcatgctctgcttggagaactggtactataggatactgatcctgctgaccggaaacctcaag

SEQ ID NO: 19586 - DNA, 583 bp, Setaria italica
  Peptide Sequence Number=SeqID_85560
aggctggccattatttttcttctgagtttgggtttgatatgtctggcacgcatattggtgacaatcgctatcttacttgctttttaagtgtggcagccgaaatggatctggactgggcaatttgggctctgcaagggagttactatatcagagaaggtattttggcttatgatgaatcatatggattgctgtcatgggactggtgtacagctagaaatcccagcttcattaaaaggatcaattccctgcaatcaccatttcaaggtcctggtctcccaaacagtagagagccatacaacttaatattccacccccaaactgggctgtgtgtcttggcaacgtcttcaaagtcactcgagcttggtccatgcgacagatcaaatgcctggaattacacctcagcatacgagctagtggtgaaaagctcaggacagtgcctccaggcgaagtctgtgggcgagaatgcaaagcttggcactgattgcagcaaacccagttcaaagtggcagctgatatcaaattcgaggatgcacgtctcagctgagctcaccaaaaatggaaccagggtgtgcttggatgccgg

SEQ ID NO: 19587 - DNA, 1130 bp, Setaria italica
  Peptide Sequence Number=SeqID_85561
tttttttttttggtggaaaaacgtcaggggctctcttcagatatttattcacatcacgttccagatctcaatggcctatcatacgcgagatcatgaattcatgattcatgaatggagattattcagaaccaggcagggctggcggtttctttacacacatcaatgtagcgtcgctctgcacgactcggtgctcgtcggagttcagaaccctgaagagtctgaactctactcagccgtacgcgtgtagctcgccactggcttggtcgatgatcccctccgtagcattggccagcacggatggtttgtacgatgggaaggtgacgtagcgagggcagtagcttctgctgttcgttgccttgtcggtctcgaacgtgcaatcacgaggctgataatccttgtggaagcagagcctaagttcttgaactgagccattcttacaaacaagtgatggcattgccccaaatgcgtactcaatcacagcaacaatatgtccaacagcgtatcttctgctgcttgcaggccgaatatgtgcttttctcagggctttcgtaacattgtatttgctgtagagataaagtgctgtggagaagtagtcatattcatcctgtatttcaggataagcgcaagttccatgagtttcccactcatgcacccaaaatggcccccttcccaccaaagcaggttgatgaagagccacagtacagggatggccagtacttctctagtatcggcatcagcattaagatcttattgatgttgaatctggcgggtctgcagcatgatggccatcccccatagttgtactgtggccagagaccatgaatcgtgaaccatttaaggggcttcgatcggcaacagccattggtgtcgcagcaattgctggtctggcggcagatggtgcccggccactggagcgccagcacgtagtagtcgaaccccgcccagcgccgcttcctgctaccacccgccgccgccgcctccggcgacgacgacgccgaggcggacggcgccagcagcgcgctcggaagcagcacggcgaggcagagcagcgagagggggaggaggaggcgcttccgcccgcgccggtgccgccgcgtctccatcaccccgcggccgccgtcgcttcccga

SEQ ID NO: 19588 - DNA, 412 bp, Setaria italica
  Peptide Sequence Number=SeqID_85562
ccccttgtatgctagttatgctagttacctgcatgacgacaggctgacatgcatgcacatcagtgttcgagggctagctgaggggttctggaccacgagtaggcacactttccggcggcgtcggcgttccacgaaaggttccccgacgtcgagctgtcattggcattgggctcaaccgagggtggtctgatatcaaacatggctggtcatcaagaatgtcatcgtataaaatcaactggtcgactatgtagcggtgttgaagccaaagttgttgacatcgatagtggcgaactcctaccaatcaatgagcaaggagagttatgtatccgcggcccaggtgtcatgctaggatatgttggagctactacatttacttatactttcatcatccattttgagcacaaaggttggt

SEQ ID NO: 19589 - DNA, 316 bp, Setaria italica
  Peptide Sequence Number=SeqID_85563
gggagcggcgcgtgccggggcgggagggccgggaagaaggcgaggatggtgtggacgcccgagctgcaccaccgcttcgtcgaggcggtggcgcacctcggcgacaagggcgccgtgcccaaggccatagtgcgcctcatgaacgtcgagggcctcacccgcgagaacgtcgccagccacctccagaagtaccgcatctacctcaagcgcacgcgcaaccccgccgcgccgcagccggctccgcacttcccgacggcgtacggttcccccttcaacccccagccgccttctgatccctccagccggagttggttac

SEQ ID NO: 19590 - DNA, 433 bp, Setaria italica
  Peptide Sequence Number=SeqID_85564
gtgatagtgatcttctgtggcatctagctgcagaagctgggaatggtctcgctgagcgccatccatttatcaacgagttcattaaatctgtggatgatggtagaggatttagttacactcatcccactcatcctcgagatatgcctggtgttaggcacgatggacgtgcatcatacttcttccatagaagatttgagtcgtacaacaatgagggtgatgaaaataacagctggaagaaaattggagcctctagatcaatcatccttgatggaacactgcaaggttgcaaggaggtgtttgtcctatatgaagacatgatgagtgataaaagccctcaggaaactgattggagattacatcaatttcatatcaggaatacagtgaaggatgagggagaggtggtggtgtcaaaaatattactactcacactgag

SEQ ID NO: 19591 - DNA, 569 bp, Setaria italica
  Peptide Sequence Number=SeqID_85565
ctcccaaggagaaaggaacgcacaacagtaaaggagagccaaatcttccctgagcaatggcggaggtggcgaccaacggctcggaggtgctcgccgccccggcggccgtgccggcgccggcggtgttctccgggctgaaggtgcaggtgacggttccggcagggcgcgccgaggaggcggtggccttctacaaggccgctttcgccgcggaggaggtgtcccgctccacccacccgaagcgcaagggtgacggggaggcggcggccctgctctgcgccgagctgaaggtcggcgcggcgaccctgctcgtctgtgaccaggccggcgacgacgtccccgccgtgggcaaggaaggcgccgcggctagtgggctggttctgcgcctggagaccgacgacgtgaacgctgccgcggcgcaggcggcgaccgccggtgcggcgctgcagggggaggtaaccgaggacggctgcgggctgggcgccaccctcgtcgaccccttcggcgtcgcctgggccttcgtcggcggtggtggatggtggtgatggtcgtcgcttaactcgttgtcaggg

SEQ ID NO: 19592 - DNA, 680 bp, Setaria italica
  Peptide Sequence Number=SeqID_85566
aaggaactaaggttaactaagaacgacctaggaagaaccgaacgaacgtagactgacgggaggcggcggccctgctctgcgccgagctgaaggtcggcgcggcgaccctgctcgtctgtgaccaggccggcgacgacgtccccgccgtgggcaaggaaggcgccgcggctagtgggctggttctgcgcctggagaccgacgacgtgaacgctgccgcggcgcaggcggcgaccgccggtgcggcgctgcagggggaggtaaccgaggacggctgcgggctgggcgccaccctcgtcgaccccttcggcgtcacctgggccttcgcctcctccacctccgccaagaagtgtggctagaagccccccgaccgccgtggtcgtcgccgcccgacggatgcgctcctcaaggccttcgtcggcggtggtggatggtggtgatggtcgtcgcttaactcgttgtcagggacgagaataatctatggggactgatggcatcgtagtagtgttgttgcttttgttagtcagtgtagtagtattcgctgaaatgctctgatggtcgttaaatttcagcatgtttaagtaattggtcctggtctggatattggtgtgaactcggaacattgatggattaatggtgttatgtaggtaatgggcagtttatccttgtttctgatgtgtttc

SEQ ID NO: 19593 - DNA, 625 bp, Setaria italica
  misc_feature (493)..(493): n is a, c, g, or t
  Peptide Sequence Number=SeqID_85567
ccttgcactcacagtggtagctgagaccagagccgttcctgcacgtgcctccggtgccacagtatgctaattcacatgggttgagtgagaagtttttaggtgctggcaaaggcgttggtgctggtgctgatgaaccgttggaacatgagctgtcaatggaacctgaaaggaaatgttatcatttgatcatttgaaatgatgtgagcatacattaacaaagttgttgtcagcacgaaaaaaaaacactgtcccttggagggtattgatgaatattgctgacatctggttagatacgtatgtggtaaagtaagatagaggtagctgcagaaaaatccttgtgaaatcacatgaagatacaaactggttttagtgtatccagatggagtaatctaataaaggcattatgtaattttcagctgtgttacttgtggtatgaaaagcataaagcaactctgaaaacgatactagacccaaacactctaaagaaatccancctttttcttctgattgagacgcgccctgaatataagaactgcattctcaaaagagacagtatatggagcacgaaattgaaacgccacacgcatagagccggtccaattaagtttgtatgcgtttagacttt

SEQ ID NO: 19594 - DNA, 921 bp, Setaria italica
  Peptide Sequence Number=SeqID_85568
ctaacatctacagtggaaatcaaccatcaaatgcaatcctgcagcagtatagcacacatcccaaaagtttaatcctaacaagctatcaactctatgctgtcccgtggataaaaatagtctagggctaccgtgcgatgctccatcgtccatctatatcacctgactcacggccagtgagactatcagcagcagcggcattaaaattcgctgtgaaatggatcctggcgctgctgcaatgccattgttagaaatgctctccgagctgggtggtgcaggggatttgttggaagagtttgagaagggaaggatccctattcttgagcaatctgcaccgatggaacagttctgaaagcaaggcaatgtggtcatgttgagaaggttgctgtaaccctccttgcactcacagtggtagctgagaccagagccgttcctgcacgtgcctccggtgccacagtatgctaattcacatgggttgagtgagaagtttttaggtgctggcaaaggcgttggtgctggtgctgatgaaccgttggaacatgagctgtcaatggaacagttggggatgacgcaaggcaggaacctgagttcgtcgccgacgtggagctgcgtccagcccgggtcgcactcgcacctgtaccccagcgtccccggcgccaccgtgcagttccccttcccgcacgccaccgtgctgcagatcgagttgatgacgggcgcgaagatcggggcgagcggggagaagaagtcgtcggcggtggcggcggtgacggcgaggagcgccacgagcgccgcggcgcgctggacccctgccgcgagcaccatctcggctggctggttcctcgggctcttcgatctctgcgcacgcgaggcggcggttgtgctcgtcgtcgcttttccgtgtgtgggcggttgcgtttttaaaga

SEQ ID NO: 19595 - DNA, 2924 bp, Setaria italica
  misc_feature (2902)..(2924): n is a, c, g, or t
  Peptide Sequence Number=SeqID_85569
gtgtgcagaacaactgcctcacaagatccctttctttggagttttgattggtctgttaaacttggagaatgaagactttgccaaggatattgtagataccacacaggccaagctacaggatgccttgcacactgaaaatcgtgatagaattaggatattgctgcgttttctcagtggcctgatgtgcagcaaagttgtagttccaaattcaatcattgagacatttgagactctattatcatctgctgcaacaatattagacgaggatactggaaatccttcgtggcaaccacgtgctgacttttatgtttattgtattttggcttcccttccatggggtggtccagaattgtttgagcaagttccggatgagttcgagagagttttggttggtatacagtcttacataagtatcagaaggcattttgatgatattgctttctctgtctttgagacagatgaaggccactctcccaacaaaaaggatttcattgaagatctatgggagcgcattcaaattctttcccgcagcggatggaaagttaaaagtgttccgaagccccacttgtcgtttgaagctcagctggtggctggaaaatcacatcgtctttccccgattagttgccctccgcctaatctctctccgacttcttctgaaatattaaaaggacaggaaaaacatgaagctgatctgaagtatcctcaaaggcttcgtagactccatatctttccgacaaataaagctgagaacatgcagcctgtagatcgttttgttgttgaagaatgcatattggatgtgctacttttcttcaatggctgtcggaaagaatgtgcgttttatctggtcagcctacctgtgtcttttcgatatgagtacctgatggctgaaaccatattttcacagctactgctgttgcccaatccacctttcaggccaatttattatacattggttatcattgatctttgcaaggctttgccaggtgcattcccttcagttgtagtaggagctgtgcatgctctttttgacagaattagtaagatggacatggagtgccgcaccaggcttatcctatggttttcgcaccacttgtcaaattttcaattcatttggccttggcaggagtggtcttatgtcaaggacctcccaaagtgggctccacagcgtgtttttgtccaagaagtgttggaaagggaaatccgcttgtcctactttgaaaaaatcaaacagagtatcgaggatgctgctgagttagaagaactgttacccccaaaagcaggccctaatttcaaattccttagtgatgaaagcaatgaaaaaaccgatggccataagttatcaaaggaacttgttggcatggttagaggaaagaagaacacacgtgatattattttatgggtggaggaacagataattccgacaaatggtgctgaatttgcccttgatgttgttatccagacacttcttgacatcggttcaaaaaagtttcacccatctaatcactgttttggagagatatggtcaaataatctccaagctatgtccaaatgaggaaatgcagttactgttgatggatgaagtcagtgcttattggaagaacagtacccagatgactgctatagctattgatagaatgatgggttatcgcatgatatcaaatttggctattgtcaaatgggttttttctcctgccaatgttgagcaattccatgtttctgatcgcccatgggagattctcagaaatgctgttagtaaaacgtacaatcggatcagtgacctccggaaggaaattcagtcactcaagaagggccttcaagttgctaaagaggccagtgcaaatgccataagggagctggaggaggcaaaatcagtactggagattgtagaggggcaacctgcaccagctgaaagaccaggtaggctaaggcggctccaagcatatgctgacaaggcaaagcaagaggaagtaagtatggaagaatctttagaagcaaagggagctctccttgctcgggctcttgaagaaagcaaggaattgcttaagttactatttaagagttttgttgatgtgctcactgaacgtttgccaactgtctctgctgatggagagattcctaatcttcgcgctggagatcaaaatgtaaattttgcagcccgagatcttgaaacagcaacaatggagatagacaatgaaaatggagcagataaaaatagtgaaccaaatgggcaaaacacaaaagatggctacaatgttggagagctcgagcaatggtgcctttgtacactgggttatctcaagtcattttcccgccaatatgcaactgagatttggtctcacatagcaatgttggacgaggaggtcttcattggggacattcaccctcttatccggaaagctgctttctctggtttgtgcagatttaccaacgaagggtctcagctttgatttttgacccctccttccaaaaatggagtgtagttaacctgtatgacacatcagacaagttttaaccgtgtttaactaatcagtccacccccaaaagcacttgaactccaaaattatgagaaaaccatggagggaattttacttcaaaagcactttaacctctatgctttctctggttttgttccgtcatgtatttttccctctcccttttcaatttacttgtcgaggaaaattacgagtaaactccacgactagaatgcttcttaggtaattaaattattgctagctttacaatagctgcgtctgagtatgcaggtggtttgatgttagtttttttttttggtcgtaaaatgatgttagttttatgtgagtggccgatacattaatgactgtcattagtgtgcctggtatgtggaccttgatagctatgcgtggaatggtcatcatccaagatnnnnnnnnnnnnnnnnnnnnnnn

SEQ ID NO: 19596 - DNA, 1195 bp, Setaria italica
  Peptide Sequence Number=SeqID_85570
ccggaactgcaccgccgccgccggcctcctcccacaccaccaccacctgcatcgctcttgagcacgccgcctccgtctccgctggatgcggccgccgccaccttgccgtcgccttcctgcgccttctgctgcgtcctgtactcaccgtacaggtaggatgagaagccccagacgcagagcaccgtggccacggccttctccgacccgaacgggtcgcggaacacgaccacgccgccgatcacgttggccgtcagcacggcggtcatgcacacgccgctgtgcagcgacgacgtgaggtacaccatacccgccgtgcccatgaagcaggcctgccacgtcaccaccagcgcggccaccactacccagtacgccgccggcgacaggtcccagcgcgccagctcctccctccacccgccggccgcggccagcccggccaccgccagcgctgtcgccgcggcctgcatgatcacctggacctccaccgccatgcggaacccgccagacacggccctgcggtacaccagctccatcaccggcaagtaggcggcgaagagccccgcagcgccgagagtgaccgcgaagccgacgaagtacctcgccctgctcccgccgtcggggtgctcgccggagtccgacgaccggagcgcgagcagcacggagctaagcgtgaggagtacgacggcattgaggttggagaaggtgagcgggtggcgcacgatgacggcggcgagcacgagcgtgaaggccagctgcgtggacagcagcagcgacgaggtggacacgggcaggtacgaggagctgtaggagaagaggaggttgttgacccccatgagcacgccgatgacgacgcacgccgccagcagccgccgcgtgaaccacgcgaacggccggggctgcgcggcgggccggccggcgtagacgggcaccagcaggaccgggaacccgaccgactgcaccagcgtggcaacccaccggttgtgcccgccgtgcgcgaagtagtaccgggacagcaggctggacgccaccgagccgccgagcagcgcggcgtagttggcgcacagcagcagcagccgcctccgccgccgccgcctcgccgcgccattggcggtggcgtccgacgacggcaccggcatgtcgtcgaggagcggggccggagtggtggtggtgggcattggcgagcggagttggttgtggg

SEQ ID NO: 19597 - DNA, 577 bp, Setaria italica
  Peptide Sequence Number=SeqID_85571
gggtgcgcctggagctggagtggagtgtggtcagtgtggggcctggccttttcctccctagcagaggcaagagtttttttgcggattttgatggactgaagtgggcagtaaaaatatctccgtggatctcgatcgggactctgctagttcgagcgtgcaaggtgattaggtgaagtgccagccttccagtttccaggtgctcttgcctattgtgttctcacacggtcagatgatcactaaacagctgggcgatgttcccaacgcagaggattgccgtatctagatcatgtaagaagacgatccttctgcgaattgctaagtttagcagtaacgtctagacatataatcgcataatacaagattatctgctgaatcagtggttaaccacaaaagctaaacattcgtactaccatgtcggaagaaaagctgcaggtaacgctatgcaaagcaccgaaagcccgaaagcaaatctaaaggatggcctaaaaagcaagtctctctgctacaacaagatcatggacgaacttaacaagaacactcgcctacagaaatactcctactcccttgtcggaggaaa

SEQ ID NO: 19598 - DNA, 229 bp, Setaria italica
  Peptide Sequence Number=SeqID_85572
actgtgcacgagcaggtattcatcagcagcttcctagatcgacttacaaacatgagagccgtgatggtctcgtcggtgagctcgatgggcatgccgccctcgttctggagcctgagcaggacggaaacgaagctctcgtggtccgtgatggcttccttgttctcctggatgatctgcttgaggatgcggtcaatcctccgccggcacgcgagagccttgcgcggcgccg

SEQ ID NO: 19599 - DNA, 1119 bp, Setaria italica
  Peptide Sequence Number=SeqID_85573
agcttcaaattaaatcatctaaagggcaaaaaagaaagtcggccgaaattgtctcttatttgagttccagggtcaaaattgtactctgatgacagtttgagggcaaaaaatgaacttcttccgaaaggaaaaatgtagttcattgcataacactcatgtaacacaggtcctaacactttgccacaataataatcatatgtaatacaggttctaacactgaatttttgcaatctgaataatcattaaagcatgcgatgattcctgccatatatacttgtccatgcaccatactattatgcatgtgtaccttaactttttaagcaacaggtggaggaatgaaagtaacgggatgcaacataaggcttgttttcttacttgcaaccactcctacagtctcccatacgtcgacatctttaggctccattccctgaggaagcttccaatcgaagtggtagagaaggcttgccagtgcaagctctatgttggccagcccaaggttgatgcccgggcacatacgacggccggcaccgaacgggaggaactcatagtttgtccctcggaaatctaggttattggtctcgaaccgttctggcttgaactcctcagcatcgtcccagtacatagggtccctaccaattgcccacacattgacgaacacggttgtgcccttggggatgtcgtagcccatgactcgagtcgtctcccggcatttacgtgggatcaggagaggtgaagtgggatgcagccttagggtttctttgaacactagcttgaggtagctaagcccggcgacgtcatcctcggtgacgttgctcttccctttgaaggcctctcgcacctcggcctgcgccttggccatggccgccggggagcggatcagttccgtcatggcccagttcagagtggtcgacgaggtgtcgctgcccgcaccctcaacatgtcaaacatgagagccgtgatggtctcgtcggtgagctcgatgggcatgccgccctcgttctggagcctgagcaggacggaaacgaagctctcgtggtccgtgatggcttccttgttctcctggatgatctgcttgaggatgcggtcaatcctccgccggcacgcgagagccttgcgagg

SEQ ID NO: 19600 - DNA, 305 bp, Setaria italica
  Peptide Sequence Number=SeqID_85574
ttcgtggtatccaaatcttgtattaccttgttcatcatattcaattctctccaaattggcctgatattttctggtagcttcctcagattagtcacttttttagatgcttcagcaatgactattttgatgacttcatctcctaaaactttaccaatcttcgatagggcagttaacaatgcttctgccattagcttagttcctgcctgaagctgccctcagctgagcgcgtggctgtcgcgcttacgggactcccgcggcccgccgctccggagcctgtgtggtcgtctaccacgaccgcgatgcgt

SEQ ID NO: 19601 - DNA, 1079 bp, Setaria italica
  Peptide Sequence Number=SeqID_85575
cccgtgcttgaccaaaacttcatctacatgggagtgaataacacatcagcaagcttctcctcggcgctaaccaacatattgcctgctgtaacttttgtaaatgcgataatactcaggatggagagaataaacatcaaggagcgacgtagccaggctaagattgctggcacggccataacagttgggggagcgctgctcatgatacttttcaagggccccatcgtcaactttccatggaccaaggacgtcagccacgctgtctccgacagtggtgcccacaacggcggccactggctcatgggcaccttcatgatcctgttaagctgcttctgctggtctgccttcttcatactccaatcatacacgttgaggagttacccatctgagctctccttgaccactctgatttgcgcactgggcgccacggagagtggcgcagtcgctctagtcatggagcgtgacactaagacttggtccatcgggtttgacatgagactcttcacggccatatactctggcataatgtgttcgggtgttgcttactacgtgcaaggaatagtgatcaaggagagggggccagtgtttgtaacagcgtttagcccactctgcatgatcatagtgactctgctaggttccatcattctctccgaggtggtcactttaggcaggctaatcggtgcgacagtaattgtttttggcctctatgcgctgatatggggcaagaacaaggaccatgtgaatggaaatgatgcagaaaacaattttgagaagcacaggacttttgagttaccattctcaactaccgacgtgaacaaaatgagcagtctcggcaatatttagctgttactgaagcggcatagcaaggaaagtttgagtcaaccactctgactttgtgtgcccgtgtgtgggtgtctagtactgttagcatgtaatagtatatgttccgtggtcgcctaattcctgtgcaagacgtaatttttggcgtctatatatggctcattatgcaaatttattgtgcacagtaaaataaacgctatatgtgtaattttgtcgagatataatgattaatgatcataaag

SEQ ID NO: 19602 - DNA, 536 bp, Setaria italica
  Peptide Sequence Number=SeqID_85576
aacacttctgttagagatgatggcaaagaggcaaagtaccgacacattcgtgattgggagaacagagaaatggggcagtcattgagagtaagagacatatccccgaggccttcaatcaatggcatttcacccaatggttatcatggagaaggccttgttgactatcatttgaagcagaggtacagatattctactagggaacgccccaatgaaagaaacctggatggtccaagcagagtcaggggacttgagaaagaccgtgctgagattttgaggatgcttgatgagttgagagaccaggtgcagcaatcctgcgaggtaactgacgggccaagtggaagtgcaccaattagtagagcagcagatgcctcaagttcatatggtacttctgaccggctgagtcaattgaggcatgatgcacctcaattgcaccggaatggttcacatcactccccatccttgaatgtgcgaagtcctagcgttcctcgcgtttatgctgcactgcctgcacaacaagatcgtgttggatatgcaga

SEQ ID NO: 19603 - DNA, 1648 bp, Setaria italica
  Peptide Sequence Number=SeqID_85577
ttttcgtcccaccgagcggaggcagagccagagcgcactctcccatcccggcgcatcccccaatggccgccaccttcccgctcctgctcctgctccacctcgtcctggccccttgcgcccgcgccgccgacgccgtggtgtccaggattgccttcggctcctgcgccaaccagagcgcgccccagcccatttgggacgccgtcgcggggttcgacccgcaggtgttcgtctggctcggggacaacgtctacggcgacaacaagcgcccgttccgggtgttcgggaaggagcgcaccgtggggccctggaagaacgtgccgcggttctacccctccaccgaggaggagctgcggaggcggtaccagctcggcagggcgaagcccgggtacgccaggctcagggagaaggctcaggttattggaacatgggatgaccatgattatggattgaatgatgcaggaaaagaatttagtgggaaagtgtttactcaaaggcttatgttagatttcttggatgaacctgaagacagtaatcggaggaaacaagctggtgtttatacctcatacatgtttggccctgaaggaaaaagagtgaaggtaatcttgttggataccagatatcacagagacccacttttaagtgatggaactattctaggagatcctcaatggcagtggctggagagggagcttcatggtcctcaatcagagatcaccatcatcggatcttctatccaggtagtatctaatctttctgccacaactggacctttgttctatgtggagtcctgggcacgcttcccaagggagagagaaaggctgttcagattgattgacagcagtaagagaaacggagtaatatttattagtggtgatgttcattttggagaaattgctagattcgactgtggagctcaatatccattgtatgatgttacttcaagtggtcttacccagtctgttgagaattctgtgccagcagtctttcaacctattatgagacttctggcagtacttacgccaactaccatgcgagtctttagccctaagtgccggtataaatcatgcactacaggtcaaccaaattttggagcaattgaaattgattggaatgctgtacctccgcggataaaacttgaactaagagatgttgagggccattctgttcacagtgtggagttccctatatctgaactgcagccatcaggtgcgcacgcaatcaagaaacaagaacatgcttttcaacggcactgtactctcgaaacagagcttccatggctaacacgacaccggctcgctctgctgttcattggcaccatagctgcttttatcatagccgtggtgctgctagcagccacttgcttgtatagtatcacaaggtgcagtaagaaaaccaagaaagaatagttgtgaggtgtgccgaggataaaatttagattctcggtccaactacacttggaagctgaacttcacactgaccaggagcactgcaggcccagccacgagcccgcaggaagcaagatgacacctcactcctgagtatcaatcagtacacctcgctgtgcaatttacacagcacagattggatagacatgttaagttgttaactgacaagtgatatacaaccttgtactgcccctctctatagc

SEQ ID NO: 19604 - DNA, 606 bp, Setaria italica
  Peptide Sequence Number=SeqID_85578
tcaatagctaacaactccaatagaatagaaaggaaaaactagggaataccaagtatgccagcctattgtgctcttgtgaaaggactttgcaagattggggaaatcaatgcagctatttcacttgttaaagattgccttggaaatgtagaaaacgggccaactgaattcaaatacaccttgactattctggaagcttgcaggtcaaaaagcccagagaaagtcatcagtgtggtggaagagattattgaagtaggctgttcaatggacgaaattatctattctgctatcatgtatggcttctgcaagtatgcaagttcaaccgaggcgagacaggttttcactattatgagagatcgaaatatcctgtcagaagccaattttattgtctatgaggacatgctgaacgagcacttgaagaaggtcactgcagacttggtgatatctgggttgaagcttttcgaccttgaatcaaaattgaaatggagaagcagaattgattgaagaaatatttatggagttactcgatatttgtaaaatcatacctgggcaaggttgtgggacaagcaaagttccaaacccagtgtgctgtttactagattactgggt

SEQ ID NO: 19605 - DNA, 438 bp, Setaria italica
  Peptide Sequence Number=SeqID_85579
ctgcacggccctgacggtgccgttcgggcggaagcagaagaacggctcgtcgtcgagccctttcgtcatgctagaggagaagaggcacgcggtgacgttggcggcgtagtagctgaagccgcggtcgctggagacgcggaggccgtggtagagcatcagcgtcggcgagtcgtcgccaccggtcgtcgccgccgcacagaccaccaggccccgggcgaccgagaggtgcacggggtcgtgctgctcgtagaggacaagcttcacggtgttgaacgtgatggagacgacgagcaaggtcatcaccgcggccagcgcgtaccgcgccgcgtccaggcaccggcaccggcaccggaagcttggtttctcgtcgtcgccgtctgcagcctccatgccgaccgagttactgccgctacctatcttgtttctgtcgctcgccca

SEQ ID NO: 19606 - DNA, 269 bp, Setaria italica
  misc_feature (265)..(265): n is a, c, g, or t
  Peptide Sequence Number=SeqID_85580
tagctctctgttttttttcttcgaatcataaccagccagctttgtagttactcgattatatattgaacttattattacttgattcacctcttgctacgttgtcttggacctgcagctactaactaatgtcatggaatggacaccttgaaaaaaggtattatgtttatttaaagaagtattttggtagcttgtcaatcgttcctttcttgaaatcttgtcagcatcgccaactgtggaccgctcttcgatcgcttgtttttttccngcta

SEQ ID NO: 19607 - DNA, 389 bp, Setaria italica
  Peptide Sequence Number=SeqID_85581
aacatccactcaactctgattctccttcctttcctgccaaaatcaactccatcaagtctattgatagcatcttcagcatcacgttcatcttccatgtagacaaatgcaaacccttcacattgaacattaaaaaaaagtgattgattgttcaaagaaatcacagtatggtccaaaccctagagtgaacaaaaaagactacaagatgaatcacgatgcaacctctacaaggaaactttcacctcacaaacctacagactgatacactagaataaacaggaacagaccttgtatatgttgaactaaacaatgtcagagtacaacaatccaaacattcgtggcacatcaaagaatcggtagtgcaacctccacttctctccagccggccatga

SEQ ID NO: 19608 - DNA, 402 bp, Setaria italica
  Peptide Sequence Number=SeqID_85582
gccgccttttcgtaccagcactgcgatcctcctttgtccactcaactctgattctccttcctttcctgccaaaatcaactccatcaagtctattgatagcatcttcagcatcacgttcatcttccatgtagacaaatgcaaaccctgtctttagatccactcgttcaactcttccatacttgccaaaaaggcgctcgatctcggaaatgcgaacatcatagtcaaggttcccacaaaacactggcctcattttactggtcgaggttctattcccacggagaggctgattgattggctctcgcctcccctcgccgccgccgccgtggaaggggaagagggggtcgaaggggattagggctggagaggcgaccgagcaggagtatttctgatatttatttcgtg

SEQ ID NO: 19609 - DNA, 1411 bp, Setaria italica
  misc_feature (1)..(27): n is a, c, g, or t
  Peptide Sequence Number=SeqID_85583
nnnnnnnnnnnnnnnnnnnnnnnnnnntttttttttttctaccagcaaaagcacagtagaagttgaaacaaaaattttgccaacaaggttcaacactgaaagctaccagtcgatacatgaagttacattctggagttgctgcatagcgaaacagcaaatattaagctaacatcgcacatcaatacaagctaacatggtaacatagatagtacaaaagtttcctgctgcctaacattaccaacttgaaataacatcagttcacacattcatcaaaagtgacaggcttgaacacagcatggaggacttaatccctgtcgtcccttccaggtgagtgactggggggcctgtcatatccaggactagcttcacggcgctcacgacgggggctagcttcacggcgctcacgacgtgggctagcttcacggcgctcgcggtcgtagttggggctgcccctctcgtcacctctgccaccaccatttgagccataatcagggcttcgcttgctacctcccctaccatagtccgggctccctctctcccgtcctctgccatagtctgggctacccctctcccgtcctctgccatagggactaggagatcgccttctagctggtgatctttcacgacctctcctgtctgggctgtatccattccctctttcacctttttcatcatcatcacgaagtgcatattcaactgagatgaccctgtccatgaaatggcttccattagtaccctccaatgctctagtagcatcctcctgtacctcaaactggacaaaggcaaagttctttttgatcctcacatttgcgaccctgccatatttatcaaagtgcctctccagatctcgaattcttgtgttgattgggtcaaagttgatcacaaacaaggtttttgttggccttgcactggttggagatctcctcgagctgccgccttttcgaccagcactgcgatcctcctttgtccactcaactctgattctccttcctttcctgccaaaatcaactccatcaagtctattgatagcatcttcagcatcacgttcatcttccatgtagacaaatgcaaacccttcacattgaacgtatatgttgaactaaacaatgtcagagtacaacaatccaaacattcgtggcacatcaaagaatcggtagtgcaacctccacttctctccagccggccatgagattggcatggttggattggcgaggaaatggtgatcaggcgggggaggagggtgcaatgttgatcgtaaatgtaagacatcggtcacgaggtggtcgtttccaagtgaacagatgccatggtggactgtgaactcctggagatggacaagacatgaggtggggctcgggcagatgcaggaaaggtagagcccagtccatcaaccaggaagagcacatatgct

SEQ ID NO: 19610 - DNA, 384 bp, Setaria italica
  Peptide Sequence Number=SeqID_85584
cgaaacgaacaattgaccatacacgcacaagtaatgcaaggatattgcccccaaccaatgcaggtaaagtctacaaggacattgtgggaagtgcatactacgtggcgccggaggtactgcgccggaattatggcaaagaaattgatgtctggagtgctggagtgatcttatacattcttctatgtgggacaccgcctttctgggcaggtgagtattgatacatcttcatcctaacgtagtacactacctcagcatgagaggctaattttcagtgtttgcatatatctgagcagaaacagagaaaggcatatttgatgctatactggtcggccagcttgatttgagctcggccccgtggccctccatatctgaggcatctctgat

SEQ ID NO: 19611 - DNA, 313 bp, Setaria italica
  misc_feature (8)..(8): n is a, c, g, or t
  Peptide Sequence Number=SeqID_85585
acgcgaanagggccagcccggcggcgcagcgggccagggcgaacggggtgggccaggcggcccgcgtggagcgtgatggagcgggcctgcacgtaggcgttgaggaggttgaagccgagggcgcaggcggcgacgaggagcggcacggggccggggcgcggcgcaggcgggcgaggcggagcgggtggacgagcgtgcggtgggcgtagtggaacgcgtagagcacggcggggagggccgcgagcgggctggagagcagcgccaccagcgggggcgggaaggcggggtggagcggaggaggacgaggggcggg

SEQ ID NO: 19612 - DNA, 2386 bp, Setaria italica
  Peptide Sequence Number=SeqID_85586
ttttacagaacatcaaatcgaaccatgatatttttattaagaaaatattaacattacatattacaaaaggaaaacattgtttgaaattacactggggatgcaaggacgggtccatgcaaattagtcggatatggaagttaaacctcacataatttgcatggtaagtttgaattgtttcctgagtatagaaagtatggctgtagatacaatcaaaatttgtagcaacatttctgcatgactcgcattgaagctgtatataagtatataatattgtatttccaaatctagctgcgcagttccactaataatcaaataaaatagtagtggaaaaatacaagaaagccgtcagcataatctccgcgtatgtaccttctatgtacctattgcggcaaatgtgataggcataaccactcacatggtcgtgtgaaaatgattgacagtcatgcgctttgcagaacatcgctgtccttaatgctttgaactccagtaagggccaaagctgaaaataaatgtcccgatgccctgtacctcaaactgacatttagaatggattcactgatcatgactcaacaacgctgctcgtagcatctgacaggaagcagagaccaatatcttctgacttaagagatgcccggaaagaatggtcagaacgaaggcattttcattcttcgctgtgtttctcacatatacagccaggcaagggatttgcaaagaaagactcctctagctttgggaattcaccaggctccctaaaatatggagcacctattctatctttgtgtaatcttttcacttctgagctgaaaatatcccagggcactcttccttcatcaaattcatctaccaggttcacaaaactcatcctgtctgggttaatagtctttctgaagttctcaaaacgtcgatggccttgtacagcttttgccatatttccgtcataagtataaataaagacatcactctggagagccacaatgtagtcaagaccagcaagcatattctgatggtttttgaagggtgcaagttccttttctgttgccagtgtagaatgagaataaatattgggaaaatcatccaacagagccttcatgcttccattgccaaaagcttcaccagcaactaagtaaattctggtgcttcgtgtgaaacccaatcctttgagtaaaagtgaagtttcccttggagtcaaaggacagccaccaagacttcttcgctcagtagcattgatttctttctctttccagtgacttacctcataacgcatcttacgcaattcctcgtcttctaatgatgttaagctatggctgcaaccagtaaaagctagcatgtccttttcataccttagatggagagcaagataagggcctccatcttgacgcatccttgaaaccaaggtagtaccaagatcttcaattgtatgagaatatttcaaagatctgtagttaactcggcatcttaatttttgaatataactcggaatgccattgttagccaggcgagaatctgtatgtgtgaagtaaatgactttgtgtttcttcaaaagagggaggatttcatctctgtaatagctcaccttcgaccaagatatcggagctttagccaaaggttcaatttgactgtattcagtgggcaacgtttcaacaatatcaatgtcttctttcagtgactcgatgaagtgcctccagttgaaaaggtccttaaattcactgtcatctgcccagtatgatgtatgatcaagtgaaggtagaaccagtgtagccttcaggatcttagcaacagcaaccatatcacatatcccaaatctcatttgattcaaacctccatttgcatttatgaggatgtagccatttgtatgagaatcttgctttttatgggagtttgaaacaatgcattgtctaaaatttgtactgcttggctgagaccagacatcaaaggcctcagccacactttcttctcttccaccaatgctagattccactgtcatcaaagtcctgtcactctcttttcctcccatgaatccaaagtgatgatcaacttgatgccctttatctctggagaaggagacagagagatcctgcaaatccgcgtgtttgtcgtcgccagggagcacgaaccacccgcccgcccagatcttaccgacgccaaggagcaagcacacgccgcagaatgcgaggaagagcatgttcccgagcttcctcctctcccggatccccagcccgagccccaggccggcctcgaccgcgccgccgcctgagcccggccgcttgaagagccgaaaccggaggttgtggtgctgctggccctggtggtggtgtaggaggccgccgccgccgccggggcccgcgccgctcccggacggctccgacggacgtacccccggacggaa

SEQ ID NO: 19613 - DNA, 262 bp, Setaria italica
  Peptide Sequence Number=SeqID_85587
cgcgcgcaggcggcaaacgaagccaggcggcaaacgaagcgagctcgctttgcttctcccagcggccacggcccaggcggcgcgcagcagcagcgacgagccccggaggccgaggggcgagcgcggaaggagggagcagaggagcgcgcggcgggactgaggggatccccccatccccgctcgggcccgaagccggatctgcctcggggctagcgcccgcggcgggagatcgtggggcgccgggccggcgcggctggtggcg

SEQ ID NO: 19614 - DNA, 567 bp, Setaria italica
  Peptide Sequence Number=SeqID_85588
agaatgcctgcagctgaataaatctatcactccaatcttgattgcttgatcttggtggatcagctcgatcaggtgccagggtagatgttgcactagtagccaaaacactgctagtcaccaaatcagcagctgcagagctttgaagcattggagtagaggacaccatattgcttggtggcaaactagtaatcacatcattagttggtcgaacagtaatctttccaggagattgtttcccaaaggaatgctgagccagcaaaactgtggattgcaaagcaggggaggcagtaactgcagcaggagatgcgaattgaggagaggactgggtgtgaggtacattgttctgatgcttcagacttgattcctgtggctgtgatcctcctgcaacaggtttctttgtgcttatagaattgaaactttcagcacgagcagaagtgcctcctttgctttgatcagtgtcaggcctcctgcgcacatacacaagatggccatttgcccctggattgcccagcgtgtgatggtttgttggactcagggggccataaggttgtggtcgcttgaggccaa

SEQ ID NO: 19615 - DNA, 1320 bp, Setaria italica
  Peptide Sequence Number=SeqID_85589
aggacaatagttacaactagacaagcaagtaaagtcatatggacgagctattgaacttgatagttccagggtctttgtgttgatagaaagtggaaacatccagctaatgcttggctatttcagaaagggagttgaacagtttcgttctgctttggaaatggctccacacaatcattcggcatactttggacttgcttctgcattgcttgcatgggcaaggaattgtgtaactactggggcctttggctgggctgctagcctgttgaaggaagcatctgaagctgccaaaaattgtgcttcattgactggaaacctttcatgtgtttggaaattgcatggagatgttcagctcgcacttgcaagatgctttccatgggaggatgggaagatcaaaaggggtgtggatgtgcagatgttcaaagattctgttcaggagtggagaaatgcatgtttgtcagcggcaaatggtgcaaaactctcatatcaacgggctttgcatcttacaccctgggaagctaatgttcacaatgatactgctgtatgtcttgatctaatttattccatggatggcaataacagacacaacccaaattttttgggagctgtcagagaaaatgtcacttggtgccttgatactggaaccagttaataaggatttctgggttacattgggttcaatgtcacatgatctggctttgaagcagcattcttttatcagggcacttcatcttgatatgtctctgtctgaagcttgggcataccttggaaagatttacaggcaagcaggtgataagcaattggcaaaggaagcatttgatcgagctcgaagcattgatccttcattggccttgccgtgggctggaatgtcggcggaaaactatcaccaatctgggggcggtacagtaaatgaatcttttgaaagctgcttgagggctgcgcagatcctacctctgccagagttccagatcggccttggaacaattgctgcccgtactggtaatcttctttcacctcaggtgttgatgggtgtaaggcaggctgttcgtcgagcaccgcattacccagagtctcacaatataaatggcttggtttctgaagtgcgatcagattttcagtctgcaatcagattttaccatcaagcaagatttgctttaggcatgatgtacaattccaagtcagacaataaatatgctcttgctgatgtttcagtgaaccttgcccggtcattatacaaggccggtcttgcaactgatgcagtgcgggatgtgaagagttgagatctcaaggctgctgagcatggatggattacagatatatgct

SEQ ID NO: 19616 - DNA, 686 bp, Setaria italica
  Peptide Sequence Number=SeqID_85590
ttttccgggttttttgtttttcgtttttgttttcttccgggtgcgtgcacgccgaggagcgccgcaagtacatggtcttccgcggcgtgttccacaatttcgcccgctcccaggtgcgccgcgcgcttagggacacgcgccgccccaccgtcgccgtcgactgcgccttctgcggcagcaaggaggcgtgggacctctactcggcattctgcctccgcagcttctacggctaccacgacgacggcgagcccgtcgtgcgcgcctacgtctgcgagaatggccacgtcgccggcgcatggaccaagcgcccgctctactcctgaatcctgatcctggagagcggccacctcccacactgacatggtaccgcgtcatccactgcccttctccattgccatggccagatgctgctgctagcattagcaagcaaatattccgtatgatttagcgataaatatgtatgtgtttattctgcatacagtgatgcagatttcttcgagctctagatacatgcatgatgtgtattcaaatattgctgttcttcatgggatggttatgattggaataagaatgcgatgttgggctggtttgcagggtaggcgattaaagatttgcgtaaaaagattgtaatcctgctgccaagaatggctgcataagaatggaagtgctgtttgctagtttagaat

SEQ ID NO: 19617 - DNA, 318 bp, Setaria italica
  Peptide Sequence Number=SeqID_85591
ttcgcggctcgcggtcgaccgggccagtggccgtcgggggcagcggcggcggaccgggtggggagggccggtgacgggcaagagaaggaagagagaaagaaagaggagaggaagaagaaagctgccgtcccagctagctataaattccgggatcggggaaggaccgttgatgaggtgttttagcgtccgcgcatttctacgggaatgacggaggagctgtcggagtagacatgaatcctttgaagaggacatccgaatcatccgttcaagaagatgaaggcgtgcataaacagcagaagagggagtgtcaggatttca

SEQ ID NO: 19618 - DNA, 879 bp, Setaria italica
  Peptide Sequence Number=SeqID_85592
tacatttgacttgaaggccccaaagaagtcaccactcgcattgagaatgtttgtttttgctatgactatgttatgcgggatatctatttgctcaatgtgtatgaagcaactagggagtgatggctggtcaagaatcgtgaagatcgaagttgtggaacaagaacaaccatgtaacaagtccacagttcctccgtccgaggttcagtttgtgcattatcctcaaccgataacttacagcagggaggaatgcaagtgtaaccctgtccggttctttgcaattatctcatcacagcgatctggaagcggctggtttgaaacccttcttaacagccacactaatgttagctccaatggtgaaattttctccacaaaagaaaggagaagtaacatttcctctataataaaaaccttggataaagtgtacgatttggattggaacagtagtgcttctaagaatgagtgcactgctgctgttggcttcaaatggatgcttaatcagggccttgtggcaaatcatgtggatgtagttgactacttcaatcgaagaggagtctctgcaatatttctcttcagaaggaatctgctccgtcagttggtatcacaactagcgaataatcatgacagataccttaagcaattaaatggaacacataaggcacatgttcacacaaagcatgaggccataatacttgcaaaatacaagcccagactcaacacatcatcactaatttggcaactgaaacaagcagacgaatacacccatggcgctcttgaaaacctaaagaacacccgccacatcactatctattacgaggatctcattctcaacagaacaaagatttttgatgtcctggatttcctcaaagtgccgaagatgaa

SEQ ID NO: 19619 - DNA, 348 bp, Setaria italica
  Peptide Sequence Number=SeqID_85593
tgttcctttgtcgtctttgtattgtattcttgggtagtaccgtttttctagtcttgttaactttttaattaccaaacctcatcaagcctgaagttgtgcctcgctttcctcatgaaacccacaaagcaccaaaatgcttcatgatcttcctccatcactgcaattatcggtgacaagagatcactcattccttgacagtacccaatctctggatcatagagcgcgtatgcctcaagcaacgcaactagtcgtgcagcatgataaatcatgtaaggctccaaatgggttcaattaattcacttcttaacccttaacttagtttattttatttttgtttctttagtttta

SEQ ID NO: 19620 - DNA, 710 bp, Setaria italica
  Peptide Sequence Number=SeqID_85594
cctggttacgggcaaatagaacccagtctgtgtttgctcgaatagcatctacacgtataatgcgctgccatgtggcaaaatcctctggagttttgtcagatataaaaatagtctgacttagacgacgcgctccggacaagttttggtttcggatcacagttctcctccaaattggaacagacgggtgttctgtcagggtcctcttcataggaagactcagagtcagaagattctgattctgccatacattgatcaacaacagttaactcacttgtatcttcatccatgcattccacagaagcccagttagaactctctgattcttctgccttgcagcctaaagatttcaattctttcggcaacacacaagccctcttacgaacaccttcagaataaggtgactctggtccttcagccccatcagaaaagtcctcattcatgaactcatttataacattaagcccatttcctttgtaacaattcagaatgcgatggcactgtcgtctcagcttttcatattctttccttttccttatcttgatggtattcctgtcctcttcagaactgttcaaatcataaactccaagtagaattgaaccaggcatccggcggatgcctggttcaattcccccactgcggactttcttaagaaactttcttcccccatcacggagcttcccgtttgatgaaaatgacgattccagtgttga

SEQ ID NO: 19621 - DNA, 1711 bp, Setaria italica
  Peptide Sequence Number=SeqID_85595
aaaacatacaacagtgcacatttcttctggttaacttgaccatggattcataaaatggatggagtgccatcccaggaaactctgtttttgcctataacaggttaaacaatgaatagcttacagtgcctcagtaacaccaaatagtatttcagctttttctttgcaaggacactcaagtcctcgctctaagttacaacattctctatacctagaagtgggttttaagccgggaatgaatagtagataatagaataatttcagcaggcggtaaaggtacctcaatttttttgttgagacctacatctgttctaccgcaagggcggagaacagcacttaccagttaccaccagatcagattttatcatgaaggttaacaacaaggtcatgtgcatcatctagcagcctccagacatctagctgcccggccatgttgttgcactctcgcaatatctcatccatgctgctgtacttctcaattattagcttcctcctctgcaggacacatgcagcgattgcataaagcaacaggtcgtcggttggtggagcacgcagccttattcttccccaggtagacctcccaatcccagcccgtatggctgcctgatcagcccacataacttcccacaggcatacagtctgctcaaaagtgagctctctcctgaagagaacaactaccattctgtacacaaagaaacagtcctcagcctgcaacttctgcagatgcctatacaggtgtgagtctttgcgcttgataatctctgagacaatcttcaactgccttcttattccaacctcatcaagcctgaagttgtgccttgctttcctcatgaaacccacgaagcaccaaaatgcttcttcatcctcctccatcactgcaatgataggtgataagagatcactcataccttggcagtagccaatctctggatcatagactgcgtatgcttcaagcagtccgactaatcgagcagcatgataaatcatactgggctctaagtgatcataatctttcaatccaacagatgctgcagactgcattgctcgctctttggaaacttcagcctggttgcgggagaacataatccattcactgtttgacctaatagcatccaaccttatgatgcgctgccatgtggcaaagtcctctgaggttctgctagacctaaaaaaatctgccttgaacgaagtgctcctggtaaatttaggatctggatcacaattctcctcaccagacacggacatccttccagggtcatcatcatcggatgattcagaatcagatgattctgactccgctatgcatggatatgcataattcaactcatctgtgtcctcttccatacattctacaatgttctctggttgctcagcctcgttatgttcaggagtcagctcctcgagtgaagcaggacatacagcaagggcatcttcaaaacaaggtgattcagatccttcagcggtaccctctaaactagaacactcctcattactaacttcagttattgccttcaacgcatttcccttgcagccattcagaatttgttggcactgccgcctcagcttttcatactctttccttttcctgatcttgacagtgttcctttcttcttcagaactgttcaaatcataaactccaagtagaaatggccaaacttcagcccggatgcctggttcaattcccccactgcggactttctttagaaactttctt

SEQ ID NO: 19622 - DNA, 472 bp, Setaria italica
  Peptide Sequence Number=SeqID_85596
gcagcagccgtcgttcggtgcgcagttccagcagcagcagcagcaacaacaacagcagcagaagcccaacccttttggattcggggtgcaaggtgcagcaaagccatttcaaaataagtgggtaaggggacccttcagctccaacaaagcaaccggaagcggcgcagccaccaccagcagcacacacctcttgtacagatccggagtcctgcagacaacagattgctgaggattttaagaatgaaactccactctggaagcttacatgttatgctcacctcagaagtggtccttgtgacatcaagggggatattagctttgaggagctgagagctaaagcttacgaggatggtcggcaagggcatcctctgcagtcaatagtagagggtgaaagaaatctgcaaaatgcaaaactgatggagtttactaatttcctgaacaatccgcgtgtatcagtatcacaaactccaag

SEQ ID NO: 19623 - DNA, 688 bp, Setaria italica
  Peptide Sequence Number=SeqID_85597
gagattgcttgttgtcatacgtccatggtaagccctggaatccaatatcatgtaggccgcaaatttccaacacttccctgaacgcttacatctgcctttctcctcttggtgttttaagaaaaatgctcatactgccaaagtgcctaaggttctacatcatctgtgtcatcaaagaataaagaaaagagaaaaggaaaacagtaatgtgaactacggatgcctaccacaaacatttgcaaacaatgaaacaacaggacacccacagctgagcatgcttgtgtagctcaagaagacggacgggttatggtgttgcttgtgagcaaaaaaagctgcctttcaactactgccacagtgaaaggttcccctctgaatctggaagaagtgctcatctcacagctgcatttgtgcaaccaacgagcaaaggaactttctacttggtgaatcacaaagaatacagttggcattcatcgcatgtttcggatctcacgtgccacatccatgcaagaagcaattggacagttggtcttgattacatttgtacctatatgagatcgacaagctgaaaaaccttcctttcgcaatgaattgatgaggtaccgagtggtggagagttaactttgccgtctcgaatctcatcaagtcttatatatcctggagcagctgtggtcactctcctcatcattgtgtc

SEQ ID NO: 19624 - DNA, 377 bp, Setaria italica
  misc_feature (32)..(32): n is a, c, g, or t
  misc_feature (63)..(63): n is a, c, g, or t
  Peptide Sequence Number=SeqID_85598
gaatgctatggactctactatagatgcagcanagtttgaattatcacatgaaagaaataaaanaacttttctatagcagcaagataaacatatccatggtacataatccaaggaaaaatgagaaagtgcaaagactagaacaaaaggaaggataaattggagcagtatgcaccggttgtaccaatcagaaaaaaaaagggacagtgtctcacttagcagctttctcccatcatgcagcccgcaaaaattccagaccaaatcataaatggtgtgtacttagcaggaaaatcagtagcaatcagtcaattacaggcaatttagagaactgacagcaaaccacatgcttcttttccctacaccatggcacatgttagaaa

SEQ ID NO: 19625 - DNA, 271 bp, Setaria italica
  Peptide Sequence Number=SeqID_85599
ggcccttcacttccacctctttgagtttttaaggcgacttcgatttctgcttgctttggtgggaaggcctgcaccttctgcttctttctggcttctttctctgcctttgacattttggacttggcctttactttgggggctttctcctcgagctcttcctcacgggcaagttccctttctctggcttcaaggttcctttcaaggtaatactgaaatcatcgatgaagaaaatttcatcatacttgctttcctatgtcttgatatgattcag

SEQ ID NO: 19626 - DNA, 2171 bp, Setaria italica
  Peptide Sequence Number=SeqID_85600
ttttttaaagtctaagccaacctaatttgcattctttatatttaacgtgtatcaattagtacaggttgtatatgagaaagaattgcctgagccatggatcaatggcattgtacaatgtgtagttctaccgttggaataacatagctggatgaacattatggcatcctccattcatcacaaaaataaaccattcctccagaaactgcctgtattatgtacaaggtcacataacgcttcctgcttggagcttggttacagtattttcggtcttctccgacgctactaggattacttccagctgatgtatccagtgcttctgttggtataccggttatagcatagagcacaccaggcagtagcaaatactggtttctgccttgtactggtgttgctgatagcatacagcactgcaaatccctaagcgaggaaccatgacacttcacttccacctctttgagtttttaagcgacttcgatttctgcttgctttgttggaaggcctgcaccttctgcttctttctggcttctttctctgcctttgacattttggacttggcctttactttgggggctttctcctcgagctcttcctcacgggcaagttccctttctctggcttcaaggttcctttcaaggtaataattgtaatctcctttatagtcctggatagtctgatcttttacttcaataacccggttaacaatttgttttacgaagtaacgatcatgagaaactgttatcacagtacctgtatactctgatattgcctcctcaagcatttcttttgatgggatatcaagatggtttgtcggttcatccaagatgagtaaagtagatggagtcaccaagaacttgcaaaatgcaagcctcgccttctctccaccacttaaatattgaacttttctgtccagcatgtcatccctgaagttacaacggccaagcagacctttgatatcatcaagcttccaatcttctgcagcatctgctacagtatctagcacagtcttctccaaatcaagagcttctgcctgattctgctcgaaatagtttggcagcacattgtggtccccaagaagcacctcaccaccttgtggcttctccatccccaaaataagtttaagcagtgtgctcttcccacatccattgggcccaatgatagctatcttttcacctctctctactattaggttggcattgttgaacagagtcttatcctcaaatccaaactgaagattctttattgttaacacggttctaccacttcttccccgctcagggaatctgatctttagctgcttccgttggaaaggtttctcaatcaacccttccttttcaagcttctccaatttcttttgctcactggaggcacgccccgcgttaactccagctccaagtctgtttatcagttcctttgtctgttcaatctccttctgctgcttctcccacgcagcatactgtgcctcgaccgctattgccttggctagaatgtactctgagtagttacccttgtatgtcttggacacaccaaattcagtttccactatcttggtacacaactgatcaagaaaagccctgtcgtgagatatgatgaccatcggcacatcctgagtcttcagatagctctccagccactcaatggtgtccaaatcgacatgatttgtaggctcatcaagtagcagcaaatcaggatcctgaagaagtatcttgccgagggacatcctcatctgccacccgccgctgaaggacgcgacgaggcggtcggcgtcctccgacgcgaacccgagctccggcatgagcttctgcaccttgacgtccaccatgtcgaggtcgacgtccttcgaccgccgctgcaggaggtcgagctcgtcgaggaggcggcccatgaggtccatgtcctcggtggcgccctcgagcgcggcttgcacctgctcgagccgccgcttgacctccatctcctcctcgaaggcgctgaagaactcctccctgacggtgcgggaggcggagacctcgaactcctggctgaggaaggcgatcttcatgttctccttggccttgacgacggtgccgccgtcgggctcctcgagccccgcgattatgcggagctgcgtcgtcttgccggcgccgttcacgccgacgaggcccaccttctcgccgcgctgcacctcccacgga

SEQ ID NO: 19627 - DNA, 1147 bp, Setaria italica
  misc_feature (1121)..(1147): n is a, c, g, or t
  Peptide Sequence Number=SeqID_85601
gaccccgcggctgctccggcgagcggcgcccggtggcgagggggccgcgctggcggagggatgtcgcgatccggatgcccgttgttggggtctcggggatactgcggatggagcaggagtcgtgggagagcgccgggcagaacttgcaggatgcgttccaggatctcaacgccctcatgagcaaagctaaggaaatgatgcagctagcagagaaaatgaggctgaagctattaacaaacgcatctactgaaccaaattccaatgatgaagatatgggttctaagcaagacatgcaggatttgctattgagtgttggcattgtgtctcctgtgacgaaagaaactgctggtgctttgtatcatcagcagttgtcactacagctagcagacttcgtaagaataccgctggagaaagcaggtggtatgatggcactagtcgatgtatattgtctcttcaaccgtgctaggggaacagagttaatctcaccagaggatcttttgcaagcatgttcgctctgggagaaagttgatgtcccagtcatgctcaggaaatttgatagtggggtgaaggtgatccagaccaagacacatagtgatgaagaggtatttgcaagaatctcatcactggcacaaaagccagatgctcttcagaaagggattagcccaagtgatgctgcattcactctgggaattgcaccagctttagcaaaggagcatcttctaaatgcagaaaataaaggtttgttgtgcagggatgtcagtccagatggattccgcttctttatcaatttgtttaatgaaattgatgcccaaaatatttatacgcaaaaacctcatggactgtaccacgcctggatctccgttgctatggcgtctcagtgacactgtttagatcggctggagcatattgatgcgatcataatatcctttgaaaaaatttgatccaagttttgtctgaatatccagccactgtgtatcaagtgtaccacacataaagacgcatcatgtaacacaactaaagacgtgatgtagcaaatttatgtattctgttgaatgaatgagcatttgagtgaggtgtagttgctacttgggagttgtatacatgatcccatcaataaactnnnnnnnnnnnnnnnnnnnnnnnnnnn

SEQ ID NO: 19628 - DNA, 233 bp, Setaria italica
  Peptide Sequence Number=SeqID_85602
cacattgcattgccttgctgccttagagcctcaatggctaccatcagagaggagtccgactacgacagcagccggtcctcgctcacggcgccaggctcccgccggagctggatcagtgacattggcagctccagctcggtctcggtgcgctccttcggcggaggctgggacacaccagcctcgtcatgccgccataagccccacaaggcgaaccaggccgagtgggaggccat

SEQ ID NO: 19629 - DNA, 714 bp, Setaria italica
  Peptide Sequence Number=SeqID_85603
tgcgtatatcagcaagaaacctcctattggggttagtctaaagagcaagagctgcaaaacttgtagttcaaataacccttcagatattcgtttacttaatgttgcaaatagttggataaagctagcatgtatcatatagaagatgcccaaaagaattgcccctgttttggagggaacaatctgtcttgcatagggtgaaacaatgtcttttatggtctgcagttgcccagcttcctccagatgatatgctaccaggttcctccagatgaaccatgcccatgctctcgttatatccagctgactctgaacattttccttcagtttataataatcaatattagctccttttatgcaatccaaaggtgtgtacatcgtgtggatcttatgatataccacttcttgcctatatttaaagacttcatagtaacaaaatcgtgttcttctgaagtcatgggccaaaatccaccgcatgcaaccatgcatctctctcctgtgtccatctttctcttgccaatttctgaaatgctccatgtatggagcatcacatgacattcaacatcatgctcacaggcaacttacataaaagtggtagtcaattcaagttctagatcagagcatggatgggaagatgcatttacatttcaattttaccaaatatataaatcaaaccgaaccaaatcatgactgacgaaggcaacataactatctgattaa

SEQ ID NO: 19630 - DNA, 1301 bp, Setaria italica
  misc_feature (1)..(55): n is a, c, g, or t
  Peptide Sequence Number=SeqID_85604
nnnnnnnnnnnnnnnnnnnnnnnnnnnnnnnnnnnnnnnnnnnnnnnnnnnnnnnagtttcttggcaagttttgatccaattactagcaaatataaatagtcgaaatttcataaggctccctaagtcagccatcatgagcagcttacagatacataatagggtaccaaatgaccataaacagatcatccaagaccacacgatatctggataaccattaggacctacagccctgaagcgagtcaatagagtgttaagttagaaacatcgagggatctccaaagctcgcgcattaggttagccgcttctggcgcagctcatccaagacgttgtggaactgtcgtttggcatcattgtgtgcctcctcaaacctgctacgtgctgattggagtccaaagatctccacttcttgatgctctttgtcctttgctatcttctgtgattcctggcgaaggcgcccaagtttctgctccagctcagctatagctctatccttctcatcgagcagtttgtcaattcgggaggaggaagctgtcacccccacaatctgggaattcagcttctgtatttctccaagacaattggtgctatcagattttatgtggagcaatttggtcagggtgctctgcaaaaattggacatcaaatccatttctctctagatggctcagtgtattcatcgtgtcctcaaaccattccatgctgtggtctatgcttgcttgtgttataagcttcactgtgtcagcaaacgacaccatcagacctaatgccattccttcacgcagtcctggtggaaattgtcggagtggaaggaaatgcgggtgttgtggtacctcacagaacacattcatttcttcaattaaagaccacataggtgagttcttaacgaactgaacatgagaggcaggcaagtgcgaaggcatagagctcccagaagcagagcagctccttaatgaagaattgtccatggtgcactgtgagctgctagcattatgaagacgtggtaggattgacctctcatccactttcctgccagcctttggaactggatgatcaacagataggatacctgtctccataagatggttgcttttagctacttgggtagcagcatggtctgcatcagcatttaggttcacttgactgatgctgtcgattatagcagttggctcttcctccgacagactaccatgtatgtcaacaccttttccatcatacattgattcaaagccaggaggtatccatgggtatagtgtcctgatctgataattcagttgtgttcagtgttattcctcctaaaagta

SEQ ID NO: 19631 - DNA, 458 bp, Setaria italica
  Peptide Sequence Number=SeqID_85605
cgtaagcttgttgacagaaagagtaggatgacaagtacaaagcactgatgtagaaatacagtgctgatcaacagacatcatgaagacattggtcaaggcatggtcctgcagtcaacaacatgacatatttttcaatcattccgcgcttcatttgtggagaaaatgatgcatgcttcatatgtggcagagtagtcctcagcacttgactttctttgctctcaccataccattttaatggaattttctatggcagatatgatgtatgattgtagcgatcccactgttaattgtatcccgccaaaataattcaaatgcatctcaactacttttaatgttaaagcatctcataatactctaaagactaagcccctccttggcacggttcattgagcggcttttgatgaagccatgccaaacgctacacctcaaaatggcttgcgagaagaagctgggcaaaa

SEQ ID NO: 19632 - DNA, 479 bp, Setaria italica
  Peptide Sequence Number=SeqID_85606
gtgtatgtgtgatgtgtcctctacacaggtcgtcactttagactgtggagaagctttggtttgtctttctcatgccaattggatacagtcagcagtaatttcaccaatgtggcaaatgctctgagcacaaaccttttgcttccaaagcctctatgcatatatgagctttttcacaggccacatctagggctaggtgaaccaggcaattgctgctttcgtggttataatttgtaggtgtggtacacttccaactattaggtactctcaaaccgtaggaaactacgtaagctttgttgacagaaagagtaggatgacaagtacaaagcactgatgtagaaatacagtgctgatcaacagacatcatgaagacattggtcaaggcatggtcccggcggagcacctgactggcggtggcttggggcggatgctggcgagacgacgagaggcgcaccggtggcggcacgactccatgggtgcag

SEQ ID NO: 19633 - DNA, 620 bp, Setaria italica
  Peptide Sequence Number=SeqID_85607
ttgttctattctacgtacttttattctattttttcttaccattgttagaattgaaatgcgcataggaaatcgtatcaattggttaaagggcacgtatacttgacccgaggcagtagttttctttctgataaaacaaggaagaaacaggactcccacactttaaacaaaaaattgtcagtatttccctgtaggagctgtaggggcctgcctgcagtagtgcagtatgtacttgacatgtgtgtacaccatggtggtatgcctatagttttactcctggagtatgctggtaggtcaagagcagaggcaggcacaggcccctgtgctgtggctgtgcccacttcctcctgcatgcatgctctgctccctgccctgcactgcactgcctttctagtttttcctcttcctcttcctcctgacttgtctggtctgctccatcacaggacaaaaataaagctgcatcttttactatccggcggagcacctgactggcggtggcttggggcggatgctggcgagacgacgagaggcgcaccggtggcggcacgactccatgggtgcagcaccggcgacgtggccagaggctggcgggagtgcgggggaggtggggggaaaggggcggg

SEQ ID NO: 19634 - DNA, 244 bp, Setaria italica
  Peptide Sequence Number=SeqID_85608
cgaagcctctagcccatcaaggtaagcatcaatcacggcctcatatcttgcaatagagaaaataagctgcagtgacagcaatgaacatgtcatcaataagcttatgaaagcagttctgcaagacgtagttttaccacaacaataccataagaaggcaatgtcaagacaactcgatacttactgtgacattgacactaatgccattagagatgacttcccggatagaaggaacacattccgcggt

SEQ ID NO: 19635 - DNA, 1591 bp, Setaria italica
  misc_feature (1)..(25): n is a, c, g, or t
  Peptide Sequence Number=SeqID_85609
nnnnnnnnnnnnnnnnnnnnnnnnntttgtcatgggtaaacaaaatgtatcttagacaaacattctataaaacaaacatgatatatccagacaaataatctgctcaaaaattatttatcgaatagcgcatagcagttacaagccatgaacattggttacacaatgacagccaggcaagcctagaatacaaagccgattcagaaaattgagcgcaaccgtacactcacaaaactaagaggagaaccagcaagctagcattttattttgtaatcgttcaccggcgggtaccaattcatttcagttttacacacttgccgtcttgaggctattgcccttctcctgcaggctcacaagtaggctgtcaaagctctttttgaacgagtctacgccttccagctcaagctgcttcccgacctcatcccagtcgatgccaagcttctccagggcactgtacacaccttccgcctcagacacattcgcatcaactgtcctagaaacagtgccatggtcaatgaatgcctgcagcgcttggtcgggcattgtgttgaccgtgtcgggtccaatcagactgtccacataaagggtgtcaggataagcagggttcttgacgccagtggatgcccacaacaacctctgtttcttggcacctttcttggccaaagcctcccatcttggtccagagaatttcttctggtagagctgatttgctagtttcgcctgtgctacagcagcctttcctctaagggcaagcgcctcaggtgttccaatcttctctagcattttgtcaataaggctgtcaactcggctgacaaagaaggatgcaacactggtaactcgagataagtcactcaaaccagaagcctctagcccatcaaggtaagcatcaatcacggcctcatatcttgcaatagagaaaataagtgtgacattgacactaatgccattagagatgacttcccggatagaaggaacacattccgcggtagcaggtatctttatgtagacattggggcggttgaccactttgtgcaaccactttgcggcctcaactgttccctgagtgtcatttgccaacctaggagacacttccacagagacatacccatcagctccatctgtctcgttgtagataggctcaaaaagtttacatgcgtcttgtatgtcctttataacgagttcccagtaagcactctctgcatcctttccagctgaaatgagctgcttgaactgatcatcatatgcgcttgatgacgaaatggctttctggaaaatcgtagggttgctggtgactccacgaacaccactggcgataaagggcagcaagtcggtgacaggccggcagaggttgtcgtaccatggggacaggccctggagctcatagagatcatgaagtgaggtcctcttggtcggagcaccattcccttcctcggcagaagccatcgcaatgatggggctcctggcgcggccggcgatggagacgcggaaccggcgggcggaagggggcaaacccgaagggcggctgggcggagggacgtccggggggttcagcgccgccgccggccggggcgccgccagcttggacaccgtgccg

SEQ ID NO: 19636 - DNA, 352 bp, Setaria italica
  misc_feature (347)..(347): n is a, c, g, or t
  Peptide Sequence Number=SeqID_85610
tgggcaacgaggtgttcacgggcgacgacgagcagctcaaggccagcctcgtgcccgccatgcgcaacctgcacgcggcgctggcgcagctgggcatggacacgtacgtgcgcgtgtccacggccaactccctcgccgtgctcgccacctcgtacccgccgtcgcagggggtcttcacgcaggacgccgccccctacatggcccagctgctgcgcttcctcgccgacaccagcacccccttctggattaatgcttacccctactttgcctacaaggatgacccgacaaaggtgtccctggactacgcgctgtcgaacccgtaccacgtcggcgcggtggacccctanacgca

SEQ ID NO: 19637 - DNA, 255 bp, Setaria italica
  Peptide Sequence Number=SeqID_85611
gcggtggccgcggcgcagcagcaggtcgtcgccggcgtggcgtactacctcaaagtcatcgcgcgggaccatggcggtggcgacaggcccttcgacgccgtggtggtcgtcaaggcgtggctcaagtccaaggagctcgtctccttcacgccttccccgaagtagtagcgcaatgagccggcagaccggcgcgtagcagatgtatccactgcgtcgttgcatgttggttttgtgttctacttgtggtgaggtggg

SEQ ID NO: 19638 - DNA, 280 bp, Setaria italica
  Peptide Sequence Number=SeqID_85612
ttttagggttttggtttaatttctagaatctggatcatcgtcacaggacaatccttcatttcagaccatcagagaccagaagactgattctagtgattcaccttatccaacccctttggtcctcagaggtgacatccagactcctggaacagtatacactgcatgtatggggacttcaaagcatggaaagcgtgcaagagcaagcagacagttcatttaccctgttctgagacccattgagaacaagctacagtggatggaactaaaagccgctgagtca

SEQ ID NO: 19639 - DNA, 241 bp, Setaria italica
  Peptide Sequence Number=SeqID_85613
ttttaggctaaaaagcattgaggataatgagatgaccaccactgccaagtgtcgaccatccttgtaactggaggctgctatgggaacagcagacgaggagaccccgctggttgttcatctccaacctcctcctcaggttgtagcgtcggagtacgcaggtgatggatcagttgatatcaacaaacaacctgctctcaagcgcagcacagggaaatggagggcatgctatctcatcttaagg

SEQ ID NO: 19640 - DNA, 320 bp, Setaria italica
  Peptide Sequence Number=SeqID_85614
aggtactaaactttagtactaaacttaaactgctgccgggtcttacttcagctcagctgtagactgcattgttgcagtggccacaacacgcggtggcgaacctgggtggattccagacaacctgaatgaaggccatctcgactatttcttctggatgatggctgctctaagctttctgaatttggttctgtttgtgggttactcaatgaggcataaaagaatataacattttttagactcaagtggtgcagccaaagttgatgtctgtgatcaatagcctatgtagaccgacatgagatgcggaccagatagtacatggc

SEQ ID NO: 19641 - DNA, 447 bp, Setaria italica
  Peptide Sequence Number=SeqID_85615
cgcctggctcggagcatgctgcctctcaccacttcttggagctttctttgcagacacttgctggggaagatactggaccattgttgcatccgtcccagtctacatcatcgtaagttcagagctactaatgaaacctgctccgcaatgaatgtaacctacaactctgaatatctccgctttaccaggcaatgctcattctgatagcttcagcatcactcccagtattctcagcgtcctcctaccatgatgttcatagtgcagcggtttaccttggactctaccttcttgccatttcgaatggcggtctcaagccttgcatttcaaccttcggggctgaccagtttgacatcaatgaccgggtggagctggcccagaagggctccttcttcaactggtacttttcttgaccagcaccagcctcccttctgtctggcacagtgattgttt

SEQ ID NO: 19642 - DNA, 1136 bp, Setaria italica
  Peptide Sequence Number=SeqID_85616
tcttcttctaaagccttgtttgcttttcctctttcttgcaaactattgtgctgggaaattttgctgaagcctcctttctctgcatctgatagagtagctttctgcaacaccacaggaggctgctatgggaacagcagacgaggagaccccgctggttgttcatctccaacctcctcctcaggttgtagcgtcggagtacgcaggtgatggatcagttgatatcaacaaacaacctgctctcaagcgcagcacagggaaatggagggcatgctatctcatcttaggtgttgaattctgcgaaagcatggcgttcactgcaatctcgacgaatttagtgacctatctcaccactgtgctccacgaaacaaaggtcgatgcggcaagaaatgtctccgcctggctcggagcttgcttcctctcaccacttcttggagctttcattgcggacacttactggggaagatactggaccattgttgtatccgtcccggtctacatcatcgcaatgctcgttctgatagcttcagcatcactcccagtgttctcggcgtcctcctaccatgatgttcgtagtgcggtggcataccttggactctaccttcttgccatttcgaatggtggtctcaagccctgcgtttcaaccttcggggctgaccagtttgacatcaatgaccgggcggagctgtcccagaagggctccttcttcaactggtactttttcttgaccaccaccagctgccttctgtctggcacagtgattgtttggctggaggacaatgttgggtgggcggtcggctacgtcgtcccagcagtgctcatgctctttttcttcgtggtatttatcgccggctcgaggatatatagatttaggggaatggaagcaagcccccttacaagcattttccaagtggttgttgctgctgtcaggaagtggcatttgcaattgccggatgacagctcgcttctgtatgagcttaccagttcgccttctacagctgaagcaagtcaaaagacaagcattccaatcggttcaggtacttcaatttttgcaaagtgcaagtcaatgtgcagtccaattgatatacaaaaaaactgtttagcagtaaactacacaaactatggtgtctgataatagg

SEQ ID NO: 19643 - DNA, 1493 bp, Setaria italica
  misc_feature (66)..(66): n is a, c, g, or t
  Peptide Sequence Number=SeqID_85617
ctttgaaaaacacgtcacttgaaaatacaaggttggcaggaaatttacctcctatgaacaatttcnaaccgggcggagctgtcccagaagtgctccttcttcaactggtacttttcttgaccaccaccagctcccttctgtctggcacagtgattgtttggctggaggacaatgttgggtgggcggtcggctacgtcgtcccagcagtgctcatgctctttttcttcgtggtatttatcgccggctcgaggatatatagatttaggggaatggaagcaagcccccttacaagcattttccaagtggttgttgctgctgtcaggaagtggcatttgcaattgccggatgacagctcgcttctgtatgagcgttcgccttctacagctgaagcaagtcaaaagaacaagcattccaatcggttcaggttctttgacaaggctgccattgccccatcagacaatgaatcagtggtgcatatgagctcatggagactctgcacagtgtcacaagttgaggatctgaagatgctgctttcgatgtcccctacctgggggttatttgtgatatatttttcagtctccgctctgatgcaaccgacaatggttgagcaaggcatgttcatggataaccatgttggctcgtttgccatcccacctgcatccatgcccactgttagtgtgtgcagcttcctcatctggattcccatatatgaaaccatcttaataccattagcgcgtcgcttcaccggcaaagagaaaggcatctcccagtcgcagcgccttggaattggccaagctctgtccacactaaccatggtgcttgctgcattgttggagacaaggaggctggcgatcgcggaagccaacggcctgaaacatcaggatgtgcccgtgccaatgagcatcttgtggcaggtgccaatttacttggcgcatggtgcaactgcggtctttggtggcattggcttgacagagttcttctacgacgaagccccagtgaccatgaggagcctgtgcgcagcgctcgggcagctcgcgactgctgccgggtcttactttagctcactcgtgctcagcactgttgcagtggccacaacacgcggcggcgaacccgggtggattccagacaacctgaatgaaggccatctcgactatttcttctggatgatggccgctcttagcttgctgaatttggctctgtttgtgggttactcaatgaggcgtaaaggaagataacattgttagctagactcagggcgtgcagccaaagttgatgcctgtgatcaataacctaaataaaccaatacatatgagatgtggaccagatggtaaatgtcgtgtttcatctaccaaggggaaaggttgatctttgaatcttagtatactgtatataattttctaaacttctgtaattgtaaaaggcttccttctaaataattaattggtcagctccgtgcctccgcaaccaatttacacctacctaaaaaaaaaaaa

SEQ ID NO: 19644 - DNA, 495 bp, Setaria italica
  Peptide Sequence Number=SeqID_85618
tgtgacctgtgcacggtcctcccacgatttattcatgagctgacagtgtcattcatgctgtttcccattctcaggatccccagctaccctcagtcccacttggaagctgttacaacttacaagacagcaatatgttgagaaggatcgggctatcagcatggtggcatatctgcagtctgattgtgtgcacatcaaattccgagaatgagccccaaatagatggattatccgcatgaagaactagttgtctgaccaggatgtagaaagagttctggaccttcaggtttccttgacgtctgcatccaattggcagcaccccttttggtcagaccttgttatcgatttcaagctatattcccaaaagcacctcttgcttcacatcatctttatccaatcttggattaggtacttaccacaaaggaacaattgtaggttattatttgccatgaatatcagaaactggtcccagcaacttcttatcgaatccttcagcct

SEQ ID NO: 19645 - DNA, 1055 bp, Setaria italica
  Peptide Sequence Number=SeqID_85619
gattgttgataatgctcaatcaaaaagggaaataaattctgctgtcttcagatctaaccccacaagtagttcgagaacaacagagccttctaccagcaagcatttgaggaattttgggcctgatgttgagacttatcgtgatgagagaggacggattagagtaagtagggtcagagcaatgggaattcgtatgactcgtgatattcaaaggaacttggattttatcaaagagaatgagcaggtcaaaagtagggtacatactaatgtacacaaaggatcaactgtcagtgaagagcctcctgattttccggagcatctttttgaaagtaataagctccagagttctcttagtcttgatgaagattttttagaaactgccgaagacaaccatcagacctcatcactagtaagaggatcgaataacatttctgagagctcctgttatggaaacaaggaaacaatggagatatctttcatggatgatcaaactgaagtgaaggacaactatgatgatatatttttgcatttagcatctggaacggcatctgatttatttgctgacaatgattgtttggctaaaaatatggaagaacctgaaggttctgagtgtatttgggaggaaggtgtaattgaaggagaaacacttcccatcaaacttgatgagaagggtaataattctgcgccagagaattgcagcgatgatgaggtggaatgggaggaaggcgacagtcttgtacctggagttgcttccagtagtgaacataatacatataatgtactgaaaggggatctggaagaagaagcacttctacaagaagcaataaggaggagtttagaggatttcgacaagcaggcatctgagaatgtgagcactgaagatatgcaagcatccgttgaagatagacctttgcaattctctgatgatgttcctaaaatatctgaagctcctgttgaaactagctcacattccggagcagcacttgtgaaagagacaaatgaaaaatcaagaacagaaatcaattctgatgagaatgatatgatacatggtactggac

SEQ ID NO: 19646 - DNA, 344 bp, Setaria italica
  Peptide Sequence Number=SeqID_85620
cctatcccctgtgtgccttgcctatgcgtgtctccagtctaccccctgcgagccctccaaccccacacgacccacctcctcggcggcggcggctgcgttggcgatgcagatggcggcgaccaccaccgactcccaggcggccgtgccgcctcaccatcctcacgcgcacccccacgcgcctccgcagcacgcgcacccgcaccaccacatgccgcagccgcggtgggtcgtcatcccgtacccaccgccgccgcccatggtggccgcgccaccgccgccgccgcagttcgccaagcacttcgccgctgggccgccaccgccgccccaagcagcagggcgccgca

SEQ ID NO: 19647 - DNA, 354 bp, Setaria italica
  misc_feature (337)..(337): n is a, c, g, or t
  Peptide Sequence Number=SeqID_85621
atgccgccctgaaacacacacgagaagtacgcaggtgttgttctgaacctgaggagatcgttcctgtcagagtggaggcatacggcatacctgccagctcttgatccgtacgccgttggtggtgttggtgaggaagcaggtgtcgaccttcacgttctcgaccatgtcggtggtccggttcttgccgaggcttccgatgctgataccatggccaggcccacatgagatgtcttttacacggacgtcagagcaattgccgaccatggagacgcaatcgtcacctgtggagatgaggttgtccgtgatctggacgtgggaggaggagttgaggtggacnccgtggtgttggggcgt

SEQ ID NO: 19648 - DNA, 622 bp, Setaria italica
  Peptide Sequence Number=SeqID_85622
attcccctttttttttcttgtgtttccctctcgacaccaatggcgtgtacaatcgacaagttttggtatgacgacagctttaaacctgcaaagatcaggacttggcgaggcaggacggcgggaccacggcgccggcggtcttcccggacgcccggtagcaggacgcggtggcgtggccgccgccctccagcgtcaggttgacgttcttgagctccaggtcctggcacggcacggcgtcgctgcacgcgatgctgatcgcctgcgccgtcgccgacgtgccccggatgcccgcgaactccaccttgcgcacctccaccgcccgcgtctggttcgcgcatggcgtgggctggtcgcagtagtactggtcgatgattatggggttggagacgttcttcatcacgatgctctcgaaccgcaggtcccgcgcgaagcccatgccgccctgccagctcttgatccgtacgccgttggtggtgttggtgaggaagcaggtgtcgaccttcacgttctcgaccatgtcggtggtccggttcttgccgaggcttccgattgctgattaccattggtcctaggtccctacttatttgttagtttatttgttttctttttttactttacgttt

SEQ ID NO: 19649 - DNA, 295 bp, Setaria italica
  misc_feature (278)..(278): n is a, c, g, or t
  Peptide Sequence Number=SeqID_85623
taagtttaactagtagaaaatacttagttaacttgttcccttcccgtcctagtcatttgcatcctcccagtgattactagctagctagcccaagaactgccttctgcacatgccggatctgatggaggccgtagagaacgccctcgtcgagggcaagatcctatggctggcgcaaaccatcctggagggcatcttcagcggcgagcacgacgaatggattcgccacgttgggcttggagaaggcatgaagcaactcaagtctgagatcgagagggttnagacggtggttgccgct

SEQ ID NO: 19650 - DNA, 755 bp, Setaria italica
  Peptide Sequence Number=SeqID_85624
aaacatcattgtactgatgaaaattagagatgcagatggcatatcaggctatcagcctctttgaactaatagtgtgcactcaatgactcaagtcttgcttcatttcacctgtttctaaactcccctattctccacctgtttaactaacactacaaagaatacaggaaataccttacattcatgtaaaactctcagaatgaaggggcaaaaaagacaaaagaatgtacaatgggctttcaggtaagaatggccaggtaaaagtctagccactcacatttgaattgcctcttgtttcatcttgctggaggtatgaggccaactccgctgagctacatgcagactatgttcgccctctcaggcttgtaccctttaggatatataaacaccgaatcaacgcacaagccaccttttgtatgggtgcaatcaatctgcatcattgagaacttgagtttcatgggctcatcggggtttgatacgacaaaatcaccaacatggtaaagcttccagcctccttgttcatgtagatgtaggtaatactcagatgtcacttgttgctcatcagaggttgagagctggaaccgtgtgggcgtgacatcccacccgtgcatgtgctcggttgcacaaagccgacgacccatgcgcctatagggtcgccccaggtgaagatggaaaaaaaggctgtaggagccagcaggaaagcagaactcaagctccccatccacctcaagccaccaaatttgctgaagatagcaacg

SEQ ID NO: 19651 - DNA, 452 bp, Setaria italica
  Peptide Sequence Number=SeqID_85625
tgcccccccctcgcgacggcaaggcgaggccgcgagggatcgacgcgcgggctcgcggcgacgcctcctgcctactccctctcggctccccagctcgctcagcggcgaacggtccctgacgaccgcgtacgccttcaggcctccttccgctgaaagggagagtgggattcctctccagccgtcttcctcctgctgtccactggacgggcgtggagtggagatccattcggctcggatcgatttgatctccccggtccccggtactaaggttattttggttacattggatagttcttggtttttgttctgaagaacaaaatggataatgctcagaatgagaaccgaactgacaccaagcaagatgatgaggtgcgccaaagcaaacaggatgatgaggaggcccgccttgaagaatataaaaaaataattgatcagaagacttccctccgccg

SEQ ID NO: 19652 - DNA, 295 bp, Setaria italica
  misc_feature (291)..(291): n is a, c, g, or t
  Peptide Sequence Number=SeqID_85626
aaggaagccctctaactcgaatactgcaggttcttgtggtcgcattcagaaacaggaaacttgagtttccggagaaactggaagaggcacaagaaagaagtgctgagccaggctctattgaagtactccctgaaacaaatagcttgaaattcctcgacaaagcttacatcaaccgtgggaaagatggatcctggtcagtttgcagtacgacaaaggtggaggagactaagattgtgctccgtgtgcttcctctgtttgtcagctccatgatcggatatgtatcaaaccctntcct

SEQ ID NO: 19653 - DNA, 2008 bp, Setaria italica
  Peptide Sequence Number=SeqID_85627
ttccttcactccgtccaccatcatgcaatattgaagcagaacctagcaactgcaaagaagtccatggctggaatgccaccctgctgtacgccgcattgtatattagtgcacttggtgatggttgtatgcgtgcttgcatgccatcccttggagcggatcagtttgaccatgaagatccccctgaatcgcgccagcaatccagtttctttaattggtacaccttcgggatctcctttggaggttttatagggctgattctcatagtgtggctagagaatgacaaggggtgggacattggatttggcttgtgtgccattttaattcttcttggtttgcttgtggttgctgttggtctccctttctaccgcaaccaaatacctgaaggaagccctctaactcgaatactgcaggttcttgtggtcgcattcagaaacaggaaacttgagtttccggagaaactggaagaggcacaagaaagaagtgctgagccaggctctattgaagtactccctgaaacaaatagcttgaagtaagattcagagaaaaacacgtaccattttgtgtgcagtctactggttaggaagagtggagagcactaccttgtttctagtatatcctactataactatgtcatgcatcttgtcagattcctcgacaaagcttacatcaaccgtgggaaagatggatcctggtcagtttgcagtacgacaaaggtggaggagactaagattgtgctccgtgtgcttcctctgtttgtcagctccatgatcggatatgtatcaaaccctatcctcttcacattcaccgtgcagcaaggtggcatgacaaacacaaggctgggcaagatccgtgtttccccagctacactgttcatcatccccaccatattccagatggtaatgcttccaatctatgatcagttccttgtgccgtttttgcggaagcgcacgggctatgtcaatggcatcactcatttgcagcgtgtcggcataggcttcgcctccatcatacttgcgtcagtcatcgcagcagttgttgagaggaagaggaaggaagctgcagagcagatgtccctattttggctcacccctcagtttttcctcttgggtgtgtcagacgtgacatcgttccctgggctcctcgagttcttcaacagtgaggcaccacgaggcatgaagtcaatcgcggctgccttgttctggtgtgtcctagggctctcgtcattgctagccactttcctggtgcaaatagtgaatagagccaccaggcatgggcaccgtggagggtggctggaggctgcaagcttgaacaacagccgtcttgatctgttctactgggttgtggctgttgtcggattgctcgccttcttgaactacatgtactgggccaagaggtatgtctaccggcacgatccacgcgttgtcacaaatgaaccaccggtcgatcaggattcaccttgaaacatcacaggattcgcactcagatattccttcagttcagcaacagcaaaggcaggataactatgctctggtgactggtgtaccacgccatggattagtgtctgttctctaatctcatgctctgttgcctgattgtatattcagctaattggattggatgtcatccgtgatacttaccagtagtttacatttgcgaaatccttattatcgaaggcgatcttcatagtttgtattgtgcaagtgggtgttcagagacacgaatctgtcagattggtaagagctgaagtgccagcttgaatatattgcataatgaatggattttcaatgtatgttctgcaaagcaatgccaatgcagccatccaatcttttaggtgtccagacacaggagttgcatctcataaacttttctctttcaaggaatcaaggaggtcttgtttggatacgtagtgatcccctccaatccacgggagggccatatggattttggggggtgggattcaaaccgttgactagaacagcgcgcaacgttgccgcgcaataaatagccc

SEQ ID NO: 19654 - DNA, 1201 bp, Setaria italica
  misc_feature (1)..(48): n is a, c, g, or t
  Peptide Sequence Number=SeqID_85628
nnnnnnnnnnnnnnnnnnnnnnnnnnnnnnnnnnnnnnnnnnnnnnnnggtttttttttgtcctcaactgaaaatttttcattcctttattgcatatatacaatattggattcccgaagtttatgtagatggcaacaggccatagagaaagagaggatgcagaagagcaaaacgctcatatctcatatcttacaattctaaaatacaaaaactttcctttcttcaccagacattatccccagaaagatatcatatcaaatttaggccatattcgccttccagatgtacgattctgtcactatgtgatacattattgccaaaaaaatgcaagtcatcactcagcacgctacagatggttggtctcaaataacaagaccagcaacaaaatgagaagtttagccttccatactcaagttaggatggtgattctggcgagacaaaatggatgagaacaaatgttattgagtatcgacctcatcctaacctaaggttatgtccccaagtattccattaaatcatcatcatgcagcaagtcatcaatatctgggattgggctactgatactgatatagtctaaaggtaacccctcaaaggaactgccagcaaacttatcttgttcaccatagaaaggaaaatctataagctgctgcatgtctccaggaacagaagttgaatttccacctagcatatgatcaccataaggaatgttatcagtaggtgccttgatacccatgggaaccacatgttgatccatcatagatagtggtagtgattgttttggaggtaaggtctgataaccgctgggcagattatttaaaccaggatcatcatccgctacaaaattattttcagatattgacctggcactgtcactattttgataaggtaaatgctggcctcccatgtatatgattgtaggagtagcatttgcagctggggcgctatcgaagctattagcctcaacatcaggaagatggacctgtacttgagtgtctcctctgtgttgtaaagatacacttgtggtgcccccatggttgaagctgacaatctgggtagccatgccttggacttctacttgatccagccgattcatatcgggaatcaaatttcttgagttttctggtgcatcaactctttgtacatcaggctcaacaacagtagagctgtgacgtgctcttttcctctttggtggttcttttgt

SEQ ID NO: 19655 - DNA, 313 bp, Setaria italica
  Peptide Sequence Number=SeqID_85629
caacaactcagccgcgagtattcagacactttcacaatggtgtatttttcaccggaagagggccaaaagggttgtagacacatgggaaaagcagtttaatagtgcaacgaaggataagaaagtatcattcctatatctatcgaatgatatcctgcaaaacagcaaacgcaagggaggagactttgtgaatgagttctggagggttctacctagatcactgaaacatgtctatgaaaatgggggagaagatggaaagaagtggtggcaagattaataggaatttgggatgaacgttaaggttttggaccctatg

SEQ ID NO: 19656 - DNA, 250 bp, Setaria italica
  Peptide Sequence Number=SeqID_85630
tctcagatcaaggtcctgacccagtcgccgatgatctcggcgcttggcctcctccttaaagtggatgtaagtcttcaattgatctaaaaattgaggatgctcttggaaggaaatggcaatgctccactgtgcaggttgatttcaatttgcctgaacggtttgacattacttatgtcgattcaaatagtgagaaaaagcgacctatcatgattcatagagctgtccttgggtctttggagcgcttctttgg

SEQ ID NO: 19657 - DNA, 1434 bp, Setaria italica
  Peptide Sequence Number=SeqID_85631
ggaacacccgccacacgctccccgagctcggcgtcgcccgggccaaatggcggcaccctccgccccctttctccgctcccacccccaccgccgcgcgctcttcccctcgttgccgcgccaccgtccagcagccgcggccacctccctgcttgggttccctccccgcaaacccggctccccccgcaggctcccgtacaccgtggtgcggtcctcctccaccgcctcaccctcgccaccggtagaagaggcggccgcggccccgactaacgatgcggaggagcaggagagggtggtgctccccaccaacgaatcctccgagcgcctgctgcgcatccggcacacctgcgcccatgtgatggccatggctgtccagaagctgttccccaactccaaggtgaccataggtccctggatagacaatgggttctactatgacttcgacatggaaccattgactgacaaggaccttaagaagatcaagaaggagatggatcggatcatccgaaaaaatctcccgttggtgagggaggaggtgtcccgggaagaagctcagaagaggatcgaagcactcaacgagccctataagttggagattttggagagcattaaggaagaacctattacaatataccacattggagaagagtggtgggatctctgtgccggtcctcatgtggagtccactggaaaaatagacagaaaggctgttgagcttgaatctgttgctggtgcttactggagaggtaatgagaaaaaccaaatgctacaaagaatatatgggactgcatgggagaatgaagatcaattgaagacttacatccactttaaggaggaggccaagcgccgagatcatcggcgactgggtcaggaccttgatctgttctctatacaggaagatgctggcggtggtttagtattttggcatccaaaaggtgctatcatcagacatattttagaagactcatggaaacatattcatttgcaacatggttatgatctactatacactcctcatgttgcaaaggccgatctttggaaaatcagtgggcatatagatttctataaagagaatatgtacaatcaaatggatgttgaagatgagatgtatcaactgcggcccatgaattgcccttaccacattttggtatacaagagaaaactgcattcatacagggattttcctatcagagtggcagagcttggaactgtttacagatatgaactatctggtagtctgcacgggctattccgtgtaagagggtttacgcaggatgatgcccatatattttgtctggaggatcagatacaagatgaaatcagaggtgttcttgatctaactgagcaaatattaggacagtttggctttaagtattatgagataaatctttcaaccaggccagaaaaatctgttggcagtgatgacatatgggaaaa

SEQ ID NO: 19658 - DNA, 1641 bp, Setaria italica
  Peptide Sequence Number=SeqID_85632
atcactagataacatgaacaatggtaaaggtggccttcttcttttttccttttttgaatgataaatgcttcgtcctctgtactactttttgggcttttttattcttttttgtgtgtttaagctattagattagatgcaggcaacagtccatagagtgacatctttctatttcaaagaaatatagcagagattctgacacccaagttctttatgttccttttaaacatgtaatatccttcagttatggaatatggatactctactctgttacattttgctaaaaaccttacaaccataacactagatggttgctactagttttactctgccacaatataaggttcaaaactgctcctggtattgttttaaatatttctatttatgtatgagatgtatcaactgcggcccatgaattgcccttaccacattttggtatacaagagaaaactgcattcatacagggattttcctatcagagtggcagagcttggaactgtttacagatatgaactatctggtagtctgcacgggctattccgtgtaagagggtttacgcaggatgatgcccatatattttgtctggaggatcagatacaagatgaaatcagaggtgttcttgatctaactgagcaaatattaggacagtttggctttaagtattatgagataaatctttcaaccaggccagaaaaatctgttggcagtgatgacatatgggaaaaggcaacgattgctctgaagaacgcgttggatgataaaggttgggaatacaaagttgatgaaggtggaggtgctttttatggtccaaaaattgatctaaaaattgaggatgctcttggaaggaaatggcaatgctccactgtgcaggttgatttcaatttgcctgaacggtttgacattacttatgtcgattcaaatagtgagaaaaagcgacctatcatgattcatagagctgtccttgggtctttggagcgcttctttggtgtcctgattgaacactacgctggtgattttccactttggcttgcaccaacccaagcacgtattctacctgtgacagacaatgagttgcaatactgtaatgaggtggcctcagaactcaaatcaagagggttccgtgttgaagtttgccatggagagcgcctaccaaagctaataaggaatgctgaaacacaaaaggtgccactcatggcagttgttggtcctaaagaagttcaggcgaggaccctaactatcaggtccaggcacaatggggagatcggtacgatgcctgttgatgaattcatcaccagacttcaacttgctgttgcaaacaaatcttcgttgtaaatccttcgattcactaaaggttttagtccatattgtagagcattagatcctctgcacatagatctgttcccacaaagaaaaatgacaggtgaggtctgcaggagcagatccaacaatttttgtgcatagttgtcaccacaggtcacagcatctctcttacagaaatccaacatactactctgaactctgtacattttgactgcaagggatgcttagttaacacgtccaggtcgtgatcactgccacgagtaccattgcttggtcccgacctaaaccaaaaaaaaaaaaaaacaaaaaaaaacctaagaagaa

SEQ ID NO: 19659 - DNA, 575 bp, Setaria italica
  Peptide Sequence Number=SeqID_85633
tttttagtacaatcaactcaagagcaattttatttccgttccagtacagtagcacagacatccatatactgaaaccgagcgacagaacttttcatcatcatcgtagaactatgttacaaatcaggcgccaaggcaaccggccaagtcgatcttaaaccgatctcggttgccgaaagcccaatcagagacacgaccgctgaaactgaaagccgagctcagttcggcccccagcagctgaggtacatgacggtcctcatcccctcctcggccttgtccgcgcgcctcctctccgccgccgttgccgccggggccatcttcttggcctgcgcgaggctgcgcacgttggccttggcgttccggtggacggaccgcagggcgtagttccagcggcagaggcccgcctggtccttgagcgcctccacggcgcccacgctcatcgccaccatccacgacgccttcgccgctccggccatctcctcgagtcctggtcttcttccttctcgggtgtactagagagcttgcttggtgatcgctgtgatcagagagagagtagtagttagttttttagttttttt

SEQ ID NO: 19660 - DNA, 1280 bp, Setaria italica
  Peptide Sequence Number=SeqID_85634
tattaagtcaagctctaatggctcttggcatcctgcttgttgttcttattgttctttttcaggggatgaaattgctaccaatggggaagaaaagtttattttacctcacaatttatggatctgtgataggtgttggttcctatgtttttcactacttctcaacattggtctcttctattctggaaaactttggcttgggtgaagagatgtacaaccctgtttcactcttcctggtggtagcaattatcttgactggagctggttttggctattggatggtcaggaaatttatcctttcaaaggatggaagtgtggatgctgggatagcacaatttgtgaagtgggccatgcgtgttgttgctacattctttgttatgcagagcacacttgatcctcgtctagcaatggttgctcttgcttcttgctggtcggtttgcgctttgttgacgggaaagaaagttcagaagaaaacgacacagaagcaaaagcaatcaaaggtttcttctcagctaatgcttacccaaggatcacccagcagtcctcaggtccagttcttaagtccatcatctaaggtaggctttggaagaactgcatctagaagttcagccacacagtatggttggagcaatttggccaatggaggccgggtctcctccgcacttacaaatcaggtagtacccaaacaagacaaagacgaagactactactccaccttccacaacatcgaaccacggaaatattcaaagcaagaatgggaggagttcacccaggaatccaccaggaaggcactggcggaatgcaccgcaacccccgagtttgcccagtgggttgcggacaacgccagccggctgcgagtagagaaagatgatgacctctctgaggaggagactattgagagctcctcaagctcggaggaaaccggggaggaacccgatgcagcagatcctggtctgtggagattgtgggggtagcatgctggttcaacttgcaagggttccaagcatatgctgctaccgtgcacgtgtgaagagtaggaagagtagtttagcagtagggtggggtggtagcattcgattgtttccgctgttgttgccatggttggtttagttctgcccggtgacagtagttggttaaccatctcaggtcaaatttggtactaggttagatgtggctgtgggttatttgtggattggcacttctccagaagtgatgtatcgaagggcttaaccaatgtaattaccggcagcattgagataaccctattgaaaaattgggccatt

SEQ ID NO: 19661 - DNA, 453 bp, Setaria italica
  Peptide Sequence Number=SeqID_85635
atgatatccttgattttcaaaattggcacaaatcacaagttacagacagtccacaagtgaagagatgcattgaaatagcccaactctgtgtcaatgctgatgaacataaaagacctactatagatgaaatcattgccatgctaaatgagatccacatgtcaagaagtaattcagtgccttcactagaaaagatggaaggccagaaaacacagccgcaaaacgtggcaccgattgagcgttcctccgtggagcatatgccagggacaaaggcaggaccagagtggaatcgagagtcagccagagcatcaagtagtcagcccccgccagtacgtgcaaacaaagaagcacaagatgccaccaccactcagaaatcttggttccaaagagatgaaagtgggccatcccaccaatcatttgcaccgcgacaaacggagagggtggtagccaaggaga

SEQ ID NO: 19662 - DNA, 506 bp, Setaria italica
  Peptide Sequence Number=SeqID_85636
cagacttcaaggagtaccagagctcagaagcatcagtattcagcacacagtgcactagttgcagaactttagaagagaacacacaatgagctattacggcagcagctcttctggtggacgaagtggtaggagagtcgactacgggaggacatatgtggtgaggccaaagggaaggcacctagccaccattgtgtggctccatggcctaggtgacaatggtgcaagctggtcccagctcctggattctcttcctctgccaaatatcaagtggatatgtcccacagcagcaacccgtcctgtcgctgcttttggtggattcccttgcactgcatggttcgatgttgaggacacatcaatagatggccgtgatgacactgagggactggatgcttcagctgcacacattgcaaacctgctgtcttctgagccatctgatgtgaagcttgggattggtggtttcagcatgggcgccgccgtggccctccattccgcagcatgctatgctc

SEQ ID NO: 19663 - DNA, 347 bp, Setaria italica
  Peptide Sequence Number=SeqID_85637
caaaccactgtactgctgcatagggttgaccatttgggcagcatcgacgatgagatcatctgggacagagaccacctcaattgcattgatgaatgcaattccatttgacggcttgaaggaaatcaccagtgtgtcacgggtgatgttcaaagagtactccttgaacaatggtgcagtcttgtctggctgctggaagtcacttagcaggagcacatcttgggtcgacacagtgaatttggcaagtgcaagatcatagctctggtaggtgaaagggaagaagtagaggcggatgaaatgccgaccctgcttctggatagggaaggtgtaggatgatgggctggtgaaga

SEQ ID NO: 19664 - DNA, 629 bp, Setaria italica
  misc_feature (6)..(6): n is a, c, g, or t
  Peptide Sequence Number=SeqID_85638
cgccangttgatgtcagcagggatagccacaattggatgaaatttacctctgatgtcacaggaagagaaattgtattaagggatgtgtacagatttcaccattttaccaatggcagttgttcatgtggagacttctggtgaagtatgtgctgtattcattgccaatgtttccatttgtgttttaaaaaaagtttccattagcactcattgtgatgtcacgttaagtattttatgtgggacctacaaaagttgttctaatgtggagacttctggtgaaataatggcagcaagaccagacagtacgatgttttttttcttgaacaacgtaggagaactgagtgtcatctcattaagaaaggaagtcatacaaaatgtacaaaggtgaagacatttgttgccctaccagcaaccttgcttcattggaagatatggtgatgaagtatttgccggtatgcaggtatcagcagacctataaaacctaccaagtggtgggaaattggatacaaaaccttgttctcgggacctgaatctccaagatgaacctaggaaagaatttcccctactcccaaccttgttcccgggatccaacaactgagggagtgctcttctgctacaaacattacggctgt

SEQ ID NO: 19665 - DNA, 1110 bp, Setaria italica
  Peptide Sequence Number=SeqID_85639
ttccccgtagtccttccgttgttccgtcgttcggtcccgcaccgtccaaggactacgagttcactgatggaaatggagaagtggagctgagactggacatccaaaagcttggcattgaaagttcaaaagacgtttttgttgatgtggatgatacgtctctattgatcagagccaagtctgatgggacgctgaggactttggtgaatatccaaacactgtttgataggattaagtcttcagagaccatatggttcatcgatgaggatcaattggtggtaaacctgaagaaagttgagcaagagttgaaatggcctgacattgatgaatcctgggagtccctcacttctgggatcacccagttattgacaggaatcagcgtccacattgttggtgataacacagacattaatgaggcagttgctaaagagattgccgagggcattgggtatcttccggtttgcacgagtgagctgttggaaagtgccactgaaaagtctatcgatacatgggtggcttcggaaggagtggactctgtagctgacgcggaatctgtcgtcctggaaagccttagcagccatgtccgcactgtcgttgcgactcttgggggcaagcaaggagcagcgagcagattcgacagatggcagtaccttcattccgggttcacggtttggctgtcggtgtcggatgctagcgatgaagctacggcgagagaggaagcccgaagaagtgtcagtagtggaagcgttgcttacgcgaaggcggacgtggtggtgaagctgggcggttgggacccggagtacacgcgagctgttgcgcagggctgcctcgttgctctcaagcagctgaccttggcagacaagaagctggcagggaagaagagcctctacatcaggctaggttgcagaggtgattggcccaacatcgagcctccaggctgggaccctgaatccgacgccccaccaaccaacgtctgaatcatcgtctcctccacaattgtattctagggatgataagatgataacattacactaggattctactcatcatttcaattcttgtcaaaatgcatgctggggactccgttttggcctttttggatgtaacaaaggg

SEQ ID NO: 19666 - DNA, 1572 bp, Setaria italica
  Peptide Sequence Number=SeqID_85640
aatcttatgttcttcggttgactgtggtgaaaaaccggtgccaataggtttgcggaagaaatctagagaatatgtaaatgcatgcatgccaacatgggcaactttccggcataagtaaacagacaattaatctttgatgcatatatgcagcaacttatatctccagatctagcacgggcctaaaacagcagcgccaatgctagaaattggactactaccatcagagacaccttcaaatctggcgtcggcgcagatgccgtctcgaatatgagccggctgccttcgatgtcatacgccatattcgtgtccgtctgcagcaagctgcccagtagcgacccgccccgggacggcagaatggtcaggcactccaggttggtgttgttgtccgcgaagaagtagttgtacttcttgagctccatcgccgcgttcgtgccgtcgaacaccagtgtcagcttgggaaccaccatttcgtctttgggttgcaacgtgtagcacaggtcaagaccaagcgccgagccgtccacagcttccgccgtgatccggctgacgaatgccttcctgacaacgttgtacgcggcctcgtcgaggtacgtgaccgggacggtcgtgctcaggaacaccccgccggaaccgttcgactggatgtcgaaggttccagctgggatgccgttgagctgccggccgtcgatcattatgccggtgagcttgacatagtaaaggccagggtttgcgtcgttgttgagaaggggagttgagtggctgttctccgtctgcggaacggcgtcatagccgaactgcaaggggctgggtccgtccgaaaccaagaggtaggagaaccaggagagttggagctgggacaccagggataggctccccctgctgaagcccaggacgccggaggcgccaaagaaatcaccgtagctcgccttgctgcagccgaacaccacgtcggggaactgagtctgaccaaacgtgaacgtgtcgttgccgaggtagccggtcgtgttggtgtagtcgtcgtattgcataaggtacgtgcagttcgccgcggggtcagggccacattgctgcttgatcacgctctggcacctctggctgatgcagggaaccccggcgaaggtgtccgacgtacttgggtcgaatgtggtccccggaggtggcaagcaggcgtcagcgctacacgcgcactgcgcccacacgagctcagtggtgatgtccaggatgccggtaatgttctgcaggatcgacgtgccgacggagaggttaaagacgtagaggccggcggtgtcggccgcttttgtgccctgcttctggccttccggagttgacaggacgttcgggatgacgtccaaggcgtgatccttcaagaagtcgaaggcttgcttcttgaagtagtcgctgatcttcttcgcctgtgctgaatttatcttgaccggcggccggacggccgccgacaagacaagcggcgctggcatgaggagggggaaaataactacagctaccagtacaagtgggaggaaccgacccatcgtgttgcagcttgcacaacctactggcttccagctattgcag

SEQ ID NO: 19667 - DNA, 340 bp, Setaria italica
  Peptide Sequence Number=SeqID_85641
aagttaagcgtccagaacaaagaatgctgactgaagctagacacgtgcctttaaaaccgcagatatccactccagctagtaatattagtgcttcttctagacccatatcaacagatagtaggggcaacattgctgcctcaaaacgtttagatggaatgaaaaagacgaggcttccaacaaatgcaaataataattcctttttaccaaaattggttaaatcatctgttagtggcacttctcaaccacagcgtccaaatttgtcatcaggtacagaaaaatttaagtcaatcttcagggatatatctgatgatgaagatgatcctttggatcatgcacttga

SEQ ID NO: 19668 - DNA, 367 bp, Setaria italica
  Peptide Sequence Number=SeqID_85642
tccacttcaactacatcacagatccatcacagctactacatatgaacagctctaagaaactcctaaacacgggccagtacgaaacgaggagaagcaagaaaacttgagaggagacaccttagcgccaccactttactccaaggcgtcgacgatgcggcccacgagcgcgtccatgagccttcgctgcgcatcaaggtgcctgagcgccatctccatccgcatcctctgcgcctccctggcggcctccatcctcctctcctccgcccgcagaaacccctctccgatggccctcagcgcccccaccacgtcgctcagtccactcctccgtccccggccatcgtcccgccgcctcttcctcgggcggggg

SEQ ID NO: 19669 - DNA, 239 bp, Setaria italica
  Peptide Sequence Number=SeqID_85643
cgcaggtgcaggaggtggcgctggaggcggctacggtggaggagcccctgccggtgccaccacagcctctgcccaaacctgagccactgccactgccaccgcagcccctgccgaagccggagccgttgccgatgccaccacagcccctgccgaagccggagccactgccggtgccaccgcaacccctgcccaagcctgagccgcttcctgtaccaccacaacctctgcccaagcccgag

SEQ ID NO: 19670 - DNA, 573 bp, Setaria italica
  misc_feature (553)..(573): n is a, c, g, or t
  Peptide Sequence Number=SeqID_85644
gggtcgggcttgggaagaggctgtggtggcaccggcagcgggtcgggcttgggaagaggctgaggtggcaccacagcctcttcccaagcccgacccattgccggtgccaccacaacccctgccgaagccggagccattgccggtgccaccacagcccctgccccaacccgaactcccgaagccggagctgccacctccggtgctggctggtgagcttccaccaaagccggaggtagtgccaacgaagccggaggtggtcccgctacagccatgatcgatgagctaccatgataactctaggggcgcatattattgaaacagcgctctagacattattttctattgtaatttgctcattcgtgtgacacacatgcatgcgtgctgggtaattgacgatattgtatagctagcatatcagatttggagcgtgagcgatgtatgtgcatcgccatgccatctaatccggccgtgactgtgatctctgtgtgttctggccgagatccatgtgtataaataaatggattcgtttgtataattaactattactgtaacnnnnnnnnnnnnnnnnnnnnn

SEQ ID NO: 19671 - DNA, 1168 bp, Setaria italica
  Peptide Sequence Number=SeqID_85645
cgatcacagaagccaaatagaaagactagggaaagacaagaaaacgtacaagggactaatggccaatcggccaaccgcacgcgctcgggtgagcgggaagacaccgacatgaacgcctccggtgagctcgttcttctataaataccgtagctcgccttccgttttcagtatctagtagtcagagttgatcgataagaagccatggcttccacgaacaccatgtcctccttcatgctcgtcctggcgttgctgctctcatgcggtggcatgagcaacgcggcgcggcggatgcaggagctcccgaagcctgacctgccgcctcttcccaagcctgaagaaccgaagcctgagcccctgccggtgccgccgcacgccctgccgaaccctgagccgctgccggtaccaccacagcccctaccgaatcctgagcccctgccaaaccctgagccgctgccggtgccaccacagcccttgcccaagcccgagccgctgccggtgccacctcagcctcttcccaagcccgacccgctgccggtgccaccacagcctcttcccaagcccgacccattgccggtgccaccacaacccctaccgaagccggatccattgccggtaccaccacagcccctgccccaacccgaactgccgaagccggagctgccacccccggtgctggctggtgagcttccaccaaagccagaggcagtgccaccgaagccggaggtggtcccgccacagccatgatcgatgagctaccatgatgactttaggggcgcatattattgaaatggcgctctaagcaaatgcatgcgtgtaatttgctcattcgtgtgacggacatgcatgcatgctgggttattgatgatattgtatagctaggatatcagatttggagcgtgagcgatgtatgcgcatcgccatgccatctgatccggccgtgattgtgatctgtgtgttccggccgagatccatgtgtataaataaatggattcgtttgtatatctatgtatttctgtcgcaccattcatatcgagttcgaccctaaattaccgaagaaatgcatggattccagaatttcagtgaagtcatgcatggacgaatgcattacatgtgttcattgaatgctagaaaaaaagacctcctaggctctcttcgtttattcaataag

SEQ ID NO: 19672 - DNA, 887 bp, Setaria italica
  Peptide Sequence Number=SeqID_85646
tttttttttttgttaacacaagaagcaacgtttattgattgtgatgagtcaagctacaggttataattttacaagtggttgatcaggtacatcttatgaataagatacttagcacagctttgctggtgtgatcttgtcaaagcgtttgatccggcatatgctccaaactaggttctagtctgctcttcttcaccttcaaaattgtacttacacacaggtagttgaacctggtggtgggcagcactcatgggtttttgtggctgcagccttcagaatcaccacctccgcaccagtgaagtgagtaactcaaaaagctcgaaaggacttccacgcctgtagacatcatcctgctgcttctgtccagtggaaaggatttgagaaaccagggcacgccaagctgttaacaagacccctgtacttcccatggtcaccaagataaaaggagttggtggaatatgcccagatgtcactgctcggatggcaagtcccaacggtatcccaacagcccatgatttagctgcagtgataacagcacttcccacgccattgcgccctttcgcatcctcgccaaatccaccaaggaggtaggcgctgagtaaccacccagcaatgaaggggtcggcggtcttgaacgtctccgcgtcgagcacggacagcccgtggctgaacctccctatcgcggagaagagcagcaggcagagcacgtccccaccggccagaagccccaacttcgcgtaggagacgagcttggactgggcgccggcgtccccgggcttctctatctggatgacgccctcgaggggcacaccgtcgtcggcgacgcggacgaggacgggtcctcggtggcggcggagccggaggggccctcggcggccggggccggcgcg

SEQ ID NO: 19673 - DNA, 915 bp, Setaria italica
  Peptide Sequence Number=SeqID_85647
tcgttaaacccagaaggctctcctgctcctcctctctcccggttgcttcctcgcggcggattcgtgttccccgcgtccgcggcaaggggaggatctcgctccggcaagaggagaggagctcgcgagatggggatggccgccgccgcagccggcgtggtgaactacccgctcgtcgcggcgctcctcgcgttcgccatcgcgcagtcctccaaggtcttcaccacctggtacaaagataatcgttgggatgctagacagtttatagcttctggagggatgccatcatcccactcagctacagtgacagcacttgcagtggctgtaggaatccaagaaggctttcgtagtgccacctttgcaactgcactggtctttgcatgcgtggtgatgcatgatgcatttggagttcggttacacgctggaaaacaggcagaggtgctgaatcaaattgtttacgagcttccacaggaacacccattatcagagacaaagccattgcgtgaaatccttggacatactgttcctcaggttgtggctggttgcatccttggaatcctaatggctgtcgttatgcacttagctgtggggagttcttagtcaagtggtgttcatggatatctgcgacacgtggtcaccatatatctcatcggtgatgacttgtaaagcttgaaaacatgatcttactggtttgcccaagtggttggatcatcaggatatacgaagttctaactgatgtagatctgctctatataggataatagtaggttgtagcttgagttggtgctgtaaatctaagggtgcgtttggcagagctcccagagctgattgattccagcaggagttctgccaaacagttttcagagagaagtgatttcctgctgattctatgaaattctggaaagtgattctctgaaa

SEQ ID NO: 19674 - DNA, 626 bp, Setaria italica
  Peptide Sequence Number=SeqID_85648
ggttaatctagatactgagtatgtatatcagacaaaattcatggacatgcaggacagcacccaaaaatgacgtgtatctgagtaaacgctaaaaggcagtataggatccgaacccggttatacctgctctttatgcatctctttctgatcttgatcagattcaactggctccttattttttcgccatggctttccagcatgcataaggtaaggttcaatgtccacaagttttctttgcttgtgggattcacagatccaatcctttgagataatggttccattatccgcctgaacttgtcggaacttgggggtgttagcaaatgcacaaacaagaagggtgcaatccgatgtccaatcaggccgatactctgcccccatatccaatgcttgtgaccgcagcatgcccctctccggattcacaaaccctgacagcacaaagacgaccccgtccagaagtttggagaaatcagaccccttctgagccttctgggacgtgcctgcatgtttcttcttgcttgaatcgtcctctccatctttagaagaacccatccaagaagggaggcttctcgtggacattttattggaaaaacgaacttgctaccctacttctttcggttttctaatta

SEQ ID NO: 19675 - DNA, 336 bp, Setaria italica
  Peptide Sequence Number=SeqID_85649
gccggaaaataccaaatttcagagttcgccggctcgccgctgccgccagcccgaccaatggagctcaccgtcgtgccctccatctccctctccccgctccgcgccctccctctccccaccaggagggcggcgcggcggccggccttcgcctgccgctgcagctgctccccggacgcgtcccaaggggccacccggcggtggttcgcctccctcctcaccgccgccgcagcggtcggagttggcgtggccggaggggaagccggcgcggtgtccaccagcaggagggcgctcagggcgtccaagattccggagagtgagttcaccagcctgcccaag

SEQ ID NO: 19676 - DNA, 381 bp, Setaria italica
  Peptide Sequence Number=SeqID_85650
cgtaacaccaccaccaccaccaccaccagccgtgtctctagcgaggcgagaagcacgagagcggcgtgaccaccgccgggccgccgcgccgggaacacacagcagccaccggagatcgatatggagagcgcgatggagaaggtatgggagtcggggcggcggatgagccggagcatcgggcggggcatgggcatggaggcgtggggcgtcgacgaggccttcatgccgcacccgtgggcggggtcccgcgggggcagccgcgggggccggagcggccgcgacgacgacgaggaggcgctgcgctgggccgccatcgagcgcctccccacctacaaccgcgtgcgcaccgccatcctctcctcctccacggaggcagaggcc

SEQ ID NO: 19677 - DNA, 328 bp, Setaria italica
  Peptide Sequence Number=SeqID_85651
aacttggtgcagatttcacagtattgtaccctgacaaagaatactgtattgttttgcatgccattgcacccacataacataaattcgttcccaaagtttcaaaggtacacgactatacatttcaacactgcaaagcggtatggaaatgaccggtctttgacatacctcaattttggtgcggtactccaatgggcattcacagacatgacattctgctctatgaggtgctcgaatggatttatctgtcttaacaaatgcaaatacctgctcaccacaattcgggcaggagcctttcagtgcaaccaaattgttagacagtaagcctcgc

SEQ ID NO: 19678 - DNA, 867 bp, Setaria italica
  Peptide Sequence Number=SeqID_85652
tttttttttttttggggttttcatctgcagcatttggaaatctcagaaaggaatgtatatgctttacaaaaatatttggcttgatcaatctttcaatggattcgtacacaataagcccttctgatcaagaagagtggcatctgaaaaatgattcaattgatcagaagagtgctatctcacaagatgatcttaactttcttcagcagctgccattggaactttagtcgtttatccacttccgtttcctaggatgcccttgcttcactagataaactcggccgtagacccaggttcttctaggccctgacaacgatttctcaattttggtgcggtactccaatgggcattcacagacatgacattctgctctatgaggtgctcgaatggatttatctgtcttaacaaatgcaaatacctgctcaccacaattcgggcaggagcctttcagtgcaaccaaattgttagacagtaagcctcgcagtgcaccaacggacgcagatgcaatgggataaccaaccagatagcccaatccaactaaagccaagtcgttaactcttgttatcgcatcaagggactctgcaccgtacaagaggtgccttgctccgaatgcatctccaaacgcaaggttcagggtgtagagactgggaacaaggaaggctgaggtgccaaacaggagtagcaacatccagatgcttgataatgccataaacattgattggtcctcctgcccagcatcggcatacgttgactgccttatgaggctgcaacgggggtactttacaacggatttggagccataaagccggagcttcagctcaactttgtcaaacatgtcatcgacgatcaatggctgaccgttgtagtagg

SEQ ID NO: 19679 - DNA, 575 bp, Setaria italica
  Peptide Sequence Number=SeqID_85653
acgaatttgaatacaatgcagaaagccatctctgcaacttccacttgtacaggtaactaggtaccggaaacgaatacaacgaatctccaaaggcctactacttactccacggcgtacgcagttctgatttctgaaagaggaacaatctgatcgaacggctgcccactcaaagtcagctatcgaacagcttgaggccgaacccgacgtcctcacagtgccggacgtacggcttgacggcggccacgtcgacgtccctcttggccctgcacccgagcaggggcggcgagtgcaggcacggctccacggacggggaccggacgcacgccacctcggagacctccttgttccagtccggccggagcaggatccacggcttcacgccggcgaaactgtaggcgacgtacccgaaggtggaccacgcgctcatcgcgatcttgtcgcagtagctcagcaggtagatctccgccagcgccttctggttgtgctcgttcgacgtgtactgctgctgctcctcgtggctcggctggaacaccgccacgatctcccccgtcttgggggggctctcgtagtacatc

SEQ ID NO: 19680 - DNA, 1759 bp, Setaria italica
  misc_feature (1)..(8): n is a, c, g, or t
  Peptide Sequence Number=SeqID_85654
nnnnnnnntactaattagtacttttgttttgtagtaggaggcaaccatgcgcattgatatcgaaacccacagtatagcagctcaagctggtaagaggtaggagttttaagccgtagttcccgtgctatacatgacagcgctcatgtgttactctagactgtattttacagactgtacgaggatcgtgtattgtcaccacgcgtatactctgtacaagaactcagcaagctgccgcatgaattttcatgtcacaaactactctacttcaagttacagcctcacgggatcgctttagcgtctaatttctaagctctcgcccgccagcattcaggatccctccctagttcaaagcacccgaactccgaattccgcaaaacctttgatcatgctacagggagggagactcggaatcaacgagtcgcgtctccaagacaaaaattatgtactgatgattcaattgtggtgatggcatgaagcagattaacaatcagtctgaatctgattccatacaaacagtgcatcacttgattcttacattaacggagcacatttgacttttgcggaagacgattcccagcctgttttgatttttgctccttcatttgccatattttctggggcttttgacttctaaccgaatgtttgctaggttctcccaccaaagaggtcctcttctgtatcttctcatgatatatagctggtggtgcaagtttcaatggaggtacagtttctatatggaaggacttctgttctttctgaagattactcagtatttcataccgtgacatattttgaagcccgcgagatctctcagcatgatcaatttcatgagtctgatggacgccatgcgacgcttcaagttcagccccagaatacttcactagcccattatcaaacataggcgatttgtttcggccttgcgtattactagttgagagacagacagggcatccatctttagattcccgattggatgacctgctctgctcagactcacactgaagatgtgttgcatgcccacaactgaacaaccgtatggctgaaatagcaccttctttagaaagtgagcagttgcatatgcaacatgcaaaagtctgtggagcaaatccatgacaaactcctctctttaataagctcaaggtataaaacgagtcatcctcaattactgacttagctgtttccagtattcttttttcataaagatacatagataacattctgtgtatcacaaatttgaaatcaccaaactcttgactcccattatcagataagagtttcgccattattgctggtaggggtatatacccagccatcacctctattatttctccaacaaattgtgaaaatattttccgcagaacatttaggcacctttgtttggctgaaatcctcatttgttgtgatggtctttttcccttcagatgttcaattggtacttccatccccttggacctggcacttttttcatttacatcctggcttccatacaatcttttcagtggctctgagaaggagtcaagcagttggaaccaaagggactgagattcctctgggtccaagcgttgtgaatttctttggcacaacccaatggaggcacgtaaagcatcaagcaccggatgagcctcactcatttctagaacaatgtctggttgcttagtctcagagatactttttgatgcaacaccagagaaagtattttccacagaagagataaataagctgattttctcatcaagtccagccaggataagtgcaaggg

SEQ ID NO: 19681 - DNA, 363 bp, Setaria italica
  Peptide Sequence Number=SeqID_85655
gagagcaagagcagaacaccgcaccagccgccgaatggccgctgccgccgccgcgagatccttcctccgatccagcgcgccctcgtcgctgcgcagcgcggcggccagagccgcctcgcgtgccgggccggctccgctgccgaggcggatgcccgcctccgccccccgcgtcctcctaaggtcgccggtggagatgagcagcgtgtgcctggagtccctgatgcccatgcacagcgccacggcttcggcgctcatgacgtcgcttctcgccgccccggcttgcaagggattcggctggctctcggaaggtcaaggtgaaactagatggacgtcatcttggatgaagactagcccatgctttta

SEQ ID NO: 19682 - DNA, 266 bp, Setaria italica
  Peptide Sequence Number=SeqID_85656
tcctcctcctcctccactttccgccggaccctccacgcgccgccgtcgcgccgcccctccctcggcctcgccgcgggcggccgtcccgctccacctcttctttcaccgtttctcaggtttgcatcctacagccatggcaaagcaccaccccgatctcatcatgtgccggaagcagcccggcatcgccatcgggcggctgtgcgagaagtgcgacggcaagtgcgtcatctgcgactcgtacgtgcggccgtgcacgcttcggtccg

SEQ ID NO: 19683 - DNA, 370 bp, Setaria italica
  Peptide Sequence Number=SeqID_85657
aatatgcctgagcagcgtgcactacttgctgaatcaaaaaggacaagaggtgctgcaattggataatgaaattgtttacaatgaagctatcatcgaggaaagagagcaagccattcaagagatccaacaacagattggtgaagtacatgaagtgttcaaggatcttgctacacttgtacatgcccaaggagttataattgaggaaatcgacacgaacattgaaaattctgcatcggcaactaaagaggcaaagagagaagtcggcaaagcagacaagactcagaaatcaaattcttccctgctttgcttgcttatggtcatctttgggggtcgtgctgcttgttgtgataatagttctggcagcttgaga

SEQ ID NO: 19684 - DNA, 369 bp, Setaria italica
  Peptide Sequence Number=SeqID_85658
aaagcagggaagtacaatacttttggggtcgtgctgcttgttgtgataatagttctggcagcttgagacaggcaatctttcatcttacaaagcgattctgtggagttcagtattgaagactagatctctgaaaatggttcttgtctaaccgtcacgttgtgtgcaaaaaatatagacagcggatttagaagcctcttttacgtttgtgatttgtgagtgcacgttcctttgtcatgcgtgagtccttttttaatggcttgccttgagtgaacagtgatgctcgtttgctccttccggttttggaagttcgcttgggtgtgattctgtaactctgtaagtatctgcatccaataaggaatagatgatttc

SEQ ID NO: 19685 - DNA, 511 bp, Setaria italica
  Peptide Sequence Number=SeqID_85659
tgcatcggcaactaaagaggcagaatttcaatgttcgtgtcgatttcctcaattataactccttcgacatgtacattgaaaattctgcatcggcaactaaagaggcaaagagagaagtcggcaaagcagacaagactcagaaatcaaattcttccctgctttgcttgcttatggtcatctttggggtcgtgctgcttgttgtgataatagttctggcagcttgagacaggcaatctttcatcttacaaagcgattctgtggagttcagtattgaagactagatctctgaaaatggttcttgtctaaccgtcacgttgtgtgcaaaaaatatagacagcggatttagaagcctcttttacgttttgtgatttgtgagtgcacgttcctttgtcatgcgtgagtccttttttaatggcttgccttgagtgaacagtgatgctcgtttgctccttccggttttggaagttcgcttgggtgtgattctgtaactctgtaagtatctgcatccaat

SEQ ID NO: 19686 - DNA, 682 bp, Setaria italica
  Peptide Sequence Number=SeqID_85660
cttgctctctttcctcgatgatagcttcattgtaacaatttcattatccaattgcagcacctcttgcctttttgattcagcaagtagtgcacgctgctcaggcatattaccagagtcagcacttctgtcatccatagtatagtttgactgagcattctggggaacaattggcttatatgccgtctccctctgaatcgcaagattttgaagtttcctgaactcctccatagtggcagcgaaatctttggcaagcttcatatcagcaaccctcttgtctgcactagtatcgatgctcttgtcagcttcagcagccttttggagcttatctttcgcatcctttgccaattgaagaatgttctgactagtcttctgcagttgatcgcgaagggtgggtgtgtccttgggcgtgccgagcgagttgaggaggcggcggtaggaagccacggcggtggtgatctggaagacgagcccgcgcgcgtcgctggggccccctctcgccttcctgcccaggggcgccctgaccgcccccgcctccagatccgcgaagctcatcgccgatcccctccccttgctcctgccgcctcaccctcctttatcggcgtccgccgcgccggaacgaaccgcagccagcggcggaggtggggtggtggagcagagcgtggttggggtaggctgtcgtctg

SEQ ID NO: 19687 - DNA, 191 bp, Setaria italica
  Peptide Sequence Number=SeqID_85661
agctaaacaatctctacagataggacttacgggttgttaattgagcatgaattacgtaatacatttcgtaatacataacagacgtaatacattacgtctgttatgtcagcccatattgaaattcagggtattgaaatccatagcaataatacctacggtacatgaacaaaaaaaaaaaaaaactaaaaaaa

SEQ ID NO: 19688 - DNA, 383 bp, Setaria italica
  misc_feature (12)..(12): n is a, c, g, or t
  misc_feature (15)..(15): n is a, c, g, or t
  misc_feature (18)..(19): n is a, c, g, or t
  Peptide Sequence Number=SeqID_85662
caccaccacaangtnaannctggacacagtggacgtcgggcgatttcaagtttgaactgcccaccatttcttgcagttgaaacctgtagagagcacttgggtgtccatccctgtgacaagaggaggagcataacagaataccggcctctctttcctgctattgacttttcattgatagaaaacgatgaagatgttctttgggaaccagatgttagagaagcaaatgagtctgtggggctgaggggtatgaagttcattgactggttatggacaagagaagagaaggagatagctattgtcagtcatagtggcttcttgtatcataccttgaacatgtacagcaaggagtgtcatccaaccataagagacgaagttggcaagca

SEQ ID NO: 19689 - DNA, 846 bp, Setaria italica
  Peptide Sequence Number=SeqID_85663
acttgcaaaaaaatcgagctcgttatcacttcccctttgctgaggactatgcaaactgcagtgggggtctttggtggtgaaaactatactgatggtgtaaatgcaccaccactaatggttgaaaatgctggacacagtggacgtcgggcgatttcaagtttgaactgcccaccatttcttgcagttgaaacctgtagagagcacttgggtgtccatccctgtgacaagaggaggagcataacagaataccggcctctctttcctgctattgacttttcattgatagaaaacgatgaagatgttctttgggaaccagatgttagagaagcaaatgagtctgtggggctgaggggttatggacaagagaagagaaggagatagctattgtcagtcatagtggcttcttgtatcataccttgaacatgtacagcaaggagtgtcatccaaccataagagacgaagttggcaagcactttgcaaactgtgagctccggtcgatggtgttggttgacaggaggtcagttttaccacctcagctgtggactttgtgtccgctatgaaagcaatatggctcggggagataatagattgattatgaggtgcaaagcacatacaggttatataggcaaggatgtcctagggtttatagaaatagaaccaatcaacggagatccttgcctaatcaacatatcatctatccatctatcccaagggttggcgcaaggccagaggcctgtgcggcagcctaccctaggcccaaagggcctgccgacatacccacatacatacttctagcacgctacttccttttgatgattgttttgccagtattctctttgtgttttg

SEQ ID NO: 19690 - DNA, 2488 bp, Setaria italica
  Peptide Sequence Number=SeqID_85664
tagacctaaaagtaattttgttcttgtagtttgttcaattgggaagatggatgctcgtcttgaaatttttggagttcttgtctcactggggcttggttaatttccacccttttccaccagttacgcagaaatgcgagctagttgagagcaaaaactggtgctgatacagcggaggaaatttctctggttgagaagctatttcagtttaaaactgttcattcgtatctggtacctgttccgaagaaagctgatgtcatatctccagttcagttcactagtttgcttgctgagcctaccctagctgaagatgcgataaccacagctgagtcttccgttgagtatcattgcaactcctgctcagttgattgttctagaaagcgctatcattgtaggactcaggtagactttgatctgtgttctgattgctacaatgtaggaaagtttgatgaaggcatgtcaaatgctgatttcatccttatggaatatgcagaggttccaggctcaggtggttctaactggactgaccaggagacgttgcttcttttggaagcgttagaaatttttaaaggaaagaatgggatgagattgctgagcatgttgctacaaaaacaaaagaacagtgcatgctatacttcctccaaatgccaattttcgattactttctagatggtaaagaattcagtgaaacacctcagaagattacacaggatttggcagaaactggcatagaagagttacctgaggaaatggatgtagatgacaatgcagaaggaaaagagagcactgatgaaaaaactttcaagaaagcagatgctaattcttcagaaacaggaacaaaattagctgaccaaagcgtttctgctaaagaggataccatgaatccaggtgataatgttctagtcgcgtcttccattgttgatgaatcaaacaaaatcttcattgatggatcctgcaaataagattttttaagctgatgttgatgtttctggggaacgatgcatccaactttgttattgatgtcctgagatctacttttgaagtaattggtcactttttggataaagaagacttgggttcatttgctgaagcaggaaaccctgtgatggcactagctgcattttttgcttctgttgtggaacgtgaggatgctgttacttcatgttgtaattcactgagagctatatctgaaatatctcctgctctccaactggcaactgggcactgttttatacttccggatccaccgagtaacctcgaagatcctacttccaatttcagcccttgcacaggtggtgagtgccaaggaggcgttggtggtactcaaaatgtgaatgctactgataaagatagcagtgaaagggaagaaagtgctttagctctggaaaaagagaaagctacattcacctcacagaaagagcacatggaattatctaacacaaaggaatcgtttgttgaaggtccccaagcggaagtcatatccaacagcacaaaggattctgataatcgaactgctataatggagagtagtgttgcatctgataagatgagatatggttgtaatactattccatgttctgctacttcaactaatacaaatgaacctagttccatagcttcccaagaagccagtgcagcaagtacaaaggggacaaccaaccctgaacgagtagaaggggacaaaccaagttctatggaattaccagatgatggctcaccttcacatggaaaggtagatccagaagagattgaacttgcacctgtggcctcatctagcatgcaacaacacgagtccaaccaaactggaaatggcaacacaaaagaacctaacagcaacgaaaacatcattgctgctgctgctgctgatcccgtaataaggctacagagagcggcaggtaccgccgtttcagcagctgcagtgaaggctaagttcctcgcggagcaggaggaagttcatattcggcaactagctgcacttgtgatcgaaaagcagtttcagaagatggaagctaagatgtcatttctctctgaagttgacaatctggtcttacgatcgagagaattgacggagaaaatgcggaagaagcttatgctggagcggagcgcgataatcacctctcgaatggctgccgcggcatccagaacaaaccagcatggggctcctgggactagactgccactgccagtagccctggttcagcagctgaggcgcccttgaagcctagacgctgtggcagatccactgatccaagtatataaatgatgtaggtctggcctttgtagtcgtgctaatcctccgcctagtaaaaatccagtgttactgcgcctagggcctagggtaactttcagggtcaagctagggtactcagcttgctgccatgctatgtcttaactgaatttatgtaggaatgtaatctcacccgtaatgtgtatcagtatcacactggtttaggatgtaggctttgatgctcgttgttggtacttgttctaa

SEQ ID NO: 19691 - DNA, 331 bp, Setaria italica
  Peptide Sequence Number=SeqID_85665
ccgcgggcggtggtcgaggccggtggacttaggggttcaggtttcgggttaggaagggcggggtggagggcggcgttgtatggcgggcgggcggcgtggcagccgccggccggggtagtggaggaggctgcgggggtgagggtcgccggggaagaaggaagggagacgagattaatgggccggaggtggctcccggaagcagcaaagccagcaagaggttacgcgaccagtagagccgttacgcgcggcaacctctggcgactcccacggtcccaccaggccggcagcataccaggtgagccttctcctttccggcggcggatggcgtcgg

SEQ ID NO: 19692 - DNA, 672 bp, Setaria italica
  misc_feature (585)..(585): n is a, c, g, or t
  misc_feature (601)..(601): n is a, c, g, or t
  Peptide Sequence Number=SeqID_85666
tagtacttggttgttgtaatttggccttagcgttccttttgaacttactgataatgttgggttggcggctcaagccaacccatacatatgtcttcccatcaaagtaccgcacagttttcattccagcccaaataccaaaccaattgcagatcaatatgtctaggacaatgctatcccaccagcattcattgaaatttggcaacatatgacgaaaagtgagctccatcaactcaaagccgattgataacacccacaaaagtggttggttccgtatcattatagccttacccaccatccaaggatatgagcgataacaaactcatcaaaaatgatctcattaacattgttaaacctgctttttggatggtcaggtacatatatgcggcaatcagttccataagatctttcaggcaattctacaccaagatcaggatgaagatacttcatgaattgcctagcatcatcacgagtctggaaaagcaaaaaagtgagggccacaaggtagacaactgccatcccgtggaccagcctccaaatggcaggatgtggtctaatgagtacagttgaaggtgcctgaagaaaagngtaagccaaaaaaacngcaatcatcgcaaatacaccccttttaaccgatgaaacacgatcagcagataagctcctttctggatccag

SEQ ID NO: 19693 - DNA, 906 bp, Setaria italica
  misc_feature (22)..(22): n is a, c, g, or t
  Peptide Sequence Number=SeqID_85667
aataattttcatcacaatttanaaccttttccttatcattgttcggaaattttgcaagtccagacaagaaggaagagcacgagaagcaaggcgatccccgtccagagtgtgatcaaccacgacggcatggagttcggaaagagaccatatccaaacttgatgcagattaggagctccacaatgcatatggccagggaaagccaacagaaagatccaacctttttaaaaggtttcctgtcttgcaagtaggtattatactcgcggatggttggtatcgcaatcaaccaccaaagaaccagccgatagacaatcaaggggttccgcggaggaatccacaggcagaacttgagaaagaatgtgttcagttcaacagccatgaaaacgatgcaaaggctcagaacctggatgaatctccaaggacccagaagagggtaccactcatccttgtcccactgtgctggtgtgaattggcctagcgtccttttgaacttactgataatgttgggttggcggctcaagccaacccatacatatgtcttcccatcaaagtaccgcacagttttcattccagcccaaataccaaaccaattgcagatcaatatgtctaggacaatgctatcccaccagcattcattgaaatttggcaacatatgacgaaaagtgagctccatcaactcaaagccgattgataacacccacaaaagtggttggttccgtatcattatagccttacccaccatccaaggatatgaagcgaataaacaaaactacaatacaaaaaataagaaataactaacctaaagaaaaaacaaactcatcaaaaatgatctcctagaaaacattaacattgttaaacctgctttttggatggtcaggtacatatatgcggcaatcagttccataaga

SEQ ID NO: 19694 - DNA, 210 bp, Setaria italica
  Peptide Sequence Number=SeqID_85668
tgtgatgttcttggccagaacaatcttatcttcttagaagcgactattaacttgtgcaaaaagtgccctgaaatctgtagtcggtgttccttcaccttcaggttttgatgccagatcaaatgccttaaactttgcctcaacccatacaccaagccctcttcacttcctccaccaccaccaatccaccgagcccaatccaaagccataatc

SEQ ID NO: 19695 - DNA, 1166 bp, Setaria italica
  Peptide Sequence Number=SeqID_85669
ttttaactcaaaactaggccaagtaacttaagaacttcatcgcaatttgtcctctagagcacaaaagccctaaatgataatgccatacattcgtataaccctcaatcaactaggtaacagaaagctcttcagcactatgtgcaggatccactgtctatgacaggaaatgaagccaagaatggcgtaccggggggggggggggggggggtgatgttcttggccagaacaatcttatcttcttagaagcgactattaacttgtgcaaaaagtgccctgaaatctgtagtcggtgttccttcaccttcaggttttgatgccagatcaaatgccttaaactttgcctcatcaaatagcaaggcctgtatgcaaacttctgcaacatcttccctggcaatagttttagtttctgttttcaagatctcgtcatccttcccaacaatcaactctctcaagccaccatctttatcttgtaaacctccagcccttatgattgtataaggcagaccagagtccgctaggtactgttccgccttatgcttccataccagtatattcccatttcctaatttgtttaatgggtgattgatgtctgttccacccatggatcccaccaaaactatgtgcttaacaccaatgctcttggcagcatctatttgattcttttggccaatccaatccacctgctcaggataactcccttcttcaaagtaaaactctgggcgccctcccttgctaggatcaaaccccggcttcatcttcggcaccgcgctggtgaggatgatgagcgcgtcgatgccctcaatcgcagaagcaatgctctcaggatctcttatatcgccgatgaacacgtcgtcagcgcctccgattttgcctttgctctcttcggtcctgaccagccctcgtcccacaaactggcccgccctctccttcaacttcttgtacacaatttggcctgttcggccgccggcgccggtgacgagcacggtgggcggcaacccgccgccggccgcagccgcagccgccgccgagacggccagcccagccctcctgggcccccgcctcgcagcaatgacgtggcaaggaggtcggataggtgcgcccgtgaacggagaagccaccctcacgcacgccgccgccgccgtggccatggttctccggcgagagcg

SEQ ID NO: 19696 - DNA, 535 bp, Setaria italica
  Peptide Sequence Number=SeqID_85670
gcggaagaaggcgtacctgacggagctggaggcgaaggccaaggacctcgagctccgcaatgccgagctcgagcagcgggtctccacgctccagaacgagaacaacacgctccgccagattctgaagaacacgacggcgcacgcgagcaagaggagcagcggcggcggtgccggcggcaagggcggggacggcggcaagaagcaccacttcaccaagagctgatgaccccggttcgtgctaggagctgtgagaaactgctcgcctgatctgaccactgttatgctaggacatttgctggctttgctgctgttgctgaatgctgatgacgtttctttcccttttcatcctctcttttctcgtctgcttcactgatgtgtactcctatttttacctgcccgtcccatctgcccgttgtagaactacccgtagcagtttccgtttcttggtagggtgtcagaacgccgtgtaattcttcttcttgtactgtcgtgtaatccagccctgcagtttggcagaatggcagttcaatccaag

SEQ ID NO: 19697 - DNA, 265 bp, Setaria italica
  Peptide Sequence Number=SeqID_85671
gccggcgagcgcggggtcgccgccggtggcttgcacttcttggacgacgctatgcgcggggtgttcgcgcgggtcttgaggcggcgcgccgacgacacggatcgcctcggcttgagcttgctttgctcgggaggaggaggtggtgttcgctgggtcgcgtgtttcaggacgtcgatgtgcttgtcctcgagcttctcgcagccgtcgggctctctccccgccggcttggtcgtgatcggtgggagcgtcttttccggcctcttgg

SEQ ID NO: 19698 - DNA, 444 bp, Setaria italica
  Peptide Sequence Number=SeqID_85672
tagtaaaggtagtagtgagagcggtcgtcgcttgtttccaaggataataaacgctgcccagctcacttcgccccgcccgccactcgcctcccctgctcggctgccctgctctgctctgctcgggatatatatacacgcgggcgcaccagtccagcgagcaacaataaaggctgggtcgaggaggaggaggggggaggagctgcttggttggaccgaacgagctgagagccagcgagagaggagggccgagcgagagggagaggaactaatgggtgaggaggccagctgcaacaccgtcagcgtgatggaggccgctaccaacgccaagccgcagccgcagcagcccaaggagaacggccgcgccgctgccgccgccgtcgtggccgaggcgacggcgcctgtggccgaggcggcggccgacccccggctgcagggtatctcccg

SEQ ID NO: 19699 - DNA, 589 bp, Setaria italica
  Peptide Sequence Number=SeqID_85673
atcaatttttttttcttcttcttctcatctcttcgctttcgaaaagcctgtacacggtactgcaagtgctacaccatcggagcacgctgcgaatatttacagacggtacagcagcaaacacgagcgacgaaaacgaaagaagggggaaaaaaagggcacgaaatggtgggggaaaacgcatgacaaaaaagggaaaaaaaggagctactaattgggagcggagcactagagctagctaatggaggagcctcctcctctgcctgcctgactgcctctggaattcctacgcgcacacggcggggccacgccgatctagcccccggtggctggagatctctctctaaaaccggacggccgggccggccgccgccagggccgggtagtcgtcgtcggcgggggggaggaggcggaggcggcagagcgggcaggtggcgtggtcgtagtccagccaggtctcgaggcacgcgcggtggaagaggtgcccgcaggggagccggttcaccaccgactccggctcgaaccgggccaggcacacgcggcagtccgccgccgccccgcgccgccgccgaccccgccgcggcgccgcccg

SEQ ID NO: 19700 - DNA, 1822 bp, Setaria italica
  Peptide Sequence Number=SeqID_85674
cgttcgagcagtgaatttcagtagtttggataagttgacataatattttcttacataattagacaccatgagtttacggctcctacaggcttcgccatgtcatacagccactgggccgagaacctcctcctttccatccccgccttggctggcccagtcattgcgccatgccacatcaccacgcagtggctctggttctccatccgcctaatcgagggcattaacatacacagcggttaccacttcccattcagcccttccaagttgattcccttctacggaggcgctgcataccatgactatcatcactacgcaggagggcacagtcaaagcaactttgcccctcttttcacctattgtgattatttatataggacagacaaagtaagtagatcctttcttatatatactatatactagctagttggcagttgctaccttgatatatattttataagatgggaagatggctggtgcaaaacccctcagtcaaagaatcatgcaaaaaacccatgctataaaaccatacctatgggtcttaaaattttgaagcaatcggacatgtatagtagtaggtagtctcacattaccaggagaaatatcaagatcaaattaacttgacttggtttgaaggaaataagcatcttcccatgtccacatagtacaaggaataatgtacgtgttgctacccaggctccacgaggtaaatacattttatttcagtaaagatgtgcccactaaggtgtaagttagtgctctatattttacacagaaatcacgtccatctgatgtgagttggtccctctttgtgtttttcttcgaaactgtaagtcgctacctactttccttatagtggctctttcgaaggagcaacttgatactctacattttgaatgttgtttttgctgtaaggagttactactaataactaatttttacaacagatgttaccttttcacggagttgttacactgttttcatagaagttgctcagaacaagtattttagtaagttacatgtagtgttaccaccaaagaattctataattactggttcataagacatcatctataggtctcgtatatatacttaggccacccaagtaaagcacagtaatacaaactaaaagcaaaacaacaaactaaaggcgaaataaagtgtggtttcaaagatgtgatcctttgaatgtagccatgcatattgtgccatgtgtccaccacatatctgaaagcaccatgctaccaaacaagaaagagatcaaacagatagcagtgtgttattaccaaataagacaagcagacgcaaaaattacaatatgacgaaacttttttaaagatgaatctacatagtattttcaagtatgtgtaagatgaaatttacctatgagtatttattgtatttgctgcatagtactgtcactctcacactaactattgtttattattttgttttttcagggctacagataccacaagttaaagcaagcgaagctgaagagtctggaagaagataatgtggagaagaaaggaggcagcactgcgttctgcaacgggaaaaaggactgagatatttttgtgcctgaatattggatatacggagattgttactattattaccagccctgatcggaggggagatccacaaataaataatctcaatttactgcagagggtcttgattgatcgacgcacaaatgtacacttgtgtaatctgtctagtgctttgtatattgcaataaacctatgttgtctaattatgtaagaaaatattatgtcaacttatccaaactaacgttcgagcagtgaatttcagtagttttcaa

SEQ ID NO: 19701 - DNA, 317 bp, Setaria italica
  Peptide Sequence Number=SeqID_85675
cccgaccggcggctgcggccgcggcggcgccggtagacggcggcgtgaggcgcacggggaatggcattactatcgctgttgttgttagagcaactccaagagcccccttaaaacaacgcgaaaatcagatttagggagaaaaggagaaatcccacgctccaacaactcccccatcgtcgccgaaaaaatacggcaacccgcatccggcctccgttctcccgcatatttgcgcgagctagcgcttccccaatcgcccctcgagcgctcatcctttcctgcgcgccattagtttcccgcgattttattttgccagcggt

SEQ ID NO: 19702 - DNA, 460 bp, Setaria italica
  Peptide Sequence Number=SeqID_85676
ccggtgcggcaccggcgagggtaggggactcggcgctgccgccgaggacggggcgctggtgggccgggttccggtccgggtcgccgaggtcgttgtacacgtcgtagtcgtagacgcgctcgaaggacttgcgctcgccgtgcccgttgccgcgcagcgtctccagctccttcttcctcagctccgacaggccctcgggcgtctccgacggcaggtacgactgcacggacacatgcaggaacaacgactgttagatccaccggtcgatcttgacggtgaagaagacgcgcttctccgggttgtcgaacttggagtgaacccaggagttgcagtcgaaggtgacggcggagctgtcgtcgccgccggtgacgagcctgatctccttgatgaaggtctccttgtggtgctcgttctccaccagcacggcgcccaccggcccgaacgaacgccggcaccttga

SEQ ID NO: 19703 - DNA, 650 bp, Setaria italica
  Peptide Sequence Number=SeqID_85677
cgtggtcgcccatgtactcctcgtcgggcgagtgcgaggagaggatgtccagcgtggtcatcaccgtgatggcctgcatctgcgtttgggagctattgttcctagtctagtcgtcccctccggctggtccaggaacctcttcatctcgtcgtcccggccctcctccaccggcatgttcttccggatcacggtggggcggttggggaagtagccgccgtagtggtactgcccgaagttcaccgccgagtggtgccccgacgtgacccacatgatggtggtgagcgtctcgacgagggcgtcccggccgtcgagcacgggccaaccaacggctcgtccttcttgtcgccgtgccccaccgtgcgcacctcctcccagaacgcctgcagctcggcgtcgccggcgacggcctcgtccgacttgtagtatatcttcacatagtccgccgcccactgcttgatggagttccagaccatgagcccgtcgttgggcagcgcctccgtgtcgaactgccacgtggcgtaggcggcggagctgagctcgacggagtacttccccggccagacgccgcctcgatgatgccgtcggcgttgatgaggctctccctggccagcgcgttgatctccatggtgtagcggaagtgcgggtgcagg

SEQ ID NO: 19704 - DNA, 171 bp, Setaria italica
  Peptide Sequence Number=SeqID_85678
aacacgtcgtggtagtcgaggatgaagaggcgcttcgccgccagcgcctcctccacgctcaggttgttgttcatctgcttctccaggatctccctggtgatggccgactccgccgggccgtacaccgccgagttccccatcaagagcaagctggacccggcggtgtacggc

SEQ ID NO: 19705 - DNA, 494 bp, Setaria italica
  Peptide Sequence Number=SeqID_85679
cgctccgacaggccctcgggcgtctccgacggcaggtacgactgcacggacacatgcaggaacaacgactgttagatccaccggtcgatctgtacagtgccatgcatggtattatatatacgttgtatttgtatatatgtatatcttgcaagttatggaaggatgatcgatcatggagatagatggtctgagaagcctagctccgaggagaccttgacggtgaagaagacgcgcttctccgggttgtcgaacttggagtgaacccaggagttgcagtcgaaggtgacggcggagctgtcgtcgccgccggtgacgagcctgatctccttgatgaaggtctccttgtggtgctcgttctccaccagcacggcgcccaccggcccgaacgacgccggcaccttgaactccgcctcgtagcggccctccaccagcgtcttgtgcgcgaacgccgtcacacgctccttctccagacccgtctctgctccacccagccg

SEQ ID NO: 19706 - DNA, 598 bp, Setaria italica
  Peptide Sequence Number=SeqID_85680
ggtagtcgaggatgaagaggcgcttcgccgccagcgcctcctccacgctcaggttgttgttcatctgcttctccaggatctcccctggtgatggccgactccgccgggccgtacaccgccgggtccagcttgctcttgatggggaactcggtgagcagctcgatggacagcgggttgagacccgccagcgtctgcctcgcgaactcctcgtccttgaaccacgagaaccggtccctgcccatcatctcggggatctcgaagcggaggacgtggtcggtggtgtcctcgaccagcttgaccatgcgggggacgacggtgcggatggcgtcgaagccggtctgggccgggagggggatgccgtcgctgtagaggtcgtcaatggcggggaagtgttggaaccggagctccttcttgatgagcagcggctggttctcggaggtgaagcagctcacgttcggcgccaccacgctccggtcggggctccacgcgctgctccccgcgatccagccgctgctcatcaagaaggagctccggttccaacacttccctgcccatcatctcggggatctcgaagcggaggacgtggtcggtggtgtcc

SEQ ID NO: 19707 - DNA, 637 bp, Setaria italica
  Peptide Sequence Number=SeqID_85681
ggtcaagctggtcgaggacaccaccgaccacgtcctccgcttcgagatccccgagatgatgggcagggaccggttctcgtggttcaaggacgaggagttcgcgaggcagacgctggcgggcctcaacccgctgtccatcgagctgctcaccgagttccccatcaagagcaagctggacccggcggtgtacggcccggcggagtcggccatcaccagggagatcctggagaagcagatgaacaacaacctgagcgtggaggaagaagacggtggcgggagccgtagagtgtcgtgtcgggctgctcgcggacgcggagcacgtaggggaggaacacgtcgtggtagtcgaggatgaagaggcgcttcgccgccagcgcctcctccacgctcaggttgttgttcatctgcttctccaggatctccctggtgatggccgactccgccgggccgtacaccgccgggtccagcttgctcttgatggggaactcggtgagcagctcgatggacagcgggttgagacccgccagcgtctgcctcgcgaactcctcgtccttgaaccacgagaaccggtccctgcccatcatctcggggatctcgaagcggaggacgtggtcgaggacaccaccgaccacgtcct

SEQ ID NO: 19708 - DNA, 817 bp, Setaria italica
  Peptide Sequence Number=SeqID_85682
tgtagtctagtcttcgttagggtctacgtaccccttgtcgtccgtctaccggtttccttgtagtcttcttgggtttgtttgttgcactcgtcgacgtatccctcgatctccttcatcctcccgccgaacttctcgaacgccgccttcaccatgggctccgccagccacgccggctcggcgtggtcgcccatgtactcctcgtcgggcgagtgcgaggagaggatgtccagcgtggtcatcaccgtgatggcctgcatctgcgttgggagcatgtccagcagcgtcccctccggctggtccaggaacctcttcatctcgtcgtcccggccctcctccaccggcatgttcttccggatcacggtggggcggttggggaagtagccgccgtagtggtactgcccgaagttcaccgccgagtggtgccccgacgtgacccacatgatggtggtgagcgtctcgacgagggcgtcccggccgtcgagcacgggccaccacggctcgtccttcttgtcgccgtgccccaccgtgcgcacctcctcccagaacgcctgcagctcggcgtcgccggcgacggcctcgtccgacttgtagtatatcttcacatagtccgccgcccactgcttgatggagttccagaccatgagcccgtcgttggcgtaggggtagtccttgatgacgagctccagctcgccgtcgtcctttcgcacggcgagcccccgccggacgaggtcgttgggcagcgcctccgtgtcgaactgccacgtggcgtaggcggcggagctgagctcgaacggaagtaacttaccccggaccaaga

SEQ ID NO: 19709 - DNA, 1548 bp, Setaria italica
  Peptide Sequence Number=SeqID_85683
taagtagcataactaccctttatattaactaaaaacgtactctcttgcagtgacacattgtacaattcaataggtactacagtcgtgtacagagtggtacattttatttcacaagccgcctgctacatgcaataataatgcaatcatctcccctggatgcatggggagatgattgcaagatcatctggatcagatggagatgctgttggggatgcccctccccggtgacccccggcttggagaagggcttgagcagctcgtagggcacgacccctgcgccgcaccggttcctgagctctgggttgttgttgcactcgtcgacgtatccctcgatctccttcatcctcccgccgaacttctcgaacgccgccttcaccatggggctccgccagccacgccggctcggcgtggtcgcccatgtactcctcgtcgggcgagtgcgaggagaggatgtccagcgtggtcatcaccgtgatggcctgcatctgcgttgggagcatgtccagcagcgtcccctccggctggtccaggaacctcttcatctcgtcgtcccggccctcctccaccggcatgttcttccggatcacgggtggggcggttggggaagtagccgccgtagtggtactgcccgaagttcaccgccgagtggtgccccgacgtgacccacatgatggtggtgagcgtctcgacgagggcgtcccggccgtcgagcacgggccaccacgggctcgtccttcttgtcgccgtagaccccaaccgtagacgacaacctcctcccagaacgcctgcagctcggcgtcgccggcgacggcctcgtccgacttgtagtatatcttcacatagtccgccgcccactgcttgatggagttccagaccatgagcccgtcgttggcgtaggggtagtccttgatgacgagctccagctcgccgtcgtcctttcgcacggcgagcccccgccggacgaggtcgttgggcagcgcctccgtgtcgaactgccacgtggcgtaggcggcggagctgagctcgacggagtacttccccggccagaacgccgcctcgatgatgccgtcggcgttgatgaggctctccctggccagcgcgttgatctccatggtgtagcggaagtgcgggtgcaggaggcggtagacggggtggaggcggctgagctggccggttggcggcgatgatgtagggctcgacgcagcagtgggtgcgcagccagtggctgacgagctggtggtagccggtgtcgtgggtgaggacgtgggccttggcgaggcttccagagccaggcgccggtggcgtcgggcccgtgggtgaagacgatgatcaagtatatatgtttcactgtttacagattcagttggtggtttcttggcggcaagtggaggtggaggccgtgaaggaggtggtgcacttgtaggttgtgtcactagagaaatatctgaaacagttatccagacttcattaggcatttgtgaagattgattcacctctaacaattcttcttcccagcaaatggtttaaggtctggaaaacagtggtgcc

SEQ ID NO: 19710 - DNA, 697 bp, Setaria italica
  Peptide Sequence Number=SeqID_85684
tggttgtacgtactagttaggtctattcgtcttctaaagtattcctttggggttctatttgtacgttcctttgtttgttctaagtctactaacttcctattcttggttattcttcctaactttctacttccggtactttggcggttgatgttaacctcgcccttgagtgtaattccagagccgaaccagacgtcaccagaaaccttcaagctgtcaagctcgacaatgctggggatggtcttgaaccgagcaaggaaattggcaaccttcttgaactcaggtccaagcgtaatcgaagggttagctggattcgttctggcagggttgcggatgacaaagccatcaaccaaggtgtaaagatcagactgcacaagcaacaaatcagatgtagccttcactgggaggaaccttgagcggggaacattaattccaatcgctttgtcaaagaaccgaatagctgcaccagctgcagtttcgagttgaagaactttcacaccatcaacttcctgtgatttgccaaattcttagtagaactcaacattcgtaatagcactcaacaaagaatctgattggtgcactgcaatataaatgctacacttgagagcatacaaaaaattagccaggtgaaataccttggggtttggaataatttccatcttaagtgcatcagcttctacaagtctcttgatagctttaa

SEQ ID NO: 19711 - DNA, 993 bp, Setaria italica
  Peptide Sequence Number=SeqID_85685
gacctcttattggctcagggcaaggagtatgtcttcgttgcaaactcagacaacttgggtgctattgttgacatgagtatccaaataagatgatcaaacatcgtgcagtttctttactgatttattaatttcttgaaactgccatgtgctttggattgagaatttgtatccttaactagcacagaaatcctgaaccatctgatcaataaccagaacgagtactgcatggaggttactccaaagactctggctgatgttaaaggtggtaccctcatctcttatgaaggaagagttcagcttttggagattgcccaagttgtctgagtttgcaacgaagacatactccttgccctgagccaataagaggtcaagtttcccactgttgttcaaagaggggaacacatcaccatggcctggaggataccagccatccttcccagctttccctttgcttggaagtggtgagaagtcttcagtaacaatgcgaggatactggctctgattaaaagtgtgaatttcaatgtcggagttggaatacttctcaacaatcttctgtgtgtcgtcatgagtgttgaaagagttcatcagaagtaaagggacattgcatccatacttcttgttcagagactcaatttgaatcacaataaggtcaaggaatgtgaaaccattgcggacctcaatgacagacttgggaccagtgcagcccatggtcgtcccgagccctccattaagcttgagcacaacgagcttgtccagcagcttcttcgtctcctcgagatcttcgggaggcgacgcgagggtatcgtacggcaccaccacctcatcggtcggggtctggatcttgctccactcgatctgatccgcctccccagtgaggtagcgtgagacgaggctgatgaacccggtcttctcgttctcgctgattcttggttcgtagtctttgttcgtacctcgccgcgaagctttcgtcgagtctttgttcgttcgtaccgt

SEQ ID NO: 19712 - DNA, 2553 bp, Setaria italica
  Peptide Sequence Number=SeqID_85686
gttgccttagctagcacttgggagttacatttttatattgaaacagatcatcatgcgtgtttcctgttcattctactaaaataagttaatgctgattctttctataatatttatgcagcttttggagattgcccaagtacctgatgcgcatgtggatgaattcaaatcaattgagaagtttaagatattcaacactaacaacttgtgggtgaaccttaaagctatcaagagacttgtagaagctgatgcacttaagatggaatatcaacccaaggaagttgatggtgtgaaagttcttcaactcgaaacctgcagctggtgcagctattcggttctttgacaaagcgattggaattaatgttccccgctcaaggttcctcccagtgaaggctacatctgatttgttgcttgtgcagtctgatctttacaccttggttgatggctttgtcatccgcaaccctgccagaacgaatccagctaacccttcgattacgcttggacctgagttcaagaaggttgccaatttccttgctcggttcaagaccatccccagcattgtcgagcttgacagcttgaaggtttctggtgacgtctggttcggctctggaattacactcaagggtcgaggttaacatcaccgccaagtccggagtgaagttggagataccagatggagttgtgcttgacaacaaggacgtcaatgaccccaaggatctttgagcgatgcctactgtcgtcaccagtttttttttcttacggcatgcaaagctaatggtagtatcatttcagcaaaatattcgtccccggcgcaccaaaaccagaagtacagaggcaccaaataggattacaattattctgtagcgggctcacaagaccctcacagcgggaatgcacatgacaattacaaaagataaaagctcagcgggggtgattagggacgcggctcctgtgatatgtcctcggaaaaaaaaaactggtgacgacagtaggcatcgctcaaagatccttggggtcattgacgtccttgttgtcaagcacaactccatctggtatctccaacttcactccggacttggcggtgatgttaacctcgcccttgagtgtaattccagagccgaaccagacgtcaccagaaaccttcaagctgtcaagctcgacaatgctggggatggtcttgaaccgagcaaggaaattggcaaccttcttgaactcaggtccaagcgtaatcgaagggttagctggattcgttctggcagggttgcggatgacaaagccatcaaccaaggtgtaaagatcagactgcacaagcaacaaatcagatgtagccttcactgggaggaaccttgagcggggaacattaattccaatcgctttgtcaaagaaccgaatagctgcaccagctgcagtttcgagttgaagaactttcacaccatcaacttccttggggtttggaataatttccatcttaagtgcatcagcttctacaagtctcttgatagctttaaggttcacccacaagttgttagtgttgaatatcttaaacttctcaattgatttgaattcatccacatgcgcatcaggtacttgggcaatctccaaaagctgaactcttccttcataagagatgagggtaccacctttaacatcagccagagtctttggagtaacctccatgcagtactcgttctggttattgatcagatggttcaggattttcatgtcaacaatagcacccaagttgtctgagtttgcaacgaagacatactccttgccctgagccaataagaggtcaagtttcccactgttgttcaaagaggggaacacatcaccatggcctggaggataccagccatccttcccagctttccctttgcttggaagtggtgagaagtcttcagtaacaatgcgaggatactggctctgattaaaagtgtgaatttcaatgtcggagttggaatacttctcaacaatcttctgtgtgtcgtcatgacgtgttgaaagagttcatcagaagtaaagggacattgcatccatacttcttgttcagagactcaatttgaatcacaataaggtcaaggaatgtgaaaccattgcggacctcaatgacagacttgggaccagtgcagcccatggtcgtcccgagccctccattaagcttgagcacaacgagcttgtccagcagcttcttcgtctcctcgagatcttcgggaggcgacgcgagggtatcgtacggcaccaccacctcatcggtcggggtctggatcttgctccactcgatctgatccgcctccccagtgaggtagcgtgagacgaggctgatgaacccggtcttctcgttctcgctgatctggtcgagcttgtcgaccttcgccgcgaagcttcgcgagcttgtcgtcgaccgaccaccacggtggcggtgattttggcggcgtcggtttgggcggccatcctcggggccttcgaggcttcgaaaggaaaggacgggaggagatgtcagacgagcggaggagtgcgggcgtagggttggttgttgttgttgttgttcgttgttgt

SEQ ID NO: 19713 - DNA, 391 bp, Setaria italica
  Peptide Sequence Number=SeqID_85687
atgctacaaggagctcaccaattgcttcagactaatcctttgtactagtgtcactaacgtgaaattatttggtggtaaacataggtgttagctggtacccatctaaagtaatacttcgtccgctcggaaatataagtccattaggacataaacagtttgacatgctctccaatatgacaatttgattcccaaatttataaaaaaattattatcttacaaggaaagagttatatattatgaaagtccccacgcgccaagttcttcagatggctcatggtccaggacaaactgtagtgcaaaaggaacctgctacgaaagaacatcatcgactcagccacttgtgatctttgtcaacatgcagaggaggatgctgaccacctcttcttcaagt

SEQ ID NO: 19714 - DNA, 651 bp, Setaria italica
  Peptide Sequence Number=SeqID_85688
acctgttcatgttgcatcactcaaactcttatctgcgtggttcgaggcgctcctaaggccttggctccttatctcgaaaaggcagtcagctacatcctacacgctatggatccaagcaatttaataatgcgtaaagcttgcatcattagttcaatgatggctctaagagaaatggcacgcgtatttccgatggttgctctgaatgagtcgatgacaaggttagctgttggtgatgctattggagagattcataatgctacaattcgagtgtatgacatagaaagtgtcacaaagataagaattcttgatgcaagtggaccaccaggtcttccaagcttactcgcaggatcatcaaatacagcggcaaccatactcatatcatctttgagtttctcaccggatggagagggtctggttgccttctctgagaatggattgatgataagatggtggtcattgggtactggctggtgggagaggctcagtagaagccttactcctatccaatgcacaaagcttatttatgttcctccatgggaaggattttcacctaactctgctcgcctaagtataatttctagtattttgggacatgataaacatggaagttcagagaagacaaagaaggaattagatgaggctgataatctg

SEQ ID NO: 19715 - DNA, 990 bp, Setaria italica
  Peptide Sequence Number=SeqID_85689
tttgggtgctgagatcactcattttatgagtgatatccttttccaaattgagtgtctaagtactgcaccttcaagcagtgccatccataaaactgcagttgctgttacaatgcgggaagcattggttggcacccttttaccaagcttagctatggctgatgtaacaggcttttttagtgtgatagaaagccaaatttgggctacttcatctgattcacctgttcatgttgcatcactcaaaactcttatctgcgtggttcgaggcgctcctaaggccttggctccttatctcgaaaaggcagtcagctacatcctacacgctatggatccaagcaatttaataatgcgtaaagcttgcatcattagttcaatgatggctctaagagaaatggcacgcgtatttccgatggttgctctgaatgagtcgatgacaaggttagctgttggtgatgctattggagagattcataatgctacaattcgagtgtatgacatagaaagtgtcacaaagataagaattcttgatgcaagtggaccaccaggtcttccaagcttactcgcaggataacctattacttctacatatcatctttgagtttctcaccggatggagaggttttgacattacaattaatatacgatagaatgttttaaactaaaactataagatgttttcacctcaagctgatttcatgtttccgtcaaagttatttgacaaatttgtccagtccatatcatgggtgctcgagtaacttttttacatctgatatcatttgtgggcacttacatttgaatgattcctagtaccatctcatgtacctatgggcaaaatgttcataaggtgtgaccaccaacagatgtttaagtatttacatttatggctgctataaagaatacctctataccatcatgctctcatgctcttctttcacgtcatcatgtgtcgttaccataagaattagtgtcaatttttgtttgtgaccctacaaa

SEQ ID NO: 19716 - DNA, 1534 bp, Setaria italica
  Peptide Sequence Number=SeqID_85690
aaacgcttctcccttcctttctccgcactccacctccgcggcgtcgccatgaacgccgacctcgtgcagcgctgcctcgaggccggcggccgcgacctcctcctccaccacccctcctcccctccctccccgacctccgcctccgccgccgcatcctcatccatcctccagtccctccccctccacgtgtcattcgaccgcgggtactacctcctcgtgaaggcgatccaggagctgcgcgcgcgcaaggatggacacatcgttaccgtcggcatcggcggacccaccggttccggcaagaccagcttggcggagaaggtggcgtcggtccttgggtgcgtcgtgattgtctccatggaggactaccgcacgggagctggtggcgatgatggcagcagcgacatcgacgccattgatttcgacgcactcacgcgcaacctccaggatcttgtaaagggtaaagatacgatggtgccactagttgattttcaagagaagaaacgcacaggttggagggaactgaagatttcttcatctggagtggtgattgttgatggtgcgtatgctctgcattcaacactaaggtcattgcttgatatccgggttgctgtggttggtggtgttcattttagtctgctttctaaagttcagcatgatattggagattcttgctcattggactatctgatcgacagcatatttccattgtttaggaagcacattgagccagacctgcatcatgcacaaattaggattgacaacagctttgtctgctcattccgagaaccttactacaagctaaagtgcaaaaatgagtcaccagatggcacaaagttctattcttttgatcaaaataaagcagaaactgagaaaggccaaacgtaatttagtaaatgaagattgatgattggattaaagtaagacaatgtggaataagatactacctatctcttggagaccagaggattgttgacaaatactttataatccgtccaaaagctgagtttgaggttggacgaacaactcttggaggattgttggccttgggatacagtgttgttgttagctttaaacgtacaagcacgtctgtcaatagagatcaattactgatagcggtagaggccatcgacaccctaaatgagaccttttttggtgttaaaaggcccaagtagaaaggttgttgcagcggaatcttctaagcttggtataaaggggccatggatcacaaagtcatacctagaaatgatattggatagcaaaggggttccgcgacttaatacaccaccaccagtctctagcacacttctaactgaaagccaagaaaagaaaattgctgcacctaaaccaattcgtgtttctgctgaaaacattacaaatcttgatgacttgatgcaaccgtggacgagatctccgcccaaaaagttggaacaggaacatgttctggcaaaatggcagtttatcacagattcttcttcaagaagtaacatccagctagctcctcttccagattcctatgatttggataggggccttt

SEQ ID NO: 19717 - DNA, 650 bp, Setaria italica
  Peptide Sequence Number=SeqID_85691
ccgcggccgtcgacgagatcaaggccaacacgtcccgcctcgccttccgccagcgcggcaagatccagcggctcgcgcgcatgtggcgggtccgccgcgtcgacgccacggaggtcttcctcaagcgcggccacgccgccgacgaggcctggcagcggctcgtcgccgcgccatgcatcgacgccgtcaggtccttcctgctggaggaccaagaatacagtagcatggtcaccgccgctaaggcctccatctttgcctccagggccgctgccgtcgcagccgcggttgtctaacacgtggaactctgcctcaacacatgaccatgtcgctgatgccaatctccattggcgatcttcgcagagctcgtcagctcagcaaggtagcaacaccggaatggctgcatgctctgccgcggtcaagctcgcggtgaccgggcagagcaagcctgtcccatatagttgaccctgttccgggggaagtaattattttctcccccattttctctgtaattttgtacgcgatgatcggttgagtgcgagagcgagttttgagcatgttccaagagtgtgtagtaggcggcggcactgttgatgcaaccggctcttgctgtaaaatagagagagagatcttggtaaaagtttcatgagcag

SEQ ID NO: 19718 - DNA, 947 bp, Setaria italica
  Peptide Sequence Number=SeqID_85692
ttccggagccggcgacaagacagttggtaatcacttgaacagataattgaaccatgacaaagtatcttctaaattgaaaaccagggcaatgttcttgctgaagagcaagaattctttgttaagccaggccttatgggcattgttctctcatcaagtcacaagctagggtcttgaataagcatcggaagaatgcagagcaggctttcaattctgagcttgaaagtctccttcaattttgttccctctttcataatgcacatttctatttacatcacattacggcacctttatatagcacccttctaatattctcagcaaaggtcatgaatcaacatgcttctccaggaaagcattagccatgttgctgaagctggtgttaatagctccaactgcagcatactctcttataatcctaactacatcaggtttcaggatctctttcttagtggacgggttgcacagataatacaaagccccaagtgcataagtcacagtatttcgcaccgggcttgataagcattgtataaccaatgggattccaccgcactgaacaatgactgaagcatttgcaggatcaacacatgagttacatattccaccaatgccaaactcgacaagcctttcatttggctctgtaatgcagtccaagaacaactcaagaacattcagctgacgcataaaggcatagttaaaagggtcatacgcaaaatttgccaagtttgcagctatcttctctttagactcttcatccgtggcgttctggaactgggtcacaagatcctgaaggtactggtttcgcggggtgccagagcggccggtgcgctcaacctggcgctgcgcgttcgtgaacatagatcccctccagccagaaccccggcgattgccccctcgaggccgcggcggctttccttctccgtgggttgccggcgaaccacgaggtaacgagg

SEQ ID NO: 19719 - DNA, 277 bp, Setaria italica
  Peptide Sequence Number=SeqID_85693
tccaccatttcgcaccctcccccctacctcccacaccattccggcgaggcggccccctcccggctcctccctcctctccggtggagcgtcgtcagctgcggttgcggctccccgtcttgcgcctcggtcgatctgccgctcgccggagggcctcgcaatccgcggttgcctcgcggtggtggccctcgcacctgctgacgcgaggcaacggcgaccccgatttgagtggccaccggaaacgcgcggttcgcgtcaccgttcgggggtttccctggcg

SEQ ID NO: 19720 - DNA, 347 bp, Setaria italica
  Peptide Sequence Number=SeqID_85694
gccgtgacgatgacgttggtggtgaggcagaacaccaggaacacggcgtgcgccgcgccgccccaccgggcgcgcacgatctcgcagaccgtgtgcgcgttgggtgccttgcgcttgatctcgattgccatgacgccgaacagtagcacctggatggtggcgccgctcgcgtaccagaacgggccgctcacgccgtactgccacgccacgttcgagctctgcaggatcgtcgctgcccatgtccactgggagacgatgacgctggcgatgaggccggtcttgacactccggccagccgtgttgaaccattccgaggtgtgctgcgacccaacataccgcttctctag

SEQ ID NO: 19721 - DNA, 244 bp, Setaria italica
  Peptide Sequence Number=SeqID_85695
caatgcccatcgcttattacaatgatgatggccataagataacatacagtgtcataaagcatcgcttgggcgatctattctatcgcttagtatctcaaaagtttgaggatcctgcggaaggcgaagatgctttggttgccaaatttaagaaactatatgatgaccttaccgctgggttccgcaatctagaggatgaggcacggtgaactgttgtagattttgtgtaaacaataaggactgccag

SEQ ID NO: 19722 - DNA, 340 bp, Setaria italica
  Peptide Sequence Number=SeqID_85696
tgctattcctggagcatttggttgtggaaactgtcattagtcaggcactttcaaagtattccaattcagaagctgtggtttacgtgggctgtggggaaagagggaatgagatggctgaggtccttatggacttccctcaattgacaatgacattggacgatggacgtgaagaatcagtcatgaaaagaacgactcttgtggctaacacctccaacatggcctgttgctgctcgtgaagcatccatttatacaggaattacgattgctgaatacttccgtgatatgggctataatgtcagtatgatggctgattccacttcacgcaatgcttcagcccacg

SEQ ID NO: 19723 - DNA, 1250 bp, Setaria italica
  Peptide Sequence Number=SeqID_85697
gcagttgccagattggaaccccaactatggattagcagcacaccacacctcggagctcacactgagcttttcctcaccggctactaactctccagacacttcttccatttctggctttgccccaagcttcatcaatgcgaacctgatgatgagctccaagccatggcaattcaagctgatgcaaccttggccaaaccatcaacatgatgatccattggccaagtcgtatgaccatcaaccattgcatgcaaaccctagtccagaatcttactcagtgtccaactcatcagtaagtggctcagcggagtcgccaaaattcatggagctcaccgctgagaatctaaaaatcctttgcaacacgctcgagaatcgggtcccacgtcacaaggatgtggttgcagacattgccagtgttgtgctccaatgtcgctccggaatgacaaggaggatgagatggtgccaagagaagccaagtgcagtgacatggttgatcttccaaggaggggacaatgatggcaaggaagtagtgtctcaggagcttgcaaggcttgtctttggatcctacagcaagttcacctccatctcactacccgagttcacccaggttcacactgattccagctctagcctgctcaccctgaagaggcaaagatcaccggacactgggcatggctaccaaagattgtatgaagcgatacttgaaaaccctcatcgggtgataatgattgatggtatcgagaaactggattatgactcagaaatcagtataagaaatgcgatcgcaaatggaagaattaagggttgcaatggtgatgagatcagtttggaggatgccattgtagtactgagttgtgaagcactcgattcaaggtctaatgcttcctcccctcggctcaagcaaagggtcattgataatggcggcaaggaagaaaatggcatgaacatagagagtgggatggagtcatctggttttaccttggatttgaatgcatgtgctgaggatggagaagaggacggagtgagtgtttctgataatatgaggatcctcaatattgtggatggtgtgttcttcttccaattagcaggatttgtgacattatctttccttcactttatcaaaaattagactagagctcttagttaattacttattttctttgtattttcctttcccctagtttctagctaatgctgactttaatggcctttgtaacatatatgttaattctgtgacgaagcgccagacttat

SEQ ID NO: 19724 - DNA, 2331 bp, Setaria italica
  Peptide Sequence Number=SeqID_85698
ctgcaatcgtggccccctgctctatcgctcccccacacagtccagcctagatcgagcgcgaccgttctctccctctcccgcacgatccgacgccggccgacgacccttagccggcggcgaccatggcgttcggtgagcgcatcacgaccttcgaggacagcgagaaggagagcgagtatggatacgtccgcaaggtctctggacctgtggttgtggctgatggaatgggtggtgctgccatgtatgaacttgttcgtgttggtcatgacaacctcatcggggaaattattcgtcttgagggcgactcagctacgattcaagtttatgaggaaacagctgggctgatggtaaatgacccagtgttgagaacaagaaagcctctctcagttgaattagggcctggcattcttggcaacatttttgacggaattcagcgccctctaaaaaccattgcaatcaaatctggcgatgtgtacataccacgtggtgtatcagtccctgccctggacaaagatcagctgtgggaatttcagccaaagaagctaggcgttggagatgccatcacgggtggagatctatatgctactgtatttgagaacacactgatgcaacaccatgttgcccttcctcctggttctatgggaaaaataagctacattgccccttctggtcaatacagtttacaggatactgtactggaactggaatttcaagggataaaaaagcaatttactatgctccagacatggcctgtgcgatcaccaaggcctgttgcatcaaaagttgctgctgatacacctctattaacaggacagcgtgtgctcgatgcattgtttccctcagtgcttggagggacatgtgctattcctggagcatttggttgtggaaaaactgtcattagtcaggcactttcaaagtattccaattcagaagctgtggtttacgtgggctgtggggaaagagggaatgagatggctgaggtccttatggacttccctcaattgacaatgacattggacgatggacgtgaagaatcagtcatgaaaagaacgactcttgtggctaacacctccaacatgcctgttgctgctcgtgaagcatccatttatacaggaattacgattgctgaatacttccgtgatatgggctataatgtcagtatgatggctgattccacttcccggtgggctgaagcattgcgtgaaatttcaggacgtttggctgaaatgcctgcagatagtggttaccctgcgtatttggctgcacgtttggcctcattttatgaacgtgccgggaaggtcaaatgtcttggcagtccagatcggactggcagtgtcacaattgttggtgctgtctctcctcctggtggtgatttctcagatcctgttacctctgcaacccttagtattgtgcaggtcttctggggattggataagaaactagctcaaagaaagcatttcccatctgtgaattggctcatttcgtattcaaaatactccaaggctctggaatccttctacgaaaagtttgatccagacttcattgatattaggacaaaagcacgtgaagtgctacagagagaggatgatctaaatgaaattgtccagcttgttggcaaagatgcgctggcagaaactgacaagattactctggagacagcaaagctccttagggaagattacttggcacagaatgcatttacaccatatgacaagtattgcccattctacaaatctgtttggatgatgcgcaacattattcacttcaacacattagcgaaccaggctgtggaacgagcagctagtgctgatggacaaaagataacctacagtgttataaagcatcgtcttggtgaccttttctaccgcctagtttcccagaaattcgaggatcctgcagaaggtgaagacgccctagtcgcaaaattcaagaaattgtatgatgaccttaccgccggattccgcaacctagaagacgaagcacggtgaatattgtacatgccgcagaagcaataagaccacaaatgctccggaaggttctgggagcagtttgttttgccgagcctgaggttgtagatgtaaattacgtatcagatttccccctaccaacgctgtcattttgttaatttccttgtttgctcttcggtgctggatgggcgcactgttttgatgtaccattatttattgtaaggcactggtgcgcatgttcatagttgaataagcacgatgcccctacgcttgaacatcagtacatatgctttgttcgtgaactttgacctatacgtgtcgtattttgctaagttttccgttcggttcattttcggatgtccag

SEQ ID NO: 19725 - DNA, 649 bp, Setaria italica
  Peptide Sequence Number=SeqID_85699
cctccaaccttcagcagcaccaggaggtcttgtgtgcaacaggaagttgatgacatgttgtgcttccatctggcggccaacatgcagttcctagcaggaggtgcatgctataaggctcgcgatacatacgggtatagctcgtcaggaacacgaccagttcattagcatcaaggatcatggatctcaaactgtcaagcacggctagcattcttccaaaatctgtgtaccttctccaccagggaagtagaaatcttttacagaatttactttgaagagaagagaagggtgactcacgatctgatctttggcgtcctctttgtgagattggaacctgaaggtgtcaagcaagtaacagcctctgtacatggtgtctctgagcatatccagctgctggagcatagattggtttgtgatttgccgcaccatggcctcctcgatgatgacctgcgctcggagcaggaccctttggaggtgatcatccacatccagtgccggttgcttggggcacttgctgatgaagaaatttatggatctagtgattagctcacccaggactgctgaaaggaaaatctccatctgtggctccagcagaaaggatgcggacgggaaagacaacaaatgtcagcttgatgttttctgatctctgtta

SEQ ID NO: 19726 - DNA, 426 bp, Setaria italica
  Peptide Sequence Number=SeqID_85700
cacagagaaacccgtggcagttggctttggtgtgtcgactcctgagcatgtgaagcaggtaaatcataatttgcactattcctgctaagtacagtatctgggattaatactactcgttgctggtctgacaccctggtcgatccattgttgtataattcagatcgcaggatggggtgcagatggtgttatcgtcggtagtgcgatggttaggctattgggggaagctgcttctcctgaagaaggattgaagaagctcgaagagttagccaagaacctgagggctgcactggcatgaaccaaccatttcttgagaaaaaacaccgaatattttttcccagtttaggattgcgggctgttgtttgtagcgaaaataattatgtccttatgttgaatgctcaaatgaataatcaaggccatatgtgttag

SEQ ID NO: 19727 - DNA, 299 bp, Setaria italica
  Peptide Sequence Number=SeqID_85701
ccttctcgccgggcaattggcaaggagagacagcggcggctggcgggggcacggaacggagccagcaaccggtcggcaaccactgccgatagatcgacgatggcggtggccgacgccaagccgcgcctcaacgtgccgccgtccatggcggccgcgctccgcctcgatcccgtccccctctcaccgcccacctcgcgccgcctcgccgaggctcccaagacgccctccccatccaagaccacctacagcgaccgcttcatcccctgccgctcctcctcccgcctccagaacttcgcgct

SEQ ID NO: 19728 - DNA, 2058 bp, Setaria italica
  Peptide Sequence Number=SeqID_85702
ttgtttctagatactgcagattctacttcagtaaaagggtgtatattgtatttagctttccttaaaatttaaaataaacccttcctaactaagtaactattatccagaatctcatccttttggctacacggctatggttgcattgttggtaggttcagattgggaatgtggttagggaagctttgtttttaaagctttatctgaaaaatgtccttcagaaaggctactatcacggataaatagctctataaaacaatacaatccattgtaggagctaaaggtacggtcatacagtccacaaaggtattgatatgtgtgtaaatactcaataatggcagcactattttctgcacattgttcactcgctggtattgtgtttacaaactccacatccgttgtcagtataacaatcacttagtcatgaagagtcattaactcattattagaatagcaccgaccttctaacacatcatttgtggaagctgtgttatatattaaccaacaaaacacaagatataagatctataaacatgactatagtccatgagtatacaaaaaagatttttccacgtaaaaaatgctttgcaggttacacttttttaccactttccaccgacaggtaattcttgctgcctgtgcaagtcaatcctccagcaatcagaacttgcaggtttcagttacatccaggtaaatccacacgtgcaaaaattaccagctttttacatcgagcaaacaggccttcacacatcaggaacgtccagcagaattctacaggctctggaagcaatttgctggaaatattttgcctcatgttgcaactgaacagctctaaactattgcttaacatatagacaaacattacgatccgtgctggcatatgatcatcctgaaccttctcaccttgatctctacactgaggaagattgtctcacatgggcaaagaaaaatgacctccacttgaatattccatatgcaattgcttgtccattgttatgttagaaatttgccatttggagtctaaaacaactggaagaatagacttgttgagccatcaccaaatgaacgaatatcagcaggttttaccagtgctctacacaaggggcacgtccgttctcgctcaaaccattctgaaacacagtcttcgcagaaaatatgtttgcagcaaaggagaacaggcacatgcatcttctcctggcagatggcacacatatcaccagcaacaagtacctgttctgcagttgcataagacccataatgcacatctttacgtgacagtgctttcactgcagccaagaatgactgaaccttctcaactactgaagtcaacttgaaagtcaggtacagcccagtggttaaagatgagaagagactaccatattccttgttcagaaagaaccggtaccaaacaggtgtcggcaacaaggcacgataaagaagcagaaggtactccacaagggttagcatttggccctgtctacgatagttacggcctctgcagttcttgtagtacataagtagcatgcacttgacagccatagcggcttggcgaaccattgtatcattgaccatgatgataaaaattgcatgccagaatggtggtatatcttttggaggaagcatgaacaagggtctgagaagatcatcattcctgtaccaccaatagacaccaaacacatgaatcatgaagatcacagtaatcccaatgagtacagatatttttctctcgcccttcaaagcagtttgcttcctcaatatatcatttgacttgaacattacagcagcaatccaaattgtgacgaagaaaccttggagatgctgccgaatgaaaacgacgagcaggagcagcgagaaaggcagtatctgctcgatccaccgagccacgtggtgcacgtcgtaccgctggtacgcgcggtccccgcccccgttccccgacgcgccgctcccagcgccgttcgcctccgcgtcagcaccgcctgctcccctcccggcggcggatgcctggtcaacctccgagcctgctgtcgcctcgatcgagtcctcggacgaggtccccgcggc

SEQ ID NO: 19729 - DNA, 172 bp, Setaria italica
  Peptide Sequence Number=SeqID_85703
catagtctacgaactcaatttgaatttgagaagaatacaaacgtcaagcaagttgagcagatgcggacaatggagatgaacctgataaccatgactaaacaggctgagaagttatgtgctgctgcttgagctgcagctgcctgtgcccgcctttcagcatttgccacatcag

SEQ ID NO: 19730 - DNA, 431 bp, Setaria italica
  Peptide Sequence Number=SeqID_85704
aaatgtgtagactgtagagaagacctttgcatgtgtagttttggagaattggcataattacatttctgtgcatgtggacatagtttgtcttgagacatacttgagtacatatttttcacctttgtctgtataatggcaaattctaatgtttcttggttctatctgattctttcaatgagtagcagctgcagctcaagcagcagcacaggcggcaggtgcgcaggtggcagcttcacagcctgggacagcacaggctacagcagtgtcagcagcagccccaaacccatatgcaagtgcatatgccaattaccccacagcatatcagcagggaacccagccaggggaatatcagcagggaccaggctggggcatatcagcaagcaacccaggctggagcatatcagcaaggaacccagcctgcggcatatcag

SEQ ID NO: 19731 - DNA, 1619 bp, Setaria italica
  Peptide Sequence Number=SeqID_85705
ctccctgcccctcccctgcccgttctcgacctgaccccccctcctcgtgggcggtctttgtttcctggcggcgccgactgggcgaccggcgacgcccgtcggcacgtcttcgcctcgccggtgacgagcacccaccaggataatggctcatcgtggacacctggatggactgaatgcccaagctccaggtctgctgcgccatggttccttcgctgcaggcagcctctctaatcgctcacctttggactcttcatccacactggagatgctggagaacaagcttgctatgcagactgcagaggtagaaaagcttatcagggagaatcaacggttagcaaaaagccatgtggtcttgaggcaggacattgttgatacagagaaagagatgcaattgattcgcacccacctaggtgaagttcagacagagactgatttacagattagagatttattggagagaatcagattgatggaggcagacatacaaagtggtgatacagtgaaaaaggagcttcaccaagtgcatatggaggcaaagagacttattgctgaaaggcagatgttaaaccttgagatagagaatgcgaataacgaattacagaaactctctgcctcaggtgacaataaaagccttactgaattgcttgctgagctagatgggctacggaaagagcatcatagtctacgaactcaatttgaatttgagaagaatacaaacgtcaagcaagttgagcagatgcggacaatggagatgaacctgataaccatgactaaacaggctgagaagttacgtgctgatgtggcaaatgctgaaaggcgggcacaggcagctgcagctcaagcagcagcacaggcggcaggtgcgcaggtggcagcttcacagcctgggacagcacaggctacagcagtgtcagcagcagccccaaacccatatgcaagtgcatatgccaattaccccacagcatatcagcagggaacccagccaggggaatatcagcagggaacccaggctggggcatatcagcaagcaacccaggctggagcatatcagcaaggaacccagcctgcggcatatcagcagggaacccaggctggggcatacgcctatgcttacaatgcaactgcttaccaaatgcatgctgcgcaagctaacacatatgcaggttaccctggctatcaagttccgggctatgcgcaaactgcagtgcctaattaccctggtgcctatgctgtgcctccgcaacaacccataagcagtggtgcggcaacggatgtcgggaacatgtatggcgtggttggtagcactggatatcctgctgggcaagttcagccgagcagtggcaccgcaaatgcagcgcaagcacctccacctccaccaccaccggcagcaccatacccgggcacatatgacccagcaagaggagcccagaggtgaaatccgggatgtgaaccagatgactgcttgccctgatgtagattaactcatggttttgttatgtagatgcagttgaagataggtttagcgacaatgtcgaggagtcagatgtatgctgaattgttggtacttttgagttgatagctgtaactgttggttaaggatgattcagtcagcatgtggc

SEQ ID NO: 19732 - DNA, 703 bp, Setaria italica
  misc_feature (141)..(141): n is a, c, g, or t
  Peptide Sequence Number=SeqID_85706
atccaccattttatcctattcatgtcgcgtaccaattggaggccagtatgctgattaactggagtaattggataatcacggatctgtcttcccttgacactgatactgtggctcctcttcaaaattcggtgtcattctttnagggttggttaaatcactaacaatagaaactacttgcaagaggcattccattcagttgacagagccgattcatgttgagtgtacaacttcaggaatggctttcctttccctagtttttctgacaagcaaagtgaacacagctgtccttcggatgtgatcaatgtggacaaccacttgttggtgtccggtgccagttgccaagcttctcttcttgatctgcatggacgcccagaagttcctcagaatggctgtgagcctgcctattacctatggaccgacaagtaccgtcctgaaactgcggcccaggtatgtggaaatagtgaacatgtaaagtttctcgctgaatggctcaaaggttgggatgaaagaggccacaagactggagctgctaatggggacacaaatgatagctcgtatcaagatgaatctgatgcagattctgcataccatgcttctgattgtgataacgtgctactaatcactggaccagttgggtgtggaaaatcagctgcagtttttgcatgtgccagagaacaaggattcaatgtaatagaggtaaata

SEQ ID NO: 19733 - DNA, 230 bp, Setaria italica
  Peptide Sequence Number=SeqID_85707
ttaaatggcatttgcgtgggtctagctcaggatggaaatgtgccatatagtaacttgcgggatgagaagcttcttctccttgcactatcacatgctatatctgacaatatttggctttgcttacatgtaaacaatctataatttcgtgctggtgctgagtaagtgatgcgtagtttccttggcatggtcatataggttgcattgctaattttatatctagcacattcttt

SEQ ID NO: 19734 - DNA, 329 bp, Setaria italica
  Peptide Sequence Number=SeqID_85708
ctcgcgcggggtggcggccacggtggcacggcgaggctgccgcggctgcggtacgggtttatcctgtggcggtacgcagtgcggctcctgcggcgggtggagacgcgggtcaccaaccgctgggtgcggaggagctacctcgagcagtggaacaccagcgtgcagctcgaccccatgctcccctttgccttcaccagcctcgacgacatcgtctcgccctgcaccgcctcggacgggcacgacatctccttctgccccatctgcgactgcgaggtgaaattgcgcagcaagcactgcaagacttgtgagcgctgtgttgatggatttga

SEQ ID NO: 19735 - DNA, 540 bp, Setaria italica
  Peptide Sequence Number=SeqID_85709
tgtgaaacctgataccaagaaaggtggcagcatggatcctggtgattatgtgaagattaaatgcatagcatctggaaacccaactgatagcaattttgtcagaggaattgtttgctccaagaatgtaaggcacaaacgtatggtctcagagcacaggaatgccaaattgctcattttaggaggagcccttgagtaccagaaagtatcgaataaattggcatccatagggactatacttgaacaggagaaggaacatttaagaactattgttgggaagatcgagtctaggcagcctaacgtgcttctaattgagaaaagtgcctcatcttttgctcaggagctcttagcaaaagatatttcattagttctgaatgtgaagaggccacttttggataggatatcaagatgcacaggtggtcaggttgcctcatcaattgacaacatcatctcagcaaggctagggcagtgtgacttgttcaaggtggagaaaattccagaatcctcatcagcagaacacacagggaagttgtcttctaattt

SEQ ID NO: 19736 - DNA, 4112 bp, Setaria italica
  Peptide Sequence Number=SeqID_85710
aaataacttttaagaactaacaaaggaaagaactaacttaaagaaagctcttagcaattgatatttcattagttctgaatgtgaagaggccacttttggataggatatcaagatgcacaggtggtcaggttgcctcatcaattgacaacatcatctcagcaaggctagggcagtgtgacttgttcaaggtggagaaaattccagaatcctcatcagcagaacacacagggaagtgctcaattaagactctgatgttctttgaaggctgtctgaagcgcttgggttgcacggttcttctgagagggaattgtcgggaagaactaaagaagattaagcgtgcaatgcaacttgcagtcttcgctgcttatcacctctccctggagacatcattccttgccgatgagggcgcaacagttccaagaattccttcaatgcctgtgatagatgcaccagatctgcaaacccatagagataacgtttctgctagccccgctgatcataatattcctgagaacctcagagatactgaagagagatatccacataatgctactatcaaccagatttttgagaatatatctgcagcaccaactctgttatcagcatcaactctgttaccatttgatggggtaagccagggaaccgtgcctgaatgtggagcatctgaatttccagctggccgtatcaactctcaagctttgtccaactcatgccatccaaatgcttcatgcattaaacattcaatatctccatgttccctcagtgattacttcagaatgtcatgtgctgtcacagattatgatgactcatacaagtttttgcaatcttcaattgcttctgatgcctgtcatgctagtgcgtcaagcatgaaaccatgccttttggaaaactgcaggagtcacccctcaatagacaacttacaatcagggaatacagatgtcaaagatgagctatctgctggttacttatctggtaccgacaacaatcagagcatcttagtttcgctctcaagtacctgcatcccaaaaagcttggcatgtgaacgttctcacctcctccgcatcaagttttatggtagcgtcgataagccactagggaggtacctccgtgaggacttatttgatcaggcgtattgctgcccatcatgcaaggaaccttcagaatcacatgttaggtgctatatgcatcagcatggcagcctaacaatcagtgttagacgctttctgtctcaaaagttaccaggtgaacatgatggaaggatatggatgtggcacagatgtatgaggtgtaagcctaaagatggaatgccaccagcaactcatagagtaattatgtctgatgctgcttggggcctatcatttggcaagttcctggagctcagcttctcaaatcatatgactgctaaccgagttgctagttgtggccattctctccaaagggattgccttcgtttctatgggtatggaaatatggtggccgcctttcagtatagtcccatggttactctatccgttaaccttccacccccagtactagatttcagtttccatgctacacaagagtgggttaaaagagaggcagttgaggtatttggcaagatggaatccttgcacaaggaggtatatgatttacttcataatattgagaaaagtatcatcaccgaggatgattccgtcaaaacaagcatgcaaaggcagataatggagatgaaagatttgcttaacatagaaagaaatgagtatgaggctttgcttctaccagttataagggggagtgctcattcagttaaatcaaagattgatattttggagctcaaccgtattagacgcggtctgttcctagatgctcacacatgggactgcaggttgtgtggcatagattcacttagggaaggtggtgatgtttccagaactgattccttcaatcaagaaaaaccccaagggaccaatgaagcgagacctgaattgcaccaggcaattacaagacttggaggtacctggcaagaaccatgtcctcgacgttctacaggaagtccaaggaaatctctcttgtctacagaaggccactcgaaagatcaccagtctgccatggttgagaaagatttgcaaattgggctcatggatggtgttgcaggtgatgcaggaggtcttgatttggtcttcagcaaattcaatatatatgaaggacatcatgtatctgaagatcccatcaagacagatccagtagagaggttaccatcacttgcatctattttagcagacaaaatagatatggcatggtctggatctggtgaattacactataatcttccacatgatttgaccaaagcagatgaaaatagatcttttagcttgttgaacaatccaagttgcaagaaggctaccgccccagtccggatccactcatttgatgctgtattgagattgcatcagcgggaacaaactggattagtgcctgcttcattgcattcagcattgaaaccagctgattcctttagagacttgacgagccttgtgaaggatccgatgacaaacatgcggagagcattttctcaaatatctcccaggacaagaggaaacttaaattctgttcttacacgtgcacctaaatatattacatcggcttctgatatggtgaagaatggggcacgactgcttctgcccaatattagctgtgaaggttctgttgttatcactgtctatgatgatgacccaaccagtgttgtgtcatatgctatgacatcgcaagagtatgttgagcatgtcacacataaaatgaatgcaagctccagcttttcagattttactaaggccagcagtaatagacttgatggatcttcttccttgcatgaagacctttcagatttgaaaggaacccacttcaggttcaatttcgatgatgatgtatcttctgcagatagtactaagttttctgtcacttgctactttgcaaggcagtttgatgcactcagaaagaaatgctgtccaagtgatattgattacatacgctcactaagtcgttgtaagcgatggagtgcacaaggtggaaaaagcaatgtttactttgcaaagacaatggatgagagattcattattaaacaagtcaccaagacagagctcgactcttttgtagaatttgctcctcactacttcaggcacttgacagaatcattgagttccagaagcccgacatgtcttgcgaaaataatgggactatatcaggttggtatcaagagtttgaaaggtgggcgtgaggtgaagatggatctgatggtgatggagaacattttcttccagagaacaatatctagggtctatgatctgaagggttctgtgcgttcacgttataattctgatacttcgggacacaataaagtccttttagactctaatctcatagaagcactacatacaaagcctatgtttttggggagtaaggcaaaacgaagattggaaagagctgtctggaatgatacatcatttcttgcgtctttggatgtcatggactactctcttctggtcggcattgatgaggagaagagcgagctggttgtgggcatcatcgacttcctgcggcagtacacctgggacaagcagctggagacatgggtgaaagcctcaggcatcctgggcgggcccaagaacgagtcccccactgtgatttctccaatccagtacaagaagaggttcaggaaggccatgtcgaggtacttcctcgccgtccctgaccagtggacctcctgaggcagctatatcctctttggtgttttagctgcaactttgtcagcgaaagcatcacccattcatcatcctttggcgaattttgagcgaaaggatgaactgagacgaataggcattctttagttgcttgttgcctccattttttaaccaacaggtaacatgtttagctatagagcagatatatgagaggatcaggccctgatctggatggactgtgacacaagcatgaccattgcagtgtcgagaaacacctgaggaaggcttgattgcaatgtaaatcacggtgagcgacggcgggttatttaacgccgagtttcgctgtattcttttgattgatgtatcagataccgagaaaaatttgtactaagggag

SEQ ID NO: 19737 - DNA, 391 bp, Setaria italica
  Peptide Sequence Number=SeqID_85711
tggaaagggtccgtggtcgcagtgactggaagaatgcgatgatcggaggcgccttgtctggtgccctgatctctggtgccaccaacaaccacaaagacaagatcatcaaggatgccatcactgctggcgcggttgcaacagccgttgagttcatcaactgccttacctagtcatgcagctgcgtttgcagtgctattgtagtacattaagaataaggacttcttcagtgaagccatgttcagttcaataaacctccatcttcagtattcgtttctgtttggcacttctgctccgtgtgaattcgctgagcaaccgtttttttgttacccttgtggttttgcagttgtcactgattctgtggcgatttgtttgagtgaatgacacttcctgt

SEQ ID NO: 19738 - DNA, 636 bp, Setaria italica
  Peptide Sequence Number=SeqID_85712
tacgttaacgtttacgtttacttaatttcgttacttatttgggttcttaaacccgtttccttctaaccgtctaccgttcgtacggtctttccttctaagtattcggtcgtcggttcggtcgcttgcaaggtggccgccgaggagaccttcgagtgcctccacagaggggatgtttcaaagcacaagcttgagcatgcgctgaagaaaaatgtgcaaggagggtgcatactggggtactgttgctggagtttatgtgggtatggtgtatggagtggaaagggtccgtggtcgcagtgactggaagaatgcgatgatcggaggcgccttgtctggtgccctgatctctggtgccaccaacaaccacaaagacaagatcatcaaggatgccatcactgctggcgcggttgcaacagccgttgagttcatcaactgccttacctagtcatgcagctgcgtttgcagtgctattgtagtacattaagaataaggacttcttcagtgaagccatgttcagttcaataaacctccagcaacagtaccccagtatgcaccctccttgcacattttcttcagcgcatgctcaagcttgtgctttgaaacatcccctctgtggaggcactcgaaggtctcctcggc

SEQ ID NO: 19739 - DNA, 830 bp, Setaria italica
  Peptide Sequence Number=SeqID_85713
taactagagagaatctagtgtccatctcacatcgccacacgcagcgcctgggagctgccagggaaggaagagaagagagacaggagacaggatgccccacggccgcttctcggggtcgctcagctcgcccaagatcgacgtcgtcatcgacatgggcaacccgttcctcaaccgcaccgtcgacggcttcctcaagatcggcgcggtcggcgcttgcaaggtggccgccgaggagaccttcgagtgcctccacagaggggatgtttcaaagcacaagcttgagcatgcgctgaagaaaatgtgcaaggagggtgcatactggggtactgttgctggagtttatgtgggtatggtgtatggagtggaaagggtccgtggtcgcagtgactggaagaatgcgatgatcggaggcgccttgtctggtgccctgatctctggtgccaccaacaaccacaaagacaagatcatcaaggatgccatcactgctggcgcggttgcaacagccgttgagttcatcaactgccttacctagtcatgcagctgcgtttgcagtgctattgtagtacattaagaataaggacttcttcagtgaagccatgttcagttcaataaacctccatcttcagtattcgtttctgtttggcacttctgctccgtgtgaattcgctgagcaaccgacagtatgcaccctccttgcacattttcttcagcgcatgctcaagcttgtgctttgaaacatcccctctgtggaggcactcgaaggtctcctcggcggccaccttgcaagcgccgaccgcgccgatcttgaggaagccgtcgacggtgcggtt

SEQ ID NO: 19740 - DNA, 2396 bp, Setaria italica
  Peptide Sequence Number=SeqID_85714
gcgagggccggacgttcaacgcgaacttcaccggcaagggggtggaccctgctgcaggaccgcgtcaaggagaagctcagggagctcatgggcgactactccgacgacacactcgcggagtatgtcgtagtattgctaaggaatgggaggtgcaaggatgaggcggcaaaggagctgcaggtttttttgggcgacgacaatgatgcatttgtatcctggttatgggatcacctctcctcaaatttgcacctttatgttcaacctaaagccaccacttctaatgatgaacctaaaagcactagcagtgctggtagaggattgcctgttcgcagtttgactagcagcgtgcaagttaattgtgaacctgaagctgaagcccagaaaacaactatagctcatcagaaaagagattggggaagaattattcgagaacagtcagaagcagttcctcttcgaagtgttgtagccaatgtttctcatgcagaggaaaaggattttcatgaatcacatgcagaggaaagggattctcataaatcacatgctggaagacgaacccgctctcctgacatgcataaccacagaaagaggagcagagaggcagattcacgatctaccaagagggtatccaacccagttattgacgcaccacgccgacttctccagtttgctgtccgcgatgctgtcagaactgtgcagccagtgactcctagatcagaatcagcttccaagcgacttcgttctgtggtgtctacattggcgtcagattcggcacttgatattactcatattaggttgcagaaaacaaattcagatgtgagaataccagcattaagagctgcagctgaggcggctgaagatgctatcaagggtagcttttcggggagtgtttttaatagattgggaaggatgcccacaataaatcatactgacgctcttagagaacaagacccagaaggtgaagaatatgagaatatagataacatacgagcagaaaatcaagttgaattttatgaaagaaatcagtatggtggcagtgatgcttacatgcatgaccaggaatcagaggaagctacaggttctgctcccaatattgatgagtatgaaaggtataatggattgggttctcgccaaagtagattgtcttctagtgcaggcaaagagtcattagtattagggtatgtaaggggagctgctgaagtaagaggcagaagattgatagctcagggcacacatgctggttcaggaccaagtccatccggaaagaacttaaatatgtctgctaacactagtatgcggaaacttccaactcatcaaactagggatgctgttgtatctgaccctcaagtgccaatggagaagaaggttgctgatgcaaggaactcaaatgtgaaaattacgcatgttaatgatacggtcatgactgataagtccaaagattttatacattcaggttctatgctggaggcgcaaaaggcttcgtcacttgctgctggatcaaatactacaggtcaacctgaaggtggccctgattctagaactgtctttgttaacaatgtacattttggtgcatcaaaagatgctcttactcgtcacttcaataagtttggggctgtcctaaagacccttcttgtgtctgatggcatcactggccagccaacaggctcagcgtatattgagttcttgcataaagaatcggcagagcaggcattaaccctgaacggcacatcttttatgtcacgcattttgaaggtcgttcgaaaaagctccactgaagcaacccagctgtctggcttgccccgcgcttctcgggggtcacccttcgcttcaaggctcattagaactgcatacccaaggccgacctttcctggtgctatccgcgggcgactgccactcagaggtggtgcccggagtttccagtggaagcgtggcgctgctgattccaccgatgccggaaaacctagtcaaactgcacctgcagctcctgggaatcagttggtcaccccaatcacaagaagcttcacctacacacgcactgagccgaaatcaaatgatggtgcgatggcatgactggccaggcgcagcatgccactgatcctgatgaaatctcgcagaaagagctcgtgattgatggctgtttcgtgcttcattcggccacttttggtacatatttaaatagctgcagatcttagtttgtaggaggctgttttttgtggacgtcaaactttgagccatactctgtgagaggcttttgtgcctttttcccatcggcacacatgctgtgctggctggctgtgtggagtttctggagagtagaatatatataaaaaatagtcgaggaagagacgaaagcgatgggaacgctggaacttttatattattgatagattattcggcct

SEQ ID NO: 19741 - DNA, 1035 bp, Setaria italica
  Peptide Sequence Number=SeqID_85715
acctgcattccggtccaatactacacctgaagagctatacttgccagacctaagagatcctttagaacccaatgctcgggagctcttatcaaagctcgtcaacttttgccgatgcaaggaatccctcttagagctccccctcttgctaggagatggcttgtcatttttcacagattgtgtcgcagcagcaacaaatgggttggtcctctgaatgatcacgagtaggaatagggtgttcttttggctcaatatttgggatcacacactgcatcttgcccgatacagagggcttgctacttgttggtactgttgatgaatcagcttttacagaaccataagaactgggtggcactggggtaagttttccacggaaagtaacaccagtctgcgggttggtaatagaaaccgataaatcaggacctgagccaggttcatagtttcccataactggttgagcaataacttgagcccccaccgctgggagggaagcagtactgtagtccatggcacaggcatttgccacattcatgtccgacataagcaagcaaaacattacatcgccagtggtgtagaatggctgagcctcatttaccaccgcaaccatgctaccaagcacagcctgctcaatcttcctcatatcttcaatggaagcgccctcccttggcaacatgtcaccttcagtcttgagaacctcaactgcagcctctccaaacccagcaaggctctccctccagttgtactgtgcagctgcccgcacaacagctgcgcgagcggccgcctcagagtaacccattgtggtgatcagactcacggcattgtcaaaagtggtgtccaggctcttgagaaggatctcctccagctgcgtctcatttgggtcactccaattcacatatcgctggcactccaataactcctctgcagtagggtggatatccttacaggtctcgcacgtgcttgggatgaggtcgaggtccgccgccgctgccatggcagccttctccggcgacataaactcgaatccaacgcagtccgccg

SEQ ID NO: 19742 - DNA, 405 bp, Setaria italica
  Peptide Sequence Number=SeqID_85716
ggagtgaacccctccacctccgtccgccgccgccgccatggcgctccgcggcatcaccccccggagaagacccctcctccctgtcccccgtgccttcttctcctcgaacccgcccttccctccgcccccgccaccagccaacggccccgacgccgcccaccccctcccctcctctccgcaatccaaccccggcgcgccgccgcgggattcggcgtccgcgctcttccaggacatccgagagcgcctccgcgtgtcgcccaggtcgccccctccgcgtcggatcccgatgaaccactctccaaaggagctccccgatgtccgccaggccctcgagtccttccgcagatccggcggcctgacctccccctccactcccggagcctcccctccactcccggagccacc

SEQ ID NO: 19743 - DNA, 1559 bp, Setaria italica
  Peptide Sequence Number=SeqID_85717
acagacaacaaaccaaaatttacatgctccaaacaggcccctatttttggcatgtcgggaagcaaatgaatcaatcgcgaaacgaacaaaactgacctatacaacagagcatcaggaatgtcagtcaaatgatcgtgaagggctgtgtccgttggcttcagtcccctgcacatcaaaacgacggcttgcctccagcagattgcaaatgattttactctcatctgctcaccttacagagactggaaagttggtttagctgcacaagcttgaattggccaggcattcgtgggggttagcgtagaagtaatcctcttctttcggtctgttctcaagtttttgcctgcaggatggttgggctacacggctcttatgagtttcctgaacagaagatgcaaaattgtcccaagagattgccttgttggtgtacaggtctagaagttcaactaatttccgtcggtctagcaccacacttctccggaaacccaggaacctccggtggccttcaacaagttttgccatgttaccatcaaaagtgggaatgaatacatcactggctgtggaaacaatgaaatcaagtgcagccatctgggaagagtgattttggaattgacgcagaacctcagagtctagcagcatctcttttcttacaagtttagggaaagcagctcggagtggttctaatctcctatctcccccataaatttcaccagcagcaatgtatataagagcctccttttgaaatcccagggctttcaaaacaagtgatgtctcctcaggagtaagtgggcatagtccttgtgacctcttcgcttgggaatcaatttctttgtctctccaccatggataagcatatctcatttttttagctcctcagcttcttcagatgaaaggccatggttgcaaccagaaaagccagcatatccatctcatagcgttaaatgcaaggctacaaatgatcccttagctcgaagtttatgtacaagattaattccccaatccctcaatttgagggtgaatttcagtgcatgaaattaacacggcatctaagcagttgaagctctgtactgataccgttattggctaaccgagcatctgttttgttaaaatggatagcactgtatttgctgaacagtggtaagatctgatgcaagtaatattttcatctgaccagctcacaggtggcatttgaagtataacatccgaatctcctggatcaagcctctctggaagctgtttaatgatgtgcacttcatctcttaatgagtcaatgaaatgcctcacatcaaatatatctccaaaattgctttgatcagcccagaatgatctcttgtcaagttccgggacaaccattgtgaggtttagcagacgagcaactgccaccatgtcacaaatctctgatcgcatctgattcagacccccattacaagatatcttgagataaccattgctcttgtatattcaagtgtaccaagttgtgtacggacggtgacaaatgcatccactctacagctccgataccattcaccatttctaactcaaaatatttttcctattttcct

SEQ ID NO: 19744 - DNA, 495 bp, Setaria italica
  Peptide Sequence Number=SeqID_85718
atagatgtgttatttattttttattcctagttatgtatttgtatttttttaattagttattagtctatacatttttccatcacttcctcgcatacatgtaaataattgtctacatggtgacacatatatacattaacttagtatttctatattaacaataacataaataggtaatttagaatcagttatttactttttggtatatttctatcatgcataaataggtaattcagaatcatataattgtttactttttggatatttctgtatgatgaacatgacgataattagattatggtttaggtgtttactttagattatttttaataacaacacacgtgtaacttagatacaaatcttgaatggtatttaagttaacttttgtaatgatatgcatgggtaaattagatgaagattatgggttactttatattactttttataattgcagagttgggtactttagagtttggggattttcataatgatagtgcc

SEQ ID NO: 19745 - DNA, 1238 bp, Setaria italica
  Peptide Sequence Number=SeqID_85719
ttcgtttattcctagtcttttggtaagtcccttactaattattactaaacctttcgtattattttttaagggtcgccctttccaatcatcagcagtttgacgttgcagaggttcttcagcacaagtgtcttcagttgtgggaagcatccgtcagacataaccaaggtgtctgcactactaaccctgtttaggcttagataggtgaggtttggcacgtgttgtgcaagcagtggaagtgggtcttcctgaagaccagaccaacttagagctagaaacttgagattttccccatggctgtgaaatattgggcactgcagcgtcctggctgccaaatggcctcggacgatcaacctgtggagttgtttgtactgtggcttgagggcttccaaatgaagtgtctggttttcatcaattgcattgagaagcaagctggaaagaagtggtaggttggacagagtagcgaaaagctctgcagaatgcatggcactaactttgccaatccaaacgctttgtagtttcctaagtttgtccagttggtctgccaagtcatttgttgcttccacagtctcaagagtctgaagttctaccaatttagacagatctttgggtggctgcaccccagcgaagtactggaaatctttctgcttctcatcaataactctgtcagctaacagatgccgaagcttcttgaccttaactatgcctcgcggtagcttctctatttttgtttgcttgatgtccagtgtctgtagattggatagcttctcaatacactccggaagtgacttaattctggtgcgccgcaagccaatatagcgtagattaaacagattgcctatggatactggcacttcagttatttctgaatcttgcagctcgagaacagtaaggtagcttgattcagaaaagattgaggctaacatgcgagttgatattacaccatcaagtgaaaatagagtgcgaaggtgtggaatctttgttgttggtgcatcactgtctttccatccacataatgatagacggcgcacttcctggtccatctgtatcattgcagcttgatcatttgcagagctaaacttctcatcattagctattgaaagagccaggtcacgcacaatgtcatgcatcttacatgtgttcaccctgccaagctcatcgtactcctcaacttgcagcaagttcctggcaatgagctccatgagatttagttcagccacatcctctggtgtaattttttc

SEQ ID NO: 19746 - DNA, 452 bp, Setaria italica
  Peptide Sequence Number=SeqID_85720
ccggagcggcctctcgctgtctccgtcgggccgccgaaccttccaattcaagttccatttggacgggagagatctttacgttgtcgccactgaccagtgctggtgagtggcgacaacgtaaagatctctcccgcgcatgcggccggagcggcctctcgctgtctccgtcgggccgccgaaccttccaattcaagttccatttggacgggaacgcaaagatccccgcagccactgggctagcttgtggccaggctctacgcttctagaagaatagtagtataacctcgcacgcttcaccggcgacctgtaaaaatgctggaatcgtatggtgtgtgacgttcccttgttttggatcgtggatgtgtgtgtatgacttggcttggcgatgtaatattgtgataggatatataggttaacttagtaatctacactggagataaggcctgatggcc

SEQ ID NO: 19747 - DNA, 934 bp, Setaria italica
  misc_feature (921)..(934): n is a, c, g, or t
  Peptide Sequence Number=SeqID_85721
gcggcgatccacacatcatcattagttcatcgccaccaagcacgaacagtgtgttcgggagccatgtcgaagccgtcatcgtcggcatcgctgctcctcctcctgctgtcgtcggcgacgctcgccgccacctgcctcgccgacccggagccggtccaggacttctgcgtcgcggcgcagcggggtagcgacgccacggcgtccctggcgttcccgggcctcccgtgcaagccggcctccacggtggtctccgacgacttcttcttcgcggcgcacgcgcgcgccgcgagcacggacaacccggcaggggccggcgtgacgccgggcaacgtggaggcgttcccggggctcaacaccctcggcctgtccctcaaccgcgtggacctcgcccccggcggcgtcaacccgctgcacacccacccgcgcgccgccgagctcgtgcacgtcgaggaaggggagatgctcgtcgggttcgtcagcacggatggcaggttctactccaaggtggtgcgggccggggagagcttcgtgatcccgcgagggatgatgcacttccagtacaacgtcggcgccgccgccgcgcgcgccatgacggtgttcaacagccagctgccgggggttgtgctcgccgcgcagtccctgttcggggccgagccggaggtacccgacgccgtcctggccaagagcttccaggtggacgccgagatcatcaagctcctcaagtccaagttccggaaaggatagtcgccaggccatggtgtcgccagatacatggctgaagctgctcactagttttgtcccatacaaattttgtttttgagtacatatatgacgttgtttcgcatttgatactttaatttgatatatttggatcgatgatgatgataaataaagttcatacacgaattactcaccaaaaannnnnnnnnnnnnn

SEQ ID NO: 19748 - DNA, 1148 bp, Setaria italica
  Peptide Sequence Number=SeqID_85722
gcggccttcgccgccgccgcgggcaacggcactgtcctcctcgccgcggtctctggaccctatcaccccttcctctccaactggctcatcagcgtccgccgcgccggccgcgcggaccaggtgctcgtcatcgccgaggactacgagaccctcgaccgcatcaacgccgcctggcccggccacgccgtcctcgtgccccccgcacccgacgctcaggcagcccacaagtttggatcccaggggttcttcaacttcacctcgcgccggccacggcacctgctgcagattcttgagctggggtacagtgtcatgtacaacgatgtcgacatggtgtggctcgccgacccgtttccctacctcgtcggggatcacgatgtgtacttcatggatgatatgactcctgtgaagcccacttcgtcattctaatgagctgccaccgccgggcaagaaagggaggacttatatttgcagctgcatgatcttcctccggccgactgaaggtgccaagctgttgctgaggaagtggattgaggagctcaaggagcagccttggtcaaagcagaagaaggcaaatgatcagccaggtttcaactgggctttgaacaagactgctgggcaggttgatgtgtacctgctgcctcagtctgcatttccaactggaggcctatatttcaagaataaaacatgggtcaaggagacgaagggcaagcatgtgattatacataataactacatcacagggtttgagaagaagataaaacggttccgtgatcatgggctgtggttggtagatgagcacagccacgagtcacagtcgcttggtagaatatgatcttgctatcaccaaggtccaaggggctgaagcacatctctcctcgcggaagcatcacaattttgtaactgcaatttgactctcaaagccagtttctgccgaaccaaatgttggataatgttcgatccaccacgcaagatgcagcactcaaagataagatccttgtgcagaagatattggttgctaacatcttgtttgatccgtatgtcaaaagcccttgtatcctttcccatgaggccatgatgattattctttcgattgtatttgttcttattgaaaatggcatgttgagggaaaagaaaaaaaaaaaaaaaaa

SEQ ID NO: 19749 - DNA, 429 bp, Setaria italica
  Peptide Sequence Number=SeqID_85723
gcttgaggagttcaagcacttcttgcctgataaccctacgcctccgcaggcagccaccatctctagagtcagaaatgatgagaagagcaccttaatccattctgctaggagtgttcagaccatcaagagggagcgagcttttctgtcaacagctgatcgtgcctccagtgttgatcgccctgatcctgagcatgatctcctgagaaggtgtactaaggagaaaataatgcctgccacagtcaggatagaagagattatgaaaggaatgataaatatgacaatggagggctatgtggccgcaaacctcaaagaaagttggaggaaaccggtgatgatgcactagggggtcctagcatctctccgttatcattcaatgattaatagtatgtactgaaaagttcaagcacaacaacaagggtctcaattttg

SEQ ID NO: 19750 - DNA, 852 bp, Setaria italica
  Peptide Sequence Number=SeqID_85724
atattatttaaaacaacgtcgcgaaaccacataagttaagctgccaagaaaataacaaaggacaaaaaaaggctgaaccaaaggctatgccagggcatcagacatcacgatggtagaaagctctgtgagacacggttctacctctccagaacgaactcaaaactaggaacacgcaaatgtcacggaattcttcctgacttaggctagccatgcttctcatagatctttaacaatctcaatgcccatggagttagctgtgccaatgatggacttgcacagcgcctcaagcgacatgtgcttgcagaaggggtcagcctgtttcaatttcgcgatctcgtacacgtggcggagagtgagcgaagacacattgctgtggcctgggcgactgctggctgtttctattcctgcagccttcttgaggaaccatgatactgagggtgacttgaccacaaactcgaaggtgctatccttataagcagttaaggtcacttgcattggagtctctgccttgtacttctgggtcctggcattgaaatccttgcagaaagccatcaaattgagccgatagaaacccagtgctggaccaactggaggtgcaggacgggcagcaccagctggaacaataagacggattgttgccagtacaggtttccttgctgcagcatctttcagagttgctgccatcattcagagtaatacctactcccggcggctttagatccagcggaggcgctcgatcccggcggcgcgctcgtcccagcggcggcgcaaagagacggcgcaagaggatgagagcggcgcgctccctcccggcggcggcgcaggagacgagagcaagaactcgagaagagg

SEQ ID NO: 19751 - DNA, 543 bp, Setaria italica
  Peptide Sequence Number=SeqID_85725
ggcctcagaagtcagaacacctgtttacgtagtagctcaaacttctagtctctggtcacacatccagtatggcctcgagaacctccgtgccctcccttgcgctcctcctcgcgctgctgctctcgtgcgccgtcatgatgagcagcgcggcgcggaagctggaggaagaagcggcgcccaaggaggaggaaccggagttgccgccgcacctgccggtgccggagttgccggtgccagagcacgagctgcccccgctgcccaaggtcgagctgcctccgttcccggaggtgcacctgccgccgaagccggagctgccgcccttccccaaggtggagctgccgccgaagcccgagatgccctccattccagagttccacttcccacagccggaggcggctaagccatgagcccaagatgcatcctacggcatatatgccgcgctagctatatactccgctggttgtgttgttgtcaagcatggacttggcactcgtgatgtgcccttgtacacggtgtgttgcattgccttgtgttctcgaaaaa

SEQ ID NO: 19752 - DNA, 229 bp, Setaria italica
  Peptide Sequence Number=SeqID_85726
gacctgggactgctgtttgtgtcttgctcggttctgaatttttcaccagctgcacctctatatccggagctgtgatctgctcttaggcagaatatcagccgtttgtttctgttgatctctgcacagcagttctacttctcagttctatcaatcgattcagactgcgcttgtctgaatttcctgtgaagcttaagatttttatgaagttgttagttgccgtgccaatttg

SEQ ID NO: 19753 - DNA, 518 bp, Setaria italica
  Peptide Sequence Number=SeqID_85727
tttgactctggctcttcatgggcagctgttttagcaaaaagggatggtcttaaatttcctgcagatatttatcttgaaggttcagatcaacatcgtggatggttccagagctcattgttgactagcattgctactacagggaaggctccatactccaatgttgatctgaaccttcaagataaatttcctgcagatatttatcttgaaggttcagatcaacatcgtggatggttccagagctcattgttgactagcattgctactacaggttcaatttttatggtgtagcatcttttaacattttttctatgcaaaagggtgcaaaggctgccatccttgtattgtttgattttctatgatatgtctgttgtgtgaaagaataaatgcctttttctctaactattttttccatctatatttccactgtctgaattattcttcatttttccatgtgaaaacagggaaggctccattactccaatgttattacacatggattgtactggatgaaaagggtt

SEQ ID NO: 19754 - DNA, 603 bp, Setaria italica
  Peptide Sequence Number=SeqID_85728
tttgtaaggctcttctaaaatgagtgaacattgttcatccagatacttcacaactgcagcattgccagctcccaggacagacaaaccaccgaactgtccagcttcagcagtgaagtttccttcatcatccacgggagaaataataggaagcccatatttcaaacctgttatatagtcttcctggccatgccgggggcagtatgaacaaggccagttccggattcagttgtaatgtaatctcctccaagaacaacagaacattcattgccattcacaggatggacatacctgctgtgctccaaggcagatccaggaaatgatttatgcactacaagcttcacaccccatttggactccagagttgtgacaagatcagaagccacaataacaaacaattttcccttttcagcgctcaatatactcccaacttttctttgtttaccaccagatgttgactcacttatgggtacagaatgtacctcagctactgcgtaagcaagctcagggttcacagcaacagcagcattagccggaattgtccatggagtggtggtccatgtgaccaaagatacatttggaagaaattcgtccagcatcccagta

SEQ ID NO: 19755 - DNA, 2382 bp, Setaria italica
  misc_feature (45)..(45): n is a, c, g, or t
  Peptide Sequence Number=SeqID_85729
ccagttccggattcagttgtaatgtaatctcctccaagaacaacngaacattcattgccattcacaggatggacatacctgctgtgctccaaggcagatccaggaaatgatttatgcactacaactgaatccggaactggccttgttcatactgcccccggccatggccaggaagactatataacaggtttgaaatatgggcttcctattatttctcccgtggatgatgaaggaaacttcactgctgaagctggacagttcggtggtttgtctgtcctgggagctggcaatgctgcagttgtgaagtatctggatgaacaatgttcactcattttagaagagccttacaaacacaagtacccctatgactggagatctaaagaaccaactatattccgagcaactgaacagtggtttgcatctgtggatggttttcgtaatgctgcaatggatgcaatcagacaagtaacttgggttccttctcaggcagaaaacaggattgttgccatgacctccagccgttctgattggtgtatttcacggcagagaacttggggtgttcctattccagttttttaccatgtggactcaaaggaacctcttataaccgaagaaactattgaacatatcaagtctattgtgtcaaagaaaggtagtgatgcatggtggtatatgacaactgaggaacttcttccagataaatatcgggacaaagcatctgaatatcgcaagggaactgatacaatggatgtttggtttgactctggctcttcatgggcagctgttttagcaaaaagggatggtcttaaatttcctgcagatatttatcttgaaggttcagatcaacatcgtggatggttccagagctcattgttgactagcattgctactacagggaaggctccatactccaatgttattacacatggatttgtactggatgaaaagggtttcaaaatgagcaaatctattggtaatgtagtggatccagagaaattaattgttggtggcaaaaaccaaaaggaagaacctacctatggagcagatgttctccgtctatgggtttcaagtgttgattacactggtgatgtgttgattggtcaacaaatcttgcgccagatgtctgacatgtatagaaaactacgaggcacgatgcgatttctgttgtcaaatcttcacgattggaatccggataattcggtaccctataatgatctaccaaaaattgacaagtacgcacttttccaactggaaacagttgtggcttccatgaaggatggttatgaaaattaccaattctataaagtatatcagatgcttcaaagatttgctattgttggtttgtccaatttctatttggatgttgcaaaggatcggctttatgttggaggccgagctagcttcacaaggaaaagttgtcagactgtcctcacagcacatctgctctaccttgttagggccattgccccgataatgcctcacttagctgaggatatctggcagaacctaccttttcaatacaccttggaggatggatccctcgcaaagtttgtttttgacctaaaatggccagaaaagaatgaagaatggctctcagtcgcgaaggatgatgttgatttcctgggcattatccttgagttgaggtcagagatcaacaaaattttggagaatgctcgcacaggaaagttgataggttctagcttagatgcgaaggtgtatctccatgcaggaagttcagatacagcaattaaactacaggagctatcttccgcatctaatgatgcagacgctctgcatcgcctgttcatcacatctcaggtggaggttctcccaacccttagtgaagaaactgcatcatctgtatcttacataggaaagttcagtgacccacgcactggagacatatggattggcgtgactcgtgcagatggttcaaaatgtgagaggtgctggaactacacccgggacgttggatctttccgtgaccatcctactctgtgcgcacggtgttatggtgtcattgatttgcagccacaacctgctgccgcagctgtcagttgagtcttgagggatgttagccgtaccctgatcgaaccatctttgactccatttaaaagattattggtggaattcatgaacttgaaagaaactacacttctttaatctattggaggaaagcgaggaaaagacgttgaggaatgggttgttctggaacttcagttcgaacctcaaattttgcctgtaacaagttgtactttagattctcaaatttgttgtgcatagttgacaattattgtttggagcttgggccatgctcaccttccccgcttcctatactcgtattcctactccacatgaaactcttgactgtaaatcaatttt

SEQ ID NO: 19756 - DNA, 263 bp, Setaria italica
  Peptide Sequence Number=SeqID_85730
cggcggttccaccggcacgagcccccgcgaccaccagtgctcctccgccgtcgccaagcacatcaaggcgcccgtccacctcatgccgacttggttcagagtcaccgctcgtttggcccatttcttcaatcgggcacatccatgcctgatttggaggccgacttaaactggtcctgccttcttgtttatctcatcgacactcttttttccttgtgattggtcggggggatcaattgatcggaaccacgtcgctttcgctgaaa

SEQ ID NO: 19757 - DNA, 354 bp, Setaria italica
  Peptide Sequence Number=SeqID_85731
ggattctccttccgttttgttggttccgttctggagtgctgatgcgtctctccttgattaggaaagatgccgacttggttcagagtcaccgctcgtttggcccatttcttcaatcgggcacatccatgcctgatttggaggccgacttaaactggtcctgccttcttgtttatctcatcgacactcttttttccttgtgattggtcggggggatcaattgatcggaaccacgtcgctttcgctgaaagataagatttccatttcctcgcaagaagcctgtgatttttattttatttttttgaatcgtcgcccagcttttgctcccgtgtaaggtgtggctttccgagatgaaca

SEQ ID NO: 19758 - DNA, 248 bp, Setaria italica
  Peptide Sequence Number=SeqID_85732
ctgaggacagggtaacgagtggttcttgccaagaaaggggggttggttatggcgagagggccgggcatgccggcggcggcggcgctgggggccgtggtgatcttagccgccgcagccggctggcacggcgcggagggtaagtcgtgcaccaacgcgttcccggggctgacgtcgcacacggagcgcgcggcgaacgcagctgcggtccgcgccgcgggcgccggtgcccgagcgcagccgaccacggt

SEQ ID NO: 19759 - DNA, 1064 bp, Setaria italica
  Peptide Sequence Number=SeqID_85733
ctcgccacggctccatgtcaaattaaagcccttctccacacacacacacacacacaagggggaaaaattatatgtttgctagctaaaacgatagccccatagtatgacatctaggccaaacatatgctctacaggggtaaatgttgatcatcatcttaaacatcaagaacctggcagctaacaagctcagccgtcccaaagttcctggaagccacgggggtccatagcacattttcttcggatgccctgttgtctgcgctattctgcaccacagcctgcataacttgaagagtattgttcgccacctttgttatgacgtggagccttccacggaggccagcgagtaaataaggggcctctgcatcagtgaaatcattaaccggaacctgtggcgtgatagctacccatgtgtcctcctcagagttgtatctttttatctggccgctatccaaagagctggaaggctccaaggtataaagtttatcatcgatcacgatacccagtttcgtgcctgcctgccttgctggccatccatcgccgagaccatctggcatcgttgaccaagagttcagttccgggtcatagatctcgccaccgatgtcaaaaaaaaatggccacgagtacaagctctgaggaacatatagtttacccttgtagggtgccattcctgtggcaataggcttcagcacatcagccaagaaagctgtggggagtacctgtgctttcgcgaaaggcatttctggtagctcgctccacagtccagtttttggatcaaacacctcagctgaacgcaggggaagcaagccattccgacccctgctgactccaccaactacatataacttgccattcaagaatgttgccttgcagaaagcccggccagtcatcattgggcttgcttcctcccacaaattgagaaaaggatcatatctccatacgcagttcagggcaacagctttggaaaaccccccaacgacatacaaggaaccatcagcaacacccactgagcaaccacaaaagggcatttggtccaaaccattcctgcgccagaaccagctcctcac

SEQ ID NO: 19760 - DNA, 252 bp, Setaria italica
  Peptide Sequence Number=SeqID_85734
ccttgcctatcctctgttgcgtgtctcaggggagagttaatgaggattggagaaaggctggctacctagaggccattaatgtgacgaactcaagatcggtggatcatcgccgagctccaaccaagatcggaggaggaaccacaggaaggcgtatggggaatggagacgaagtagtagtttggagggagatgggggcaatgaggaggattgcgggcggcggcggcgatgcagggcgagcgaggagtaggcgag

SEQ ID NO: 19761 - DNA, 1039 bp, Setaria italica
  Peptide Sequence Number=SeqID_85735
gcatgagagcaggctagactctttggtagctctacccatcacttgcactcataggcacattgaaagatgtatgagcctgagtagaatattgcttacctttccttgcaatcaaagctgctttgaacaaaatagggaaaggggaggctacatcatataccaatttaactgattcgagaggggatgatcttttaggtcctttcctacttcacggttagcacattgaaacgctcggtatatcatacactttggatatatcgatgcctaatagtattaggggtgaatgcacgctaaagttgatgttactatactacgaagatgtattgggttcaggcttcaacgagtggccatcctgggggttttgagtgtcgtagattgccattgcaagcgaaatcggcatcatgcatagcgctttggactggaggaactgcatcgctgccccgatgtcttcttccatcagctttgcgacctgcttctctgtgccatccgttgaccacttctcccaaatctgctgtttgctcccactatcacttgcttcacccttaactgaaagagggatatcagcaaccagttgcgcaacagcaccagcaccgcccagcctgctcatgcttagtaccttgacttgaagcctcagaaacttcacataatcgaggatctcatctagcatagctgcccgatctgtcttgtttgtattgggcaccaattcctgtagggccctcatcctttctgctattctctctcttcttagcctctctgcgatgctatgggggtcagttgcctgcccacgccgcgcccgcaccttcggcctcggcgccggcggctgtggcccgacagccgccccaccttgcttcggctgctgtgcgtggaacacctgggtaggcgggctggggcggaggtgggtcggctgcacgccaccgccgaacaccggcgggaagagcccggggagctgcacggcctcccgatccgccttgccgccctcgccgtgcttcccgctcccggaagcctcggcggccgcggcgtctaggctgagcgcaagggagaa

SEQ ID NO: 19762 - DNA, 351 bp, Setaria italica
  Peptide Sequence Number=SeqID_85736
ggatccagggctacgtcaagaacgtcaagttcctcgccggctgcaactcggcggcctgcaacgccgccgccacgcagcaggcggcggcgctggcgagctcgtcggacgccgtcatcctcttcatggggctgagccagacgcaggagagcgaagggaaggacaggacgagccttctcctccccgggaaccagcagagccttatcaccgccgtcgccaacgcggcgaagcggccggtgatcctcgtgctcctctccggcggccccgtggacatcacgttcgctcagtccaaccccaagatcggcgccatcctctgggccgggtaccccggccaggctggcggcctcgccatcg

SEQ ID NO: 19763 - DNA, 391 bp, Setaria italica
  Peptide Sequence Number=SeqID_85737
tgaaatccaccaaccactcagtctgttctgagctcaaggattttgtgaggagattgcactcgctaccggagatagctgtgagtttattgcatggcttcattctatctctgttattattttactaacttattgtatgcaatggtttagaggcatgttcatttggcgcaacacttgcaatccttcacaggaaaaccctcattccatgcccgactagacatagaacaaacgatattggaggttcagaactttgaaatgtgagtttatcgttgtattactgttttttatcctttgaacgcacagctgagcttcgtgtcatttcatttccactgctctttaattttcttttgtttcattttcttgtagttcattcatcactcctatttaacttatc

SEQ ID NO: 19764 - DNA, 664 bp, Setaria italica
  misc_feature (630)..(630): n is a, c, g, or t
  Peptide Sequence Number=SeqID_85738
tcgcctttgaaacactggcatttatattgatatttttacttcaatactcgtacaagatctgcctaaaatgttatgtgaagtttggccacatgttttctatcctgataaaccacaatatttttttgtttgctcccaaattatgtttgtatatgagctaagttaacttcatccccagatgctttgagtacgtcgaggagatgatacataagcaggaacctattgaaaatgtgcttcgccttctagtgttactctctcttacaaatgctgggttgccaaagaagaattttgattacttgaggcgggagatgctgcatagctatggctttgagcacatgaacttattatacaatctggaaaaggctggcctttttaagaagcaggaatcaagaagcaattgggttggtattacaagagctctgcagcttatagtcgatccctagtgatatatcgtacatcttttctggatatgcacctcttagtattcgccttgttcagcatgcagtgagatctggatggcgttctattgaagaattgttgaaactattgccaggtccacatctagatttgaaaagggtggtttgacaattgattcgtcactggaagtacatccaggttcaggggctcagcagngtattgacagggttggtcatcgctctctggtttt

SEQ ID NO: 19765 - DNA, 434 bp, Setaria italica
  Peptide Sequence Number=SeqID_85739
cttttgaacttgaccattctttgcaggaatgtctcattgaaggagatacaagttctatctggcatgttgcaaaagcgattcataaactagagtttgcctttggagttatcccaaatgttagggctaagggtgtggcatctaccaaagctgcagagttgttgaataatatgcaactagaggatccggtcaacatggatgatatgggcattccggagataaacactgttattctattagacagagaggtggacatggtgacaccaatgtgctctcagttgacatatgaaggcttgctggatgagtggaagttgatgcgagcatcatgggaactcaacaagatgggaaaaaggttaggttccactgaattcgagtgataagttgtacaaggagattcgtgacctcaactttgaagttgtagttcaggtttttacgtc

SEQ ID NO: 19766 - DNA, 458 bp, Setaria italica
  misc_feature (5)..(5): n is a, c, g, or t
  Peptide Sequence Number=SeqID_85740
tagcngtttatgtggcaataaatgtgccagctggttgtgcaagtgatttgcatgagaggccttaattaatggataaaaggttttccacatatactctcacattacagttatttcccactttacagcagggcgttctattgaagaattgttgaaactattgccaggtccacatctagatttgaaaaggggtggtttgacaattgattcgtcactggaagtacatccaggttcaggggctcagcagagtattgacagggttggtcatcgctctctggttttggttgtattcattggtggtgtcacatttgctgagattgctgcccttcgattccttagtgcacaggaaggaatgggctacgacttccttgttgcaacaaacaaaaggtacgtcaaataggtaaacaacgaataactacaagaaccaaattaataagaccaagacaagtaaaatacaagga

SEQ ID NO: 19767 - DNA, 484 bp, Setaria italica
  Peptide Sequence Number=SeqID_85741
ccggccgcgacctcccgtcaatcgtgcgtgcccgctgcgccgcagctcctctcgcccgcagcgccccacgccggtgatcccgcagggcggctggaggaggcgacgagggccaaggggcgccgccgctgccgacccacctctcgtggccggcagactgcgccgctactccgcagctagcctctggtccgtccctcgacgtgctccgccgcagcgcgctcgatcggtgtgaggctggagtggagcagagatccacccgaacttggataggttcctttccaactcactcatccctggacagatggcgcagatccccaaccttgacaatgcgccgctcaaccttgcagccctcagggagcagtcgcagaaggacctactcggcatcctaaaaagcataagggggaagaagtgtctggtcattgacccgaagctcgctgggaccctgtcgctgatcgtgcagacatccctgctaaaggagtatggtgcg

SEQ ID NO: 19768 - DNA, 1038 bp, Setaria italica
  Peptide Sequence Number=SeqID_85742
tagaagagattttcgacaatcctaaagctgcattgctagtgtgatatagaatctcaagttgtttgaaatgaattctatgaccgtgtaatattctacagatgctgcaaattaataatggttcagtggaagttgatgcgagcatcatgggaactcaacaagatgggaaaaaggttaaggttccactgaattcgagtgataagttgtacaaggagattcgtgacctcaactttgaagttgtagttcaggttttacgtcaaaaagcaacatctattcagcaagattacgcggaagtgaaatccaccaacactcagtctgtttctgagctcaaggattttgtgaggagattgcactcgctaccggagatagctaggcatgttcatttggcgcaacacttgcaatccttcacaggaaaaccctcattccatgcccgactagacatagaacaaacgatattggaggttcagaactttgaaatatgctttgagtacgtcgaggagatgatacataagcaggaacctattgaaaatgtgcttcgccttctagtgttactctctcttacaaatgctgggttgccaaagaagaattttgattacttgaggcgggagatgctgcatagctatggctttgagcacatgaacttattatacaatctggaaaaggctggcctttttaagaagcaggaatcaagaagcaattgggttggtattacaagagctctgcagcttatagtcgatgtaaatgatacagcaaaccctagtgatatatcgtacatcttttctggatatgcacctcttagtattcgccttgttcagcatgcagtgagatctggatggcgttctattgaagaattgttgaaactattgccaggtccacatctagatttgaaaaggggtggtttgacaattgattcgtcactggaagtacatccaggttcaggggctcagcagagtattgacagggttggtcatcgctccctgatttactgctggctataattggtctgagtatcgtgttaccattgacgtacctttgttgttg

SEQ ID NO: 19769 - DNA, 2111 bp, Setaria italica
  Peptide Sequence Number=SeqID_85743
tcggcatcctaaaagcgtgggtttcttgtctcatactgctcgttgcgaccatggcctccagtggtattgttatttgatgatgctgaattgagaaattaagtttcctttgtggtggatatcagataagagatccccaaccttgacaatgcgccgctcaaccttgcagccctcagggagcagtcgcagaaggacctactcggcatcctaaaaagcataagggggaagaagtgtctggtcattgacccgaagctcgctgggaccctgtcgctgatcgtgcagacatccctgctaaaggagtacggtgcggagttgcgaattctctcttctgatcccttgcagacggaatgcccgaaaattgtatatcttgtgcgctctcagctgagcttaatgaaattcattgcaagtcagatcaggaatgatgaatctaaagggctccaaagggaatacttcctttactttgtaccacgccgcattgttgcttgtgagaagatcctggaggaagagaaagttcatcagaaactgacacttggagaataccctttgtatctagttccattggatgatgatgtcctttcttttgaacttgaccattctttgcaggaatgtctcattgaaggagatacaagttctatctggcatgttgcaaaagcaattcataaactagagtttgcctttggagttatcccaaatgttagggctaagggtgtggcatctaccaaagctgcagagttgttgaataatatgcaactagaggatccggtcaacatggatgatatgggcattccggagataaacactgttattctattagacagagaggtggacatggtaacaccaatgtgctctcagttgacatatgaaggcttgctggatgagatgctgcaaattaataatggttcagtggaagttgatgcgagcatcatgggaactcaacaagatgggaaaaaggttaaggttccactgaattcgagtgataagttgtacaaggagattcgtgacctcaactttgaagttgtagttcaggttttacgtcaaaaagcaacatctattcagcaagattacgcggaagtgaaatccaccaacactcagtctgtttctgagctcaaggattttgtgaggagattgcactcgctaccggagatagctaggcatgttcattgaaaaccctcattccatgcccgactagacatagaacaaacgatattggaggttcagaactttgaaatatgctttgagtacgtcgaggagatgatacataagcaggaacctattgaaaatgtgcttcgccttctagtgttactctctcttacaaatgctgggttgccaaagaagaattttgattacttgaggcgggagatgctgcatagctatggctttgagcacatgaacttattatacaatctggaaaaggctggcctttttaagaagcaggaatcaagaagcaattgggttggtattacaagagctctgcagcttatagtcgatgtaaatgatacagcaaaccctagtgatatatcgtacatcttttctggatatgcacctcttagtattcgccttgttcagcatgcagtgagatctggatggcgttctattgaagaattgttgaaactattgccaggtccacatctagatttgaaaaggggtggtttgacaattgattcgtcactggaagtacatccaggttcaggggctcagcagagtattgacagggttggtcatcgctctctggttttggttgtattcattggtggtgtcacatttgctgagattgctgcccttcgattccttagtgcacaggaaggaatgggctacgacttccttgttgcaacaacaaaggtcgtcaatggtaacacgatactcagaccaattatagccagcagtaaatcagggatgatgtaatttttttttctgagcatgtgtttgtaatttcaatttcaaacaaacccaagcttgtgagttctttttgctgtgcgtgtgttttaagcttgtgagggtttttcttgtttggctatcagttcctaattactcggcaactggacgttaggctcacgcgcctggccttttttgtgtatatatttagattaatactgatagatgaaattttgatgttc

SEQ ID NO: 19770 - DNA, 394 bp, Setaria italica
  Peptide Sequence Number=SeqID_85744
aagaaaggaaggaacggcggacaaggagaagaagcctggcagcagtaagtgcgtgacgaccaaggactgtcacctgaagcggcttgtgtgcgccaagaagtgcaccatggccgcccacaagaagtgcgcagccaagtgctcccgcgcctgcaccgccgccggcctccccatctgcacctgatcgatcaagccttttttcaatcatatctgcttcttgtctatgtttttttgttgtaaatcatgcaaccaataatactcctagatcgatgtctgctgaatttctgaaagcatgcgcaccaagacagacacatgtcactgggaatggcatgtggacaggcattcacagctgagtttcccatccatgactaagaattcagatttacaaagaaaacaa

SEQ ID NO: 19771 - DNA, 278 bp, Setaria italica
  Peptide Sequence Number=SeqID_85745
tttttttttttcaaggtgacttggaaattcacgagtattttcaccaattggaaaagaatgatccaacactccaacagcactaccccggtcagtgctttgctgctaacaattggcttggaaactgtctgaacatgatgatccagccacagcaaaataaattagtcgaggctggtgatgcaacagtgaggataaatagacaaactcacatacttatcatatagatttcaaccttttttcactaacactatcagcaatagtacatacattagataaggttc

SEQ ID NO: 19772 - DNA, 921 bp, Setaria italica
  misc_feature (43)..(43): n is a, c, g, or t
  Peptide Sequence Number=SeqID_85746
tttagtttaaaagtttctttttttgtttctttaacttttgttngatcgatgtctgctgaatttctgaaagcatgcgcaccaagacagacacatgtcactgggaatggcatgtggacaggcattcacagctgagtttcccatccatgactaagaattcacatttacaggcacaacaattcatcaccaccctatctagtccactccagcgaggcagcgattcatatagtatataaataaagacggcatgcatggtcaaagcaagtgcagcatccagtttctcctctagccctatcgctagctactctcctcatctttagaacagtgaaagagagaatgcacccttcatggcccctctgtcagccttcgcagctcgctctcctcatccagcgtctccatcagcagcgggggcgcataccgcgcgttcccctcgtgctcttccgtgtcctggcagaacgacagcattatggtgtcgatcgacatctccaccactgcaaagaaaagctttgcaactgtataacccaacgcccacgacaccaggacgggtaccagcggcgatgatatcttgttgtggccagacctgtacttgtgcttatccagcatgatgaaagcaaacagcgcgcagaacaggctaacacacagcttgcccaacatcagaatcacatccccaatcacattcactttcccaatgcgcaatatgttcttcatgattaactcagttgctagcgcagaagccttgcagaatcctttccctgtaatggcaatcatgatgtaagcatttcgattcactgatttcagggtccaatcaatgcaccctaagcagcactgagacgaggatgatgctgtcttcccaaaccagctgtcatgggcagaattgacaaatttcagcctgcggcgaagtgactccagtataaaccgcaccca

SEQ ID NO: 19773 - DNA, 229 bp, Setaria italica
  Peptide Sequence Number=SeqID_85747
cggtgacgacggtgagtgctgtaggaatgtaggcgacaccccagactggtaggaagacttctgggatcatgacggaaacagggatgataatattgtagagaatgaaggcgacagtgggggcgacgactcgtcgcaccaggaagaagcttggcaaccaggaccttccatgccatcttccggaacaagtttgcgctgccacaggcccacctgaactgctgacggcagtagg

SEQ ID NO: 19774 - DNA, 253 bp, Setaria italica
  Peptide Sequence Number=SeqID_85748
ccacccaccgtcccgtctcgacctcacggttccccttgcgtctagacgcttcctcgccattcacacgcatcttccttctctctctacagttcagaagtcagcagaatgactcatatcctccaccacaccatgcgtagaatttctctctctctctttggattttcatcttcttgttctgttatccttagatcttggtagaatcttttttttcttccttttgtttcggtgtgtttttggatggtgttgtccttga

SEQ ID NO: 19775 - DNA, 494 bp, Setaria italica
  misc_feature (485)..(485): n is a, c, g, or t
  Peptide Sequence Number=SeqID_85749
cttgcgtctagacgcttcctcgccattcacacgcatcttccttctctctctacagttcagaagtcagcagaatgactcgcggcgaccagcgggagcgggaccggcagagggcgcaggcgcggcggccggtggccaaggggcgcgacgacgggctcacgccggagcagcggcgagagcgggacgccaaggcgctgcaggagaaggctgcaaggaaggcggcgcaggctgcggggggcgccgacgccaagggcggcaagggcgccggcaagaacggcgtcaagaagtagccggggatcttcagatttagagaggaggcatcgggtttagccggtgtcgccggatctgttaaaattgcgtggtgtcgtagcggatagacgatgaaatctctctctgtccgtgttggaagatctgtgttgcttggatatggaaaaatctggaatggaattaggtttcgtcggtgttcgccttgacaaaaaaaaaaaaanaaaaaaaaa

SEQ ID NO: 19776 - DNA, 641 bp, Setaria italica
  misc_feature (614)..(614): n is a, c, g, or t
  misc_feature (638)..(638): n is a, c, g, or t
  Peptide Sequence Number=SeqID_85750
ttgttgtcctaccagccagacaaacatttatatgccggttggtttggttgcattcctggctcttctttcagtgtggattttgccaaatcatgtttggaaggatcaacttggaagggttgctctcctttcaggattcatattcataatgctgggatttggtgccgatggtgcgccttcattagttcagacaagaactcctcccccttctgttctaggcataccaaacgttccttgctctacaagtgggtattcttacacaatcatgaaactgggaccactccaatttacaaggaaaggcctatcagtagcaagtacttcggcaagcctctcctttgtgatatttcaaagcgcgagtctctgcttaacaacaaccactcctgagcagcttgcttctgctttgtggtggtttatgattccattgaagcacattggtgtaccggtacctgagataatacttacactactactttcgttgaggttcattaatttagtatttgatgaggtccgcaactcagcactggcgattgtagcacggcggataaactggaaaaagctgtcagctatggaaactatagatgttttcttcaactatatccagcgaatattcaaaaacntatttgatcacgcagaaacaaatntcc

SEQ ID NO: 19777 - DNA, 283 bp, Setaria italica
  Peptide Sequence Number=SeqID_85751
cactgcacagtgcgccactgctcccttcctcaccctctccccgccaatgcgagaggctcccgtaccgtgcgagctctgagacccatggcagccgtggccgggagcgctgggcgcagcgcccgtcccgtcgtggccctcgctctcctcctcctcgccgtctccgccgccgcgcccgtggccaccgccggcgcgtccgcggccgtgaacggggaccgcctccgggcggagcagatccggaagcaggcctcggacgccgccgcctccgctgccgctctcgccgcgg

SEQ ID NO: 19778 - DNA, 262 bp, Setaria italica
  Peptide Sequence Number=SeqID_85752
atataatataagagatattaagttttctgattatacataaacgtctattatttccttgtgcctttttatttagacctcaaaataatggtacagagagagggcaaacatcacaacgccaacggaagctagcgtgactgagaatggtattctccctctgtccttcctaaggaacattgcttcatagattgggatattgatgatcactagcagcccgcatagaacgacctggaggcaaaatccattcaacggcatattccggccg

SEQ ID NO: 19779 - DNA, 434 bp, Setaria italica
  Peptide Sequence Number=SeqID_85753
tttgaatacatatcacaatccacattcataattatagggctgttgcttatcaccgatgatacccttatctgcatttaaaatggaaagctgggaacttagcaatatgcattgtggttaagcaatttttctttcatggagtgcaatgtgtatttaattggcctgatactaataactgatgctgagtttgtttatgagaattttcagactctgcagtccataacactcttagtggtctctggcagccgtgaataggttatctcatatagccatatatttgcagctacagcggatttgaagtgtactttttacatctattaccacaaaaggctagaggtgaactccgtgttatgattttctctgaagtaaagtaatgatagcatgtcctgcctgaccttttggctactcttgtcataactagaaactttgtgattatg

SEQ ID NO: 19780 - DNA, 2407 bp, Setaria italica
  misc_feature (1)..(70): n is a, c, g, or t
  Peptide Sequence Number=SeqID_85754
nnnnnnnnnnnnnnnnnnnnnnnnnnnnnnnnnnnnnnnnnnnnnnnnnnnnnnnnnnnnnnnnnnnnnntagaatacaaaggatcctttttcaccatatatttttttagttatcgtataagagatattaaggtacaataaggtagataatttatgattagaacatacaaagtatttgttattcactgtgccctttttaggacatcaaaatattggtacaaagagggccagcatcacaaagccaagagaagctagtgtgactgagaatggtattctccctctgtccttcctgaggaacattgcttcatagattgggatattaatgatcacaagcaacccgcatagaacgacctggaggaaaaatccattcaactgcatattctggccacttgtcaagattcgacatagccctcccaccaggcacacgaggttgagtaatgcaatggttgcaatgatcacatattctggtgaagacgttccaaattccatgatttcttgctcgtacctttttgactcatcttcatcacttacctttggtgaaactacaaaacccatctttgacagtcctaacaacttcctgatgttgtcaatgacgccataaagatacgaggttattcttttaaccatccacattctctgtccattccaccatcctttcaatgtgtctccagatgttaatgcctcatacaggctgtaaatattctccacaacagagacatatatgaaaggtgtgatccatggactcataatctcagggaacaagggggtgcccttgagaaggcctagtgaagggatgacaacatagtacaaagtaggtagcgagttgggtgcccacaaaccatagatggagtagcccatttgatgtggcaacctagtttttccatgtccaaataagaaggggcagtattttgaaagaaaaatcgaaaaattaccctcgctccatcgcttgtgctgaagtattgtctgagccattgttgtaggggctacaccgacaaatgctgctcttgggggatcattgtagaccgaattccatcctctacaatgtattgccagtccggtgataacatcttccactgggcaaccatatttcaatccaatctcatttccccactgtgtgttaagttcataagtgcaggttgctaacgactttgctttctcttcagtcaggtctatgccctgttgtgtcttaattcctcggtcccagtcttccttgtagtctttggtgaaggtcctgccgcatagggcctctcttctatggaagcatccagtgccaatatacaatgggccaccccaagtgtccataccacccatctccaccttattgatgacattgagtgagttgccatatatgttattcttggtcatattgttatagttctgagggtactgcacaaatgctatcttgtgacccgtttcttcatccaggaagaagcacagtgcctctctgattgaatcgctgttgtttgaatacatatcacaatccacattcataattatagggctgttgcttatcaccgatgatacccttatcagagcattcattgccccagctttgaagttatggtggtactgaggcctcttctcacgtgccatgtaaaccagtgtaggcagtacatttccttcattatcaactgcatctctgtctttcccatctatcagaatctgaacaattggctggtggtcttttgagtttgcccctgtattccattcagaaaatcctttatgatttactctgatttgttcaggaactttgcctgacctaacagcagaatcgattcgctccgtcatttcttcgtacaggcccttgacgaacgaccattcttctaaagctctcggatcactaggcttatctgactgggcaaagtaagcggcaggtgaccttggctcgattttgtatctcctgcagaatggaagccagtgctttgcgaaggcggaggtctcccacagagcatagaaagtgagaatggatccaccgtcgtcggagaggtacacgttcagtttctcaggtgggtaattgtacgccatgagtgagaggactgtggccatgacgaggcttggtggctccgactgcggatctgcagtgcagacgaagatgtccacgcagggtagccgctccccgtacctggcagcgagcctgtccttgaaggcgcagcggcggctggggcaccaccgcgcggactgcgtgatgacccagtagaagccgaaccacagctccgccgccagcatccccagccacgccgccctgccggccgccgggacgtgcgtggccctgtagcagagcaccaggcatatccccacgaacagggttgtggcgtggagcttgtacagcgccctgcccccgagcttctcggtggcgaacagcctctccatctcctccccgatgtggagtagctactcggagtgtggc

SEQ ID NO: 19781 - DNA, 454 bp, Setaria italica
  Peptide Sequence Number=SeqID_85755
gaccaaagttgagggaaggaacaaaaataagctccagctggaaaaaggtaatgtgatttctgatcctacagttttcccatacaggagattgcatttggaactttaccggcgaagttactgttcagaggactatcatgtggctatatccagaggatctacttgtattaagacttcacattagctaagggtcataaaagaagctcatttgttacgcaggtagtaacccttctgtgagatgcctgtgcaatcccatgaatcatgacattcagttttgcccgtgatgttgtattttttggttcagggcaggagggtgtggcaaatttgtttgtgtaaaataggctattatgaaccttaattttggcagactaggttcttgtatttgcacataagatctgggatcttgtactgtgcaaatttggtcctgggctaagtttttctgtgttgtgtgcttgct

SEQ ID NO: 19782 - DNA, 316 bp, Setaria italica
  Peptide Sequence Number=SeqID_85756
ttgccaagagacacgatactagaaagatcgaaggaaaataaaaattagctttgcacaagaacaagcagaggcatgactagggagccaaaatagtgccatttatatttaccagcattattttttctgcaacctttctatctgtctgttacataaggggactttgtcaagcatataacgcagtccaagattcatagaatctaacatgcgcagagtcaactaaaactactgtaaaccttggtaaaacctaaagttctgctgaagcaattaagcagccatgtcttaaattactaatgtccagtatgttattaattggacc

SEQ ID NO: 19783 - DNA, 1203 bp, Setaria italica
  Peptide Sequence Number=SeqID_85757
tatgattattggaaaactagaataatggttcatcttaaagcaatgggcaagaagatatggggaattgtaaatgaaggttttatcattcttgatgagaagaacatgagtgaagccgatgacgctaatgagctactaaatgatcaagctatgaatgtgttatatggggctcttgacattaatgaattcaatcgggtcaaaaatctcacaaccgtatatgagatttggaacaagcttatgaaaattcatgaagagacatctactgtaaaggaagctaaactttatgtttttaagggcaagtttagtgaattctcaatgaagaaggatgaagatgtctctactatgttcaaccagttgaatgacatagtaaatgagctcaagggtcttggcttcaatattcatcctaaactacaagaagcaaggttctggcctcaagattgcataggaacaatagatggtacccatatacctgtaactgtgacattagttgatcaaccgaaatacattggctggcatgggtatccttcacaaaatgtcatggcggtatgtgactttgatatgcggttcacatttgctgtcactggttggtctggttctatccatgacactcgtgtattattagacacgcttctcacatacaaggaacaattttcacatcctcccgatggcaagtactatcttgttgactctggatatcctaatagaaaaggatttcttgcaccctacaagggacaaaggtatcatgtttatgaatggcaacatggtcagcatccggcaggattgaaagaagtgtttaatcatgcacattcatcacttagaaatgtgattgagcgatcatttggagttctaaagatgaagtggcgcattctcttaaatctgcccagttatctggttaacaagcagtccaaaattatagttacttgtatggcccttcacaatttcatcagagatagtgtcatacattatgtgcattttgaacaggattttgaggaagatgatgctaatccaacccaacctagcacagatggtggtgctgctgctttaggaaatgacatggatatgggtgcattgcgtgatgctattgttgtcgctatggtttcgtaattcgttgttgtacccatgatggatgtttccatactagaccgatctcatatgaatttcatattattgtaatgcaatttctaaatttaaaaaaaaaataaaaaa

SEQ ID NO: 19784 - DNA, 357 bp, Setaria italica
  Peptide Sequence Number=SeqID_85758
attcgcctcataaaccaaccgcagatgatcccttgggttcatagcaactccaccatatatgagcgtccggtggaaatcagcaaccagtgagcaaacatagcgagctgagtacttctttgggtgctgtcctttgccttgtctgattgtgtcaatgtacttccttaggccctcaggccaatcaaaatccgtgcatcattcactgaatatatttgtcctctaggtggtatctggagggaaggatgtgtaagaatgaattctccagtcgaccaatccaatgtgaaggcatgggtacctgcaccaaagctgatacacaagatggtggcagacgaatacaggacatacccagcagcaacaggc

SEQ ID NO: 19785 - DNA, 496 bp, Setaria italica
  Peptide Sequence Number=SeqID_85759
ctgatcactggtcagagaagaagcctattgcacagcttcatctgcttttttctcccaatggaacttgagaagaatctccttcttcctgatcttgttcgtgacttgatccaatgctagagcaagaacagctatgaaggaggagggctgaaggagtgagataacacagaaggaggagaattgaagtagtgagccaacagccaagcagagaatctctgcaatgcagctagctcctaatgattattgcagccccaagacttttgctcctgatctttcttggatctggatgccgaaagttgggctgtgggagtggcagcaattactaaagtccaaaagctcagagctgacagttgaaaacgaagaggatgaagaagaatcctaaggctccagccacatgtagtgcctgcaatggtgcaagcaaagctattcaccaagaaaagtgatgctcacttcctctctctgatccctgaacttccccttcctttgatgaatttcccct

SEQ ID NO: 19786 - DNA, 281 bp, Setaria italica
  Peptide Sequence Number=SeqID_85760
cctcaggtctccgccgaagtctcccccacaccgctctccacatctcgtcggcgacaaacccaaagacccgcgcaaaatcctcttgatgcggggtttatctgccgccgccgccccctccgtgtagccagtcggatcggagcggcgagaggccttcgtgtcggcgcgcgtatcgctttcatggcggcggcgcgaggggcccgatctggggttttggcggccgccgcggtgctggtttccgttctgctcgtgggatgtctcgcctcggtcggcgcgggggccga

SEQ ID NO: 19787 - DNA, 828 bp, Setaria italica
  Peptide Sequence Number=SeqID_85761
tctacgcatacactacttccgggtcaccggctccggccgcgtcatcggccacaacaacgacctgctcgagctcttctgcggtgtgtccccgatcgatgacaggcacacgatgttccccgtcgccagggccgcgatagcgccggccgaccgccatctttacatcatctgcaaacatcgcccggcagccggatcgagcagcaccagcggccaacaagcccacgagaaggtctttcctcccaaagccttctctttgaacaccgcagacaagagcctgtctactctgccgccgctcccgttcactcgtggatcatgggaagctatctcagcgtgtggcaagctctgggtgccggtcgtattggtaaagagaggctcctatggagaggcatggagcctcatcgtttacaagctgattggggactgttggtctgaagtcaacagtgtcgagttcccttacaagcattcgttggaacgtgggtacagtggcaccttactccagggctatgtggttctccatacaaacattctattatcattcagtaactccagcttcttcttattcaagtgcaccagcggcgacttgtcccgtgttgacactaatggcacaagtcaatatattcctatcactggcaaagcagtatatgtcaagctccatgacatgatctacttcatacggggaaccaaactctttgcatacaagtacactccaaagtgggacaagctgcttgcggctcccatagtaatcaggaaatatttggccctatgacaaggaagggtatggcttcgtggagcacgtaggcggccgtatgttgtgtgctgtttggatcaata

SEQ ID NO: 19788 - DNA, 860 bp, Setaria italica
  Peptide Sequence Number=SeqID_85762
caagaagatacagcaatactgtaatagtaatggtgcagcaaagagcataaaatttagtcttaaaagagcatgatcataagtgatgtacattccttgccccattcataacatgctatcttgtttccagccacgctctgcagctggagcgaatgtttcacagagtgctcagttcaccaatcaagtttctcaggctgccaatggaagccaaatgtcgacagaagcatatcgtgctaagcatgagattactatcgttggcaacgaggcaccagcgcccttcatgacatttcaatccactggcttcccttcggagattctaagggaggctcttcaagtcaacaatccaagtcggggttcgacctgtttgttgtcttgttcagcctcctgtggtttggaacacctcctttattttgtttccagtcctccagtgcatgatatttggcttggcttctgtatagctaaaaattacacatcatgagaagccttctctctttgctatatactagatttagacttgtatccttacacagttattcacatattagttatatctaaggggatctattttttacaggtcatgcaagcaggattctctgcgccaactcctatccaagctcagtcatggccaattgctctaaagggtcgtgatattgtagctgtggcgaagacaggttctggaaaaacactgggctatctcattccagggtttattcttctgaagcgcctacagcataattcaagggaaggtccaacagtattagttttgtctccaaccagggaattggcaacacaaattcaagatgaagcaatcaagtttggcaaatcttcaagaatatcttctacgtgcttatatggaaggtaga

SEQ ID NO: 19789 - DNA, 2620 bp, Setaria italica
  Peptide Sequence Number=SeqID_85763
tttccccctttttaatcggcgacgcctactcaatcccggccgcaccggagagagagaagggttcggtgacgaaaaccccaatcgcctccaccccctccgctcctcctccggccgccgcctcccgcattccgccgcgcctcgatcgggggttggtgagagggtgttggggacgcgcggggatggcgtcgtcggcgtccgcgccggcgtccaagggcccgcgatacgcgccgccagatccgaccctgcccaagccgtggagggcgctcatcgacggcaacactgggtacctctacttctggaacccggacaccaaggtcacccagtacgagcgccccgtcgcggctgtgcccgcctccccgtcgcagccgcctggctactccaggcccgaggagagggcgaggagctccggaccttccgagtcacgctcggaagctgcggtgagccgctcgcagtatgtgcccccttccgataacaggacaaggaatgatcacgcagagccacgctctgcagctggagcgaatgtttcacagagtgctcagttcaccaatcaagtttctcaggctgccaatggaagccaaatgtcgacagaagcatatcgtgctaagcatgagattactatcgttggcaacgaggcaccagcgcccttcatgacatttcaatccactggcttcccttcggagattctaagggaggtcatgcaagcaggattctctgcgccaactcctatccaagctcagtcatggccaattgctctaaagggtcgtgatattgtagctgtggcgaagacaggttctggaaaaacactgggctatctcattccagggtttattcttctgaagcgcctacagcataattcaagggaaggtccaacagtattagttttgtctccaaccagggaattggcaacacaaattcaagatgaagcaatcaagtttggcaaatcttcaagaatatcttctacgtgcttatatggaggtgctcctaaaggtcctcagctaagagagttggatcgtggtgctgacgttgttgttgcaactcctgggagattgaacgacattttggaaatgaatagagtgagcctgcgtcaagtatcatatcttgtccttgatgaagctgaccgtatgcttgatatgggatttgagccacaaataagaaaaattgtgaaacaaataccatctagacggcaaactcttatgtacactgccacatggccaaaagaggtgagaaaaatagcgtcagatttactggttaacccaattcaagttaacattgggaacactgatcagctggttgcaaataagtcaattactcagcacgtggaggttatctcacattcggagaaatcaagacgacttgatcagatcttgcgttcacaagagcctgggtcgaaagttataatattttgctccaccaagaggatgtgtgatcagctggctcggaacttatcacgtcagtatggtgcttctgctattcatggtgataaatcacaggcggagagggattctgtgttgagtgacttccgaagtggcaggtgtcctgttcttgtagccacggatgtggccgctcgaggcttagacataaaggatatcagagtcgtggttaactatgatttcccaactggtgtggaggactatgtccacagaattggaaggacaggtagggcaggtgcaacaggatctgccttcacattctttggtgaccaggactcaaagtatgcttcagaccttgtgaaaattttggagggggcagaccaatcagtgccaccacaattaaaagaaatggcttctcgtggaggatatggtggaagatcacgtcggtgggcatcttctgatgactcctatggtggtcagggatatgggggtagaagatcaacggacagcttcaataacagtagctttggcaatcaggctggtggtggttcaagctttcactcgagcttccataacagcacgagtggcggtcaatttggtgatactcctagctttcatggcagcagccgcaacaatcagactggtgacaatccaagctttcctcccagctccagcaacaatcaatctggggatggtctcagctttcatgaaaggttctatggaccacgtggaggggatcaaagcagaacaagcaatgacggattccgtgctaggagcaggagtcctagcaaggctgtgggagtttccaactggtaattgcatcttctaggtgtgacccagtttttccgatggtgacgaaaccaagtagatgaagatgggtaccctgaccaattatattgtttcctttgctaccttgctcaaatcaaaggatgtcatggaacatcgctaacttaggatatgggtgttggtctaatcccaaatggtttcctggtatgctgatttgatgcctgggagaaggctgataccttaccatgtgctggtggtcgtagtttgtaaagctttttaagctcaacttctttgctagtatacctcctaatgctagaacctgatcatggggaaacaaaccgctcagggctgaattttggacaaaacggacagccggtatttctgtttaatgttatgtacaatctatgtcgatgactgttgtaaatgcatgcggcatggtttattacatgtgcaaaaaaaatcaa

SEQ ID NO: 19790 - DNA, 231 bp, Setaria italica
  Peptide Sequence Number=SeqID_85764
tttttttttttttagtctgaagtattgaagcttgcacaaaaaaaatgttttacaagggcaaaattatcgatgtaatcttacaaacgtgtgcttatgtactgtctacacttgtatgaatggctcaaatcctgctcttccagcatcgttctgagctcgacatggtacaaattacacacaggccacacccatatctcaagtcaaaaacaccaaaacgaaaagaatgatgaaaag

SEQ ID NO: 19791 - DNA, 564 bp, Setaria italica
  Peptide Sequence Number=SeqID_85765
ttggtaattgaatctttcagatgatattattgattcagcaagtgttgcgaccaccatttgcttgacctcctgcttttcaataaaaaccttgttgtttgagaaagcaggaggtcaagcaaatggtggtcgcaacacttgctgaaatcaggaatgaatctttcagatgatattattgaaggcattattgacaagacatttgaggaagcagatacaaaacatgacgggaaaattgacaaggaggaatggcgcaatcttgtcttgaggcatccatctttgttgaaaaatatgaccctcccatatctccggtcagtactcctgatgagtttgcctttttcttaactatttgagttttcttcctaaacttccaattgcaccctaaggatatacgtgaagctcactcggtatgttagattcttaacagcttgtcatgcttgtccatggcctcaggacatgctgtttcaattaattgtccctcagtgagtgaaaaaaatgctgtttaatgtggtcttttcatgatgtgcacgggatactgttgctttcccaacaagctttaatgcaaatagt

SEQ ID NO: 19792 - DNA, 447 bp, Setaria italica
  Peptide Sequence Number=SeqID_85766
gtttgagcttttctgtgatgaacaatttataatgactatgtagtgaaccaattcagttgattctactttgagaaattatgcttctgtgatactaaatcattcatcctcatgatcttgtttcatctcaacttgcagttgcttttaaattgtatgatctcaaacaacaaggttttattgaaaagcaggaggtactttccatttgcttattcataagttaataatttgttccaagctgcatgtgttagtgcatatgattggtttgcgtgttccatgttgcatgtatttttcctataggtgctacaataccttgtatgtgatcattattcatcctctcaaatcatgttctgattttagcacatgatttgctgccagcggaatttagagtggttatttctcaagtttaacagaactaagttgctgatgtcagcatctatctatgagtctaaa

SEQ ID NO: 19793 - DNA, 1185 bp, Setaria italica
  misc_feature (1184)..(1185): n is a, c, g, or t
  Peptide Sequence Number=SeqID_85767
cggacgattcggcggtcctctccacgtgacggcgacgctctccctgcttctctctcgcccccggcccggcccccgccctccgtccatcctcgccgccggcccccggcctccgtacctcctcgctgccggcagccaccaccggtgcaaacttcccctactgccgcggggaggatcccgatgagctgtgaaccgcgttgatttagatcgctgttgttaagagtgtgaaatggactttcttcggcggctcgctgctggcttgctcaagtgctgtgatcttgacatacccaatcggccaaagggccttgaagaccccgaacgcctggccagggaaacagtttttaatgtaaacgaaatagaggctctgtatgagctgttcaagaagattagcagcgccgtggttgatgatggcttgatcaataaggacgaattccaattagccctgtttaagacaaacagaaaggatagcatgtttgctgatcgggtgtttgacttgttcgacacgaagcataatggaattcttgaatttgaggaatttgctcgagctctttctgtgttccatccgaatgcaccaattgatgaaaaaattgattttgcttttaaattgtatgatctcaaacaacaaggttttattgaaaagcaggaggtcaagcaaatggtggtcgcaacacttgctgaatcaggaatgaatctttcagatgatattattgaaggcattattgacaagacatttgaggaagcagatacaaaacatgacgggaaaattgacaaggaggaatggcgcaatcttgtcttgaggcatccatctttgttgaaaaatatgaccctcccatatctccgggatattacaacaacatttccaagctttgtattcaactctcaagtagaggatgcatgagatcccaaagactagtgcacaacagaacagattctgcggggtgcacttgtgtgtttttatttccttggaaatgtatattttgtgtggtggcaatgtccttctgagggttctttcttttgtatagtttgagtgcgctgagtatattctacccaggatttcagtacgaaccatttcttatcatgtgtttataaaatgctcttcaaatatattgtttaattaacaaaaaaaaaatgaaggcaagaaaatgctgccaaggcacacaggggaaaaaaaaaaaaaacaaaaactnn

SEQ ID NO: 19794 - DNA, 643 bp, Setaria italica
  Peptide Sequence Number=SeqID_85768
ttttcttcagaagaggtattcgttttcttttcccccttgaattgggatgttttcatttttgatgtctgcggtttggaaggatatattcagcgtgtattaagggagggattggattagggcctggagaaagtaattaagcaacccggctaatctctgatggtgaagaagttgcatgagttgatgttgattgcagcaagcgatccatcaaccacattatcggaccatgcatgcatcagcatctctctagctttttcagtataatacacaggcatgttcatctggaaagaaagataccggttaaattttcaacaaaagaagatacgtactgtagtcttcttctgtagtgtgcattgcattgcattgcaaccatgaaccaaccactactcatcatcgcaaagaaaaaagcggagtatatagaatagatgatgatgatgcaacatgcaactatgcaactccacgtcagaggtcggcgcccccaccagccgctgcgagctcccccgccaattgttcgtccacgtggcgcagccccgctggccgggaggcccgccctctcatcttgttgtctgtcctggtattctttcttgtctgtagtacattacctggttcgatgttgctattggttggtatgtgggcctgcctgcca

SEQ ID NO: 19795 - DNA, 1221 bp, Setaria italica
  misc_feature (1161)..(1161): n is a, c, g, or t
  Peptide Sequence Number=SeqID_85769
gttcagcaacgcttactaacttatttcgacaagttacccaatacaaggggcctatgcactgccaccaacgtgctctggaatcagacgagaatttttcaacaagtgcaaggatttccctgttacatcctgacctccacaccggcatccaccagatgctcttttactgctagtatgggaacctctttccgatggaaaatgccagcagcaagggcagcagaagcatttgttttctcaaagacttcagaaaaatgttcaacagcaccagcaccactgcttgctatgacaggaattgtcacagcatcagacaccatttggaccaaatcaatgtcaaatccacagccctggccatcacaatcaatgcaattaagtagtatttctcctgcacccagttcttccacagcttttgctagttcatatgctcctataggtcggctatcacgtccaccactcactgtacactggtaccatgcgtattcttctcctgatggacctttgctggacaccttcacagttttaaatggtacatcttctggactattgacatatacccgtcgaggatcaatacttacaactacagcctggttgccatatactctagaaatttgctccaagctgcttttccccgtctttacaccagtttgtaaaaaaggcttcagcagcataaacagcatcacttccgattgaaattttgtcagcaccagacctgaaatattccgatgctacttccaagcttgaatagtatcttccatttgcatctgtgaagtctcgtatacctccaccaactgtaagtggcacaaaaaccttttcagatgcacaacgcagtacctcaagcattggcaaatcacccaatggaaagtcgcggaaaccagttatattcaagaagctgacctcatcagcaccatctatgtagtattgacttgctagatcgactggcttgccaaggtttcttacctctttgctgctagtatgatctcttacatcatactgatcaccttttgttaccacaagatccccattatcatttgaccgaacatcgaggcatgctatcactctctttgcaagttttgatgctttcctacgtgctgggacctttcgttcctgaagagttagcactgaagtaaaattttttaaaatagaaaggccagtagctccactctttcngggtgaaattgaactgcctgaatgttgcccattgacgatggatgatatgaagctgtcacc

SEQ ID NO: 19796 - DNA, 911 bp, Setaria italica
  Peptide Sequence Number=SeqID_85770
aagatgaacctgtaattctctgatgatgagaaggaggttgagtcaaaaggtcattacgccaagcgagaaggcagactgatagacagcatgagccaaagaagcattctggcgataagaagagatcacaacccagaggtggcggcttccggaaggacatgccaccaaggaaccgggatgtaccaacaccaggtcagcagtcacagccccgtttccaccgctcagacatggctcctgcagttgctgaaaatacagcacgctcatcggggcctcaagacgctcctatgaatgctccaaccatgctgccgcctggcccaatgaatccccccatgccatcgccagttcatcttgcaaatcagatgggtggctgcttcatcaatccagcacagcagttcttgccacagcagccaaacatggtttggcctggtgggcttcctccatcgcccaatccgaacatgggggtagacggagccgccctcgccgccagcatcatgcagaacctccttgctggagcaaaccaattccagcaacagctgcagaaccagaactttggtggattcccgaaccaaatgcctatgcccttcccacaattcatgccccagactggaatgcccgcaaatcagttgccatttggtggtggacccccggtggggaattactcgtttggtgcagcacctcaaatgcctatggggctaggcaacttctgtcaaccacctccacacatggcctctgggaataggcacgagcagggaccccgtcccggattccctgctgactcaccgggattcccaaaccaagcgcaaccccatggagatggagcagagctttcacctccacagttcaattctgggcagtttaatcaagggagcccgcccttccgtggtggaaggccgcgcagcgcggtggtcggcatt

SEQ ID NO: 19797 - DNA, 386 bp, Setaria italica
  Peptide Sequence Number=SeqID_85771
ggcgccgtggagcccgtcgacgaggaggccccggccgacgacgactccggcgcggcggagggcgtcgaggtctgctgcttcgacaaccgcggcatgggccggagctccgtgccggcacaaaagtcgcagtacacgacggcgaccatggcgaaggatgcattggcactcctggatcatctgggatggcgaaaagtgcatgtcttcggccactccatgggggcaatgatagcttcgaaattggccgcaatggcgccggaccgggtcgcgtcgctggcgctgctcaacaccaccggaggaggctaccagtgcatcccaaaggttgattggcacacgatatctctcgcctatcgttttctacgggcaagaactcctgagcagagagcgta

SEQ ID NO: 19798 - DNA, 1066 bp, Setaria italica
  misc_feature (10)..(10): n is a, c, g, or t
  Peptide Sequence Number=SeqID_85772
gttttttttntttttttttttagtcatagtaagatgctttagatttgaacacctcccagttaactttcaacaagtattgctaactctgctatgcgatttcctcgaaccacacagatagtctttactctatttctataggttacagatcatcaacgtgcaatgaggtcaaggtgcgacgatactgataggaatggctactgcagttgttgaaggatgcaaggttgcaaacaaaatttatccattctatacaatctcgcatttcacgtcagttcgatagcttggtttctcaaggataagttctgcagctgcaaagctcaaaatcatgaagctggagatccatcccgtatgttggagcacgcaatttatttcttcagcaggcaatccttgaaacccttctccagctcttctttgttgaggttcctgccgatgaagacaatcttgttgatgcgtggctcatttggctcccacattctctcaggagatccctggaaaatgtcgtgcactccctgaaacacgaatcgttgaggcattccactgacagaaagcagccctttcatcctgtatatatcatcactgtgttccagcagtagatttcccaaccacatgtcagccttttcaagatccatctccccttcacaaacgatgctcacagaagaaacaccaggatcatgggtgtgatcatgtgcatgatgatcatgtccgtgatcacgatcatggtggtggtgatggtcatgatcatggtggtgatcgtggtcatgctcatgctcatgttctgcatggtcttcgtgtgactttcagagacagaactctcaatcctctctccgatctccgtctctctctgacgctcccctccctagctcacctctcgagagatcgccaagaagcggcggcggcggcggcagcgagctccgcggccatggggtacacgtacacgccgacgtactactcgggcctgcaggacaccatcgcgtccctgtgcaagtccatcatcccctccttccgcgtcgggcgccgcctcaccgccgaccaggccgccgcgcgccgccacgcggagcagctcaagtgg

SEQ ID NO: 19799 - DNA, 1026 bp, Setaria italica
  Peptide Sequence Number=SeqID_85773
tggtcttctattttggtcttccctactatttcttcttctaggtagtattccctggaaaatgtcgtgcactccctgaaacacgaatcgttgaggcattccactgacagaaagcagccctttcatcctgtatatatcatcactgtgttccagcagtagatttcccaaccacatgtcagccttttcaagatccatctccccttcacaaacgatgctcacagaagaaacaccaggatcatgggtgtgatcatgtgcatgatgatcatgtccgtgatcacgatcatggtggtggtgatggtcatgatcatggtggtgatcgtggtcatgctcatgctcatgttctgcatggtcttcgtgtgacttttcagagacagaactctcaatcctctccagatcaaatcctccaattccaagaacataatccaaatcaactttaccatactcagctcgtttcaaatttgccatgcgattaataccccttatacgctcaaccaaggaagaaacttcaggttcattgacaagatcaatcttgttaactataattctgtcagcataggcaatttgctgaactgcttcattgactatacccttgggctttacttcatctaaatgcagtctagcatgctttgcgtcaactaaagtaaccacaccatccaacttgacatcattaaaaactacatcctctgcatagaatgtctgtataatgggcgctggattagctaaacctgtggtctcaataacaatatgatcaaacttccccttcttcttgttgaccaattcaccaatcatacggactaagtcaccacgcacagtgcagcaaaggcagccgttatttagcatcattatgtcctcagctccagcggtttgtgcagcaactagtgaaccatcaatgtctacttctccaaactcattttcaataacagcaattcgctttccatggtgagcagtcaagatgtgattcagtaaagttgtcttgccggaaccgaggaagccggtgattgtattggttgggtcggggtattgttcgtt

SEQ ID NO: 19800 - DNA, 571 bp, Setaria italica
  Peptide Sequence Number=SeqID_85774
tccgaggctcggatcgtctccgacgacgaggacgaggcggccaaggatgaacggaacctctacatcgtcctcatcagcatacatgggctcgtccgtggggagaacatggagctcggccgtgactctgacaccgggggccaggtgaagtacgtggtggagctggcccgggcgctggcggccaccgccggcgtgcaccgcgtcgacctcctcacgcgccagatctcctgcccggacgtcgactggacctacggcgagcccgtcgagatgatcacccgccactccgacgccgacgccgacgacggcagcggcgacggtggggcctacatcgtgcggctgccgtgcgggccccgcgacaagtacctccccaaggagtccctgtggccgcacatccccgagttcgtggaccgcgcgctggcgcacgtcaccaacgtcgcgcgcgccctcggcgagcacctcgccggcatcgacggcactccggcgccggtgtggccgtacgtgatccacgggcactacgcggacgcggcggaggcggcggcgcacctggcgagcgcgctgaacgtgccgatggtga

SEQ ID NO: 19801 - DNA, 269 bp, Setaria italica
  Peptide Sequence Number=SeqID_85775
ttctcgcatctactgtttggttgcaatagccaatgtgtttgttgttttatgggagcttgcatcttggtacctctagtgtgctgggaagaattcaaaacttatatagttttccccttttgttgcatcaatccttggtcattctgggccatgcatttcccctactataaaccatgtgctttctgccctacaagatatcttctatacctcctccggtcctcttcccaaactctagataatttggagggtaccatttagtcctaattttcata

SEQ ID NO: 19802 - DNA, 1252 bp, Setaria italica
  Peptide Sequence Number=SeqID_85776
aagtgcctacacttccttacttcttatcatgtttgttgcgatctagagagcaccctaggagttccaatgaccgtaatgctgggagtgtggattcagagcttgatctagatgaattgttgaatgaggttcaagaggatgaagaagatgattacgatcagcttcctccctttaagccactaagtaaatcccaggttgcaaaactctcgaaagagcaacagaagttgtattttgatgaatatgattaccgaactaagcttcttcagaaaaagcagctgaaggaacaagtcagaagatttaaggaaatgaaggagggcaatgacaatgatgtaccttctgaggatggtcatcctgatgatgaatatgatacagatagatctcctatgccagactgggcattgccatcttcgtttgactctgatgatcctgttcaccgatatcggtgccttgaacctacaccgaaccttctggttcgggctgttaacaaccctgaggtatgggatcatgattgtggttttgatggtgtgagtgtccaacatagccttgatgttgctaacaagtatccagcttctctctgggttcaagttaacaaggacaagagagagttcaccattcatatggattcctcaatgtcagttaagcatggagatcatgcctcgagcctggcaggctttgacatccagacaatcatggaccagcttgcttacactctaagaggggagaccaaagtcaagaacttcaggaaaaacaccacgactggtggtttatccgtgacttttttgggaaataccgtggtgactggagcgaagtttgaagacaagctttcagttggcaacaggttaacactggtagccaacactggtgctgtgtccgtgagtggtgattctgcatatggggtgaatatggaggcaactctgcatgagaaaagttatcctgtaggtcaagggctcacaactttgggtgcatccttagtaaggtgccataaagaatggaccatgactgcaaacttggattcccagttctctgttgggaggacttcaaacatggcagttcatgttgatttaaacaacaaactaactggacgggtgagcatcaaggctaacacttcagaacagctgaagattgcccttttaggtgtctgttcagcgacaatgtatttgtggaacaagatgcatcctggtgcagatgctaatgcttaagtagcactgaactcccaagatccaaccattcagaggtcagcgagcgatcattttcc

SEQ ID NO: 19803 - DNA, 697 bp, Setaria italica
  Peptide Sequence Number=SeqID_85777
gctttcgagaagaatccagcgccgaccggatctgcagccgttcgaggtgctccccgtcgccggcggtaatggcgagtcccaactccggcatccccatcaaggctgaacaagattctgatggctcggcccaaagcactgctgatatgactgcttttgtgcaaaatcttctgatgcagatgcaaaccaggtttcaagctatgtcggagaacatcatttcaaaaatagatgagatgggtatgagaatcgatgaattggagcagagcatcaatgacctcaaggctgagatgggcagcgacagcatgacaacgccatctaagacaaaggatgaagggtcaaaacctgctggcagctctgcatgagcaagcacagcagaagcagctggtatcttaggcatttgtcgctaacaaatacctgttatgaggtttcatatgagagaaggttgttactgatgtggtacttccgatgtttgtggaagtatttgctatgatttttatataaactgtattcatcctgtagacctactggtgcttatgtacatgcatgtcatgtcggctgctagaacgctagtagagatttatttagcttctggtgtttgtgacaagtatccggtgagattgctgctttattcctctgtgtgacatcggatcaatactcataaaatatgtgcaatttttcgtatctagaaaaaaaaaaaaaa

SEQ ID NO: 19804 - DNA, 484 bp, Setaria italica
  Peptide Sequence Number=SeqID_85778
tttcgttaacttaccttagttaatttgttcccctgaaataaatgtcctttcgagaagaatccagcgccgaccggatctgcagccgttcgaggtgctccccgtcgccggcggtaatggcgagtcccaactccggcatccccatcaaggctgaacaagattctgatggctcggcccaaagcactgctgatatgactgcttttgtgcaaaatcttctgatgcagatgcaaaccaggtttcaagctatgtcggagaacatcatttacaaaaatttcctttgaaatcagttcccttttaactatttttagattctgctaatttagaactatcaatagtatagcatttactatattgatcatgtgtacattactcatagggcaaacaaaatgagcgatgaactgccattcctgatatgggcatatttgaatatcttaaaaggaagactgatttgggactgaagttaggagtttttatcaagttctagtgc

SEQ ID NO: 19805 - DNA, 375 bp, Setaria italica
  Peptide Sequence Number=SeqID_85779
tcggggggtggggccgtaggtaggggggtcgtcggggagccatgtccgccacagcgtgtcgttctccttgctcaccttggggccgcccacgttgaggcggtacaccgtctccagcgcttgctgccgccacgtggctacgttcgccgcggcgcccaccggcgtcaccgggctcgtgctgttccacagcagctccgccggcgccgggaacagctcgacggcgttcacgaacgcggccgagccggggtccggcgtgaacatgacgcggaagtcgccggggccgccggccggggatgaagaactccttgacgacgccggcgctcggcggcgtgaaggaggacagcacggtgtacgcgtcccgagtgtacgcgtcccgac

SEQ ID NO: 19806 - DNA, 695 bp, Setaria italica
  Peptide Sequence Number=SeqID_85780
atgaatacatcaaggtcctcatcgggttttattcccgcattcttttatctcctcagtagttcaacaagcatgtcatactttattccaacaccctgacagcgcccagcaaactctagagtttctctgaccgtcatctctgaagcatgccagtcttgctgactgacataagcagatgttcgctgaggcacaaactcatttaaatggtggccgttgtaagtaatgttcccagacatctttaatccagggccaagccgtccagcaagagccagaagcaaggtggtcttcccggagcttggaggacccaaaagcagtgtcattcttgatgggcgaattatcccactgatgttgtccaatatcggcaatttcattcttcctcctcggtagatcctcatatgcctcagaaacgcctcagtcatgttgcatatgaagtttgggatggtgggcagcgccctgctcccgacgtgcacgtacgcgtccaccgtcagatcctcatacctcacttcgatcttggggaactctatgtgcacagcgtcgaagcggctgcgtatgcgccggaagaagtgctcggcgtcgccggagtcggcgaggaggcggtcgacgagcgcggttcggtcgccggaggagagccccgcgacgtcgacctcgcagagcacgtccgtccccctcgacggccgcggcgccgtcgggcgctgggg

SEQ ID NO: 19807 - DNA, 932 bp, Setaria italica
  Peptide Sequence Number=SeqID_85781
ggagaagaaaactgaaactgatttcaaggacacttctcttacagttcttgcttttctactatcttacagttacatgctttagcccttcatgggcgaaaaaagaacaaaagcacaacgaatttgaagtatgctaacttcaagtacatacggaattttgccattgactatcttcagaataagctcactatctatcaacaagttaaaccaatacgcttttcaattcgtctttggcattaaaactgagagaaacttactcctctcaaacagcattctacaaaaaacaattgctgtgcaacttgtgcatgagtgcatcatccgatttcacttgttgagctgcacatctttgcacaggcaaacatcacttctggtaatctgttagcttgcttactgtgatctgtcggaacggttcagaaagacatgcctgagtatgcgctgatatctcttgagccactgatcgcatggaaggccgtgattcaggatttgcccgtgtgcaagcaagcgcaattctcacgacaaacacaatttcctctgcaatctcccccattggaggatccaaccgctggtctagtacgtcctggagtaacaggtcatcttcttttgaagcagagatagccggcagggaggttaagaggtcaccaggatgcttccccatcatcacctctagagcaactactccaaagctgtacacatcacatttctctgtgactctcattgtgtatgccaattctggagccatgtagccatatgatcctgctacagaagtccagtttgtagaggctgacccaaggagctttgccgtgccaaaatcagataaccgcggctcaaattctgactcaagcaagatattattcacagtggtgtcccggtgaacaattgctgggttgcagtcatggtgcaggtaggccagggcatgggcaaccccttggaccacc

SEQ ID NO: 19808 - DNA, 876 bp, Setaria italica
  Peptide Sequence Number=SeqID_85782
ttgtgtataaacctaggcagggcccttgatgggggtaaagaaacattctctagttgtaacacttctaactgtatcattgtgcttgtacgtgatacagtggccaggaaatggaaaatgccaagccatatgaaaagcatggaggcatttccctagaaggatgctagacctctgagtttgttgcaatttttgctagttttgtttacaagttgcacgtcttccaactataaatacaatcgatcctctcctggcttcttttctatgtatctcctctccttgtatagatgaatgaaataattccaagttcttcgattaagttgtcctgttctcctagcatcttcttatgagtccagccacattttgcgcaatgtcttgtttggtctccaccgaaacagggggatcaccaatgtacatatcgaagaaagctctgcagagatctttgctctggacagtgccaatttgtctgccatcaatttcagttattagctgcccatcagatgtttgccggaagtcgatcttagtaccagcaggtatacggatgtcttcactaaaataagaaccaaatgtcttcaaacaatggtaatcggtattaggattcatcttttgcaaccggaagcaaagagacttctcaaatgcatctcgaactgtgccaatgctgaggccattgtagcttactactagcctgactgtcatatcaatattttcccttagaagatcttcatagaaatctgggtgatccttcagctcagcatctggaatacaagcatattttggacccagcttcttgcaaatagaatccggttgtatgtataatccaaaggcgtaaagattcagatttttcaccctcatttaatttacgtaactaaattaagtaactaa

SEQ ID NO: 19809 - DNA, 1256 bp, Setaria italica
  misc_feature (103)..(103): n is a, c, g, or t
  misc_feature (1184)..(1184): n is a, c, g, or t
  Peptide Sequence Number=SeqID_85783
tgttttgccggaagtcgatcttagtaccagcaggtatacggatgtcttcactaaaataagaaccaaatgtcttcaaacaatggtaatcggtattaggattcancttttgcaaccggaagcaaagagacttctcaaatgcactggaaagcacgttgacacaaataatcaacttcaatcttgaaaagataacatattttgaaccaaatataaagacaaggatatgctaatttccacatgaaaataagaatgcttactctcgaactgtgccaatgctgaggccattgtagcttactactagcctgactgtcatatcaatattttccctggacaggattgaaattctactagcatcaaaggcaacaaatgggatgcggatgaggattaaaaaaattaaggtcattgcatctacgaatcacattttctttcttttcttttaatgattcccacgtttccaactagataaaggccagaacctgaaacatctttaatgatggaactcattaagatacatgtcattgcacaccttagaagatcttcatagaaatctgggtgatccttcagctcagcatctggaatacaagcatattttggacccagcttcttgcaaatagaatccggttgtatgtataatccaaaggcgtaaagattcagatttttcaccctcattattcgcatgcttctgaaacctatcccaacaagcacctctgtactcagattggaattatcctcaaggatagtagggaacttgatcccggtttttggttccgttgcatcttctggcaggattaatcttggcacagcaacacaagcacaacctgaacggttttcctctgaataaggctgatcagcaggttctcggatatgtccaccatcttttcctagtgccaatgactcagcaagcatttttggtgatatgttttcgaatggtggtattacggtagcagcagctagcatgagaacattgcaggcatggtgctcctccacttcagtccacaggcgtccaaaagttgcacttgcaagcctcgctaaaagcacctgtacagcgtgctcttctcttaattgtgaaccaaattgcaatccaggtaaatgctgcaagcaagaggtcacttgcttgatgtgtgacctgcaagctcttgaactcgagccagcagccgctgacagcctttggagtagcttagggtttnatgctctagaaaaccagaaatagaaagctccagcaaacttgttgaaactgctgaatgcctctgactgctccg

SEQ ID NO: 19810 - DNA, 267 bp, Setaria italica
  Peptide Sequence Number=SeqID_85784
gaaggaatgtaggcttgcagtgcaagcagtccgtagccctgcacaagtgtgagtttatcacgataacaaatacagtgcataagggtgataactgataaagggtgttaacttgtgcacatttgcttaaggactgataaaaaattacgactaaaaatttctctaaattcaggggctactctttttaatggctttcagaagctccctgtgcagcattagtattcagaaaaataacaggaggatgttaaattgttaatgcaggcctttacg

SEQ ID NO: 19811 - DNA, 371 bp, Setaria italica
  Peptide Sequence Number=SeqID_85785
tgtgaaagggatggaggttgcacttttgttggtaatctttctggcatatggttttaacaatggtggagcagttggctatattttactctctataagcagttggtttatggcgctgtcttggcttttcgctccctacttatttaacccatctggatttgaatggcagaagtaagaaactaagaattctatgtactgttatgttactccaaattatcggtatggatattacagaccctccaccctcctctcaggattgtcgaggatttcagagactggacaaattggctgttttatcgaggcggtattggtgttaaaggagaagaaagctgggaagcttggtgggaagaagaactgcaacatatttacaccat

SEQ ID NO: 19812 - DNA, 494 bp, Setaria italica
  Peptide Sequence Number=SeqID_85786
gtcggccatcacagtgtggacgcgtgcggctgacttgacctgctcttgccttgcccaacgacgagagagaggagcggatcggaggaggaggaaaggttcgggagatggcaccgctgaagctgtacgggttgccgctgtcccccaacgtggtgcgcgtggccaccgtgctcaacgagaagggcctcgaattcgaggtcgtccccgtcgacctcaccaccggcgcccacaagcagcccgagttcctcgccctcaacgtacgcgcctgtcctccttcgatttcaatttcttacgctgcaggcggcacggcatgcctgtgattttgctgtcccctgatctatggcttccctccctgttcgcagcctttcggccagatccctgcgctggaggacggggatgaagtcctctacggtacgtaactgacatcactgctcgttcttcccgtgcgtatagtagttgattatattaggaactactcggtcaattttaaaaaatga

SEQ ID NO: 19813 - DNA, 3192 bp, Setaria italica
  Peptide Sequence Number=SeqID_85787
agcataaagtggatgagctgattgaagatgaaatgaagttgagggaatcagccgtgttcagtggtaaccttggagagttggaacggaaaactctgaagcggaaaaaggtgcttgcgacgttgaaggtcttatggtcagtaatagaggatatgactaaggaaatttcacctgaggatgcaaaaaatttgatatctgaagagatgaaaaaggtcatgcaaaaggatgccgcgaggacggaggatgttgttccatataatattattcctctagatgcattgtctactaccactaatgcaattgtgacttttccggaggtgagagcagcaatatcaattctgcagtaccatagggatcttcccaggctccctggtaccttttcagtccctgatgctaggaattcagatatgctggatctattgcaatgtgtatttggatttcaggaaggtaatgtgaaaaaccaaagggagcatatcattcacctattggcaaatgaacagtctcgggtgggcaagccatcagggaatgaaccgaaaatcgatgatggtgctgtgcatgctgtgttctccaaagcccttgataactatatcaaatggtgcaactacctgcctactcgtcccatctggaataacactgattctttgacaaaggaaaagaagttgctatatgtgtgtttatactacttgatgtggggtgaagctgccaatgtacgatttcttcctgagggcttatgctacatatttcaccatctagcaagagaactggaggagattctgcgaaaacaaactgcagagccagctaaaagctgcagttctgatggcagtgtctcatttcttgaaaacgtcatttctcctttgtatgatgtcattgctgcggaagcagccaataataagaacgggcgcgcaccacattctgcatggagaaattatgatgatttcaatgagtttttctggtctaacaagtgctttaacctagactggccgtggaagctgagcaacccatttttctcaaagcccagtaggaaggagaagggcttgttaggtaggaaccatcactatggaaagacatcttttgtggaacataggacttttcttcatctttaccacagctttcatcgcctttggattttcctaattatgatgtttcaggcactaactatcattgcctttaacaatgatagttttgacatgaagaccgtattgctaactttttagtctgggcccaacttatgtcgcaatgaaatttgttgagagtctactggatattctgatgatgtatggtgcctattcaacatctcgtggatctgcaatcaccagagtgttgtggcgattctgttggttcactgtagcttcattgacgatttgttacctatatgtcaaggcgcttcaagatgggacgcactcagctacattcaagatatatggttttgtaattggtgcatattttggtgttaagataataatgagcctacttactagtgtcccttgttgccatggtttgaccgaggcttgctaccgctggtctgctgtacgccttgttaagtggatgcatcaggagaataattatgttggaagaggcatgcatgagagtcccctggactatatcaaatacgttgccttttggattattatccttggtgcaaaattttcgttcacctattttcttcagataaaacctcttgtaaaaccaacaagagctgtcatcaatttcagaggtttacagtatgcctggcatgattttttctcaaagaataaccataatgccatcacaatcctttgtttatgggctccagtggtgtcaatttaccttttggacattcatgtattttacactgtaatgtctgctatatatggatttctccttggtgcgcgtgatcgcttgggagagattaggtcggttgaagcagttcaccgattctttgagaagttccctgaagcattcatggagaaacttcatgttgctattccgaaaaggaaacagctgcgatcatctggtcaggaagcagagttggacaagcttaatgcatctagattcgcccccttctggaatgaaattgtgaggaatttaagggaagaggattatattaacaatgctgaattagagttgcttttgatgcccaagaatgatggagtgcttccaattgtgcagtggccacttttcttacttgctagcaaggttttcttggctaaagatatcgcagctgactataacgaatcacaagaagaactttggctaagggtctcaaaggatgactacatgaaatatgctgtcgttgagtgcttccatagtgtttatcatattctgacatcaatactagagaaagaaggatgtctctgggtggagagaatttatggtggtatccgagaaagcatttcaaagaagaacatcaaaagtgatcttcatttcgaaaaattgcatattgttattgccaagcttgttgctgtacttggaatactgaggggtaccacagagtcaaacgatctgaaaaagggagcagttaatgctattcaggacctatatgaagttgttcatcatgaagtgttttctgttgatatcagtggttaccttgatgaatggactcagattaatagagcgagggctgaaggccgcctcttcaataaccttaagtggccaaatgatcctggattgaaggacttgatcaagcgattgtattcacttcttacaatcaaagaatcagctgcaagtgttcctaaaaatctggaagccaggcggagacttcagttctttatgaactctctgttcatgaaaatgcctgttgcaaggcctgcttcagaaacgctttcctttagtgtgtttaccccgtactactccgagattgttctctacagcatggctgaactacagaagaaaaacgaagatggtataactacgctgttttatctccagaagatttacccagatgaatggaggaatttcctaactcgtatcaacagggtaaatcttctggagataaaacagcgtagttataccagaagattcctccattcatctgggtaaatcttctggagataaaacagcgtagttataccatcttcgttttcttctgtagttcagccatgctgtagagaacaatctcggagtagtacggggtaaacacactaaaggaaagcgtttctgaagcaggccttgcaacaggcatttcatgaacagagagttcataaagaactgaagtct

SEQ ID NO: 19814 - DNA, 3247 bp, Setaria italica
  Peptide Sequence Number=SeqID_85788
ccaagcttgttgctgtacttggaatactgaggggtaccacagagtcaaacgatctgaaaagggagcagttaatgctattcaggacctatatgaagttgttcatcatgaagtgttttctgttgatatcagtggttaccttgatgaatggactcagattaatagagcgagggctgaaggccgcctcttcaataaccttaagtggccaaatgatcctggattgaaggacttgatcaagcgattgtattcacttcttacaatcaaagaatcagctgcaagtgttcctaaaaatctggaagccaggcggagacttcagttctttatgaactctctgttcatgaaaatgcctgttgcaaggcctgcttcagaaacgctttcctttagtgtgtttaccccgtactactccgagattgttctctacagcatggctgaactacagaagaaaaacgaagatggtataactacgctgttttatctccagaagatttacccagatgaatggaggaatttcctaactcgtatcaacagggacgaaaatgcagcagactctgaactttttggtaacccaaatgacatacttgaactacgtctgtgggcttcttatcgtgggcagaccttagcacgaactgttcgtggtatgatgtactataggaaagctcttatgctgcagagttatttggagaggatacaatctgaagatctggaatctacatttccttcggctggttcagctgatacacattttgagttgtcccctgaagcgcgtgctcaggctgatttgaagtttacatatgtggttacctgccaaatctatggaaaacagaagggagaagggaaacctgaagctgcagatatagccctattaatgcaaaggaatgaagctcttagagttgcttacattgatgaagttgagagcgttaagaatggaaaacccagcactgagtattactcaaagcttgtgaaagctgacattcatggaaaggataaggaaatttattccattaaattgcctggcaatccaaaactcggggagggaaagcctgaaaatcaaaatcatgccataatattcactcgtggaaatgcagtgcaaacgattgatatgaatcaggataattactttgaagaggcacttaaaatgagaaatctgcttgaggagttttctctgaagcgtggcaagcattacccttctattcttggtgttagagagcatgtcttcacgggaagtgtctcctccctggcctcatttatgtcaaatcaggaaaccagtttcgttactttaggtcaacgtgttctttctaacccactgaaagtgagaatgcattatggccacccagatgtttttgatagaatctttcatataacaaggggtggaatcagtaaggcctcccgcagcattaatatcagtgaggatatatatgcaggatttaactcaactctgcgtcaaggcagcataactcaccacgagtatattcaggtcggcaaaggtagggatgttggacttaatcagattgcagtatttgaaggaaaagtttctggaggaaatggtgaacaagttcttagccgagacatatatagacttggacagctttttgactttttcaggatgttatccttctatgtgacaactgttggattctacttctgtactatgcttaccgtgctgactgtgtacatatttctctatgggaaaacatatctggccttatctggtgttggagaatcaattcaaaacagagcagatatattgcagaacacagccttgaacactgctctgaacactcaatttcttttccagattggtgtatttactgcagtacccatgattctaggtttcatccttgaatcaggtgtcctaacggcttttgttcaatttatcacaatgcagttccaactatgctctgtatttttcactttctcacttggaacaaggactcactactttggccgcgcaatattgcatggaggtgcaaagtatagagcaactggtaggggttttgtggtacggcatatcaagtttgctgagaactatcgcctttattcacgaagccattttgtgaaagggatggaggttgcacttttgttggtaatctttctggcatatggttttaacaatggtggagcagttggctatattttactctctataagcagttggtttatggcgctgtcttggcttttcgctccctacttatttaacccatctggatttgaatggcagaagattgtcgaggatttcagagactggacaaattggctgttttatcgaggcggtattggtgttaaaggagaagaaagctgggaagcttggtgggaagaagaactgcaacatatttacaccattcgagggaggatactggaaactatactaagcctaaggtttttcatcttccaatatggagttgtctaccacatgagtgcaagtggagaaagtacagctttatcggtgtattggatttcttgggctgtgcttggtggtctttttgtcctcctcttggtctttggtttaaaccccaaggctatggtacattttcaattgttcctgcgtctggtcaagagcatagcactgttaatggttttggctggtttgatcgtggctactgtgtttactgccctcagtgtcaaagatgtatttgcttccattctagcatttgtgccaactgggtggggaattctttcgattgctgtggcgtggaaaccgattgtgaagaaattgggtttgtggaagacagtgcgctccctagctcgcctttatgacgctggcatggggatgatcatttttgttcccatagccatctgctcatggtttccattcatatctaccttccagacgcgtcttctgttcaaccaggctttcagcagagggttggagatttctcttatccttgctggcaataatccaaatgcagggatgtgatggtggtagtctcgacgccgtggatcaagcagctttgttagtttagctgattcctggttctcagttagcgatagcgattgtatatatctccgtgttgacctatgctgtgggtgtatatctcaacggctatacttctacagtgagcctaggagctgtagttgtgacactccttaacttttacattgatatttgggctgagaagaactggcttttcgttatcaattcagctaatctgatgtgttgtgctacttatcttgtatctccatgttaagctacttaccttgtatatttatctatttgtacaaatattatagagaagatgaaaagtcaaacaaa

SEQ ID NO: 19815 - DNA, 1129 bp, Setaria italica
  Peptide Sequence Number=SeqID_85789
aagaaacagcgccttcttcccccatctacccatccatccgtcggccatcacagtgtggacgcgtgcggctgacttgacctgctcttgccttgcccaacgacgagagagaggagcggatcggaggaggaggaaaggttcgggagatggcaccgctgaagctgtacgggttgccgctgtcccccaacgtggtgcgcgtggccaccgtgctcaacgagaagggcctcgaattcgaggtcgtccccgtcgacctcaccaccggcgcccacaagcagcccgagttcctcgccctcaaccctttcggccagatccctgcgctggaggacggggatgaagtcctctacgagtcccgtgcgatcaaccggtacatcgcgaccaagtacaagtcggacggcgccgacctcctcccgaccatcccgtcggcgaagctggaggtgtggctggaggtggagtcgcaccacttctaccccaacgcctccccgctggtgtaccacctcctcgtcaagcccatgatgggcgggcgcccccgacccgctggtggtggacaagcacgcgcaccagctcgccaaggtgctcgacatctacgaggaccaccttgcgaagaacaagtacctcgccggcgacgagttcacgctcgtccgacgccaaccacatgtcctacctgttctacctcagcaagacacccaaggcgggcctcgtcgccgagaggccacacgtcaaggtcctggtgggaggacatcgccgcccgcccccgcgttcaagaagaccgtcgccggcatcccattcccaccgccgccctccgccgcctgagctgtcgcggaagcgtcgaataaaattaagatgctctggtgctgctagatccgtggaataaacagcgtgcttcttgtgatcggttgttgtgccacgagctcggcggacgcgatgtgcaattgcttttgctcctcgatcgtcagatattgtgttgctgttcctgtttgtttttctaattgttcttgtgattagcgacatgccaggtattgtgaagttgatcttttgtaagcttcgatcagcgctttatttctatttccccttaccgcgttgatcgcgcgttttccattttgtcctggatgaaatgaactgcgttttggaaaaa

SEQ ID NO: 19816 - DNA, 684 bp, Setaria italica
  Peptide Sequence Number=SeqID_85790
tagaactacttaaccaagaaaagggaagacaaagaaagaaactagaaagaacgaagaagatgaagaggcagcacgaggtgttgtatgcagtaccatacgcggcgtgtgtgtatgagcaggaggagaggaatccgatccgagccgaccgacgattagcggagggcgcgcgcgagtccggcgaggattcgcgagagcccgaggcggaaccgcaggacggcgccgtgggagtatggcgcgcagtcgcggcagacggcctccatggcctcgacgaagaggctgaggctccgcaccggcggcacgtagagcgtcagcggcgccgccgagaaggccagcgccatcagcagctgcagcatctccgcccggcggctccgacgacgggcgagcgcgcctcctcgtgcccccgaagaaccaaccagatcttgtcttggcgacttggccggtcggtcggcaccgtgcggcgcggagggagtcttgttattgctgagacgggcccgccgggacgggacggacggtgaggtagctagctactggtgtggcgggggcggcacggcgagcgtctggtggcgggggacgcgcgcgtgttcttctcctatcgcgcggcgtctggtggtgatctggtctggtggagacgcggtgcaggggaagaggctgggaggtttggtttggtttcgtctcgttttcggc

SEQ ID NO: 19817 - DNA, 259 bp, Setaria italica
  Peptide Sequence Number=SeqID_85791
gatgatggcaagacgagcatgggtgttctgcctcctgctcactgttgccggggcggtggcgacggcggacgcagagtctgaagcggaggccctgtccacctacattgttcacgtcgcgccggcgcacgcgccacggtcgtcacgcccccgcgtgctttccagcgcgtaccgctccttcctgcgcggccacctccccgcaggccctgcgccgaggctgctctactcgtacgcgcacgccgcgacgggcttcgcggcgcgg

SEQ ID NO: 19818 - DNA, 475 bp, Setaria italica
  Peptide Sequence Number=SeqID_85792
tgtacaagaaatgaggtccagatccctgaaggattccaagaggtgctcggacagtttgattgatacaaagacgaccttacaagtagaagaattggaagttaagctggattaagctccaattcttctacttgtaaggtcgtctttgtatcaacaaagctaaaaaggagctaccgaacctgcaaaacgagagagataacagatacagaaagaaataccttgctcaaaggaataaattgattgggatgctggaggagatgcatttgactagttctgatgttcaatttgacgaaaagaaacaaggtactgattaatgtgacttggattctatagctgtaacctatacggccttgcaaattttacatgttctacgagcagtctgatacaccagaaaagcatgtcatttgcatatcttgttgtgagtgctcatggttttagatctgtagcctagcttctgcgcttgatactgtactttctg

SEQ ID NO: 19819 - DNA, 191 bp, Setaria italica
  Peptide Sequence Number=SeqID_85793
tctcagaattgaattgatcaaacaagccatatacaatgaatggcatttggaggatatgatgatctgattgaaaataccaagaactaactcttttcttgcagcatttgactagttctgatgttcaatttgacgaaaagaaacaagtgagtacagacgagtataaatcagaactaactcttttcttgcagcat

SEQ ID NO: 19820 - DNA, 330 bp, Setaria italica
  Peptide Sequence Number=SeqID_85794
aaatacaagaatcagtagagtgaaatcagatgctgcaagaaaagagttagttctcagattatgtgtttcacctttctcaattctgagaactaactcttttcttgcagcatctgatgttcaatttgacgaaaagaaacaagtgagtacagacgagtataaatcagatgctgcaagaaaagagttagttctcagaattgaattgatcaaacaagccatatacaatgaatggcatttggaggatattgatgatctgattgaaaataccaagaacttcacatatgagatgattggggatctggacctcatttcttgtacagatttcctaatcgt

SEQ ID NO: 19821 - DNA, 1132 bp, Setaria italica
  misc_feature (1104)..(1132): n is a, c, g, or t
  Peptide Sequence Number=SeqID_85795
ccgcagtattcctcttcgccaacaagcaagcgggttggcaacaaggaaatccaaggagaatgtcggcatcaagcaagcgggtcctgcttccccttcgtcctcgacgtcggcgcgcgccgtcgcgcccgacgcctgggacggaattgggagaaagccggcgaggaccactcccgccgactctcatatcctccccgatcgaacaaagctaaaaaggagctaccgaacctgcaaaacgagagagataacagatacagaaagaaataccttgctcaaaggaataaattgattgggatgctggaggagatgcatttgactagttctgatgttcaatttgacgaaaagaaacaagtgagtacagacgagtataaatcagagaagagaaaggtgaaacacataatcagaaaagtgaaatcagatgctgcaagaaaagagttagttctcagaattgaattgatcaaacaagccatatacaatgaatggcatttggaggatattgatgatctgattgaaaataccaagaacttcacatatgagatgattggggatgttgaaatcgttcattatgatggacaaaaccttgtggacattttgagcaggcttcgcaaagatgccaggaagtctgccactgatcatgatgaaaagaacaagctgactgctgggttacgattaggaaatctgtacaagaaatgaggtccagatccctgaaggattccaagaggtgctcggacagtttgattgatacaaagacgaccttacaagtagaagaattggaagttaagctggattaagctccttctggtcaagtgtagttacctgcggagaagctttttgcagtaccccagttgtttgacattgttaaaaacttgttttgcttctcaacggttttaggtttgatctgtcagtgagctaagagttttgggagtaattgctggatgtgatcccgtcccagtgctgtaaacttacggttttgctgtttggcttttgcttccgaccgggtctcatctagacaactttagaaacagaagagttttgcctcgtttcaagatttcaaattttctaaagaaaagactacgggttaatgtgctaaaaaaaaaaaaactgaannnnnnnnnnnnnnnnnnnnnnnnnnnnn

SEQ ID NO: 19822 - DNA, 338 bp, Setaria italica
  Peptide Sequence Number=SeqID_85796
atattccttcaattatagttgacgtaagtgtgggttagcttacaatgatttttgtaatacttgatttgtaccaagttattcaccaagatttgtgttgattcggttggagttaactattagcaaccttttgtatatatgttcttgataacagaaagcaatccacattgtttatatgccattttctcgcaacaaagctttgtttctgtatcgttgatgctttatttcttcattgatattctctgtataagagattagtttgtgttgatacagtatttttctgcagaatgtattgggccaaaaagattctagaatggacctagttggtaccttgtaagtaa

SEQ ID NO: 19823 - DNA, 1014 bp, Setaria italica
  Peptide Sequence Number=SeqID_85797
caacctctcccagtctccctatacaagtatgccacggtttgaaatgccccaatgccctgcattgctgctaatgaccgttgagggttcaagtcaggtaacaaacaccatggtttagaggtttccattacaattcgatggtacatgtcatccaatgcactgtactgatatcaaatattaaacacaccagtatgtatcctgagctgctttttgagcaactatgactgtagccttcaggtttggccccaaatctcggaaacagaaattttaaagggaataaacggagggaatttagcatcataattgaaacaagcattttactattctgagacaacatgctgcacaagggagaaaacttacacataaattgcttttgaatctcatcaaaaggtatgtcattgccatggtacgtctccagaatagtgtattagcagggaaaacaacaaattgaaaaaaaatatgtgaatcaagttttccaggatcaaagaattttgatgcttgaaatgcatttggtggtcatcaaatgaattgtgacgcatcatggtcttagcagggctactaaagacaaaacatatgcaatatgtttgcatgactatagtctcctatgcagcatgttcaataggccattctacaccagctttaaagacctctttttacatgacaaatcttaatattattcctgagatgtgcaagaggttctccagagagaaacatgctgcaaatttatacaacttaacagaagacttacatcggaggcagagcaaagatcgttcgggatcctgatccatcgacacagaatgtgctccattaatggtgtaaagccttgttctgccatttgctaatgaagcagattcaactgcctcttgccagtataccgagtaacacttcattttgaagcacgaattcatgtccatcataactgcaaactcctgggatgctctcgttgccactgtcagctagaattctcctgttgttcatttctaccacaatgcagcacaatcgtaaacttcgctaggc

SEQ ID NO: 19824 - DNA, 439 bp, Setaria italica
  Peptide Sequence Number=SeqID_85798
ttaccagcccttcgcagttaccttgctagctccaaacagatacaccaacatacaacccttcacatcacagactacccaaaagacaagtgaagcaagtaccttgcaccaaacacttgctaacctctccgatgagaaggcacggcagcgaggcttccccttccatcgtccacacatcttccatagctctcctccaagagaggttcaggaacctgcagaaggtgaaggagatgagggaaggaagagagttgcagaaggtgcacagtactgatgctgaccgtaccagctccctgtcctcggctctgaaccttggcctgcaagtggcgaacagcaccgagcggccaaggtggttcttgcatccggacttgatccggccatctaggcccctgcgcggtccggtgtaccatgggcttggcgccaacggtggccagacttcgccgcc

SEQ ID NO: 19825 - DNA, 253 bp, Setaria italica
  Peptide Sequence Number=SeqID_85799
accagtcttgggggtaggtattttcggtcaatgtacactccagataccatggcaccaaagccaatgcccactccagctagtagcctcccaatcataagcacagtgaatgatggagcaaatgtcatgatgactgcgcctatctggaacacaattgcaccaaggcccattgtccatttcctgccaattgcatcagatgttcgtccacctgataggcttcccaagagtgagaccacgctcagacagcctactagga

SEQ ID NO: 19826 - DNA, 282 bp, Setaria italica
  Peptide Sequence Number=SeqID_85800
ccctgccccagctcaagctcgagcccaaaccctaaccctcgccccacctcgccgtcggcatgtccgccaggttgctccggcgagtcctccaggagcgggaggccgccacgcaggaccctgatgtcgccgaagacgagcagccggaggaggaggaggaagcctctcctccgcgcgccgcggcgcggaatctcttcgatctcctcgacggcggcgacgacgaagaagaagacaaggaagatgaagcagaaagagtcaacctttgagttatacggaacagaaaca

SEQ ID NO: 19827 - DNA, 319 bp, Setaria italica
  misc_feature (30)..(30): n is a, c, g, or t
  Peptide Sequence Number=SeqID_85801
ccacctcgacgccgccgccgtcgcaaaccntaaaacccccaaccccccccgtactcgccggcgaaaccggggcgggcggcggcggcgactatgggggagtacgcaacggtgaagacctcggtgtggtgggacatcgagaactgccaagtcccccgcaactgcgatgcccacctcatcgcccagaacatgagttccgccctcacagccgccggctacaccggccccatcaccatctccgcctacggagacaccaactgcgtccccaaccccgtccagcacgccctctccagcaccggcatcgccctcaaccacgtccccg

SEQ ID NO: 19828 - DNA, 225 bp, Setaria italica
  Peptide Sequence Number=SeqID_85802
agaagagccaggtgagcaagaggtgacgcggattccggtgggcgggccgccggcggacctgtgggcgtggcgcaaatacgggcagaagccgatcaaggggtcgccgtacccgcgcggctactaccggtgcagcaccgataaggactgcaaggcgcggaagcaggtggagcgctgccgcgccgacccgggcaccttgatcgtcacctacaccggcgaccacagcca

SEQ ID NO: 19829 - DNA, 358 bp, Setaria italica
  Peptide Sequence Number=SeqID_85803
gctgcacgagtggttcgcggacgacctcgccgacggcgaagacggcggcaagcagctgatggtgaacagctatcaccaccagggcgtgcggcggctggcgcagcggttcgtgcccatggcgttcgcgccggacggcctgatcgaggggttctacgacccgaacgcgtacaacccggcggagggcaagttcatcatgggccttcagttccatccggagcgcatgcgtaagcccggctccgacgagttcgactacccgggctgcgccaggccctaccaagagttcgtccgcgccgtcgtcgcgtaccaggagaagcagctcgccgccgcgcacgtgccccggagcgccgtcccgacgtcc

SEQ ID NO: 19830 - DNA, 1256 bp, Setaria italica
  Peptide Sequence Number=SeqID_85804
gcagcagcaaacctgctctgctgcagcagtcacaaacaacaagtcactgcctagccttgcttgttgagagctgagactgtgactgaccgtacgtgcccgccacgcgccatggtcgacatggggaacaagcaggaggaggaggtccaggtaccagtcccggaggaggggatggcgtcggaggaggaggaggcggcgctcgtgcacaagatcgccgggctcgccgctgccatcgccaagctgccgtcgctgagcccgtcccccgaggtgaacgcgctcttcacggagctggtgacggcctgcatccctcccagcgccgtcgacgtggagcgcctcggccccgagctgcaggagatgcgcgcgcggctgatccgcctctgcgccgacgccgagggcctgctggaggcccactactcggacctcctcgccggcttcgacaacccgctcgaccacctggggctcttcccctacttcaacaactacatcctgctgagcgagctggagcacggcctgctggcgagccacgttccggggccggcgccggcgcgcgtcgccttcgtgggctccggcccgctcccgctgagctccctggtgctggcggcgcgccacctgccggccgcgtccttcgacaactacgacatctgcggcgaggccaacgagcgggcgcgccgcctggtgcgcgccgacgccgggctgggcgcgcgcatggcgttccgcacctccgacgtggcgcacgtgacgcgggacctggcgtcctacgacgtcgtgttcctggcggcgctcgtgggcatggccgccgaggagaaggcgcgcgtggtggagcacctcggccgccacatggcccccggcgccgcgctcgtggtgcggagcgcgcacggcgcccggggcttcctgtacccggtggtggacccggaggagatccgccgcggcggcttcgaggtgctggccgtgcaccacccggagggcgaggtgatcaactccgtcatcatcgcgcgcaagcccgtgcccgccgacgcgcaggccggcggtggcgtggcccacgcgcacgcgcacggcgccgtgctgagccggccctgcctctgctgcgagatggaggcacgggcgcatcagaagatggaggaggtggccctggagcagctgccatcctaattgatcgattgcttcatcgatccatcgagttgcatcatcatcatattcatagtattactatctatctatctatcatggggattactatgatttacatctagcactactag

SEQ ID NO: 19831 - DNA, 628 bp, Setaria italica
  Peptide Sequence Number=SeqID_85805
ggcgcgagggcgagcgtggaagctgctgctcgacggccgtgctggcgggcttcagtggatcgccctcccgccggccgggctggtgacgtgaaggcccccatctgatccgcaaccaaagctacacggaagcacaccagtcgactctcgtctcagatttgcttgtcgcacagtagctctttcaggtagcagcaagaagatgcaaccttctgtttctttgtgaggtaaaagattgtactgcagctttggagtaggacattgtaaatacaaccacattaccaccttcttctttttttcattttttggttcaaccaagcaaggagggaggtgaggaactgaggacaacggccaaaaagatggtttcatacgaactcgtaaggactcagtgaaaagaggggcggaacaacagaacgcaagttttagtgtttttggatggggtagacatctgaagagcatgtgttatctgctttaattcttggttgttatctatggtgcttagctgattgtgttttgtggaagttgtttacctgagattgtatctgatttgatgctgtaagttgtgttcactaaattctgataaatgggttgaaaaactgtgtatatcttctgggctgaaattcatattatgaat

SEQ ID NO: 19832 - DNA, 472 bp, Setaria italica
  Peptide Sequence Number=SeqID_85806
cagtagctctttcaggtagcagcaagaagatgcaaccttctgtttctttgtgaggtaaaagattgtactgcagctttggagtaggacattgtaaatacaaccacattaccaccttcttctttttttctattttttggtttcaaccaagcaaggagggaggtgaggaactgaggacaacggccaaaaagatggtacgcctagcacccataagatctgtttcatcatgttcataaaaaatttcttctgtttgcctttgggaatctctatttatgctcataagaacttgtcgtgctcatacgattgtggactcaaactgattactgctagttagaggatattacattctagcttgctttgccttctccactgcagttattggattttgtctatgtgcagcctttgtgacttgttactgtaatgagaacatatattaccttgtcagaaattgtaaatttgagttattctgtaatta

SEQ ID NO: 19833 - DNA, 317 bp, Setaria italica
  Peptide Sequence Number=SeqID_85807
atccgccctccgctgccccccccttcccaacgcggcgacgaccgccgaccgcggcgactccgagcccggagccgccgacccctccccgcgccccgcccgccgccgggggtcaacgggaaccgccggcaacggccgccgctccgcaggcattcgccgccacgcgggtccacgagcggctggaattctagggttttgtaggcccggcttcggcgtgatcgggcgcggcggcggcggcgggaggaggagcgggtgcgcgggcattggatggtctcgatccgtacgggcccctgctgacctcctgccgcaatggaggacgg

SEQ ID NO: 19834 - DNA, 432 bp, Setaria italica
  Peptide Sequence Number=SeqID_85808
tccaggatcatgtccttgaaagcgccaccgctcgggatcataggcaacacatgctcctggtgcgggacaatgatatccaacaggtatggccctggagtctcgagcatcttcttgattgctgcacggacctcgctcttctttgtcacacgggctgctggaatgttgaatcctttggcaatcgtcacaaaatctggatatatctcgctctcattgtctgggttccccaagtatgtgtgtgcccggttggccttgtagaacctgtcctcccactgcaccaccatccccaggtgctggttgtttagcacaaagaccttcactgggaggttctcaatgcggatcatagccaactcctgaatgttcatttggaagctaccatcccaatcgatgtcaacaactgtgacacctgggtttgccggctgctgctggtgctgc

SEQ ID NO: 19835 - DNA, 443 bp, Setaria italica
  Peptide Sequence Number=SeqID_85809
gatgaggagatccagccacagtatgctatccaggttctggatgagctgacgaaaggagaggccatcattgccacagggtgttgggcagcaccagatgtgggcggcacagtactacacctacaagcgtccaaggcaatggttgtcttcagctggtcttggggctatgggatttggtttgccggctgctgctggtgctgctgtggccaacccaggtgtcacagttgttgacatcgatggggatggtagcttccaaatgaacattcaggagttggctatgatccgcattgagaacctcccagtgaaggtctttgtgctaaacaaccagcacctgggggaatcccctcttctgctgatccaactcatcatgccatgagccaaagtcaaagctcttctttgatgtgattccttccagaagagtgttcatgccctgcagagcaagcttg

SEQ ID NO: 19836 - DNA, 1744 bp, Setaria italica
  Peptide Sequence Number=SeqID_85810
ttttttttttaattggttactattttttgtaatccagaacccgctgcatagcagcacttattaccttattgacatgtaggcacttacatgatctcttaggagttatgacgcatatgcctgcatgaacgaaacaacagactacacaactagaaggttcgaagctacttgagatcataccagagtacatcaaacaagcacattagaaaacgaagcagtccagagttgacgccctagaaatcgacacacaggagaacatcacatagttaagacacacaaccactcttgtactagctcatatgcatgtcaaagaaaggcaagggcggcgctccctgaatctcaggatcaatacacggtcctgccatcaccatccaggatcatgtccttgaaagcgccaccgctcgggatcataggcaacacatgctcctggtgcgggacaatgatatccaacaggtatggccctggagtctcgagcatcttcttgattgctgcacggacctcgctcttctttgtcacacgggctgctggaatgttgaatcctttggcaatcgtcacaaaatctggatatatctcgctctcattgtctgggttccccaagtatgtgtgtgcccggttggccttgtagaacctgtcctcccactgcaccaccatccccaggtgctggttgtttagcacaaagaccttcactgggaggttctcaatgcggatcatagccaactcctgaatgttcatttggaagctaccatccccatcgatgtcaacaactgtgacacctgggttggccacagcagcaccagcagcagccggcaaaccaaatcccatagccccaagaccagctgaagacaaccattgccttggacgcttgtaggtgtagtactgtgccgcccacatctggtgctgcccaacacctgtggcaatgatggcctctcctttcgtcagctcatccagaacctggatagcatactgtggctggatctcctcatcaaaagttttgtaccccagggggaatcccctcttctgctgatccaactcatcatgccatgagccaaagtcaaagctcttctttgatgtgattccttccagaagagtgttcatgccctgcagagcaagcttgacatctgcacagatggacacatgtggctgcttgttcttgccaatctcagccggatcaatatcaatgtgcacaatcttagccctgcttgcaaaagcctcaattttccctgtcacacgatcatcgaaccgcacaccaaatgcaagcaacaggtcggccttatccacagcataatttgcatatacggtaccatgcataccaagcatgcgcagagacagtgggtcgtcactggggaagttgccaaggcccatcagagtagttgtcactgggattccggtcatctcaacaaagcggcgcagctcctcaccggatgcagcgcagccaccaccaacataaagaacagggcgccgtgactcaccaacaagacgcagcacctgctcaaggagttcagttgcaggaggcttgggcaggcgcgcaatgtacccaggcagacacatgtgcgtgtcccagaccggcaccgccatctgctgctggatatccttggggatgtcaacgagcaccggccccgggcgaccggaggaggcgaggaagaacgcctcctgcacaacgcgggggatgtcttcgacgtcgaggaccaggtagttgtgcttggtgatggagcgggtgacctcgacgattggcgtctcctggaaggcg

SEQ ID NO: 19837 - DNA, 536 bp, Setaria italica
  Peptide Sequence Number=SeqID_85811
gaggacgaggacgacgtgctgagcacgggccgcaccccggggtgccgcgccgggggctcgccggactccacgtgctcgtccgggtacggcggcggcgggaggaagcaggagaccggcggcgagaagaagaaggagcggatgaagaagatggtgcggacgctcaaggggatcgtccccggcggcgaccggatggacacgccggcggtgctggacgaggccgtcaggtacctcaagtccctcaaggtggaggccaagaagctcggcgcgcgcgggtcaagcagctagctaaacagctgacatcggcattcggcggcgatagatgatgacaagacaggctctcgggctctctcggaatggcatgagatgccacgaaccagttggtgcgtgctctgtttgcaatggcaggatcggagagagcttgctgatgagttgccgcgcgctttcgcgctttattttgtcaacgtccttttggtgcctctgcctctctaggctccagcctgccgcctgcgtgcgtgcgtgcatggattgctgctttt

SEQ ID NO: 19838 - DNA, 574 bp, Setaria italica
  misc_feature (20)..(20): n is a, c, g, or t
  Peptide Sequence Number=SeqID_85812
aaatgcttgttgcgaccaanactttgatgtggagcaattttatccagtctcctttcatccagatggcgatcaaaggttcagcatgtcatataacaaggcctccaggggaagaccagatgatgttgttgaaatgaccacttgcatagtggaaccttcaattagctatgtggttgactcttgcaatttgtcaaatgattcagaaatggataatgtcccagtaacggacaccggggcacatgctaatggtgtgaaagagaagatgagcccacagaatgctgccgctgttggcctgaagagtgctaatagtgagtcagtagttgatcagcagctgcatatcccaacatgcccctccatctctgaaaatatttgtgaggatgaaagctttaacaagaggtctagcaaccattcagtgtcaagcgaggaaacaccttcccctgagaaagatgagcctacagaatggctgcagccatcggccgtgaagagtgctaatagtgcttcagtagtttgtcagcagcagcatatgcatatcccaacatgcgcccccatctctaaaaatatttgtgaggatgacagt

SEQ ID NO: 19839 - DNA, 422 bp, Setaria italica
  Peptide Sequence Number=SeqID_85813
agagtgataagcaagaaggatctggtggttcaattgctcgccttccgttgcttgctcacttgggtgttgagtttcctctggaattggacccttgggaaattctccagaagcatgtgctttctgattatgcaaataatgagggacacgagttgactctatgcatcttgaaccggttatatcgtgaggccgagcaggatcaagattttctttcatctagaactgctacatcagtttacgaatcctttcttctgagtgtagtatgtctacttaaaattgatgcaactttgtcacaaatgctatttctctcgcatcatagctgtccattttctgctgcataggctgaaaatcttcgagacatgtttccggcttcagataagtcacttggcaaattgctttgtgagataccatacttaccagaagga

SEQ ID NO: 19840 - DNA, 3152 bp, Setaria italica
  Peptide Sequence Number=SeqID_85814
tggaagaatcgttgcctccgatggagagaagcaatgacagtagtaacaagcgtagtttgggtgaggacatgaatcatatgatagaagatgatggtcactccaataaaagagtcagacatgcacttgatgctcaagaacatagtgaagaggcaaacaagagaaatgttgagtcaacctctgttgatatctcatctggccagcccatctctataagaaccgagaattcagaagctgtgtatcaattaattggtatgtttgctgcactagctgcacaaggtgacagagctgctggatcactgcaaatcctttcatccagtatcgctagtgacttattagcggaggttgtaatggttaacatgcaacatatccctatgtctcgtcctgaagttgaccaacaacagcttccttctactagctctggagatggaattccatttcaaagttccttctctctgttggcgtctctgctgaagaaggtgaatcaaattgatcaagatgaagtgcctccagctaaggaatccgcagtagtgccatctgttgcagatgatatcgtgacagttcctgctagttcacctggtcctagttcagtaaatcttcctatggaagagaacagtagcagtccaactgttccattatgtgtagaaacagcagaggtcaaagtaaccagtgcaggtgccaatagtttgattgatattctagaatcatcagaaacctcccatgcttcaacagaacctcagggaacccaagagcatgctagcagttatatcagttcattgcatgctgataattcctcagctggccttagtttggcacaatcttcagaaactcgcagcccaagctcttcgacagtggaagcaaaccactcacagctttcatctttgaattcccttggttcacaatatgttcttccgaagttggttgtcaataatgttgatctcagtgatgaggccaaagatctgcttcaaaaaagagtcatttttgcggattcttgagagtgataagcaagaaggatctggtggttcaattgctcgccttccgttgcttgctcacttgggtgttgagtttcctctggaattggacccttgggaaattctccagaagcatgtgctttctgattatgcaaataatgagggacacgagttgactctatgcatcttgaaccggttatatcgtgaggccgagcaggatcaagattttctttcatctagaactgctacatcagtttacgaatcctttcttctgagtgtagctgaaaatcttcgagacatgtttccggcttcagataagtcacttggcaaattgctttgtgagataccatacttaccagaaggtgtgttcaaactgctagaaggtttatgttctcctggaagtaatgagaagcaggacaaggatattcagagtggtgacagggtaactcaaggtctcagtgctgtctggaaccttatcatgttaagaccttcaaatcgggacagatgtctggagattgctttgcagagttcaactcatcatctagaggaggtccgcatgaaggcaatacgtttggtagcaaataagttatttcccatggcaagcatttccaaaaagattgaagattttgcaaatgaaaaacttaattcagttctagaagtgattccttctggtgattctgcagctactgaaacggctacttctgaagcacacaatgatggtggtttagaaaatttatcagcttcaatggcaaatgctcaaactctgatgtcgctgtattttgcattgtgcaccaagaaacattcccttctcagacatgtatttgcaatatatggtagcctaccgcaagctgccaagcaggcagttcaccgacaagtaccaattctgatacgcacaataggctcctctcctgatcttcttgggatcatctcagatccaccaggtgacagccgggacctcctcatgcaggtcttacaaaccctcactgatgctgctgtgccatccaaagaactgatttcttccataaagaacttatattctaaaacaaaggatgttgaggtcctttttgcaatcttggctcatctgccaaaagatgaggtcctgccggtgttccccagcatagttaatcttcctatggacaagtttcaaacagccctttcacgaatcttgcagggatcatctcggaatggcccttctcttgatccatcagaaattttaattgcaattcatgtaatagatactgataaggaaggaataccactaaaaaaggttatggatgcatgctctgcttgcttcgagcaaagaacaatattcactcagcaagttttggcgaaaacattaaaccaactggttgaacagattcctcttcctttgctattcatgaggaccgtcatgcaagtaataggtgtttttcctgcattggtggattttgtgatggagatcatgtcacgccttgtgagcaagcagatttggaaatatcctaagttatgggtaggatttctgaagtgtgctatcttgacgaaacctcagtcatatggcgtgttactgcagttaccagctccgcagcttgagaatgccttgagtaagaatcccacactgaaggcacccttggttgagcacgccgagcagccaaatgtccgatcaactcttccaaggtctactttggtggttctgggtcttgctgaagatcaacaaccacccccgccagcagtaagtcaagcgcagagcagccaaaacctggctgcggaaaccagtagctctgctgcagatacgactacagaagtaactcaggagtcttctgctgctagttagcatcggccttggtaaatctatccttctgactgctgaagacctaaaggggaggatgaagacgagacccatagcggaatctgacaagacctagtttttttatttagttgatggataattttaatgaccgtgtaaagcaaaggggtgaacgttacattgcctttgatagggaaaggatttgtgctgctagtcgatctatattacgcagccagtgagtcgaatacttcaacatttcatgtcccattctagtatactatcctgcttttctatccctcccactacataccaaatactagttagcattatcgtattgtgcgcctagccagtggcttataatttggaatcttctgcagtcacttattgcctatagtaccgcc

SEQ ID NO: 19841 - DNA, 1148 bp, Setaria italica
  Peptide Sequence Number=SeqID_85815
cactttagttttttttttttctttactagaaaatattaaactttctttttataactcaaccataatttgatcagattacaacctgcacatgatcattttattgatgtcgagaatcgaaagaacgcatctgttcagaatgtctcatcagcaatgtgccaacaattttaccgaaatggcccatcagaccataataagctccgggaatctactaggcacaatcttcaaagccttcatcacttgcatggagcagaatctgcttcaccctgtcaaagatttcctggatctgcttcctggagtgcagaggagaagggtacatgcacgcgcagtccagcctcccatccctgatcgagtcgaacacgccgatcgacgggccgatgccgtgcacggtggcgcagcagacgcagtcctccacgccggcattgccttgcagctcggccatgtcggcgatgaccggctcctcgaacacggagacgagcgccgtccggagcgcccccgccgtcgtcagctgggggttctcgatggcccggcacatgaggaagttgaggtcgctgatgtcagtgaggtgcttcttgttgctcttggcgctggtgtacgagtcgtggcacctcttggcaagctcccacagcccttcctcgccgtggaccgtgtgcgtgttggtgatggcggagtagaagaacccgacgttgtgatcgtccaaggccggttcaagaaacttgcggcagttgatgagggtcacgacggagtacgtctcctgctgcccgctctccagcggcttcgactgccgcgcggcgagcatagtcgcagcggccatggcggagcagagcctcaccccgttctccttgcactcatcgagcagcctcgttgtctcgtcgcggccgagagtgagccgcagcatctgcgtcgacctctccgttccagtctccacgaacggcagcgtggacgtgcgcagcccgttgatggagtagcccaccatgtccagcccgcgcgcccagaacggcttccaggtgtcccgctgcgggatcttctcctccagcgccgcctccgccgccgcgtcctccggtgcgcgccccgtcccccttttcctttccctaccaccgcccagcagcaccaggagctccctcgccagcgcgttcgccgccgagcggtcg

SEQ ID NO: 19842 - DNA, 799 bp, Setaria italica
  misc_feature (738)..(799): n is a, c, g, or t
  Peptide Sequence Number=SeqID_85816
tgtggttggagttttgctcgcagatcaggtggacctcaccagcctccgtggcggccatggttggcagcaaaggaagaagtgcgtatccctttctccttcctccttgcctcccccgaagcagcccagagtgagaacaccaccccatggatcaaagaatcccaaagttgctgccttctgatttgacccacctgccaactgtccagcagcagcactcagatgtaggcaggaggtggtcagctcggcaaggtggatatagcatatgtgcgatttatcggaaggtttcagatattctattccaacatcaagaactacgatatcacaaagggcagacccaatcttcagaagttcattgagcctgaatggagcaatacaagggacgccgtagaggtgatagacaagaccatgggtctctcccagaataatcatttgattctttacaccatgagatgctcatatgatcttcattatcatttggccgcatatacgtgattatgaaccttttagtatagaaatctccgctgatatgagctaccggctatgggtagacaattcaatttgttaccagcaatagatacatatgatccttatgttcccgctagattaacattttacctatgttggtatatactttgatattgttgtaccaacatgcaatttaccgcaagtgttgcaccgaacctaattgttgattctttgactgtggaagtatgatactgctgtagcttgtcaatgtttttnnnnnnnnnnnnnnnnnnnnnnnnnnnnnnnnnnnnnnnnnnnnnnnnnnnnnnnnnnnnnn

SEQ ID NO: 19843 - DNA, 1206 bp, Setaria italica
  misc_feature (1166)..(1206): n is a, c, g, or t
  Peptide Sequence Number=SeqID_85817
gctggtctaccgctgacgccggcctccacctcttcccccgtcacctcttacgctccatcatcggcgagtataaagattcgccgctcgcgccgcgccgctcaccgcatcgccgtgcagaagcccacccgaatcgtcgccatggcagccaccgcaccgccgagctccgtcaaggaagtgctcccgtctcccctcacctccgcctccgagcctcctcccctcttcgacggcacaaccaggttgtatgttgcgtaccactgcccatacgcgcaacgcgcttggattgccaggaactacaagggtttgcaggacaagatcaagatagtcgcgatcgatcttgctgataggccatcatggtataaggagaaggtttatccagagaacaaggtgccttccctggagcacaacaaccaggtgaaaggagagagcttggatttggttaagtacattgacagcaatttcgaaggcccatcattgcttcctgatgatcctgcaaagcagcaattcgctgaggagctgctcgcttataccgatgcatttaacaaagcactatactcatctatactctccaaggaagatgtgtccgaggaatctgttgctgctctggataaaatagaagaggccctggggaaattcaacgactgcccgttcttcctcggtcagttcagtctggtggacatagcatatgtaccatttattgagaggtttcagatattctattccaacatcaagaactatgatatcacgaagggcagacccaatcttcagaagttcattgaggaagtgaacaagatcgatgcatacacacagactaaacaggacccacagcttttgcttgagcacacgaagaagagacttgggattgcctagagcctgtgaccaaggatgaaactctcgctatggcattaccatcatagacttgaatagtagatccagactcatttgtatgcttgaatgttatatgcattgtttacaataagacatgtccttctatgctggtcgtgcttttgagaataaactatagttgtcagggattaagctttgtagtgcatcatcatcagtgtgctactcgacatgaaggagatgtaacgatgtgcagtgtgctgttaaatgttgctgatttcaatatatcagtgctcctctcatattaataataaaaaaaaaaaaannnnnnnnnnnnnnnnnnnnnnnnnnnnnnnnnnnnnnnnn

SEQ ID NO: 19844 - DNA, 691 bp, Setaria italica
  Peptide Sequence Number=SeqID_85818
ctgttacatgatgcaccttagaaggtaaacagaatgtatctgagatcctgtggttctctcgaacagtatcattcctgactgctgtataacgaccatgcttacacaatctctgtctgccgtgaaacaccatgtcatggtgtacagcttcctctaacctagctaccaacttgttcatcttcgagagatcaatcagacttactcttcagggtgtatacatttccgacaactccaatgacgctgacaactatggacagccccagcaacccaagtgacaggagcctctctccatgccccaagcgactcccttccttgtccagcctcaatgccaccagggctgggaacatgaaccccaatgccaaccctgttgtcgcaccagtgaacttgaaggccatccagatgttgggtatcatcgttgagccaaggtagatgagcgccagtagcaccactgtcaatgtgagcgtcttcttcctgctaggggttgccaactccccaaatatcagcgagtccacagtctgtcttagcgagaagtggacaacagggaacacaaggacaaggtggacgacataaccaatcctgacaatgtagttgaggaccgagctgaatcgaatcccaagatccttgtcaaagttggtgagaacgtcggactctgtatcgtcgccaaacaagaggtagccagagagagcagtcaggg

SEQ ID NO: 19845 - DNA, 1506 bp, Setaria italica
  misc_feature (1)..(32): n is a, c, g, or t
  Peptide Sequence Number=SeqID_85819
nnnnnnnnnnnnnnnnnnnnnnnnnnnnnnnnccagcccatatatcacaataatattatattaacccatcaaccataaataacaattatgatgttcaggttcaatcaaaaatagttagcatataggctaacagggctacttgaactcgactgttcttcctgcaagcatcactacttaaccaccaacttaacgtccaaaggaactggaacgaacaaaatgaccaaggtaattcctataacctgcaattaccgatgttcacccgtaactgatgccatcatatgtctgcagcaaggaaattgccagacaaggaaaccttctcgccaggcttgaatggtgggagacctctgtacggacaggtaccacatcgaaaggcatcacccaacccacaactaccacaagctgactgaggattgatgacctgctcggcagtgagctctagcttctctacttttgcctcagcctcagccctgccacaagtacagttcttgcatgctttccttgttgcccccacttcacaatccccaactagtgaaactcaagaggaactatcaggacctaaacttgaattgagtgtctttacacagatgtcaaagtaggttgatggattttatgactgtacgtaccaaatgggagttgcggtttctttaggtcttcctcagtcaagagcatgcagaactaatgtgtgcatataagttctgaatgtgtgcatataagtcctgaatctaattacgaaacaaaatgtgggcaaacatctacataatcttacatttaagcaggcataagcattgtgcaagctactcaaataaaaaacaagatattacaggaagtaaaatccttttctatgtacaacaagatggcaatattttattgattttagaaaattcatatggccaaaaaggaaaaaatctatgccgactctaactatgtacccaataacccaaatctgtcttcatgctaggaacttgtagaacatatatttctcttgaacttcactttaaaggacattcagttgatcagttcttttggacaaatgaacttggcagttaagctctcaactcatgaacagagctcagacagcagatgcacaaaactatacggagtattatacttataaagtactacactccaaatcacaactagcccaaacattacaccaggtactcaggtagtagtccgcacgtcacagagcaagagcaaatggagaaccgatgacaaaattgtcaagcaaaattatttgcataacatacagaaatacacaaagcaagtagctacaagctacctcaattctgcagttcctgaatggacagtctcatgcatacaatatgccatatgataaagcccagatgtgtgcagacgcacgagtgacgcttattagcacagattcatgaaatgcaaaacttgaaaattcccaaactagctaagtggacatatactttatcttgagcaagtagacaagcacaaacaaagaccgactcgatctaggcatctagaactggagaaagaata

SEQ ID NO: 19846 - DNA, 1433 bp, Setaria italica
  misc_feature (1)..(65): n is a, c, g, or t
  Peptide Sequence Number=SeqID_85820
nnnnnnnnnnnnnnnnnnnnnnnnnnnnnnnnnnnnnnnnnnnnnnnnnnnnnnnnnnnnnnnnngtttttagtttaatgaacagatgttgcagcgtaaatgagtttagttcatgacgaatgtagattatcacgctacttacaaaatccggaaaccacatacacagaccaactgtaggtaaaataggtagatataggcccatcaacgttttgatatcaaacccatcagcacacgtgtgaaaagtagagagcaaactcgagtcccacgcacacatataggctaacagggctacttgaactcgattgttcttcctgtaagcatcactacttaaccaccaacttaacgtccaaaggaactggaacgaacaaaatgaccaaggtaattcctatatcctgctcctaccgatgttcacccgtaactgatgccatcatatgtctgcagcaaggaaattgccagacaaggaaaccttctcgccaggcttgaatggtgggagacctctgtacggacaggtgccacatcgaaaggcatcacccaacccacaactgccacaagctgactgaggattgttgatctgctcggcagtgagctctagcttctctacttgtgcctcagcctcagccctgccacaagtacagttcttgcatgccttccttgttgcccccacttcacaatccccaacaactggaagttgtggtttcttcaggtcttcctcagtcaagaggctgtcttcatcaataagttctgagtcatcatcaatttgaatcttaggaagggcctttgttgctttcttaagggggaaagaagaacccacactccagctggccttctttgccttaacagtaacagactgcacattatccagcgagcttgcagcggatgcttgcacttcaacaaatccccccatcagtagcttgcgctcaatatcagtgtttggcttctggctggaggagggtgcagagctgtgaatcagaactcttccgccagcttgcagcacccggttaatctcagcaaccaactgttccctcaagctttccacatttttaatgacagcaagaacagcaccaactgatccatcatcaaaaggcaacttcccaccgagcgacgcgcactgggtgatgacggccacctcctcccgcgagacgtcggcggctgccgccagatcccccaccgcccggatcggcagcgccacctcgtccgtcaccgcgagcgccgccgccatggagtcacctgagacgaagaggaagcggatctgacggaagcggcggaggaaaccctggggcaatcgattggggaggagaaattgggttttgggttcgtggctccctctcgaagcttccggcaatcaccaaatcctctctttggttcgtgccgcctcccgccgccgtttcagcccgtcgccgaggtgagcgatgacgtttctgtgggagtaaacg

SEQ ID NO: 19847 - DNA, 395 bp, Setaria italica
  Peptide Sequence Number=SeqID_85821
gcgggggaggagcgaggagagcgcggaggccgcgccgcggagggaggcgagcacgacggagagcaagttcggcgggaggagctgtacggaaacagcggacgcctcgactgccttcgcgctggcgacggcgacggcgtccgggtgcgaggccacggcggcgaggcatgagaccgggtgcggggtcttgtggcagatggcgtggtgggcggtgtcggccggcgggctggcgtccgcggcggcagccttgttgggcctcctggttcggtcggtatggtggtggtggcgcttgtgcccgtggcattgggttgtgccggcggtggtgaggaggaggactgcgaggaggaggagcggcggcgagagcgagacggccgccatggtcgtggacagtgagtgtg

SEQ ID NO: 19848 - DNA, 1420 bp, Setaria italica
  Peptide Sequence Number=SeqID_85822
tacggtcctacgtaaacggcctccacccggaaatcgacccatgtgcccagcccgctgctcatgtccttgtcgacaagctcatcctccacccattcccccatgctcttccagctggtgatctcattgcagacttcggcctctacacccctgctcagcgcggccacccctttgctccatgctgcatatcctgcccggaagtaggtgctgcgtctcgtctccaggcattcatttatgcagtcaaacaacagccgccggtagccacgacggcccagaggctctttcccttgtgcatatacatgcatattctccaatttctcgaagaggagcgggtccaaagctgatccatcctgattgacaaagagtgaccctagttcatctgttgtcaagttgacgttgcttagcacatcttcaatgtactccagctctgtgtgtcttgatttcttcgaacattgggtgacatctgagatatctgaagcatctactgatgcggaagaggcagagtctgtagtctttgcctcaatgtcaactggtggtggattcatcaagaaattccctgtggtagttttaacttcagaagaagatgaatacaccgccttactcccatcactgcttcctgaacactcagaagaccagcaactctcgcttagaaaggtgggttcaagcacagagaggggacttagatcttcatactcctgttccttccttgcattactgatactactgcattcttctggttcctccacctttaatttactgccacggaaaatttggccctttgtagatgactgggctgatgggcaataatcatattgagaaggtttggcttcagaagggctacagtcaaatactccgctttctgagccccaattgctgcaggaagaggttggtggttcctccaaggtaaaagtagcaggcacaaatgtatcaccccttgtgaaggtgatggatggatcaatttttgatgttagctccttcagcttcttttctaggagaaggctcaaggcatcaccgtttacaaagttcagacccactgacgatagcccttcagccttaccatctgaatcatctttatcacatcctgcatccagattgaaattgcttcttgagtcccatttacccgccaatctggagggtcctgctgatggtttgaccaacggtgaggtgaaggtaaatgacacaacatctgtagtgtctttactttccttgtcccacttaatgtgctcatccataacaacattaggttgaacctgcttctgaagtttacccactggtttttcaggcacgaatgtacccttctcattggtggagcgcctctctatcaaacgtttcttttgtgggaagtccttgttgtttgacgatgatccctccctatcgccacttatgctttccacaatgtcttttctgccaccaactttagata

SEQ ID NO: 19849 - DNA, 1257 bp, Setaria italica
  Peptide Sequence Number=SeqID_85823
atatgtttcagcatgagtgtcgaactgcaatggaacaaaagctttgattattattgagcaaatgttcactgcaatggagggaagggaatggttggttggtcatacaaaactctgacaaagcatcgagacctctctatatattacaaattgcacatcaccacttccttattcgccattgttcaagcaggtgcacatcttatcagtgctgccagttctatcatcacatctcagcgtggtgatgcgtccggccggcgagcccgcagaggaagcctcggcgctgtctctgaggccgcgcgtgagccggcgctccgccgccgttctcgccatcgacgagcttgccggtcgccagcatcagcttcctcaggcggtcttccatggtccagctgcggctgcgctcgttgagccaggcgacgatgtcggagaagatggcctccacgttctcgtcgggctcgccggcggtgaggccgtgccacatccccgggtagagcttgatggtcttgtcgccgctggccgcgcgctcgtacagagcgcggctaacctccgggtccgtcaccgtgtcggcctcgccgtgaaggacgaagaacggcagcttcacctgcgacaagctgtcttctatgtacatgctggttctgagcatctccagcgcagtcttgagccgcggcttgtcctggtagatgagcttgttcctcctgatcttttcgcgcttggcggggtccttgaaggcggcgtcgatgacgtccttggtgggcacgatcttccacttggggatcacgtcctccacctgcgtcaggagcgtgatcaccagcgggtgcggcttcaccttctccgatatcttgcacatgggcgcgacgaggacggcgccgtcccagaaggcagggtccttcctgtgtagcagcagcgccaccgcgccgcccatggactcgccgtacagaaaccggctcttgctgcggtactcctcaagctcgcatatggacttgaagaagtggtggcagtcatcgacgaggcggcggaagctgcggatgtagcagcgggagcccatcgacttgccgtgcccctcgtagtcgatcccgaacacgccgtaaccggccgccgccagccgcacgccgcattctctcatgaagccactgcactccatgccgtagccgtggcagaggaagacgagcgccttgggcgacgccgcggccagccagccgcagactagtacttactaatagtaacaaataagaactaaggttaaactaaagaaaagaaacaaaa

SEQ ID NO: 19850 - DNA, 464 bp, Setaria italica
  Peptide Sequence Number=SeqID_85824
gctccaacactggcgctccaggactctagccagcttgagcatctactatcagccaagagcacgacactggtcatagtgatcgccgtgacgacgccgctcatctccagcccggtggcttgtggtggttgttgggcactgggggaccgtagtcctgagtctcgaaggccatcctctcggagattacggatttgccatcctctggcacaaacctctccgttttcatctttggctctggagtgctgcctttaaccgacggcatctgaccagccttttgcatgggcatcttttgcagtcttgagagaggtacagcactggatggaaccaagaggtagaatgccaacaaagagatcagaagacacagagccggtgccctctccattgccgtggcctgtttcaacagtgcagtactacctctcaaagctctcaatggataatgcaatctattctgttgccttcatgttacc

SEQ ID NO: 19851 - DNA, 380 bp, Setaria italica
  Peptide Sequence Number=SeqID_85825
ggaccttgcaggggagctcccaccagttctggcccttgccgtcgatgagcccggcgccgcgcagcgtcgtgccgtgggcgttgtagaacacgagccagttgcgcttgttgttggcgggccacttgtcggggtcgctcggcgccaccatcgtcccgtcgagctggatggtgacgctgccctggcacgggccggtgaagacggtggtgtgcacgaggaaggagtagccggccctggcgagcacgacgccgtccccgtcgtccgcgcacgcggtgtcccacgccgtcttgatggcgtcggtgtcgtccgccacaccgtccccgacggcgccgaagtccttcacgacgtcgtacacggccgccgccccgcccgacgcgggctcc

SEQ ID NO: 19852 - DNA, 278 bp, Setaria italica
  Peptide Sequence Number=SeqID_85826
gctcggggcgcccagatctaggcctgatagaggcgtctgcccccgcggccagcccccatggcgccgcgacagccgtggtggatggcgctgctcctacccttcctcctcgccggcgtcgggtcctccgccgccgcgtcggttcctaccgatgcgtgccgggtccctactaccgtggaatccgtcctcgggactcccgagatgtgctcgacgttggatcgcctcggcgacccggtcggggtcatcgagggagacgaggtcacattggcaaaggcagttaa

SEQ ID NO: 19853 - DNA, 488 bp, Setaria italica
  Peptide Sequence Number=SeqID_85827
aaaaataatccttgtagggagacgaggtcacattggcaaaggcagttaatcttcttcacatgaacaaggatgactatattgccatacttttctatgcatcatggtgcccattctcacaagaatgcaaaccaaattttgagacattggcttccttattcccaactattcggcattttgcatttgaggaatctgcaattaggccaaggtaagtcctcaaatcgtgtaaagaaaattttgtttcttagtgtaatacttctgtttggtggaatagtaatatgttgctggaactgcagcataatatcaagatacgggattcatggttttccaacactgtttctcttgaattcaaccatgagagtgcggtatcatggaccaaggaccgttaaatcactcgctgctttctacactgatgtctcaggtgtgctatttgttccttataaactcttgtctcatttttcttattggatggctttacttgaatgcttgta

SEQ ID NO: 19854 - DNA, 567 bp, Setaria italica
  Peptide Sequence Number=SeqID_85828
ttgccatacttttctatgcatcatggtgcccattctcacaagaatgcaaaccaaattttgagacattggcttccttattcccaactattcggcattttgcatttgaggaatctgcaattaggccaagcataatatcaagatacgggattcatggttttccaacactgtttctcttgaattcaaccatgagagtgcggtatcatggaccaaggaccgttaaatcactcgctgctttctacactgatgtctcaggtgtgctatttgttccttataaactcttgtctcatttttcttattggatggctttacttgaatgcttgtcaaaattcatccttgttgctttgcacatcgagcaactgatccatgtaagattatgagcttggcttttttcagctcacttgtggtctcttcattccaaaacattaaacattgttgttggttctttctatgcttaagtcgtttacaattcgtaaatttatgtgatgaaggtatcaatgctttggtgaagtcaactgcaggggaggccatggtacattccttagatgatattgagcaataaaaaggacg

SEQ ID NO: 19855 - DNA, 1228 bp, Setaria italica
  misc_feature (1126)..(1228): n is a, c, g, or t
  Peptide Sequence Number=SeqID_85829
tttttaggttttaaactttttagttttacttttaagtttactttaattttaaatttatttcttaagtatggactccgagatgtgctcgacgctggatcgcctcggcgacccggtcggggtcatcgagggagacgaggtcacattggcaaaggcagttaatcttcttcacatgaacaaggatgactatattgccatacttttctatgcatcatggtgcccattctcacaagaatgcaaaccaaattttgagacattggcttccttattcccaactattcggcattttgcatttgaggaatctgcaattaggccaagcataatatcaagatacgggattcatggttttccaacactgtttctcttgaattcaaccatgagagtgcggtatcatggaccaaggaccgttaaatcactcgctgctttctacactgatgtctcaggtatcaatgctttggtgaagtcaactgcaggggaggccatggtacattccttagatgatattgagcataaaaaggacgccgaacaggaaaattgcccattctggtgggcgcgttcgcctgagaaaatacttcagcaggatacttacctggcattggcgaccacattcgtaattttgaggttgctgtatcttcttttccccaagatagattcctttgccagatgggcctggaggaggcataatctctttgcaaacttgacgggtgcacatgaatattttctcaactaccttgagcaagcaagacagaaattccataggctctacccttcaagttcaaagcgggggaatttgcaggagggggcaatgaacgccactgcttgggcctcaaagtcattagcttctgtatcgatcggagaaccaagcaccatgggaaggacaaactctacgagtgagctaagatgaactgtagcttctttttgtccgcagggatatatatgtacagtacagtagagtgatcaggatatgaacaccaagaatctgttgtaacggctgtattactcattgtaacatcctccttagaataagcacattcactgtttcggcccctgtttctcgttgttgttacagcccaattctttggaggaataaaagtctctggtgtattgcgcaaaataaaaaaaaaaaaannnnnnnnnnnnnnnnnnnnnnnnnnnnnnnnnnnnnnnnnnnnnnnnnnnnnnnnnnnnnnnnnnnnnnnnnnnnnnnnnnnnnnnnnnnnnnnnnnnnnnn

SEQ ID NO: 19856 - DNA, 245 bp, Setaria italica
  Peptide Sequence Number=SeqID_85830
cgaacacgaaactccaaagtcacgagcgctcgacaaaagaaaaaactcgcgaaatatctcttcgtcccccggtgagtcggcgagatggcggggatctcgcgcgcgatccgggcctgcgccgccgcgtacccggcggagcctgtctgcttcttcggcggcagcggtgccgaaggacgcagctgcggctggggtcacagcggcggcggcggcggcggtggccgggcacaaggggcgggatcgggagg

SEQ ID NO: 19857 - DNA, 289 bp, Setaria italica
  Peptide Sequence Number=SeqID_85831
tcggcggcggcgtcggctccatcatctcccagtccctgttcgaccagatgctgctgcaccgcaacgacaacgcgtgcccggctcggggattctacacctacgccgccttcatcgccgcggccaacgccttccccggcttcggcaccaccggcgacctggacacccggaaacgggagatcgcggcgttcctgggccagacgtcgcacgagaccaccggcgggtgggccacggcgcccgacggcccctactcgtggggctactgcttcaagcaggagcaaaacccggggtc

SEQ ID NO: 19858 - DNA, 1062 bp, Setaria italica
  Peptide Sequence Number=SeqID_85832
ttcgcacgctcgcgagtcgcgtcgcgccgctagttctcccggcggcccgcgctcgcacatccttcgtcgcctcttctcgcgcctctcctctctccccttccgactgcttcccgacccccgaaccctagcctcccttgagacctctgcccccttcccgcctccgccgccacagcgaaaggatggaggtcgaaaggtccacgaccgccgccgcggcggggggttcctccgcggagatggcggtggaccatgcggcggggtcgggcgccgtggagaagccgcggttcgatgctctgatgccgagcgagatgagcggcgggaggccccagttccggaaggtgcccgtgccgccgcaccgcttctcgccgctgaagcgctgctggatggagatctacacgcccgtctacgagcacatgaaggtcgacatccgcatgaacatcaaggcaagaagggtggagctgaaaacaaggaaagacacaccagatgtgagcaaccttcagaaatgcgcggactttgtgcatgcttttatgcttggatttgacattgccgatgctgtcgccctgctgcgtcttgatgacctgtatgtggattcctttgagatcaaggatgtgaaaacccttcgaggggagcatctgtcacgtgctattggccgcctatcagggaaaggaggcaagaccaagtacgccatcgagaactctaccaggacccgcattgttatcgctgatacaaagatccatatacttggatcctttgttaacatcaaggttgcccgggattcactttgcagcctcatcttgggttctcctgctggcaaagtgtattctaagctaagggctgtgtctgctaggttggcggaaaggtgttgagttaaatgggttttgcttgcacccaatatggttgcagttttgatcgcataatatgttgtcatagtagctgatttgtgtgctgggggctgggcctatttattgtatccttctggagagcaaactatattgtgccaagagatttgatacatgccttgtctactgttgcgcttgttgatctgttgctgaaacactggagctt

SEQ ID NO: 19859 - DNA, 429 bp, Setaria italica
  Peptide Sequence Number=SeqID_85833
acggccatcaccacggtgaccagaaggcctgctcacaaagttcccggccgacatggaggccacgctcatggcgctgccgaggctcctcaggccctcggggagctggtcgttgaagaactccgtcatggtgacatacatgaacacctcggacgctccgatgagcacgtactgggggatctgccagaggatggtcagggagctggacgcctcccccgtcgcatgcttcagcctctgctgctccaccacgccggacgtgatcatggctagcgtcgagatcacgagcccgatgcccatcctctcgagctcggtaggctctcgccacaccttggacatgatcttgacgatgcagaagctgtagatgaagacgaaggccgtcacgcccaggatctcgaacacgttcatcgcggcagcagggatctccagcttccg

SEQ ID NO: 19860 - DNA, 270 bp, Setaria italica
  Peptide Sequence Number=SeqID_85834
ctggaacttgaacactttgcgtatgtcctccttgacctcctccttctcgcccttgagcaggagctcaacctgcctctggagcaggtccgtgaagtacctctcgaggttgtccggctgctgccccggcttgttcttgtacccgtcctcgtagagcgcgtcgatggccgccagcgacgggaagctccggcgccggtcgccggccaccgcctgcgcggtggtgaacgccgacagcgtcgacgtcaccttcttggtcagggaaccgcccccggt

SEQ ID NO: 19861 - DNA, 393 bp, Setaria italica
  Peptide Sequence Number=SeqID_85835
attttctacccaacccagagctgcagacctcagtgctttcgatctgcctcacaagtgtaacattgctcttcactatacctttcggacttggagctgctgggagcacacgggtggcaaacggactgggcgctgggaaccctgacggagctcgatcagcagtccgcgtcgtgctttccatggcggcgatggatgcggtcatcgtgggcgggactcttctagcggcacggcgcctcgtgggcctcgcgtacagcagcgaggaggaggtcgtatctttcgtcgccgccatggttcctctggtctgcatcactgttgtgactgatagcatacaaggagttctctcaggttgtcaggttcttttcgctagcatctcaaggcgattacgacttcgattcg

SEQ ID NO: 19862 - DNA, 780 bp, Setaria italica
  Peptide Sequence Number=SeqID_85836
aggcggtgagcgagtcgaaagtgtttgcagcagcgtcctgtgggcagcctgcgcctcgtggatccgacttggactccaatttccccccaaggaaccatgtcgccagcagtgatgcctcagtattaaccctcctgagaattgacttgataccaaatcttttatgacctgttcattttgagtggattggcaggattaaatcctggtcggattgagtgacacaggtggaatcactcaaaccgggcctggaagtaatcctggctggaatccaatccaacttaaacgaacgagggctaaactgagcgctggacctgcatcagtttgtatctgaactggcccacagctcagtgagttaacctcggaggtcgacgtgtggttgaggaggcgaaagctcgcacggacgcttatctgttccggaggccggccggcgtcctcatccgacgcaaaccacaaacgtttgcattccaagataaaaccaaagcaaacgtttgcattccaagataaaaccactcctgccacaaccacaaccgcattctgtcaccccatttccaaccatccattcagactccgatcgagagcagagagatggtcgagcctgctatttctgccgtcgctgggagcatcaaggaccttgctgtccaggagaccacactgctgtgcggagtcattggtgaagccgggttcttgaaagatgagctgcagcggctacagggcttcctccaagatgccgacaccaagcggagatcagggaatgcaaatgccactgtctgcattagccagatc

SEQ ID NO: 19863 - DNA, 558 bp, Setaria italica
  Peptide Sequence Number=SeqID_85837
gcttcctccgtggtgtttagtacttttggttgagaggctacatgctgcatttgtggatacgatcagtgctaggaggttcatcaccgataatcctttgacttgactttttagggcttgaccatggtaagaagtttacaacatctacataataatacaatgtgaagtcaggtatctactagcttccggcaaattgtcatcccatccccaataggcaccatgctgatatcgacacgcttatcctccaaaactttcttattgaagtttcttatactgattgtctttcggtcatcaaccagaggatcagcaacccgtccataccaaaggacattgtccattacaattaaaccaccaactcttactagctttagtagaagctcaaaatactcctcgtacattcgcttatcagcatcaacaaatgcaaagtcataactggaagcttcaccacaatcaagcaatgatcttagagaatccgcagccaaagcatgtttcacatcaatcttgtgtgcgacaccagcacgttgatagtatttttttgcaacttctagacatcttcttcta

SEQ ID NO: 19864 - DNA, 977 bp, Setaria italica
  Peptide Sequence Number=SeqID_85838
aagtccacaagctgaataggttcctcagaagggtgaggaagagcaaaaggttgaaccatcagagctaaaggcatggccgatgttgtcaagagatcaccagtacaaggtatctgattcacagtgcatcgcattaaacgagggctacagttcccagtgtccttcacaataaactcactagatgcagccgggggaacggttgcttggccaccttgacgggtctcataaatgatgactgatgcttcaggtattggccttgggatttgagtaggatcaattttggatggggttgagacctgggttccagcatgtggagaatacggcatagtcggggtgccagggggtcctagtgtgtttggctgcatgccagggatgcctggcattcccataggtggctgcatagcaccagacccagctccctgagtttgccatgacggaggcccaaacgccggagcatttgccctgggtggtcccatgaatggcagctgctgtgccacaggcgctgattgtgcagcaaagggcggctgcacacctggctgtggacccccaaactgcgtctggccgccaaacggcgttggaggctgctgcggagccccgaagctaggtggcattgcctgcgacgaagctgccgccgtcggcccaggctggccggggaatgtcggccgcggcgcgccaaacattggtggtgccggctgcgacgccatggcgggaggcccaccgaacggcagaggctgtgaacccgcgctaggggggccaccgaacggcggcgcctgggacgccgcaacggaagggccaccgaacggccgcgacgttacggcgggagggcctccaagcggcggagacgtctgcgacaccgcggcaggagggcccccgaacggcggaggcacctgcgacgccgcagaaggtggacctccgaacggtggaggcgcccgggacgccaccccagggggcccgccgaacggcgggggctgctgtgacgc

SEQ ID NO: 19865 - DNA, 440 bp, Setaria italica
  Peptide Sequence Number=SeqID_85839
ctccttgtctctaactatctcccaatactccttgaatagaaattcataagttgccctgtcattgaaatcggccctctccccatcagagtcaacatcaacattcttctcaatcatgattgtcatccttaaacagttaatgcagaatccctttgtcttcctcaggactggaacgaattctgcctgtgacacgcaaccttggcagaaggtgtgccatggacagcaatagcaatagtagcgtgaacgcccttcacaaataaagcatgtatgccattcacaaatgaattcttcatttgaattgaggaaatcgctatctttccccacgcaaacaggatggtaagctttgtggcagctcctgaaatcgcagacgcggagttcgccgccgtccttgcagacgaagcagaggtcctccccatccaccgcctcctcctcccccttccgcc

SEQ ID NO: 19866 - DNA, 478 bp, Setaria italica
  misc_feature (1)..(60): n is a, c, g, or t
  Peptide Sequence Number=SeqID_85840
nnnnnnnnnnnnnnnnnnnnnnnnnnnnnnnnnnnnnnnnnnnnnnnnnnnnnnnnnnnnatcaagccacacaaatttaaagattagcagcaacgcaccatcatctcaacaaatgggacggataacaatacatcagtagcaaccagactgaaccatcatcaactcacgacgagatagcagagtatctacaagggatcacacaacccagcacaccacgacaccggtaggaactcatccatcatcaaccagatccgaccaaaatgccacgacacgaccaacgaagaaaatccatctctacttctactgctgctgctgaatgataataaaatagatctaggcgatggtggtggcagtactgctaggtaggcaggcgtcctccgaaccccatccctcggcgccgagcgcggagctcagtggcggacggcgccatctctgcctctcaacccccgaaaccggaaacaacctacaacgaaaccca

SEQ ID NO: 19867 - DNA, 640 bp, Setaria italica
  Peptide Sequence Number=SeqID_85841
tcgggtcgtccgtaggtcttaaggtaccgggtcctacgtccggtagtctaggttcgtccgtagttacacccttgaagctcctccaccgccgcatcccgccctccgtccccggcatcatgttcctctccggcgggcagtcggaggtggaggcgacgcagaacctcaacgccatgaaccaggggcccaacccgtggcacgtgtccttctcctacgcgcgggcgctgcagaacacctgcctcaagacgtggggcggcgtgccggagaacgtcaaggcggcgcaggacgcgctgctgctgcgcgccaaggccaactcgctggcgcagctcggcaagtacacctccgacggcgaggccgccgaggccaaggagggcatgttcgtcaagaactacagctactaattcatcggctagcaactccgacgatacatactggttacgcaagctaagcacgtcttcgccgtgatgatccatgcatggtgctcatcgatgctttgtgcgtgccgttagttactactgctagctactgcaaagatcgagctcgccattgagatgcaagcttgaggcatggtaatgctatactaataatagtaataaagaagaaaattaaaattaatagaaagttagaatacgaatacgaagta

SEQ ID NO: 19868 - DNA, 250 bp, Setaria italica
  Peptide Sequence Number=SeqID_85842
gtcccatgtgatctataaagcacacaaaataatagtagtggtagcgttttacctcttttaatgagcacctaacagcacaaatgcacatcttgaagttatgaaactcatacctgacaatctgatatagtatcaagcccatgcctgtaaaactcatggtccatggatcggacattttcacggttcttgaaggcaacattccacctgcatccaaggggccaatcatcgggttagaatcttattctctagtccg

SEQ ID NO: 19869 - DNA, 522 bp, Setaria italica
  Peptide Sequence Number=SeqID_85843
tgtcaggcctgcttgcaagtatatgttcaacaatggctctagtgtcatgccgtacaacttagcaaaaatacttgcttgaacatgtcaacaagaaagtcccagcggtctttctcaaacaatatctgcaagtaaaaaacagcatcaggtagcaaaatctttgtactgcagctgcagtactccacctggagttgattccagataaatgatgaaccaatcgtgacacagtacaagtaacaatcagactccagggatgtacaattcacagtccatgctcaagccaggaaacaagatttggtgtggttaatatgttatattcaagagaagactgtatttgaaacccagttcaagtcaactgtcagctataaatcaagcatgccataaggaaccaggacatcagctgttgactcatttgacacagtggcatatcataactgaagaaacggaagaaaaatagttagctaaccttgtaaggagcacaattcgtattgcttctaaaaaccaatgttagctgtaacacgctgc

SEQ ID NO: 19870 - DNA, 1106 bp, Setaria italica
  misc_feature (1090)..(1090): n is a, c, g, or t
  Peptide Sequence Number=SeqID_85844
tttttttttttgtggttccaacttccaaccagtttaactttgcaggttaactcaattaacttaacatggcgcagaatgcgatgaccattctatgtacattcactcagactcccaggtcacacaaatctgttcacgattacgagatgaaggccctcacacactcagagaagtcgcaaacgtctcctgtcctggggcatgtgatcttgccatcgtttttcttcgccatctcttgaagagccttctcactgtacacatagccatttggcagaacccgtggcgggttctctgtgtccatgagctccttggtgatgtagcagacgagctttgagtggtgctgcttggagaagggcaggggctcggctagtttcctgaagccctccagggacaaggggtcttctttggggcagctaccctctgagcataatggggtcttgagagctgtcaggcctgcttgcaagtatatgttcaacaatggctctagtgtcatgccgtacaacttgcaaaaatcttgcttgaacatgtcaacaagaaagtcccagcggtctttctcaaacaatatcttgtaaggagcacaattcgtattgcttctaaaaaccaatgttgctgtaacacgctgcaattctttcatgtgaatagacccccagggagcaaggtattttcgagcatatgctatagcctgtatgcaattcttagccttgacaaattccacaaactcttgaagcctcagtaaaaactcgagcttactctttgatttctttaatcgagacttgttttctgcacaccaagctaaagcaggagcaacctcattgttctgaagagaatcaattactctttttgcatccaggaagacatcaatatcaacgaggtcctgaataccagaagtctcagcgagcttggtggcggagtcatagtaggacatccgaagcatgtaatcgaccaggatccgcttcagccgcatgtcctcccactcggcgtcctcgccggtgctggcggacgccagccggtccagacgcgcccggcacctctgcacctgcacctcctccgcgcgcgcaccctcctccatcttgcgcttgaggccgtggaggcgganacgagggaggtgaggt

SEQ ID NO: 19871 - DNA, 364 bp, Setaria italica
  Peptide Sequence Number=SeqID_85845
ctaggtaagaaaaaaaaataccataattctagatctaaaatgggtgtatttctaccttctgttaataagatggattaaatagctatgtacagctggagaaagggaatcaactgaaggagctctcttgatgttaatctgctagttttaagtaatcagtactgcaaaggatgtgatgcagacacttatgtatggtgcatcatgctatatcaagtaattgcagttgtataagcttgtcttacagcaaacacttgctacctcactcagggattgtagttattctgcttctcaagagagtttccagatgcaaactttgtcatctctaggcagttatgccatggcctgacctgttgtgacttgcaagatc

SEQ ID NO: 19872 - DNA, 773 bp, Setaria italica
  Peptide Sequence Number=SeqID_85846
cggcgtacgcggcgctgcggtcggcgttccggagcggcatggcggcgtacgggtacccggcggcgccgccgaacgggatcctagacacgtgctacaacttcgccgggtacggcagcgtgacgctgcccaacgtggcgctcacgttcagcagcggcgccaccctgacgctgggcgccgacgggatcctgtcgttcgggtgcctcgcgttcgcgcccagcggcagcgacggtggcatggccatcctcgggaacgtgcagcagcggtcgttcgaggtgcgcatcgacggcgagtccgtcgggttcaagcccggctcctgctgatccatccgctccctcgtcgattaactagcttctgattgcaaactagtagtagtacagggtatgcgtgtactcgtgtacgtacacgttcgagagtatatagatacatgcatagtacatgatagcacatacagacttaggccccgtttggtagggcttctcaaagtgcttctccaacagcttttggtgaagccctaccaaaggaccaatttcaaaacggcttcaccaccaaagccggggagaagccgcaaaacggcttacactagagaggagaagccgaaaaaagtggcttcaccggcttctcctctctctccaagcattaagtgatcataaaattacatatattgccattgagaagccgttttaacaaaagctttgcaaaacggcttcagcttcactaaaaaagccactccaccgaaaaagccgaagccgaagccgttttatgagaagctgaag

SEQ ID NO: 19873 - DNA, 846 bp, Setaria italica
  Peptide Sequence Number=SeqID_85847
caaaaaaaacaactccaattaactggcacagtttcatattattgaaaacatagggtttcctgttgctcttcaatctgtatgctctcgggaattgaataccaaaaactggtaagggtgggttggtcttttggagtcctcatggttccctgattttttagctctttgcagcccatgaattcgtggccctagattaaggcattgtctttcaaggcctcatataataaattgtttattttggcataacctggttggtttggcagcattttcccttttttttctcaagtggtgggccctgaaatagatgtggtgtatattggtggatggaatgggtttcctgaagctgaatgttgtggtggcagctagagggaaaaagtgaattagtaaacgaatttagggctcacttggtcagcttaggagccatgagaggcagcccagtaggaatgaggagatgaagataaattggcagggacaattccagtggtctaacggggatgatgtcttgtggaggtgaggttgaaagttttcgcctcccacagaatgtggttcgcttaagtcattatttgagattgtgttagccctgtattactgtgttttcataacttaaccgttcctggtactcgtaaatcatatcagaccaatcttgaaatgcatgtttgttaaatttgactggccttcctgtagaaaagttaaggttacgcagttaacaagattgtgctgtcaattttgtgtctcattatgcacatcagttgcatcgcaagctcatatttgcacttctcccctttaagtaaacttgctagtaggtctattacaggatttcaaatattactaactatatttggtacattg

SEQ ID NO: 19874 - DNA, 176 bp, Setaria italica
  Peptide Sequence Number=SeqID_85848
tgcatgagaattcttacgttgtccatttgacctactagttgcaggctgtgttatctggtacaccaaaagctctggaatcaagagaaagataaacaacctgtaccagataatacttctgactgttctgtgcatgagaattcttacgttgtccatttgacctactagttgcagctgtg

SEQ ID NO: 19875 - DNA, 1031 bp, Setaria italica
  Peptide Sequence Number=SeqID_85849
gccatctccaccacatacaagaactctgaagtgtgttaccttccgaaacaaagctaaccaacttctggaccttgtgcttgctcaactcaaaaacctgcacagggttaagaaggatctgcagacgctgtctcagtgaatcaccgctctgggcaccgcttctcttgttaatgaaaacgaggagtggcctagaatcagaaggcacgttgacaatttcatacttctgactgttctgtgcatgagaattcttacgttgtccatttgacctactagttgcagctgtgttatctggtacaggttgtttatctttctctgattcagagctttggtgtacctcattgagtttgccgtttgcctgatcatccctcctctttgctgcactatttgcttcctgtgaatctccttcagcatcagatggtagctcaatagccccagagctatctgaatcagcagatgcagtaccctttttgtacctttttctacgaatcataatcgtctctcggacagtggaagccaattcattagccccgcttgtgatagactaaaaattcctgcacctgtccagtgaagctccttaacacaaagaggtgacagtatcagccgcttcaatggtcccaagtcacagatatcgccagtttccttggctaagctggtgtggcaatcaacatgcacgagccgctgacaccacatacagtaccaaatcggataccccgcgaggaaagctccattgcaagattcgtcgcagtagcaacagaaagagtcctcctcagagtgatctgcggtgtcaatccactgcacagcccactggtgaaggacatggttcaaacccgccatagaaacacacttgcaatcctcgtgcgcattccccgagcagctcggatgcgcggcggcaccgcagatgtcacactgatggatggttcccccagagtactgacgtggcgaaactgacttcaggcacacgcagcacttcaggcctttgctgcgggggacgacttctttcctccagacgtgggacgcggcggggaccttgtcct

SEQ ID NO: 19876 - DNA, 1527 bp, Setaria italica
  misc_feature (1)..(10): n is a, c, g, or t
  Peptide Sequence Number=SeqID_85850
nnnnnnnnnntaaaaaacccaaagaaagaaataacaaacaattaagtttagaactttcaacaatcacaaaaatgaacgttcacgttatctagactcaccaagggcaacagagtactgagtactgagtgcgtaccatgctctggcagtgccctgaccaactatgctcatcccaatagggcatacaaaattttacacgaaattatacacagcacaatccaaatcaggcgtaaaatgccatgacttgtatgtacaaacgtccaggcatagttcactactagcctggaaggaaagcctctggcagctgaaaaacaagagaacatgctatagggtgagctacacaactacaagcggaccgttagtactgtcctacaagagcctagatgctatctcctggagcagagtcctcttctgcaaggctgaaatgatgccgctgttctcagcattttccaggatgtcggccatgacggaagcggcatgaccaagaggttcttcggaaactctcttcagcatgaaggcctggttatgatgagaaacttctatggtgcacggctcctgagaccaaggttctccatccacttggattggcattttaatactgatttcaatctttatatgatgaccttgagctaatcttttcgcacgagaaagccctacctgcagccttccgagatgcagcattcctgtgaagctaacaacttccagcttcttgtcatgcatggattgaggaaggtaagcgtcagagcaatcatcctcattcttccataggtcaacccctcccatgtagcttcggatattggcaacaaggataccttcagagtcctgaggaatatcaattttggatccatctatctcaagtttgacatcccaaggaaaataatcaaatgtgttatccatgatattctttgctccctctcttgcataaagcaccttgttcataaactggctataaaaccgctcagggttttcttccctcaaattgtggatatctaaggcaacctttgcatcgcaaccaaccccaaagtagttgttcataaattttggtggtgccataagctttccttggttgtccttaattgtgatcttccatctgtctagaacagtgactgctgcgtgctcaacatcttgcaaaactgagaatagacctcccctcttctcaataacaccaaggccaccaccccaacacagaaccctcgcaagatcattaccagtaccagctggaaggatggctacaggaggcggagcttcaaacttctgtttctcaatggcatctaaaacccaaccagcagtgccatctccaccacatacaagaactctgaagtgtgttaccttccgaaacaaagctaaaccaacttctggaccttggtgcttgctcaactcaaaaacctgcacagggttaagaaggatctgcagacgctgtctcagtgaatcaccgctctgggcaccgcttctcttgttaatgaaaacgaggaggggccttaataattatagtaggttgggtacttacttcttctgactgttctgtgcatg

SEQ ID NO: 19877 - DNA, 1082 bp, Setaria italica
  misc_feature (23)..(23): n is a, c, g, or t
  Peptide Sequence Number=SeqID_85851
ctcttcagttcacagtcttgacnggttctcgagctgcgccgagcaatggagtggcggctctggagaagaaggggacacagagcttttgccaagcctctgaagtctttcagttcttcagagcacaagcgatccaagagttattttgaggatatgtatgctgcagatgctttgcgctcttcagataaaaccatcgttctgcctaagccggaagttgtaaaagctaaggtgaaaagcgacatcaataaggatgtgcaacctggaggggagcacaaagcaccttgagaaaagagattctgcaactagaaaagcacctcaaggatcagcaggttgtgcgtggtgccctggaaaaagctttagggcccgacgctgctccagtcaacttgtcacctgagaatccaatgccaaaagctgctaatgaattgatacgagagattgccacattggagcttgaggtcaagaacatggagcagtatctcctgacgttgtatcggaaagcgtttgagcagcaagcacctacattttctcctcctgatcaccaggatgcttcaaagccgtcagtgagctcacggtctgggcagctccgggaaatgccgatggcaatgaagtcttgcaagagtagaggggatgcagcactccggtccagctatccgccaccacataagaagtggaatgatccattgacagattgctgcacatcggttcgtcctgatagagcagttgattcggatgtcctccgctgccagtctgcgttatcgtaccgtggagtttgttcgtccaggatattgccttcagaggatgatagtcttgcaagggctcttcgttcgtgccactcacaacctttttcattcctagaggaaggagagaccggtgcatcaggaatgataagcttagcagagtatctaggaactaatgtagctgaccacatccctgaaactccgaacaacctgtcagaagagatggtgagatgcatggcagggatctactgcagacttgcagatcctccgttggttcaccatggctcctcgtcttcgccaacatcgtcattctcctcagcaagtgcaatatctccacagtatgtggga

SEQ ID NO: 19878 - DNA, 460 bp, Setaria italica
  Peptide Sequence Number=SeqID_85852
ggggacaaccagaccaaccagtaggctttctttccgaagtttcctcccggggcccttacttaaatcattgaattcataggcataggggcgtcccaggcagtggttcattcaatgagaaagaaagacaggagggctggattcgtcgtgtcgggcgaattcattctgggaaaaaagggggaagggagtcacctgagctatgcgaagggaagggagtcgtgggctgagccggaggtcacttttcccgatccaccccgaaggtttttttccctctctcgccccatcatcgtacccagtcctgctatcggctcagctctatctattcatctctttttttttacatggatatttttttttctctcttgttcatagatcttgaaagcggatcaatagaaatttctcaaaggatctatctatagaaagatctagatctctatcatcatctatcttattcttcttatta

SEQ ID NO: 19879 - DNA, 251 bp, Setaria italica
  Peptide Sequence Number=SeqID_85853
caagaacacgtccaccgcatccaccgctcgccatggccgccgccgctgcgaccgctctcctcctgctaccaatcctggccgccgcaccttgggcggcatcggcggcgagcggcgagaagagcacgcacatgaagctctactggcacgacgtggtgagcgggccgagcccgacggcggtgccggtggcgcgcgcggctgtgaccaacaactccaagacggccttcggcgccgtggtggtgatcgacgacccg

SEQ ID NO: 19880 - DNA, 424 bp, Setaria italica
  Peptide Sequence Number=SeqID_85854
cgttgtcccccacgggcttaacgtcggcgtcgaagatgccgagcgtggagtcgtacttgagcaggtgagacgcctgcttgacgcctcccgtgtcgttgatggcgatgacctcgagcggcgagtcgtcgcgcccgtgccagcagcggaggaagttgcgcccgatgcggccgaacccgttgatcgccaccttcagcttcgcctccgtcggcgcccgcctaggcccgccactcgtgccgaccgcgtgggtcctgaaggagacggcgttcacgaagtcgtcggaggtggcattccgccgcagcggcagcgaggcggagctcctgagcccggagaactcggacaggccggcgctctggagcggcgcggtggtggcggagagcatgggcgacgccatggtggtggccacggaccagagcaggggcgggat

SEQ ID NO: 19881 - DNA, 3032 bp, Setaria italica
  Peptide Sequence Number=SeqID_85855
gacctacggactcaggatgctgctgcctggcttgaatactttgagtcgaaagtaattgagcaacaagaggctgcacggaatggaactcggaaacctgatgcatcaatagctagtaaaggacacttaagtgtgtctgatcttcttgactacataaatcctaaccaagagaacaaaggaagagattctgaatctggcaaacggagatactcaagcataaaggttttatcgcattcaaatgaaagttctaatggagcaagtcctgagatctctccaagagattcaactcccattatagatgtggaagagcaagttaaagagctgtcaaaagatgacagtactgaaattatttctgaagctgaggttaaacagagtcctaaatcgtttgagcaaccagcaccttctgagctaccaatagagatacacgaggttaatattaatgtacctaaggaagttcttcaagatgaaactgcagaacctgaagatggttggcagcctgttcaaagacctaaatcagctggaggacctggaaaacagataaagcattaccgtcccactgccagaaaggtgtatgaccctgatagtcatgatccaacatatacttcacaatacaaggcaaggaattcctattctaataaccggtattatttcttaaggaagagaactgtcgtacctacaacgtacacagatcctcagcagcatgtgaaagtccagacatcaggtgccaggtttggtcgcaagatttacaaggctgtgacctatcgggttaagccagggacagcatctacagaggtgcaagatacttctaagagtacagagcaggtgagtggtaaagcagaaacccaggtgacgtactcacaagcacatgatcctacctcaatagatcacaaagaaagtgagctacatggagctttagttgcaagtagcggaaatgctccatcatacaaagatgttgccttggcacgtcctggaacaattgtcaagactcaaatacagaaatctagagatgatgtaccacagaaccaaccatcacttggtcaaatcattgcacaagaaatgaaggattctttggttgattcacttcgagtggaacagagacctgtctcttcaaatgccaataatcccaaagaaatagcaaatgtaccagaacaaatccagcaatcagaagagacaaaattctctggaagagaaccagagattgagaatctaggcaaagatggttcacaaaatttgccgatatctgtaattggaagtgagcctggaagtagtaaagaagatgccaatgtgttcagtaacacaaggcaagaaccatcaagtagtggcaatgctgatgcagccattgagttttctgagtctactggatctgcaatagctgaacagagtgggaagtctgacgtggaattatttgaaggtctacccagcagtatagaacctgtatcagttacagcatctacaacgaacactgggagtcttgaaggtgttgcaagtgagaagtccaatcctaacttagtgctaagtaatattgatttaagagagatgcctaataagaagctatctgctgctgccccaccatttaacccatctccaccgggacttagcccccatgctggaaatgttggtatcccaccaccaggtgccattccaggagtagcgccttggcctgtgaatgtatcactgcatcctgggcattcaagtatggtgccaagtggtcctcctttgtgcacttcccctcatcatttgtatcctcctgctccccggtctcctaatctcatgcatcctatgccatttatttatccaccatatagtcaaccacaggtggttccaagcaccacatttcccatgaacactaatatttttcggcctaaccattatggatggcaaacttatatgagcccaggtccatcagaatttgtgccagtgtcagcatggtcaaacagccatacagttgaattcattaccccaacacatggtgttgaccccatttcgcagtctttagcagataagcatattcaatctgatgcagctgttgtcagtataggaccttcactggacagtagtgctgtagcggtcaaagaagaaatggagactcctgcagtggtaggaagtgacaatttcatcagcaacaaacatgatgatcaggataaacaattgaaggatgcaattagaattgagctgaatcctgacatgcaagcagataacagtcaagatattggtgtaacaaatcattcacgaagcaacatgaaaaacgaagatgaaggtagtttcaggatatatgtaaaggggaaaagccggcggaaacaaactctgaggatcccgataagtttgcttaacaagacatacgggtcacgttctttcaagtttgtctataacagagtagtaagagagaacgacatcttcaggccttccagtgtgtcctttgctgaagttgtttcatctggcaactaggcaaatcaaaattctgcctaagcatctaatattggaattattatccacgagaaagttttgatggatctacaattcaaatgtactgaaatgtgataaagttcttatttcgaaggcagaatgatgatcctagtgttccagatatgaaattccacaacccaaaactgtttagaaaggataaaatccattattttcatttgaaataaggtgtcgacaatcctgtgcagagtccagaagaattgttaagagttttgtgagatccagaactaatagaagatggaagtattaccaacaatatagactgtctagacaggctgatttttcttcaattttgatagattaagaaaaagagaatcctcttcgatttttttgagctaaattttgggccttgaaacttagtgcgtagattctaatttttgttgcctcgctgcatcccaataattgcctcagatttttctttttgagaaactagcgttattcttttttataaaacgataataatgcctattcagcaaagctgcttgtttattcagaacaagagccattttgatattattgatccgtatatttttagttcaaaaaaaaaaaaaaaa

SEQ ID NO: 19882 - DNA, 871 bp, Setaria italica
  Peptide Sequence Number=SeqID_85856
ctagcacttttctagttttggttgcttcaccaatatcttctcccattgatccccatgatgcaaatggattattgacggacacaagcctctgcgcctgcttcttttgttgcacagcgtaaaatccaaccagagttagccccacgatcaggagaacagatccggtcacaatgccaatcaacactgctcgagaggttttgtcatggaacgggtaaggatccgctttcacatagtaaggtccaaacttctccggtggcttgtaagtctgaagggtcaggttgaagcagtttaacacttgcgagtagttgaatttcttctggtttactgggcatgccttgattgccaccttaaggtacccaccttcattgaagtaaggtcttaagcctagccggttcggggtacagctactcagttgaccagataagttcttctccagctgaggaaggtactcgattacattggcgaaggaaggagctctgaagatgatagtttcaataaaaggatttgcacactggacatcaaagggaacaggctgaggtggggcttcagtttgcaggcccgtgcatggcgttgtgtctgacagaagagaatcattgcagagtgggtttccttcaagcttgaggttttcaacattgaagctgttgtacactgtaactgaggagattttgttgtttcgaatatcaaaaacatccagatgtgttcttatattgttgcccatgtcaagcgtgccattcagttcattattatttagtactagatgtcgcaattgaggaaaactgaaaagcttctgtggcagttgcccagaaagcccgactgactgcattgtaagggtcattatgctcttcaaatctgagaaccagcttggaacgttaga

SEQ ID NO: 19883 - DNA, 254 bp, Setaria italica
  Peptide Sequence Number=SeqID_85857
tggccaggctcggccccctcgctgccgcccgacttcgaggggaaggtcaaggtgaacgagtggctcagcaagctgcataaaatgggcgccgcggatgagctcaccgagcagcaggctaggcagctcaacttcgacctcgactcggcgtacagtgccttcttggctgcgctgcctgctggcatgtgactgggcaaggatctgcctgcttcattcctatttggttggttctttctattttgtacacttctgactga

SEQ ID NO: 19884 - DNA, 440 bp, Setaria italica
  Peptide Sequence Number=SeqID_85858
actacgtacccctacctactacccccctacccgtcgtcgccctcctagtccacacctcgtcctccccaaccctcctcgccttcggatctcgtcctgccggccgcggccggacgaggcgccgacccggtccgaccccaccgaccgcgcgcttgtccgcttacttatacagcccgcattgccgggattcgcttccatttgcccacccaatcgccgggctgcagctaaggagcttggactcggaggcggcgcttctccttggtttttttgctccaggggtcggtcgatctgaggccgcgttcccgggattggtctccagggcttgcttgccgtgatggcgattggagctcggtgacctggtgggcggggacgaggactcgaggctctcgggggccggaggaggtttcaagggcgctggttcctgagggaggggtgggggaggg

SEQ ID NO: 19885 - DNA, 421 bp, Setaria italica
  misc_feature (333)..(421): n is a, c, g, or t
  Peptide Sequence Number=SeqID_85859
aaagcacacaacctccggcggcagttttcctcctttgtttccatttttgcacataaaatcgacaaagtcgctaaattgccagttttccctcttaaattatgtcggataaaatgcggatactcttcagttttggagatatatgcctagagtttgagggagggttataaaggatcctgtaacttctgattgattcattctctagttctttctgtatgtaagacttatataagctttgtttaaccatagcccctgacgtttctgacagcgacaaggttgtagtactccacagccaccatgtgaagaaattgcttagacccaaaaaaaaaaaaaaannnnnnnnnnnnnnnnnnnnnnnnnnnnnnnnnnnnnnnnnnnnnnnnnnnnnnnnnnnnnnnnnnnnnnnnnnnnnnnnnnnnnnnnn

SEQ ID NO: 19886 - DNA, 216 bp, Setaria italica
  Peptide Sequence Number=SeqID_85860
tttgcaattgaatcagagatgaatcaccactgaagaagatcaacttctccactttattattcacaaatcagaaaatcaggttttgaatgcatagttcatgatcacgatcagattaacagtcaccatatatacacatgcatggacacagcgaacagagcaggcagtatacacacaacacctgcagatgggagagacaggacagcttacagccagagg

SEQ ID NO: 19887 - DNA, 830 bp, Setaria italica
  Peptide Sequence Number=SeqID_85861
aaaacaggacaaatgtgcacatgtgaaaatgccagctacttccctttttcagatagtgttgcgacagggaatctctaccaacaggaaattggataatacagcgaatcaaaagcttctcatgtctctatccatcgctccaagtatagaacttaaaactcatttacatccccgaaatttgaaacatgacagttagcattacaaacagcaagatattcactatgctcttcagtaacacccaacaaaatgcggttggcatgagatcaacaacactgcggttcaaatcaacctgaggcatctcttaagcgagcgatcagttcatcttttttgccttttggtgacagccccctctcttttagaagcgatcgtaacttttccacagtaaatgactgaagtgtcagctcagagaaaccagatgatgattcctcatgggcagaagatccagtagggctgccaatgttgggtctttttgatggattcttgccatctaaatttctggcagcattcctttttcccctgctgctttctcctggcatcttactactcatatctttggcttcacttttatgtttgctcaactggagagctctgattaaaatattgtttgtgtccgtctttacaacttgtccctctggaggagccgtgtcgtggaggcagatataaaccttgaggcctcccatgctagaagcgacgtcgctctccgtgaagttcccgcgggaggggagcccagcgagcaagctcgaggtccggccctcggctggcttcgccggcgacgagcccttgcggccgccgctgccgcggccatcggcgcccatgtttttgggagaaaaaag

SEQ ID NO: 19888 - DNA, 323 bp, Setaria italica
  Peptide Sequence Number=SeqID_85862
cgccctgccgccctgctccgaccttcgcgtccccctggcgacttcccctttgctccttgcccaccggctcagctcgcacgccgttccacgcgctccccctcctcctcggctagcgctactccgcctccgtaaccaccgtcgacccgcccccctagcggattggagcagagatccattaggaacctcgtcggttggggaagaagacccgccccgccggagatggcaacgggacctcctcgccgggctaggggagacgtaagtatcgagtccctggcgcggccggtagctgtcgaccaccgcatcagcatccagtactacttccg

SEQ ID NO: 19889 - DNA, 445 bp, Setaria italica
  Peptide Sequence Number=SeqID_85863
cggcggcaaacaatggtggcgtgcttgctgtagaacaggtcttggaggaaggacagctccacccctgtgacacggaaggccctctcgtagtcacggaggatgtagccgaagatgaggctgcggatcttctccttccctgccgcctcttcagctcgtgcattgggaggtcgtagaaccggcggcgcagcagcttgtacagcgcgaacgagaggcacaggtccttgtgatggttgccagggtctgccgtgccccccagcaacccgctctcgctggtgtcatcccacaccttctctacggtgacgagctgctccttgtgggctccatacggatccagtcggatcttgtagctgctctcacttcttgtcgggtcctcttggacttgcttgagcacccggtgctcgccatgcaccaggtacttgtacccgctcatggagaatttggattt

SEQ ID NO: 19890 - DNA, 402 bp, Setaria italica
  Peptide Sequence Number=SeqID_85864
atcctccggtgtgtgacccacttctcgccttggtggaccgtcaggccgttggccagcagcctctcaatccaaagaaaagacctttgcttcccgaactggccgtgcttgttcgccaggatctctcgcatcagcttaggatcgttcacgatcactctcggctcgggcccgaaccatgtcacggcaacattaccgtgctgcctggtgatgctgtgctcgaaggaaagagctcggggagcgatggcgtgcgacgccggcggcatgggctgggagcgcgccgccgcggcgagccggacgaactccttcatgtcgccggaggggaagctgtagtccgtgacaggtaagccctgcgcccgcagggcgaggcccagcctgttgcgggcggtagtcctagtaaccgtccct

SEQ ID NO: 19891 - DNA, 835 bp, Setaria italica
  Peptide Sequence Number=SeqID_85865
cactagctcgcatggaaacgtacctatacgtgcacgatcaagacgcatcacgccgctgcccggagttacatgatggagcaggcgccgtagggcgggctgtcatcacagacgaccatcgggtacgggtacggcatgggcggcggcatgtacggcgggtagccactgcagtagcacgacggccacgtcgggcaccggcacgccggcggttgtggcggctcaggtggaggcggtgctggtgcgggggtggtcggtggcggcttggattggcactcacagtgcggggtggggcagttgcagggccatgggtatgggtacggatacggatatgggtatatcaccttgcatggggctggctctggctcgggcttgggcttttgctcgggcttgggtttgggagttttgggtttctcttctggcggcggcggcttgggttggcatccacagtgcggcgtggggcagctgcacggccaccctggttgcgggcatggatatgggcacggatacgggcatatcaccttgcatggcggcggcttgggctttggtggttcagtttttggtggcggcggcggcggcggcttggcgacctcgatgttcttgatgatctttccagccttgcagcagagcttgcaggagagcttgtcggcgtcgaatggccccgacacgaggaccttgtccttctcgtacacgatcttctcgatgacgaactccccgcgctcttggatgcagcagagaaccttctggatcttgctgctacagcggcagcagtccaggtccacggtgatgatgagcgtcggcatctctttgcctgaaggaacgcaggtgacttgcaattcct

SEQ ID NO: 19892 - DNA, 889 bp, Setaria italica
  Peptide Sequence Number=SeqID_85866
aaaagaagaacacaagtttacagttgatcggctctggaatcaaaatgctttccaatttcttcctgtctgtcaaccaagttggtatattgtgtcccaatcacaaattaccctaggctccagctattgcttctgtaagcagccatttcaataaaatgtgctattccaaatgaagttacttcttgagcaatctcaagacatcaccaacaaggtgcagggagccggtaaccaagacctgaaattgcgtcgatgggttctgtttagcagtttcccttagccactgaattgccagtgggagagattcaaaaactgagctagtcttgctagtgttcacaccatttagacctttattgctatgaggcaggctttcccacaccctttgaagtgacaactgccatgacaaatcagtttgttcacgctctgaaggtggtgatgcaagggaaccaagcttgttgtactgtgattggtttggcacaaacaaggcctgctcaaagtggagaccgttttgagcacatgtatctagaagatgtggaagcaatctctgaggatctcttacagtcatgcaattgaaaaggagaatcttcttagaattcctgtcagcatgaggctgcttcaaagaaactggctgcattctatcataatttgtaacgtgggcaaaccaccttgcacacatttccatgctttctgggctatgcgccccatccaaatagaaaaccagtgaagaattaccatccttgtcgttttcagagttcacttgtggatctggaacaatctgtgctcggccttgcagacaagcacttgacagccctttgatgaactgatctggcaaggcatcagaatgtctggcatgcattctatccaaatgaccttgcttctcaagccacgtattcgc

SEQ ID NO: 19893 - DNA, 390 bp, Setaria italica
  Peptide Sequence Number=SeqID_85867
gtgggttgcaattgcctctccggagatacgagatataccaaagttccggtgctttccatctgccttgttgatgagcttgaagcccttcaaaggaagctggtttatgagaagagtctccagctggcaggcaacgctcttgccaggaaccacgatgtacagtatcgtggcatcctgcataccttccttcgatctgtgagcacgaagacgccccacaagatcatctgtctgtccaacataaagcttgttgtcacttctgataatcacatagatgcaagacctgccaacagttgaaggtggtggttgctctctggcgccataagcaacacagaacacatcaaccaattctgggatgcttacttttgttgtagagatccaactaatttcttcttg

SEQ ID NO: 19894 - DNA, 1655 bp, Setaria italica
  Peptide Sequence Number=SeqID_85868
tttttttttttttcttctctgaaataaaagacaggagctgtgcacattcatttaaaaatgagtaagattgtatgactttgtcccccctctttattctgaaatacaagattacacagataaccactggtcggtttgcgatatcgcatcataatacaaacttaaatggatagggaaaaaagaatgggcaggaaaggaacggcttcactcagatgtcacatccgcttccacttccctgcagttgctaatgcttgttcaagtgatatactccgaactcattggcgccatactagctatattacgctgcagaggcaaaaaagagatgcgaatcgcacgaggggagctctcggttgaagggaagagggaggaaaagaaaaaggttacactaagaactcgatctctcgagctcctagaactatgcagcttcagcatactgggagtgtgaggctgcaagaagcgcagctccgattcctgagccatcgttggccaacttgacaacaaccgacgaggcagcctcctcaccgagcagatctgtaagtgtcgcttccaggcaggcactgaacttcttgtaatgctcatataagccaccatccatagcgaccacagtcctttgttggctaaagtcatttggcaatttgtccttgcctagcttcttcagaatgccatatataccagcagcagccaagcgtgcacctcgctccgcgacaaggtcacatacatgaagagtaatgtatcttgcttcgagggaagtatcaggaacccccagaatatccttgagcttggctcccaggtgtttgagatcatgtgaggtgtcatgatgcatggctgacatatccggcgttctcagtacaaaaagttgttccaattttggcggaacaacatccccaaacaacgatgcgtcatgagccagtttcagcaggatcctccgcacaatttctccaagatacattccagaaatcatcttttcatatatctgctcgccagggttcaagctctcaaagtccaaggctttgtcatactctgaacttggaagcttatctgacctgaagtttccccattccatgttgattaccatatttcctgatctaggtagtagcccgttccatttaggaatcgcatttgcatgttccacataagctgcatttgtgccagtgcccaatattacagcagcagcaacatcattatcaacgtatctcccgccagccaatgtgcctacagtatcattaaccagggctgtaactttcatatcaagaccctgcctctccatagccctactcaattcagccacgacatcttctccaaccgtgccgttgatggaaaagcccttggtccacttaattagagtgcccgatgatattgatgtttggtgcacggggaaagaaaaggtgaaacccagttctctctgcttgccatctggtaggtggaaatcctctccttcagtccgcacaaatttttccaactcagcagcaatgaaatcgaatagctccgtggaagttccaaccatcagatgaggcggaatggagacctcctcgtattgttgcttcacaacacgcttctcccttcctccaagttgaacccgtatgacacgaaagttggtcccgccaagatccagtgcataaaacagtccatgctcatccccggtggccggtaaggaaacg

SEQ ID NO: 19895 - DNA, 295 bp, Setaria italica
  Peptide Sequence Number=SeqID_85869
cactccacacggcactctacctgcctccctgccgccacgaaaaaaaacccaaccgcccgcttccgtcgtacgggcactcgcctgcgccgcgcggaggagagcgacgaagatggccgccccgccggcggtcgacgtcatccttcacaacgcgaccgtcgtcaccgtggacggcgcgctccgcgtcctccgtgacggcgccgtcgcggtcgccggcgaccgcatcgccgccgtgggcccctccgccgacgtcctcgccgccttccccggcgccgcgtagaccctcgacctcggacgg

SEQ ID NO: 19896 - DNA, 794 bp, Setaria italica
  misc_feature (25)..(25): n is a, c, g, or t
  Peptide Sequence Number=SeqID_85870
atttttggctttattggtcatgaanaggttgacttaggaatgttaatggcaagccagtggatggtaccttgcttagcggccacagcttgccttatgttgtaccttagttatagagtgcaacaaaaacgccgccgacgaagaaaagggtcggtggctagtcggctaacaagtatggtataatgtgacaatcttgagaggatggataggggttttagcagctacgtttcaggcctccagtcatgatgggtagaaaagaagcgctccatctgcgcaacatgacaaagtatttcagcagctggaagttcctgatactgttttcagcttgctcatggggtccatcaagacacattttgactcagcagcaagaggctcagctaactttcgagcttaagagagctgattggtcagttgtgcaaccacatggaaagctcattatctgtcaggattcaggcatttgtgacatcaacatgtagttgcttgtagtcatccacaattttgttctttgtgacacaagctatagccacaaaaatctctgagagctaattctttaggtgagaagctacagctaactctttcccatcaccttgggatgtggcgaaggtgaatttgagcttctcagtaggtccataagcccctaggggcaaaagtagcatgagctggcacagatacaaacgaggcttaggcttattgacaagtctgtaaagaaaattttgtatcgttcttaaaaaagaagcaaatctgtttgaaagaacattgtcttggcacaatgtaactagcaaaaaaaaaaaaactaa

SEQ ID NO: 19897 - DNA, 425 bp, Setaria italica
  Peptide Sequence Number=SeqID_85871
gggcaggagagaggagtccacgtgagtgagcgagaggggaggagagagagagagatctcccccctccgcctccctcgccgtctccggcgcccgcccaattcgccatggatccccgcgcggaggtgcaataattgatcctgctaaatgtcgactgatgagtgtggatgaaaagcgagagctcgttcgtgagttatcaaggagcccagaaagtgcccctgacaagctccaggcatggagccggcgggaaatagtagaaattctttgttctgatcttggaagggagaggaaatacactggtttatccaagcagcggatgctagattatctcttcagggtggtgactggaaaatcgtctggaccagtggagcatgtgcaagagaaagagaaagagtcaattccagagcccaacacaattaaccatcagt

SEQ ID NO: 19898 - DNA, 2926 bp, Setaria italica
  Peptide Sequence Number=SeqID_85872
aacaaataagaactaagaacaatttagtttacaagttaatagaatagaacaaacaataggaataaaaccagtgtatttcctctcccttccaagatcagactagattatctcttcagggtggtgactggaaaatcgtctggaccagtggagcatgtgcaagagaaagagaaagagtcaattccagagcccaacacaattaaccatcagtcccctgcgaaacgaccaagaaagagtgacaatccatcacgactaccaattattgcaaacaactctggggcatctgatgtaactgctccaactaataatcagcgctattgccaaaatgtagcttgcagggctattcttagggacaagttttgcagacgatgttcatgctgcatttgtttcagttatgatgacaacaaggacccaagcctctggttattctgcggttcagaccaaccctcgcaaaaggattcctgtggtttctcatgccatcttgaatgtgctctcaaggatgaaagaacaggcattctgcagagtgggcaatgcaagaaactcgatggtggttattattgcactcgctgttggaaacagaatgatttgctcgggtcctggaagaaacaactggtgatagcaaaagatgctcggcggttggatgtattgtgtcatcggatttttctcagtcataagatcctcatctccactgaaaagtacttggtattacacgagattgttgacacagcattgaagaaactggaggccgaggtcggtcctttatctggagctccaaacatgggtcgtggaattgtcagccgacttactgttggtcctgaagttcagaagctttgtgctcaagcaatagatgctatggagtcaatgttctctgatgcagctcctgctaactcaagaattcagcgacctagtatggtaccaccaaacttcataaagtttgaagctataacccaaacatctgtcacaatatttttggatttggatcaatgtcctatgcttgcccaggaggcaacttccttcaatctatggcaccgagtggctgttactgaatcctacctgtctaatccgagtggcataatacttgcaccatcgaaaaagttacctgtcactgagcttgcaccggctacaagctatatctttaaggttgttgctttcaagaattcaattgagttggggtcatgggaagttagaatgaagacatgctgtcagaaggaacatccaaggggttcagtgccaggtggtgctggactagaacaaaataatgggagcctgaagacaaacagtgatggtcagtctgatccttcctcagagggtgtggactcaaacaataatactgctgtatatgctgatctaaacaaatcccctgaaagtgactttgaatattgtgaaaatcctgagatccttgattcagataaagcatctcatcaccccagtgaacaaatgaataacttgcaaaatatacagatggctgcagctagggcaactgaagtcactgagctggaagaagctcctgggctctcagcttctgccttggatgaggaacccaatccttgtgttcaaacagggctgctcagagagtcctcaaattcagtagagcacaatcaaagaaccattcctagatcacaggacacatcaaatgcaccagatggaaatgagttggtgattattgcacctagatactcttgctctgtgccgcccactgcaccaaaagctatggagaatggcaatgagaatggtggaaggagcttcaaacccaaaccttgtgataaaattgttcagaatggctattcaaagcctgagagggaacctggcaattcgtcaaataaaagaacatcaggtaaattggatgacattggccacaaggattgttgctcggaagcatcttatgaatactgtgtaagggtggttaggtggctggagtgcgagggctatattgagacaaacttcagggtgaagtttctgacatggtttagcttgcgcgccaccccacatgagaggaagattgttagtgtctacgtggatactcttattgaggaccctgtccacctttctggccagcttgtggacagcttctcagagacaatatacagcaaaaagcggtcttccatgccttcaggtttctgcatggatctgtggcattaaggaactgggagctcttaacatttgctttgtagggagcgtatttggtcccattcttttgtagcagatcgttgcattgattcttcattgggaatttcattgaagtagttgacttgtacaatcttcattgaaacttcctagttccttcgatgacagtaggtttattttatcgggcaacttcttttctttttccgttttttacttttgcctccataggttacagtgctatcatctgtactgcccatgttattcttagagcatcatgggctgcgtcatgaattttgtggcgtgtagctgctcgaagaaggatgattgtcaggctggatcaggaatgcacctgtctctgggatgaagcaggcttcgtatgggtgtcgacgaatccgagctaaccatgtcttgtcagtagtagaatgattgcgctgtatcatggggaaatcgcagtatgttgctgactcttgtgggaatgggaggaatgatgcttaagatgcagaacgtctgcctaaatgttatgtttgactcatgcttctctatctcctgctgcatttgttggtttattgctgatgtgctatcgtagcgctcccattcctccctttcatgttgttacacctgtttgaaccccttgcagcatgtcctggtactgtcagcagccaatgtggcttgcctcgcatgactgcaatctggaattgcagtgttggaaggcggcggctcttgcgttgctaggcatcggctaagaacccggctgccccggcctggtaagggaacccttgtttttcatcagctttagttaaaggtt

SEQ ID NO: 19899 - DNA, 510 bp, Setaria italica
  misc_feature (470)..(510): n is a, c, g, or t
  Peptide Sequence Number=SeqID_85873
cacgagagcgggctctccaaagaagagcagatccaaccagtgagcagtacgaagtgaggtccatcacagagagggaatatcgtacactttctgatgccttgcaatcagaaaactcgtcaactagtgaacttgcatacgtggagtgaaaggagaggccattggcatctagatactagattcctatatttattacgggaactggctgcagttagctaaagttgggattcagaagcattagcttaaacctacagtttttaggtttgttgagtataggttaatagcctcaaaagtaagactaacatgttgacagtgtcaaattttgtatggtgacaatgtaaatgtgactgatgccaggaattttgcctagaatgacatctttgttcattctttctgttagatcgccgccatatggaagtcactaataactgtggaatggagctcctttgaattctttaaaaaaaaaaaaaaannnnnnnnnnnnnnnnnnnnnnnnnnnnnnnnnnnnnnnnn

SEQ ID NO: 19900 - DNA, 890 bp, Setaria italica
  Peptide Sequence Number=SeqID_85874
catggtgcaagggcagcaacctacccaccaacatgtccgcattgttctatcgagcatgggacaataatacccgttagccgtgttacctcttcttgttctaattctcaagaacgagcatgatacaagtgtgtcacctcttctggtttttaatgctcaaggactagcatagagatcaaatcacctgatggactcctacttgttaaagagtttcagagaaaaacagaacgtgaaaatggctcagcgcaaccaggcaggacattcttcatagacagggagaagcagctgtagaaatgcatttgtaccataaacatctacattggcgatgagaagctgaaccggatcccagtctttccacgatcgtgctcaaattgcttcaagatataacagtagtttatctccacccggaaaagcttagtgggtatgataatgccaacaccagctgagctcctaaatgtgcgcctgaactcagcaaatgagaaatttctgtactcactctcggataacttggcgagattcccagcagttaggaatgcatggccatgtataccagcatcccggaataactttaagggcaagtcaaatgatagatcagcaaatgcagagactgcaaaatcgcctcccaaataatcccgtcctggagaggctgcagaatcatccatagcagattcacttggaacaaatctccgtagttctgtagggccaattcctcttgttttgaaacccaatagagaatttaaaccaccaaggctgcatactggagaagaattccctcccaggaaaaatctatcaggtacagatgaaggtgatccccaaaaccccctgcccaatggtaaaaccacccctgctgatatgccagcattcagcgcagcattgtaaaagctgaatggaac

SEQ ID NO: 19901 - DNA, 281 bp, Setaria italica
  Peptide Sequence Number=SeqID_85875
gtttgtttggtcttctctctgaagaactatgctgtagggcacttggtttgattttgaacatgtttagttcatggttatcagggattggcggaaatcctcatcttgtaaggacacaatttggcatctatttttcttttatggattcatagaacgtaaccactgcattgtatggtaccttcggtctgaccactgcatcctactgtaggattcctacagtacccttcaactgttcaacagctactgagctgggctccccagatccaaccatcgttttcctcaag

SEQ ID NO: 19902 - DNA, 1048 bp, Setaria italica
  Peptide Sequence Number=SeqID_85876
agacttcatctgtgcaattagtctatatttaatatttctaattaatatcaaacatctgacatgataggtgctaaactttagcgggtatccgaacggggccttatgctagtaccatacaacagagcggcatccgggccggatatattccctcccgccccccgtcgtcgcggagcaggactcaacagagcggtcacgtcacatcatcgtcgtcgacttcgccgagccgagctcgctcgcagggagaaaagtcgaagagaacgccgcgggagaaaacaagtccagcgcacgccatgcgacccgcgcttgctcgcttattatagcaagcaagtagcaagggccaagggagcagccagagtccacaggcaggctccctcgatccgccgtcgtcttcaccgcttgagcaccccactttctgcccaacctcctgctcctcctcatctcgagatcaccaccgctactgggtcgaggaggaggggagatggcgagcgccgctggaggtgggccggcgggtgaaggggagtggctcaaggtcgccgagctcagggccatggtccaggcgcaggacccccacgccaagcaggaggtggacaacctgacgctgcggaggttccttcgcgcgcgcgaccacaacgtcgacaaggcctcggccatgttcctcaagttcctccagtggcggagggaggcggcgcccggcggcttcgtgccggaggagcaggtgcggagggagctcgcgcaggataaggcctggatgggcggcgtcgacagggccggccgccccatcctcgtcggcttcctggcaaggcactactccgccgaacgcgacatggcagagtacaagagtatgcgatctcatctggagttggcttggaaatgcagcgcattcgattcgattgaaaccattgactgtagagtcacgcttgttgttgttcttcttctccgcctgcaggttttgttgtctacttcttcgacaagatctgtgccaggatccccagaggtcaggagaagttcctggccatcatcgatcttaagggctgggggttctttggtt

SEQ ID NO: 19903 - DNA, 670 bp, Setaria italica
  misc_feature (611)..(670): n is a, c, g, or t
  Peptide Sequence Number=SeqID_85877
tcagggcgtacattgcttccatagagattatgcagaactactacccggagcggctcggcaaggcgctgatgatcaatgtgccctacatcttcatgaaggtgtggaagacgatgatctacccgttcatcgacaccaacaccagggacaagttcgttttcgtggaggacaaggaccagcacgagacgctgcgcaaggagatcgacgagagccagctcccggagttccttggcgggaagatgcctctggtctccctcaaggactatgtccagcagcctgaatccgtttaggcgcacacgtcggtaataatctccattagcggtttggtgcgcaaaggatgaacctctctctgggtacagaagggaggaagatggcctctaactactagccctgcaactgcaatgcaacaatggcgtacctgtaaagtgcggctctgactgctagcgttgtgtacagctgctccaatcagcgttgaccgaggtcagtgatcagcataactgcagctgacattgtctgtaccctatggctgggcgcctgggctataagaaaatgaaatgaaactatcagggggtgttttgggaggagggggacttaaatttttagctcccgtaacnnnnnnnnnnnnnnnnnnnnnnnnnnnnnnnnnnnnnnnnnnnnnnnnnnnnnnnnnnnn

SEQ ID NO: 19904 - DNA, 1332 bp, Setaria italica
  Peptide Sequence Number=SeqID_85878
cagccaatgtcgccatccaatgtctcgggcgccaggaaaaacgcgcgcaagagaacaaagccgcggctccagcctccagccctcccttcctccctccctcccaggtgagcgagtcgagtcgtcggtcgctccagccccatcgtcctcgtccacacaagctgctgctagcagcccgcttcattagcttccccgtccgccctcgagtactcgtatgcggcggcgccacgccactggctctcgctgctgctagatcgaggaggagggaggagggaggagggaggagatcgacatggcgagcgcgggaggtggggctgcgggggaaggggagtggctcaaggtcgccgagctcagggccgtggtccaggcgcaggacccccgcgccaaggaggtggacaacctgacgctgcggaggttcctgcgcgcgcgcgaccacagcgtggacaaggccgccgccatgttcatcaagttcctcaagtggcgtagggaggcggtgcccgacggcttcgtgccggaggagcgggtgcggagggagctcgcgcaggataaggcctggatgggcggcgtcgacagggccggccgccccatcctcgtcggcttcctggcaaggcactactccgccgaacgcgacatggcagagtacaagagttttgttgtctacttcttcgacaagatctgtgccaggatccccagaggtcaggagaagttcctggccatcatcgatcttaagggctgggggtacgcgaactgcgacgtcagggcgtacattgcttccatagagattatgcagaactactacccggagcggctcggcaaggcgctgatgatcaatgtgccctacatcttcatgaaggtgtggaagacgatgatctacccgttcatcgacaccaacaccagggacaagttcgttttcgtggaggacaaggaccagcacgagacgctgcgcaaggagatcgacgagagccagctcccggagttccttggcgggaagatgcctctggtctccctcaaggactatgtccagcatcctcaggccgtttaaccacattgtgagtcatatttagaggctaggagcacagtacgatccgtgattacaacaaagatgcatctattggtcccgaaatagtggcgtaacatcttcgcaggaaaaaagaagaagaaaaaataaatggtgtaagtgtacctgtaaaatgcagctttgtccgcttgcagcgggcggggtcaattgaccagcgactgcaaaccaaatccctgaatatgttatgtgcacgtgcatatgaaaactatgaacaggaaggcaccctgaagacaaacacgatcattccttctcgcaaa

SEQ ID NO: 19905 - DNA, 420 bp, Setaria italica
  Peptide Sequence Number=SeqID_85879
gggagctactaactgtcccagacctgagtaatctaagacagtcaacctacaagtatttcagaaaatcaggataaagtaggaaatgtgctgaaaccttgaacggatgaatgggcaatgtatttttagtttgaatgcacctgcttttggatctgctgctgtttcgcccttttatcctgcatcaacttctggtggctcttgtaggaggtaaagtcacatcaaggatggaggtcttactgacatgctccttgaataacttgaacatctgaaggccttgttcaaggtgtatctctagtgtgtcatgggtaccgtgacaggcttgttctcatgattccctaggatggtgtgcttgagaatattgttagggacgttcctggacaatgcgccacttaacagaggagacattccacttgtcctgttgcc

SEQ ID NO: 19906 - DNA, 722 bp, Setaria italica
  misc_feature (14)..(14): n is a, c, g, or t
  Peptide Sequence Number=SeqID_85880
cactggttgtgacngaaatggagctctactgtcccagacctgagtaatctaagacagtcaacctgcttttggatctgctgctgtttcgcccttttatcctgcatcaacttctggtggctcttgtaggaggtaaagtcacatcaaggatggaggtcttactgacatgctccttgaataacttgaacatctgaaggccttgttcaaggtgtatctctagtgtgtcatgggtaccgtgacaggcttgttctcatgattccctaggatggtgtgcttgagaatattgttagggacgtcctggacaatgcgccacttaacagaggagacattccacttgtcctgttgccagtactcaagggttttctcaaaatcaacaggccacttgtattcacctgatgtttcatcatgaagggcataccaggcaaaggaaactaacttaacatccaccacgaaatacaaagtcctgaaaagatccttaccaaggaaacaagaatatagggcatgcagaactctttgactgagcttcttgataagcagcatcaagcttcttgcttccattggtggtgcttgcccacacattccagttgtgtcactaagtactaaaaactagctaagtaaaataaacaatagcccatcaattctaagaatgtggtgttttcgacttcccagtctcaaagaggcaacatggtcattttttttatatataaacaccaaaccaaaatagt

SEQ ID NO: 19907 - DNA, 451 bp, Setaria italica
  Peptide Sequence Number=SeqID_85881
ctttgaatcctgttcctgtccacctcaccgtcctcgcattccaccgcacgccctcgcggatcccgccgccccttcgtcgccggtgttcttgcctgcctgcgtcctcggtcccggaagcggctgccgggtcttgtggcgggagtcgagccagccgcctccggtgggtgggtttgccggatgattatcacctcctgatccatccggaccccggatccgccgcaaaggcggcacctttgtggggtttccgcgccatgcgggagggtttggcgcgtcggcggtgaggcggggcgagcctctggtttagttcttgccttggattagtccggagatgcttcgaggaacggggcacggtggcggcgatgcacggaggcgggcactggagcaccgccgctcggcgcggcggcggctgccggggtggatctggtggctcctcgggatcttcctcctcgtc

SEQ ID NO: 19908 - DNA, 2130 bp, Setaria italica
  misc_feature (2073)..(2073): n is a, c, g, or t
  misc_feature (2118)..(2118): n is a, c, g, or t
  Peptide Sequence Number=SeqID_85882
taccggtaagtaattagtacttttacgtaaggtaaacgggggtctaacggttggcggtcgattgcacggaggcgggcactggagcaccgccgctcggcgcggcggcggctgccggggtggatctggtggctcctcgggatcttcctcctcgtcgggctcatgctcttcgtcctgcaccacaaccagaaggagcagttccggccgcccgtcgtggataatggttcggaaatcgaggaagtccctcatgagaaggtgaatttcacagaagagcttttgagcagcacatcatttgctcgccaattagcggatcagatgactttagcaaaggcatacgtcatccttgcaaaagagcatggcaatcttcagcttgcatgggagcttagttcgcagataaggaattgtcaaagattgctatctgaaggggcagttagtgggagagcaattactcaagaggaagcccatcctataataagccggctagcacggttaatatacaaggcacaggatgctcactatgatatcagcacaacaatagtgacattgaagagccatgcccttgcactagaggagcgtgcaaaggcagcaattgttcagagtgctgagtttggtcagttagcagcagaatcttttcccaaaagtctgcactgcttaaccgtgaaactgacagaagagtggcttcggaacccgaagtataggagtcgctcagaggagcagcggaattccacaagattggtggacaataatctgtatcatttctgtatattctctgataatgtgctggccacttcagttgttgtcaactctacagtctccaatgcaaatcaccctcaacagcttgtgttccatgtggttaccgacaggatccactttggtgcaatgtctacttggttcctcataaatgacttcaaaggttgcactgttgaagtccgctgcatagatgagttctcatggttgaatgcttcttcatctcctctggtcaggcagctatctgaggtggaaactcagggttactactactcagctggttcaaaaaatcctgaaagagaaataaaattccgtaatccaaagtttgtttctctgctgaaccatttacggttctaccttcctcagatactccccaacttggagaaagtggtgtttcttgatgatgatgttgtggtgcagaaagacctgacacagctgttctccatagagttgcatggtaatgtcattggagcagtggaaacttgtttagagtcatttcatcggtatcacaagtatctcaatttttcgcacccaactatcagctccaagattgatccacatacttgtggatgggcttttggaatgaacatctttgacttgatagcttggaggaaggcaaatgccacatcactttaccattattggcaagagcaaaattctgacctattgctctggaggactggaacgcttcctgcaggccttttgacattttatggtctgatggagcccctagaccgcagatggcatgtcttgggtctggggtatgacgtagacatagatgttcggttgattgagagtgctgctgttgtgcactataatggaaacatgaaaccctggctgaagttggctattcgccgttacaagtatatatgggagcggtatgtgaatttctcgcacccgtatgttagagagtgtatgttacattagaaagtctgcaaatctctgtatgttcttgcatgccattgaagctgtatgcttcagtttcttcacatgaggcttgcttttgagcaccttatgtgagggatgtttcagagaggtagaatatatactcaagggacaacatcaaagaagtcaactgttaaagttttctttttgggttgggggaagattcattttgagaagatgaaaataattcctttgcagatttttacatacaatttggactggaagttttagcagtctaaccagatacatctggatagatattgtaaaagagatacagttgttggatcaatgggccaattttttgagatgttaggaaatgccaattgccagttcagctgtgcagggtcactggtgctgcattcttttcatagtatcttgttttanactggtgaagaaggttctttcctctgtataaatagctgtttttanactcatttagac

SEQ ID NO: 19909 - DNA, 1619 bp, Setaria italica
  Peptide Sequence Number=SeqID_85883
ctaaggctactgggaagcccacaacaagacaaacgaacgagcgagcggagcgctacacgcccgacgccatcaagcgccgcgtcgacgagttcgagcgcaagtgcaagcgacacggggagctcctgcgatcattcgcggaggccgagaccctcgacgaggctcacaaatggatgaccaaaatcgacaagttcgaggagcgccacctcaagctgccactcgagtacagggtcatcggcgacatgatgaaccgcctcaaggacgccaccggcaaagagcgcttcgttctcctccagaagctcaacagagcggttaggatcatggagtgcaaggaggccttcgaccccagtaaccctgcaaactttgggctcattcagcaccagcaggttggctctccagaggatctggtgctcaatgcaggctttgacaaggagaagcagatgatccagggggagcaacttgaggatgacgacgacgaggaattcaatgaagcaaaggagagggatgacatgctcatagagaaactcaatgctatcgagaagaagattgaggacaagttggcagagttggatcacaccttcggtaagaaaggcagagttttggaggaggaaatcaaggatttggtggaggagcgcaattccctctccgagaaaaagaggaggcctatgtacagaaaaggttttgacatcaaagttatcgatgttaacaggacatgcaaggtcacaaagggaggccaaatagcaaaattcacagcattattggccactggaaactaccatggtgttgtaggcttcgcaaaagctaaagggccaacagccaagattgcaatacagagggcatatgagaaatgcttccagaatctccactacatggagcgatatgaggatcacacaattgctcatgctatccaggccaaatatgagaaaacaaagatatacctctggcccggaccaatgaggagtggaatgtctgctgctggtaggactgttgaaactgtgctgtacttggctggtttcagcaatgtcaagtcaaagattattggatcaaggaacccacttaatgtgattaaagctctcttcatagctttgaatgctattgagactccaaaggatgtccagcagaagtttgggcggactgtggttgagtcttacttattgtaaccttgttatttgtttggaggaggtgaggccaagcagagccgcctctgtaggctttggcgtgggaagaccaaggaggcaatgccaggtccggccatgagagacctcctttatttgttttggcgattctgtgagcaagcagtaaggcccagcacacgtgtgatgggagggagggagcttgttgattgaagtggtaaaagatcagtggcaacagtaagcagataaacagacggtatttccctggtcctatctgtgtttagaactgaatgaagttggggacacatttgagggttgttgtataaatgaagatcaaaattgcctcctgccgtcgtcttgtttttgttagcatatagtttgttgtcactgcatactgctgcgggtggatgacaaatcagtcaattgaagactaatttcaaattttagtgtaggataataagtcatctttctcaaataaaaaaaaaaaaa

SEQ ID NO: 19910 - DNA, 806 bp, Setaria italica
  Peptide Sequence Number=SeqID_85884
ttagttttagtttagtttagtttcgtttcttttggggtgtcgtcttggggtgcggcggctcgagctcctgccccaggaggcgcgaagccggcttttggaagtagagcagcggcgaggcgcccggcgggtcggcggcgtaccggctcgtgatccgggacgaccggcaccggagctggcacgtgtccatctccacgatccgcgggctgcgatcgaacccattgtccccgccgtcggacagccggcggcggtgcaccaccggcttcacgcgcgcaccaccaatccgctcttgttcaacagatttccgggacgacgccgtcctggcctggagcctcatgagcgcctgcagcctgcgcagcgtcgtggcggcctgcttcctcacgaggtagccacgcaccagagcttgcagcttcacgagcgacttgagagcacgcagcgccttcctcgccaagtaccctctgaaggccttctggatcacgacggcggcctccacctcgcgctccaggccgcagttgcacggccgcacctgcgacagctccccggcggcgacggcggtcaccgagggcctccgtccgccgtctgccatgctgtgcctcggcttcgcgaagctccaccgcctcttctccaccggcggcggcccgagcccgaggccgccgctggcgcacgcggcattactgtgctccttgcggcccctctccccttccttcttggtgccggtgagcaccttcttgagccacctcatcgcgcgccccatggcgtgcgtcgtggtcctcctagcagaagaagagggaagtagcctttacagaggt

SEQ ID NO: 19911 - DNA, 738 bp, Setaria italica
  Peptide Sequence Number=SeqID_85885
gacgacctcggtcatgacgggcggtcgcagcccacgagcccacgcagtcggcggcgaggtagccgacgtaggccagcgcctcggcctcctcgggcgtgggcgccggcagccgcgggtcgagcacccgcgcgacttcgtcggcgaggatgtgcggcacagcgaactggacgacgttcttgggcgtcacgctctcggcgtagcgctgcacgacgcggcacccggacatgagctccaggagcacgacgccgaagctgtacacgtcgctcttgtccgtcaggtgctgcagccggtagtactccgggtccatgtaccccacggtgccgccggtgtagagcggctcgccgccgccgccggcgtcgtcacaggctccggcggtggggtccaggacggaggacaggccgaagtcggcgatcttggccgtccacgcgtcgtcgagcaggatgttggcggacttgacgtcgcggtggatgatgggcggcacggcgtagacgtgcatgtactcgatgccccgcgccgcgtcgagcgcgatggcgaggcggccgcgccacgacgacacggcgggcgccatagggacgcggctgtggagctggtcgtgcagcgtgccgttcgccatgaactcgtacacgagcacgcgctcgccggagtcggcgcagcagcccaggaggcagacgatgttcttgtggttggcgcgcgccagcgcggtgagctccgagttgaacgctgtctccctgtcgcggc

SEQ ID NO: 19912 - DNA, 409 bp, Setaria italica
  Peptide Sequence Number=SeqID_85886
aggtcactgtaaagattgtaccccagcaataagaaaagcccccttagccaggtcttgacttccaggtttcagttctaagtatcctctggtatcttgaaaaggaactgcggtagtgaagccatgtcgagaaaggactcttttggggagctcctgacgaaccttccccgcatcgcttcactaccgcagttccttttcaagataccagaggatactgagaactgaaacctggaagtcaagacctggctccgcattccctgaagtagggaggtcactgtaaagattgtacccaagcaataagaaaagccaccgtagctctcctccttcagaggtgagttccccgccctgtaaatgtgacacccggtaggttgctccaattgtctgtatgtttcgtgacttaaatgggtagtgg

SEQ ID NO: 19913 - DNA, 1641 bp, Setaria italica
  Peptide Sequence Number=SeqID_85887
tctaatttgtaaggttgtccttgggtctttaggtcctattcgattgtctttcaaattttcctgcaaatataattgaaaattggtacatgggagtacgtatcacggtatgaaggtgatttggccaagtgttactttgcaaagcataagcttgtgtgggaagttctggaaggtggtcttaagagtaagatagaaattcagtggtcagatattactgctttgaaggcaacttgccccgaaaatggacaaggaaccttggatgtggtgttggccagaccacctctattctttaaagagacagatcctcagccgagaaagcacacattgtggcaggctacctcagatttcactggtggccaagcaagtatgcacaggcggcatttcctgcagtgcccttcaaccttgttgagcaagaattttgagaagcttgttcagtgtgatcaacggttatatcaattgagccaacaaccagagatcgtattagagactccagtgtttgaacctaggtgttcaatatttgaggatccggttgaatcaaaatgtgctggttttactaatttgaaagatgaacatgaagctctacctgggtattcaggttccttgtcaccatgtgctggctcatccatgtctgctaaaaatgaagccaatgattccattggaatgccagcagaatatcttcctcaaacagtcggctcaggagctggtgctgtaggtctgcaagctatcagcagaaatgttaacggtgcagctccagaattcaatattccccactggtggagtcaattgaaggtgcctgggcttaggccatcgatgtcagtggatgatttggtaaaccacctaggtaactgcatctcagagcatatcacttcaggcaatacagcactggccaaaaacgaggtgccaaccaaagaaacactggaggagattgctcagtatcttcttggtgacgcacaaggcccacctgtctctgcctctgaagagagatcactgatggctagggtggactccctctgctgtttgattcagaaagacacagtgccagttgccaagccaaagcctgagccaaatgacagtggcggcattggtgtggatgcctcagatggttctgatgaagaattcagttcagcaccaacagggaaaactacagatgctgccgagctgccagccatgtcgagaaaggactcttttggggagctcctgacgaaccttccccgcatcgcttcactaccgcagttccttttcaagataccagaggatactgagaactgaaacctggaagtcaagacctggctccgcattccctgaagtagggaggtcactgtaaagattgtaccccagcaataagaaaagcccccttagccaggtcttgactgagaactgaaacctggaagtcaagacctgactccgcattccctgaagtagggaggtcactgtaaagattgtacccaagcaataagaaaagccaccgtagctctcctccttcagaggtgagttccccgccctgtaaatgtgacacccggtaggttgctccaattgtctgtatgtttcgtgacttaaatgggtagtggaaaaattaaaatgttcattggttctttttaactcaatcatgccctcgtgcaaaattttctgaccaaaaaaaaaaaa

SEQ ID NO: 19914 - DNA, 319 bp, Setaria italica
  Peptide Sequence Number=SeqID_85888
cagaccacgcagctctcgcgcgtcgcatggtgaggaggtctcttccgttccgtgcggcgatggatggagggagggcgacggcgctgtggctggtgctggtggcgtccgcgatcgtgtcggcgtcctccagcggcgaggcttcggcgaacggccagcccgcgacgccgaccgggccggacacgaacgtgctgtgcgtgagcaagtgcgggacgtgcccgacggtatgcacgtcaccccgggcgccccgtccgtcggacgcggggacagcaccacgccgccgacgacgccgaagagcggcggcgggtacccgtcgctgccg

SEQ ID NO: 19915 - DNA, 451 bp, Setaria italica
  Peptide Sequence Number=SeqID_85889
gccggctcccggtactcgaggtgcgggtacgacggccgcgggggccgccgcgccatgaacaactccctgccccacgccggcgcgatcgacggcgccgcggcgccgcacgcgagctcgcagacggccttctcgaactgcatcccgcccggcgcgtccacgacgcagtggcagaaccgctgcccgaagatgaagccgccgcacctgagccgcgtcacctggatgtagagcaggggccggtcgacgacgggctcgacgccggcgatgctggtgctctcgaggatgaagcgctcgaagcacgggaacggcgggctctgcacgtccccgaagtcgtcggcggtgaggtcggcgtcggcctccgcgaacatgacgccctgcgcggcgcagtcgaccacgagcttcctccctccctcctcgcggagccgccccgcgagcgggtagtagggggaccgag

SEQ ID NO: 19916 - DNA, 504 bp, Setaria italica
  Peptide Sequence Number=SeqID_85890
ccgccgccgcgcttgccgcggcggttctttttgtctcgcggcgatgtacgcgtctgaccagaggcctcgccgcgcaccgccgctgccgcggcagcgacggcgcctaccggcgccggattcagctgctaggcttcgtgctctgccagcgcccgacgatgggctcaggattctgtcgtcaaacgatgaatctttggaaaacgtgattcacggcgcgtccatcggcgccggagacgacgagccggatattgtcgcgcgagtgcagatggatactacgacggccgaaatcgtcggagcaaatgccgacgacgaaacaaagcaagacccatcggagcaagaagagcggcaggagctcgagcggcaagagcacgagcggctcagggagctgtggctgtcgctgctggagcgggagcagaggctggagctccggctgcaggagctcgaaggcctcagggcgcaggtggccaccctgcgggagctcgagggccgcgttcgccgtccgtccta

SEQ ID NO: 19917 - DNA, 554 bp, Setaria italica
  Peptide Sequence Number=SeqID_85891
cgttcccctttttcggggtttgggagaagaaggggggcgaaaacaaaagaactgcgccaatgaaaacaaaagacttcagcttatgcttcaagtacctcaggataatttccaaaatcctgctttcctctttaatgtgaagagacgatgggatctgtaacctggtaaagctaccaaatggagattcaaaaggcttcggccaaccttttgttgcagtaggtcagcaatgactccaacattccatgagctctttctatctaccacattcaactattgtacatagtcttcagcgccagaagcaatccaaatttatgtaagcgtactgaagatcaaggttaaccaaagtttgcagcgtgtatgacctcttcattcaatgggatcatagtcttgcccgcagggagattgtacttaattcttttgatggcttaattggtagagctcggaagctgcagcagtggggctccgtttaggctaggaatttggggatttatgtaagagttgtgctggatgattgtttcatacattatgtccaattgtcgagcctgtttaaaatgcag

SEQ ID NO: 19918 - DNA, 2167 bp, Setaria italica
  Peptide Sequence Number=SeqID_85892
ttttttttatgatcaacaatagtacatgacgtatccacaatggtgcaacatgtcagacaataggaaaatgtcaataaaaatacatactgagctaagctcacctgactgaaacttgctacgacatattacaagttttacaaaaagagggtttaacagtcatcaccggtacatctaactgtgccccaagacagacagcagcatcaagttgtccaacaagtaccgtacatcaaaagattaaactatacagagtagccctttttccctaccatattgcaagtcagaaacatctgagaatacatataaagtttggtacttgtcccacaacagtagcttataaattgtaattatctggtaaaaaggccaaaacaaacagcaataaaaatgaacatatcgctatcctttgtctacagaaagcgagcgatccggagtaagcttattatcttccaagccaagccaagtaactgcaagatgctcattcattcttccagttctgtaggtgaagacaatcaagcttcaggttgcataagaactcgcattaatttgcaacgaaaatgactagaacccttttggaactcaaacagtgttgcttgccagagaaagctcatgtatttctgtaagcatccactcttctccagtttgtccaccaagcactatcgcttttgttcctccaacgacacaagtgctgtggccccaggcaaacctgggaggacgccctggaacattcagtattctccaagtaggcttttcttcagtaggatccaacagatacagctgtgacgctgagtgaagacctgcaactgagccaccaaatatcaaaatccttccaccaggcaggctaaccgcaacatgatcaaggcgaggaggtggacctgccccagctggatttccagcaccaggcattccactcccagtgaggcatcgccagcaaggctcttcttcacttaagtccattgtgtacacatcactagaccggagtcgcagagggccactctttgcaagaccgccaaacatcaggattttcctgccaccatagacagacattgagtgccccagtctggaaggtggcttccaagatgcaggtacctctctccaaactggcctgtccatggttacatcgagaagatatgtgtcactgagcagtacacctgaatcagcacagccaccagaaactaccaactttgtcccatccaaagtgcaggaactgtgccaagagcgtggaacagggggtgcaactccaggtatctcacgccaggttggttgttttgcatccaaatccagcatgaatacatcgttaagcagaccctgccttccacatccaccgaaaacaaccaaccaagatccatttaaacatgacagcgtatggccccagcgacctggaggagctgcgcttacattgatatgcctccactctggattgctggcatttaaatccaatacaaatgtatcattcattggttgcatgtttacaccttccccaccaaagagaacaacacggttccctacagcacaggcactgaaattgcatcgagatggctccactgcacccccaactgtcaatttcctccaggcaacagcttccagagtggtcagttctcttgccagccgaccccagcccaatcttcttgcagcaggcactgtctcaagagcttgagtagtctcactgccccaagcattctggcaaaccattctccaaagatcttcatttcttgttaagtgatacatgcgcctgcacacagagctcacagatgctatatctcttggtgacaaccttgacagtatactttggcaaagcacttcatccgtcaattggaagatgctagaatattcccgacagaaattgctctcccctggtcccgtggatatgggtcgaaatgagttatctggagcaaaccgtgttgatctcacgggttcctttgttatagagccaggcaatggtcccagatcaacattagcattagtgaagaactgaatgcccatatagtgggttatggttgcatcatctccatatataggggtcagatgcaacctgttcatcaatggagagccatccttcctgaaatttagtaaatcaccgcggaactcagtaccgttgtctatgcatcttcgaatatttgaaaccattgctgcatcgactaggggtgcgcctcctttgagcaaatggtcccct

SEQ ID NO: 19919 - DNA, 508 bp, Setaria italica
  Peptide Sequence Number=SeqID_85893
gaaattctctgcttcatcgctggacttctgctgatcttctgtcgctttaactttttcatccaccacaacatgctcacctacccagatgaatccattgcaaccaagaatcaaatcgacatcatactgcgcaagatgatggaaatgctgcttctttcgtttaaccaagtacggaggtactgttagcaattgacccctctcgagctttccatacttttcactccttgcttgtaggtgcagagatccatcatgttggaaaccacgaacttcagcctggcaattgattacacacaaggtagcagcatcttactttaaacagttctcatgcagtgaaaaataaatgaattgtgcatcagactattaaacgatagaggtgaaagaagttccttggggaggagaatgtaagatctaagaaatgagggggaaaaccatttcaaactcatgatgaaggattttgcgcttttgtctctaccttgtcaacatgcggtcagattgaaaggtgagcaaagcg

SEQ ID NO: 19920 - DNA, 833 bp, Setaria italica
  Peptide Sequence Number=SeqID_85894
cgggaggcacatattgcaccgagtgatctacacgtcaacttttgcactcacattaaatgcctatacctcttacagataatacaaagctaaattggaggcattaaagggacagattgataatgctacaagctgacaagcataggcggtgccatctaaactagttcggaactgcacattgaagataactggcagagtagctgaactagcatgtacctttccatacttttcactccttgcttgtaggtgcagagatccatcatgttggaaaccacgaacttcagcctggcaattgattacacacaaggtagcagcatcttactttaaacagttctcatgcagtgaaaaataaatgaattgtgcatcagactattaaacgatagaggtgaaagaagttccttggggaggagaatgtaagatctaagaaatgagggggaaaaccatttcaacttgtgaacatgcggtcagattgaaaggtgagcaaagcgcaaaatccttcatcatgagtttgaaaaatgcattgcttctatgcaaataaggaaataatggtaaacaagttgaagtatacactagtactcacagtgagagtaaaatgccaatgattaaaaacggttcacacaatattggaactggagctcactcaaaaatctcttcatatttaagcctttaaaaaaattatttctgaaactaaaccacttcagttaaagcactcgtcacatggccttctttctcaacatatcatacagttctttcaatggatcaatatagtgtcagcgtgcaaagttcacagatgaatgatcaacggtattcagagagtaggtgtggtaagtgtacgg

SEQ ID NO: 19921 - DNA, 801 bp, Setaria italica
  Peptide Sequence Number=SeqID_85895
gctcacctacccagatgaatccattgcaaccaagaatcaaatcgacatcatactgcgcaagatgatggaaatgctgcttctttcgtttaaccaagtacggaggtactgttagcaattgacccctctcgagctttccatacttttcactccttgcttgtaggtgcagagatccatcatgttggaaaccacgaacttcagcacagataacatcattttcctcaaagatactccgcatattaagttcatcaacagcagttctccttctctgaatgccatcaggcaaattcatggaagaaagcatcaacacagcatcctggctaaaatttatctccaacctccagcgcttaggagcaatctcaatgacacggccaactatgatatcaccaacctctggcttatatctcgcccggagagtacggacgtagaccagcttgttgacccgctccaccaccccgcagagcgtcgccaccacctccccgtcctggtccgacgtcccgtgccccttgaggatgttgtcctcctggttgacggggatggtgtccgcgacggtgacggcggcggcagacgctgcggcaggcgtgagggactggagctcgtggagcgccgcctcgaggcggacccgctgggtctggttcagcgagaggtggaggtccctcatggccaatctctccgtctcgcgagcagaagtgggggaataggccggaggcgatcaagcgacgccgccaccgtgccgagaaaggaggggagcaatgtttgtgggtagaaccctaccaaaatccttcccgtgtcggcagttccctt

SEQ ID NO: 19922 - DNA, 971 bp, Setaria italica
  Peptide Sequence Number=SeqID_85896
agtttttcatatcaatttatagcatacataggagaaacgaacttgttacatacttcccagacaaacatggaaatgtttactcacaattcatcttactgtagcccaggaagcacgtcaaatgaaatcaacaaacggattaaagatctgctagactacattgctggcacctcatcgaatgcacaccggagtggggcagcactccgtaaatctttgctgctctgtttggtgtacatagaacttgattatgtattttcccttgaaaatatcacacgataagcactgctacacttacggatcggacactgctgcgtgtcaagcactgttctctgcaaatcaggcagccagaatctgcaaggcattacccacttaccttgccccattcttctttctcagcagatcagctcgacgcttagcctccctctcagcagtctggacgtaaaattcagccccaagcatgtcgtttacctcaacatttgatgatgcacttgcttctgctgtctcaattatcagctcaacagtcaaagtgaatcctagggctgaaagtacacgcacagcattggcaagtcggcaaatatgcttccttgtttctagtggggtgaaattctctgcttcatcgctggacttctgctgatcttctgtcgctttaactttttcatccaccacaacatgctcacctacccagatgaatccattgcaaccaagaatcaaatcgacatcatactgcgcaagatgatggaaatgctgcttctttcgtttaaccaagtacggaggtactgttagcaattgacccctctcgagctttccatacttttcactccttgcttgtaggtgcagagatccatcatgttggaaaccacgaacttcagcacagataacatcattttcctcaaagatactccgcatattaagttcatcaacagcagttctcctactaccagaaatagaccattaagtaaaattaagtaacctaa

SEQ ID NO: 19923 - DNA, 596 bp, Setaria italica
  Peptide Sequence Number=SeqID_85897
ggaacaccatggtgaagtggacggacaggtcgccgtacgcgtactggaaggggaacccgaacgtgggcgccggacgccggttcctccttaggtgcaacgcgtccggcaagcgtgactggaacgcgcggatatacgcgcaggactgggggaaggagctgcggcaaggattcagggaatcagacctgtccaagcagtgcacgcacaggtacaagatttacatcgaggggcggggctggtcggtgagcgagaagtacatcctggcgtgcgactccgtggcgctcatggtgcggccgaggttccacgacttcttctcccggggcctggcgccgctgcggcactactggcccgtggtccgcgaccgcggcatcgccatgtgccgctccatcaagttcgccgtggactggggcaacgcccacacggacaaggcgagggagatcggcgggaacgcgagccggttcgtccgggaggacctggcgatggatcgcgtctacgactacatgttccacctcctgtcagagtacgcgaggctgctgcggtacaggcccgcggtgccgcgcggcgccgcggaggtgaccgtcgagtccatgatgcggggg

SEQ ID NO: 19924 - DNA, 235 bp, Setaria italica
  Peptide Sequence Number=SeqID_85898
aatgctgcatcatgcgctagtgctactgttaatttgtgaggcattaagaaagaacaagtcggggagagtgaggattcctaatggcattaagaagaacaagtagcactagcgcatgatgcagatctggatgctgcatcatgcgctagtgctactgttaatttgtgaggcattagaagacaagtcgggaacttaggaatcctcactctgggatgctatcaagcagatctggatgctg

SEQ ID NO: 19925 - DNA, 249 bp, Setaria italica
  Peptide Sequence Number=SeqID_85899
tacagcttcacctctccctctctagcacagggaaaagtgccgagaagaagctgggcagggcagtagcgatggctgccaaggccgtctccttcctgatgctcgtgcttctgctcctcggcgtcgccttccccgtggtaagctcactggcctcatcctttcagccttcaagttccagccgttttcccgtgtgcgctatgtgctcattcaattctctgtcttctgttttgtccagccagggaggtggacggg

SEQ ID NO: 19926 - DNA, 1212 bp, Setaria italica
  misc_feature (1209)..(1209): n is a, c, g, or t
  Peptide Sequence Number=SeqID_85900
tagtaccttagtaccccttgtcttactaactaacttggtaagtacctaaggtaaggtagggtccctaagttgtccccttagtattctaggtattgtagtattctatttctagtatcctgctgcctgctgccgtgctacggtgccaccaccaccgccaccgtccaccgtcccctcgctctataaaagctcagcccgggcagggcagtttctcagtcccaataatctcgccccttcttcaacagcttcacctctccctctctagcacagggaaaagtgccgagaagaagctgggcagggcagtagcgatggctgccaaggccgtctccttcctgatgctcgtgcttctgctcctcggcgtcgccttccccgtggaggtggaggccggcggcaatggcagaggcaacggcaacggcaacggcggtggcagcggcaacgggaacggctacggcaggggcaacctgaagccgtgggagtgctcgtccaagtgcgcgtcgcggtgctcccagacgcagtaccacaaggcctgcatcaccttctgcaacaagtgctgcgccacctgcctctgcgtgccccccgggttctacggcaacaagggcgcctgcccctgctacaacaactggaagaccaaggaaggagggcccaagtgcccctagatcaggatgagatcattcagatccccgccggcattgctacccgcagctggccggcttactgatccgtgcattgttcgtgatctgtttctcccccagtagttgttagtgatgcaacatttgctgaatctgggatgctatcaagcagatctggatgctgcatcatgcgctagtgctactgttaatttgtgaggcattaagaaagaacaagtcggggagagtgaggattcctaagtttcaaaaaaaaaagagtgaggattcctaggtagggtctaccatgtgctgatgtgcatccccctccttaagcagtggtcctactctattactaggacttaattaaaattatcctccgggcctagttgcctaatgatggaaatcccagaccattagtggggccagtcagaactgatgtccttgctatttgcagtcgtagactgccagttgtaggccatttgcctaattttggagttccaaaattactgtagcgttttgtttatattggtgaattattctccaaacattgactaattaggctacaaaaaaaaaaaaaaactaaagngaa

SEQ ID NO: 19927 - DNA, 236 bp, Setaria italica
  Peptide Sequence Number=SeqID_85901
ttccttatcatgccagctcgtcaggaacaaggcggcagagatggtcgaggagatggtctacaagacacctgagctcaaggacaggctgcatttcccgcgtggcccgcacaacctgcaccatgtagtgcccacggtctagtcatgcgatctaatccttgctagctttcatcgggggcgtcatgtgaagattgtatgcagcaaacagtcaaccgattacgcccaattctatcttcgga

SEQ ID NO: 19928 - DNA, 787 bp, Setaria italica
  Peptide Sequence Number=SeqID_85902
cgtggtaagggcacgccggaatgtccatgttcaggctcgccgtggcgcagaggccacgattccccaggaacgccttgtcgaatgcagtgctctgcagcgactgggggatctcgccggtgagttggttggaagagaggttgaggaaagtgagacggaggttgttgaactcctgtggtatgtcgccggagagcttgttgttggagagatcaagcatgttgagcaccgccagcgacccaatcgccgccgggatgtcgccggatatctgattgctgctaaggttcaggtaattcagacttttcaacgattggatggaaggtggaatcgagccagatatccggttgccggcgaggttcagatcggtgaggttggcgaaccccgacatgttcgccggtagcgcgccgaagaattggttgttctccgccttgaagacattcagccccggtgcggatgacggcacggcaccggagaacagattgttccccatctcaatccgtgtgatgttgggggatatcacactgggcagagtgccggtgaagccgttgttctgtatcatgacagtggtcagcttagggaacgcccaccataccttctctgggaactccccggtgaagttgttgctgtacgccatgatgttgtccagtgtttggcaatccccaatgttcgccggcaacacgccggagaagttgttgttgaacaccacgaggtcgtacagattcttgttgtagcagagggtgtctgggagcttgccggagagcaagttgttgctcacttccaggttgccgagtgg

SEQ ID NO: 19929 - DNA, 1145 bp, Setaria italica
  Peptide Sequence Number=SeqID_85903
ccctcgccccgacgcccccgcgcctgctccgcctccgctccgcccgccgcctaccgctcgccccactcgccgcctccgactccttcgagtcctccgtcggcgtcgactacgcggagccggccgccgccgacggggccgagtcggagcaggaggaggcgttcgcgtcgggggaggaggaggaggaggacgctgccgtcgaggaggaggaggaggtcggggagtacgtcgagccgccagaggaggccaaggtctacgtcggcaacctgccctacgacgtcgacagcgagcgcctcgcgcagctcttcgagcaggccggcgtcgtcgaggtcgcggaggtcatttacaacagagaaacagatcggagccgtggatttggatttgtcaccatgagtactgttgaggaggctgagaaggcagtggagatgttccatcgctatgatgtcaatggaaggcttctgactgtaaataaagcagctcctagaggctctcgtgtggaaagagaaagatctcccagacaatttgggccttctttcaggatttatgtgggcaacctgccatggcaagtggatgactctaaattggtgcagttgttcagcgagcatggtaaagtagttgacgcccgagttgtctatgaccgagaaactgggcgttcccggggattcggttttgtaactatggcaacacaggaggaattggatgatgctattgctgcccttgacggacagagcttggatggccgtgccctgcgagtgaatgttgcagaggagcgaccgcagcgaggtttctaatcaggctgtgtgtgggtggacaacaggcttgttccataggagcatcgtagcgtggtctgatacatgtagaccctccgttctcttttcttgtgttgatgggcttgctaccatcccgtcttattgtgaagagggaagtcttctgctattttgttaactattggttgtgttcacgagttcatgtcttgtaggctactgttgtggtgcacctagcttaatttgtcgatgcaattcgaaattttgtctgacatctgttcaaggaaaacaagtgtgtatgtgcatgtttgctctactgctttcttgacgagagtacgagacatgttcacttacacgtgcaatttcaagccacatatgggccca

SEQ ID NO: 19930 - DNA, 532 bp, Setaria italica
  Peptide Sequence Number=SeqID_85904
ctggacagcgtctccttcaagaagcatgagccgcgagtgcatcaccctgcacagcaacgtcaacatctccaacccctacgaccaccgcctccccatctgcgaggtcacctacaccctcaagtgcgccggaaagtaagccctccatcttctcggcacctctctcgaattcgaatcagggctcatttctttgtggcggatcgtatggatccagggtggatgctcaaataaataatcaaacgtgttcgtcgtcgcagggtcgttgcgtccggcaccatgcccgaccccggctggatcgccgccagcgacagcaccaagctggagatcccggccaaggtgccctacgacttcctgatctcgatcgtcaaggacgtgggcagggactgggacatcgactacgagctccaggtggggctcaccatcgacctccccatcgtcggcaagttcaccatcccgctctccaccagcggcgtagtttctaagtcttcccctaacctattctaaggtactattgtcttgtttctagttcgtctac

SEQ ID NO: 19931 - DNA, 845 bp, Setaria italica
  misc_feature (812)..(845): n is a, c, g, or t
  Peptide Sequence Number=SeqID_85905
gtttcgttatttcccagccatcctgtcgcgtttggccgttgctgcaaccaccgcgatccataatccaagagagagtcgaagagcaaggtttgccatggcgagcgagcacgcggagccgaagcagaagcagagcctgatggataaggccaaggagttcgtggtggacaagatcgcgcacatccccaagccggaggcgtcgctggacagcgtctccttcaagagcatgagccgcgagtgcatcaccctgcacagcaacgtcaacatctccaacccctacgaccaccgcctccccatctgcgaggtcacctacaccctcaagtgcgccggaaaggtcgttgcgtccggcaccatgcccgaccccggctggatcgccgccagcgacagcaccaagctggagatcccggccaaggtgccctacgacttcctgatctcgatcgtcaaggacgtgggcagggactgggacatcgactacgagctccaggtggggctcaccatcgacctccccatcgtcggcaagttcaccatcccgctctccaccagcggcgagttcaagctcccaaccatcaaggacatgctgttcagtcgcaccccatcagaggcgagctaactctgtgatctgatccgacgaatgtatcctatcttgcaaataaaaggcagctcctctgtttcagttccacatgctactgctactgcattgtatcagctgtcagctcaactgaacctctgtttctgaatgcatgcctcatggttgcaataaagagctagacgcctgcatttcaggtttctttaaggaaaaaaaaaaaaaaaaaaannnnnnnnnnnnnnnnnnnnnnnnnnnnnnnnnn

SEQ ID NO: 19932 - DNA, 274 bp, Setaria italica
  Peptide Sequence Number=SeqID_85906
ggacaccgcacggccccgccggacgggccgagcgcggggctgttggtccaagcgtcgccgaaggcgaggtggcctccggcggcggcggcggaagcagctgagcagcccgcgtgctctggctcgttcacgtacagcgaggttgctccgcggtagataggcaggtggcggtgcggtcggccatgtacagagaagtgatcgtagttgcatgcgaggcggcgttcgtgcttcggaaaagctaaaccatggacctgttcgttcagcttataagccggct

SEQ ID NO: 19933 - DNA, 614 bp, Setaria italica
  misc_feature (565)..(565): n is a, c, g, or t
  Peptide Sequence Number=SeqID_85907
ctcaaagaacgcgccagtcaccccgccttttggcagcaaacgccaccatcgccaccctgctcccaccttcctcgggtgtcaaaaaccccgagtggatggtcaagtcagttttgacatagccagggtgcacacagttgacgcgcagctcggggtgctccctcgccaggatcctcgagtatgcgttcaaggtcgccttggccaccttgtacgttgagaaatacttgggccagccgcgcgagtccaccgtgccggcctcgaagtctttcacgaacatgttcagcagctcatccagcctctcctcggtgaggttgtcaatgtcgttgagctccctcttttaactcctcgtttctgaaaagccttagctgtccgaagtgggaggagacattaacgatccttccatccgaggaggcttgcagcagaggaagaagggcttcgatcacttgctttgtgccgtagtagtttgtccgcagacctttctttgcagtgtcataagtctcccggcaattttcccacagccacccaaacctctgatccatatccatggcactgagcgtttccttttccncggtcgttactgagccataatcagtgtcgtgagcatactgaaccccaca

SEQ ID NO: 19934 - DNA, 1277 bp, Setaria italica
  Peptide Sequence Number=SeqID_85908
acaatacagcaaactgaacaaatagttctgcaccagtactttgtacaatacagcaaaatgcacacattctgctgcaccagtttttttgccgcagtgtgctgacctacatgcctaatactgagctactacctgaacttgcagcaggatgtgtaacatctcttacttgaactttttacaacatgtgacctggtgatttctagtatatcaagacattcctgtaggtcagcatcgctttctaggatcacccagtcatcctcatcatctctgtacttgaggtgaaacgatccaacagatagtttcatccgctttgcgatttcctcgagcaaatcatggtgtttcatggatggcagcaacttgaacctcacggcatcatccttgtaattggccttcacagtgacggttgtattgccttcattagctgatgcctgagttttggagcatttctggaaagttccatgactggatgcactgccactggagtaatctgtcttgctggatgaagatgggagcgtttcagtcccgatattagattgtggcacaagaaacaaatcccttgatgcattattgccctgacttcccactatccccaacccggtttggaaggaagtggctttttcatttataaagtgtgaaacattgtatgtatcagcagatagtgacctgtttgatgtaccagaagaatgtgaatttagagacaatcttccctcattcagactgaaatcaatttcactcaacttttcttcctgtgctttcaaaacaagttggccttgatattctccttgactagcaccacaatcaagtttaatctttagttgcgaactttcagattcaatgtgtgcaggatcaacaccatcaccttcaacatcaatcagcaaaggattcccagaaggggaaatagatgaaatgagaaatccagttgcaggatcatattttagttctctgtcaacaactccatgtactgagcttatgacattctggatcttctctagagatcgattcaccttctttatcttacgagacggccaccgtgatattccatgttgacggcatatcctttttaatgtcgtgggacaaacaccaaggctctttgaagcatcttttagactcccagcaaaatacttctgaaggacactcaagctaatattcttctccattgaggtgctcgttttctccccatgtgaagtagtgctaggtttcaactttttagcacgcttcatatctcccagtagatcgttagtgttcatcttctgatgtccagaaagcacatttgctttgat

SEQ ID NO: 19935 - DNA, 306 bp, Setaria italica
  Peptide Sequence Number=SeqID_85909
aactagttcatgagccagaaaataactgccagatcaagtggtgagtttctccagagaagtatgtcagcaactgatctagatataactgaattggcaccacagaacactcaccatgttgcttcagaagacgcagatgttaaaggttttccccttttctttctgaatttaacgtttatacacatttgctaacttagtttaattaaaggacttatctgttacccctgtcagatgttcacggggatatctgtgtttcacaagctggtgctgatttcgaaataactggtgaagttgaaggttgtattaaag

SEQ ID NO: 19936 - DNA, 590 bp, Setaria italica
  misc_feature (588)..(590): n is a, c, g, or t
  Peptide Sequence Number=SeqID_85910
ttcaatcctactccaacagcagcacttctgacgatttatccacttcagatgctatagaggatgatctctcgaacgaagcatctgttgccgaagacagctggttaaatcgtcaggatagctcaagggagacagagcatacttcctcgggtaagggagacagctcatcggtattgaatggggaggttgatctaaccacggttcagaaagagattgcaagcttgaacagaagactgaagacgcttgaaggagaccggaattttcttgaacatagcataaactccctcagaaatggcaccgaaggtttggtgtttatacaggagattgcttgcaacctgagagaactgcgggcaattgctactgacaagaaagatagcctgctgcaacatgtgcaatagattccaactcaacacgtgcattgtgcatttttgtatcattaattaaaagaaattcttattgtaattagggtgccaggtactcttgtaattatttcaaaggaacttccaaaaagaaggcttgtacctacaggaggcagatctttctttgcaaatgaaaaaaaaaatgtaggaacaaaaaaaaaaactagaaagnnn

SEQ ID NO: 19937 - DNA, 1018 bp, Setaria italica
  Peptide Sequence Number=SeqID_85911
atgtcagcaactgatctagatataactgaattggcaccacagaacactcaccatgttgcttcagaagacgcagatgttaaagatgttcacggggatatctgtgtttcacaagctggtgctgatttcgaaataactggtgaagttgaaggttgtattaagaaaattgaagccataggtgacatggggacacataaactggtagtccaagatccgtctgatgagctggtaatgcagaacattaccaaaagaatttcactggagaggaaacaggtgaaccggactgcgactcctcaagcatctcatggaggcatctgctgtcagagctccctttagtatcttcgtggaaatcttgatatgcaatgctgagaaaatccttcagctcagcgaaaccatcatgagcaccgaaccgtgatgcagaggccattctcattccttcatgatcaattgactggtttgttctatcctgcaacaatgccaaattcactgtcagctcacaaatgtaggtcagatcaactcttgtatgcacatacagcattgcatcaggatatgcggacggaatatgatacttacctccgaagaattcagccatcttgcaacaacagagtttcccgatcttcctaactgagggcatatagacaatacagcaactacactgacaacatgatttcgcctattggttattgaactatatatagatgcagacaatgcagcaatactgaagatgatctctccagatggtactatcacaagatggtgtcctgcgtcagaaaataggaagtttgcaacctagattttcttatgcagttgtaacattttccaccattgtcagattcttgttgtggctccttcaatttgaaacagattaatgttgtagtttgtactttgtagtaatcacagatgtacatgatgatcaatgtatcaccttttcttgacatgatcaatgtatcacctttcttttgatatgaaatatatatggatgtgttggaaaaggtgatacattgatcatcatgtacatctg

SEQ ID NO: 19938 - DNA, 3213 bp, Setaria italica
  Peptide Sequence Number=SeqID_85912
tcggcgccgccaccccctctccccccgcctttcgcctttggctccttccggggatggggaatcgaccgaaaatacttatatgcagagagcgagctggggaggcagcaagtggtcggtgctcgccacctttctgccgaatcgtcgcctaatactaccgccagcttagctagctagcagcgagcctttttggccgctgctcccgacaagatcggcctcccgacgtcgtgctcctgcggtcgcagatcgggatctcgcgactcgcgaggctgaatcatcctccagacatcctacttcaacgccagtcatctctggggctttggccagtcttcacagattggagcaaccgttctgaagatttgacccaccattggagatgggtacaagggtgccaatcttacgccgagtatcgagcgcactgtccacagcattgctggagtggatcttgatgctgctgctgttcattgatgcagtttacagcttcttggtcactagattcgcccgtttctgcagactaccggcaccatgccctttctgctccaggcttgatcacgtcctgggcaatgagaaaccatgcttctatagggaattgatctgcaaaactcacaagtcagagatttcatccttggccttctgccacctccaccagaagcttgcaagcgcccaaagtctgtgcgaagggtgctgtgagaaaacaagcgatgatgagatagcagatgagcctgtgatggatgtcaatgaactcgatagtaatcaaaggaatgatgttgtgaggaattccaatcctacaagaatttgctcatgctgtggacaacattttaaacaacggagcgtacccttggcctatagaaagattgcagaactagaacatactgaagctgttggctcaccaaagatttacacggattattctgtagctggtcaagtgcatgagtctttggaacctagagatatttatcaccagagtgattatacatctcatgagagagacagtcttctacagatgacatccgactccgaggttgaggttccttgtgcccatgatgtgaaaagttcacactcttgtgaagccagtgcagtggaggaagacttgcaagaagatgcagcttgtgaacagcccgttcttccttcccctgaggcgatcaaggaatctgaaagaaaggttgaggcggagcttaatgttacagacacccacgatacatcctcgacgtgtcctggtacagatggccatcctgatagcagaactgatggggatcggatggaagagaaggaaagcttattgacgaaatgggcatcccagcatgttcccatacttgttaaagaagattcatgtttaaaagatgccgatatctcacaacttccagctgcagcaagtgatgagctacctcagactcgtggtgaaactgaaccatctcagagcacaaatgaaggcaacactgacccattcagatctcagttcacaatactagaagagcactatgctgtttcaggagaaagaaatataaacgataatctggaactagttcatgggccagaaaatactggcagatcaagtggtgagtttccccagagaagtgtgtcagcgactgatctagatataactgaattggcaccacagaacactcaacatgttgcttcagaagacgcacatgttaaagatgatcgcggggatatctgtgtttcacaagctggtgctgatttcgaaacaactggtgaagttgaaggttgtattaagaaaattgaacccataggtgacatggggacacataaactggtagtccaagatccttctgataaagattgtgcagatgaacctcacattccagcagccgctgttaaatcaggtggtgaagtttctcaggatcatggtaccattgagggataccccaaaacaagtgaagccattgttgaaagaaggccatctctaagcactcagattagcatgaacgaagcctacaggcttgccattggcagcaagagtagcttgccatcccctaccttgacggatgtgatcctcgggaaggactctacttctagcataaacgaagaattaaggttactgttatcacagctctcagcttccagggggctcgaggcaccatgggtcgatccaggccctagcccccgtgcatatggacgtggtgatgagctggtagtgcagaacattaccaaaagaatttcactggagagagatgcatccggtttggaatctctagacggaagcattgttagcgagatggaaggtgaaagcgccattgaccggttgagacgacaggttgatcttgatcgaaaatcgatacacctgctctgcagggaacttgaagaagagaggaatgcctcggccattgctgcgagtcaggcattggctatgatcaccaagttgcaggatgagaaggctgcaatgcagatggaagcttcacattaccaacggatgatggaagaacaagcagaatatgacagcgatgcacttgcaaaagctaacgagttgctcgctgagagagagcagcaaatagaggaactggaagttgagcttgaaaactataggagacagtatggaggtgaaccaatagaggaacaagccaaaaccccctttaaacaagaaaatgctgttatagctttcctcgaagaaggcggtcttgaagttcctatgattaacacaccaaggggcacaaattctttggtgagttttgaagaggagagagcgtatatagcctctagtttgaaaaagttggagcagaagcttcaatcctactccaacagcagcacttctgacgatttatccacttcagatgctatagaggatgatctctcgaacgaagcatctgttgccgaagacagctggttaaatcgtcaggatagctcaagggagacagagcatacttcctcgggtaagggagacagctcatcggtattgaatggggaggttgatctaaccacggttcagaaagagattgcaagcttgaacagaagactgaagacgcttgaaggagaccggaattttcttgaacatagcataaactccctcagaaatggcaccgaaggtttggtgtttatacaggagattgcttgcaacctgagagaactgcgggcaattgctactgacaagagtgcttacttgtactaagtaaagtattagtcctttgttctttgttcaacattttgttttatacaaggtaggtagaaagtttactacaaggaatacaataaggtaaccaa

SEQ ID NO: 19939 - DNA, 658 bp, Setaria italica
  Peptide Sequence Number=SeqID_85913
atggagggatgggccagcccggaatccgcgggcacggacagacaaactctgcgcggaagcggacaccgatcgagatgaatataccattgtacccacgcataagcatgacctgcgctcgctccaatccaagaatcaacagagggaagtgttcttggcccaaaaccgaggtgatggaattttttttttttttgaaacgagcaggcaggagagctgccgctgtattaaaaaagaggagtgcccgaaggcgaaacaattaagtaattacatgctgcgcactgcgagcttagaacactggtaggaggtaaactgaaagagcgccttatatacactcaactacgcctcgcggcgtccaaaaaccgaccgaggtgcaccgcaccagcccgacacccatgtagctgcctcatctcttatgcgagctaccaaacggggaaggattgctcctgtcgatggaaaactcgcgcgttgcgctctttccaaacttcccacaggactaaaatgatgaaggatctaaatcctcttttgtcagggacctgctcgcctgctaaagccgtccaccagtcatgcagagtgtcatgcgcatcccaacgttctggttcaatggcccgggcacctcgtccactcgctaagttgagcccagacattccttgtgtaactgcaa

SEQ ID NO: 19940 - DNA, 426 bp, Setaria italica
  Peptide Sequence Number=SeqID_85914
tctgcttacaagtaatttgcaagcctgcatatagcacttgtaagtcctaagaacatgtggtttcaatatagatggcccaaagcactgaaaactgagatgcaagtgaacttgaaaactttgctactcttatgcagatgaaacccaattttagaatgttgtttaggtcctgacccctttagcgacgcgccatatctgaatacagatttgacattatgcaagggctaagctgccaccctcctggctcctggtgccacgccatatctcgatcaagctacggtgataaacgatcaaagattcggttgtcactccctttgtgctgaatgaaaaaagacttcgtgtttcactcgacgggtgcaagggtaaaggtagccaagacgagtaggatttgttaaggccacctatttctcacactggacatatttctga

SEQ ID NO: 19941 - DNA, 487 bp, Setaria italica
  Peptide Sequence Number=SeqID_85915
tccaggacagtgtcgtacgcgacattcaatccaggataggggaggtcagggagatggaacaatgaccactaccactaccaacagcatttgaatccacaccgaaatccatcagcaagatctcagcaggacagcacagaggcaaaactgcaaattgatgggcatggcttccaggttgtcaagccggcatactggtggcgcaacgagactaagcattaaagatgggaaacatagccacaacaacctaaagatgcgtttcaaagaagggagagatacaaagcacacatcagaggtaaatggctcaattatttctcaacgcaacacagagttgcagaatgccggtactagagtaaatgctggagatgtctgcaatgggggcacaaggctcactcctgcccttcctagagaggcctatttaagaagatagagcaacagaagcaaacctcctcccacactgctccctcccacactacttcttagccagcaccag

SEQ ID NO: 19942 - DNA, 737 bp, Setaria italica
  misc_feature (487)..(487): n is a, c, g, or t
  Peptide Sequence Number=SeqID_85916
cagctatctctgttccatgctggtgctgcgacctcagctgggcgcacgttgcaacacaatggtctactacaacaggcctctgtatgtgatgtcaatttgagcacaatcacatgttcagagcaacacaggctgtattgaacacaagcagaaaactgtacatttctagccatatgcctgaacaaataccggtaacaacatgtaggtgcattgcaaagctacctgtaatggggtattcattcataaataaagcaaacaccacacagctacctcttccttttctactactacaaagcaactaggagaacaccagtggcactgcagttaaataccatggcgacaatgggccatgtcctttgtcgctactcattacgccctagccaaaagcatgggattcggcacagcaaaccttgtcagagtcttggtcaccacaattgaacatagttcagtatcatggaaaaatctcattctagataaatactcatatatnttaaaaaaaaacatatgtctgttccagtgggcactttgccaagttatattaatcattgccaataaggattattttggtctgaagtgaaattacagctacttctcttgattctacaggttattttctctcagcagtccacttgacccacggcactgatcatctaattaaatattgtgctaagcataaacacagttctccaatgcatgaacaaccacaatgaggtattgcaataaaccatctcaaatctatc

SEQ ID NO: 19943 - DNA, 377 bp, Setaria italica
  Peptide Sequence Number=SeqID_85917
aaagctaatcgacgtcagttggacaaggagttgatgtgctccatgtttgcacatagtgcaatgacgacagatccatggataacaatacgctccatcatgagggcttagcttcctttcctctctttaaattttccacacgtcctcatcagctcacttcaccgattcccttcgacagctactcttgtggccgtggaaaatgcagagccaaatttcattattccgctaatcagtctcatttctagtgtcttgattaaaccacctgcaatgattcgctgatcgacgaatggcctgttcctgccgtgtgtgtgattttcagctgggagggatgcagtgggacccgagcctgacgttcgccattcggccgaagcgtaagtcgt

SEQ ID NO: 19944 - DNA, 1597 bp, Setaria italica
  Peptide Sequence Number=SeqID_85918
ccccgaatcggcgagcgaatcccctcctcacctccccgtccagccgtcgtcctctcctcccttatcgatccggccgctgaattcgtcttcctctcgctcgctccttctaccctgcgaagcaggtaacgatcgataggcggcgataatccgttgatactgttattaaccgccgcccccggccggggcccctgctgccctttaccaatctgcagcaggcgccgagttcgttgcaccgagatagcttgctagaggatatacagagacatctcggctagcagtagctctggaggaccttataccaatggtgatggtgagcgtggcggcgagcccgagcccgatggtgcggtcggaggaggacctgggcccgccgtggctgcggccgctgctgggcacgagcttcttcgtgccgtgccggatgcacccggagctgagcaagaacgagtgcaacctcttctgcctcggctgcaccggcgacgccctctgcgcctactgcctcccggcccaccgcgaccaccacgtcgtccagatacggcggtcgtcgtaccacaacgtgatccgggtgtcggaggtggggaagctgatcgacatctcgcacgtgcagacgtacgtgatcaacagcgccaagatcgtgttcctcaacggccggccgcaggccaggcccggcaagggcgtcaccaacacctgcgagatctgctgccggagcctcccggactcgttccgcttctgctccctcggctgcaagctgggagggatgcagtgggacccgagcctgacgttcgccattcggccgaagcgtgggcagggctccggcgacgacgggtccggctccgacgactcgttcagccccaagaagccccggaggatggccgggttcgacctcggccgcttcgaccggccggggatccggtggtccgacgacgaaggcagcaggtccaacaacgggaggccgatcacgccgggcacgccgccgatcaaccggtgccggccgtccaggaggaagggcatcccccaccgcgcccccttctacggttagctagcagacacacccggtgcaagtgcaacgcacacatcatcagcctgcacttcactcttcagcttgcacaatgcgtgtcgctcatcagtcaggtctgaggagtgaagtgatccaaaaatcagctactgggtggtaggtcaccagatacagctaggtatagcccctgttacatatagctgtgtatacaagcatacacaataatgtagacgaaagatatcatctgtacatgccaatatattgacaaagtttgtcaagtatgtgtagacataatctgaaaaggagatagaaacataggtagggtttgaattttagctagcttgggtagtgtagtagcaatcgagattgatatgtgaaaaagggaataagcatcatcatgtatttgtctcggtttgtagtgtctggctgcttgcctctccaccacccaacgcgtttattagcgttgtggtgtgaagcttaaaagtttttgttttttaatcttaatctcctgtttagggcttaataatatgtatacacagtgtatatgtgtgtgtgtgtgtgtgcgtgtgtgtgtttctgttatttgag

SEQ ID NO: 19945 - DNA, 435 bp, Setaria italica
  Peptide Sequence Number=SeqID_85919
tgcgtcgacccgttcgtcatccgtcacccaaagggccacacagttccaaggctcggtaagctcctacgcctttccaattttcggtgctaatgcttttcaaccgaaccaaatttctcttcttcattcagtctaatccagggttcagcaccctttgattttgcgtggatgtggaacagacctttactaaccgagtcttccagtagcagttaatggttttgccgaaatattaacggcgcctgaccaccaaactaaccacaatgtatgactgttctttgtcgcgcagatgacaagagccttcaagtcatgctccgttccttgagaagattgagaaggagacatctgagcatgcgtccaccgatgttgacgaaaaagaagtgtgcttgtgataggacgtaggttattagcatctgaatactcatgatactagtattgtaa

SEQ ID NO: 19946 - DNA, 1045 bp, Setaria italica
  misc_feature (1019)..(1045): n is a, c, g, or t
  Peptide Sequence Number=SeqID_85920
ccaccggcgatcgaggagcccccgaccaggcgcgcccgcacacacccctcgtctcctctcctgatccacgggctcgctcggcgcccggccggacccgcggacgatgggcagcctcggcggcgaggatcggcggcagccggaggcgcggggtaggcggccgcggttcctgtgcctgcacgggttccgcaccagcgccgagatcatgcgcaagcaggtggtgggcaagtggcccgccgacgtcacggcgcgcctcgacctcgtcttcgccgacgcgcccttccccgccgagggcaagtccgacgtcgacggcatcttcgacccgccctactacgagtggttccagttcgacaaggagtttacagagtacaagaatttcgacaagtgcctcgcctacatcgaggagctcatgatcaaggatggccccttcgacggattgatgggtttctcccagggtgccattctttccgcggcgcttcccgggctccaagaacaagggctggccctgactagagttcccaagatcaagtacctgatcatcatcggcggcgccaagttcctgtcgccgactgtggccgagaaggcgtacgccaacaagatcgcgtgcacctcgcttcacttcatcggtgacaacgacttcctgaaaacccatggtgagaagctcatagaatcatgcgtcgacccgttcgtcatccgtcacccaaagggccacacagttccaaggctcgatgacaagagccttcaagtcatgctccgtttccttgagaagattgagaaggagacatctgagcatgcgtccaccgatgttgacgaaaaagaagtgtgcttgtgataggacgtaggttattagcatctgaatactcatgatactagtattgtagaaataaacatacaactgtagcctcgttattttgaggcacgactattctgtacctaaatgaagaataatcattttgtatcttctattcacttcaatttgctgaatactccctccttttacgaaaaaaaaaaaaaaaaaaaannnnnnnnnnnnnnnnnnnnnnnnnnn

SEQ ID NO: 19947 - DNA, 1355 bp, Setaria italica
  Peptide Sequence Number=SeqID_85921
tgttttaacaaaggaaggtcatgagcttaacactgtagcaattactctgctggaatgaagtgtgtaggcgcaaagaaaaaagaaatatggagcttacctgaaagacacaaaaataaataatttaggagtagacaaccatcctgcacacaatttgaaacgaatgttgaaagagaagttgatcattgacgatatgaatgaatgagaaaaaggaagaacgtcaagaaagaaagaaaagtagtttcatcattaacatacattagtggcagcaaataagcatagccgagtggtcttaatatgatttttttcagcatccttcaaatatatccatacaaataagcatagccaagaaaactatgaattatccaatttaaggacactaagatatataccttatacagaaaaattgaacattaattagcaaaactttgatatctgaatagacatagtttatgaaggctcattacatgaaaaaaaagatattactcaaatgaacaaatattgaaatgacaggaaaggcaagatatataattagaacagctcatttcactccatacaaataaatatgtaaaagacatccaatgagagcatctaacccattttacatatacagataattttccatatctatttagtaagcaatgaaacaaaggagtatttcatcaggtctttgggaacagatgatataacatatcaatagttgcactgaatgccacagattgtgctaatggaccttgtaacaaacttttcctgtaaagagaaacctagaaatttatgatttgtaggcaattatctcaaacattcttccataaaattctgtgagtctccatcaacttgaaaggcaaagttttagatagtgctagtttgtgagtatccttctaacatgtggaaaatacaactcactccagaacatcatccaatagataggctgagtggttcacagagcactcagactgaaacagagcttgctgcacatgccaaaagtgaaggtacggagtcatgtactgcagccacaaatttattaagaggacaccagttcaattggttggttcgctatatcaccataacagttggaatagtttccaattattgaagaaaagttgccctttcacactctcatagaagcagcaccaagatatcgttatctggctgagcagcagacctcaaggagggctttcagaaatggaaggcaaaaatatgcatggctatgaaactgaaaggaacatttacctgcaaaatagaataatagagatctcaacgtgtcctatgaatttctcatactgattacaaaggccatcggggatatgtattgaaaaaagatgcaatgaatttatcatctgtaacggtcatttaatcaa

SEQ ID NO: 19948 - DNA, 594 bp, Setaria italica
  Peptide Sequence Number=SeqID_85922
cataccttcccaatttacaagatccactaatgagtatattgtaagttacagcatctggcttcacgttgctcgccctcattaatgtgtacaactccaaagctttctcataatcacccaaacttaaatagcttccaatgcctgagttgtaagcaactgtatttagttcgatccctcgagacttagctgctgcaagaattgtgtcaattttagctagttgtctgcagcgaccacatgctgttaacagggtacttattgaaacaacatccggttgaatgccatctctctccatttcatgcagaaaactaacagcttccttcaacattccagcagatccataagcatcaataagtgcattgtaactgactttgtttggcttgcatgcattcttcctcatttcattaaagacgtccctagccttctcaggttgagcagatctaccataagcattaagtaaggagctgtaggaaactatatcaggtctcaacccgttttgcttcagtaatttaaaagtttccaaggcctctttgtgcgcaccatgtgaggcataagcacccaaaagtgcattgtaggatacaatattaggcttgacacctt

SEQ ID NO: 19949 - DNA, 284 bp, Setaria italica
  Peptide Sequence Number=SeqID_85923
ctttcctgtcgtcgtcggcgagcaggacggtggccgacctcgtggccgccgtgcaggtgccagggctggacgaggacgagggccgccgggtctgcctcgcgtctctcccgatgtgcagcgcccacggcttggcgctcatcgccctggggctccccgctgccggagtgaccacggtgctaccccatccgggggcggcaagcagcagcttatgggaggccgtagccacgcacgccgcgacggacgtcgtggcggcgcctgaggctctcgccggcggtcccatgcca

SEQ ID NO: 19950 - DNA, 431 bp, Setaria italica
  Peptide Sequence Number=SeqID_85924
ctccagactgaaaccgtttgtcatattaatgtgatccatcagtcttccaggagttgccaccaatatatcaactttagtttgcggttccattttgacatattcttcatcgatagttgggtaaagctcttgtttgggcttcctgacaagattggaaacttcatctgctatagacgattgaccaactgctgaacctactgacaagcccaccacaggagcaatagcatcaaaaacctctttaacctgcaaggctaaatcccgtgtaggaagcacaatcagtgcacgcaagcaccttactttccgtgtagagagcatttgcacaataggtagggcataagcaagagtttttccagatccagttggagagttaatacagacatccctctcaaaagcaccaggaccaaccgtttccacccaagctgcttcttgaaacg

SEQ ID NO: 19951 - DNA, 346 bp, Setaria italica
  Peptide Sequence Number=SeqID_85925
ataaacaaaacaaatacatcctcgcgaccatacaatacagccagcctacatccctcccgtacccaatacgaaaaggagaagaaacaaatggtatcaagagcaagcaacaactgaatgctggaacacacatacgtacacaccaagaagggcaagaaggtgatggggatgggcggatagaagtatagagcacaacactggcacacgttgctgttgtggttacatgtacagcagcagcttaacctccaaaccccccattggaagccttgcaagcttgcttgttactcatttgacccaccctcccggtaggccacagtttctctctctagacacataaggaggaggcgaa

SEQ ID NO: 19952 - DNA, 387 bp, Setaria italica
  Peptide Sequence Number=SeqID_85926
tatatcagtatcagtctcctagaagaatttgtaatcttgatcctactgacactagttcatttgtacaggaaatcgtgctgctgagtcagctgtcacatccaaacattgtgcagtactatggcagtgatctgtctaatgagacactctcagtctatctcgagtatgtttctgggggctctatccataagttgcttcaagaatacggcccatttgggaggcagttcttcggaattacacagcacaaattctttctggccttgcatacttgcatgggcggaatacagtgcatagggatattaaaagggggcaaacatacttgtcgatcctaatggtgatatcaagcttgccgattttggatgccaagcatatatcagcgtacacatctat

SEQ ID NO: 19953 - DNA, 480 bp, Setaria italica
  Peptide Sequence Number=SeqID_85927
atggaagatatgcatgaatagatataagtaaactgtaaacatgaacaccatttattacaatctgttatattgaccatttttcaaattttaatgtgtccatgatttcttacaaatatattctttttcaggtgcaaacaagcattgccatgtcatcatacagaagcttatctcctttaagagacataagaaacctgccagcaccaacatcccccatcccttcgacagcaaatcgcaggattgcagcaatgtatgttctccttctgtctgagttatcagaaattacatctcttccattctctaaaagatactgtttcgtgcagcaacccatccaatgtgcggatgaacatgtccctgcccgtctctccttgctctagcccgctacggcagtacaggcagtccaaccgaagttgcttgccatcgcctcctcacccagcctattcagctggagcagccaactacagtcctatcaacaatgcgctc

SEQ ID NO: 19954 - DNA, 383 bp, Setaria italica
  Peptide Sequence Number=SeqID_85928
ctgaactaacaatgatcctctgtgattacatattatgttactacaatgctgataagctatatagttaatgccttgagattaagcattgagactacagtcatattaatctgtgttcttcatactgaaatgcagtctaatgagacactctcagtctatctcgagtatgtttctgggggctctatccataagttgcttcaagaatacggcccatttggggaggcagttcttcggaattacacagcacaaattctttctggccttgcatacttgcatgggcggaatacagtgcataggtatttgccagtcatttacatcattaacccctaagatgcagtagtcatttcatctttcatgaaactgcatatcactcttacttatccatg

SEQ ID NO: 19955 - DNA, 1971 bp, Setaria italica
  misc_feature (1941)..(1971): n is a, c, g, or t
  Peptide Sequence Number=SeqID_85929
aacaaggtgctactatttgctcattagtccaatatatgtattacagctgaaatttgttttttctatgtctgatttgacaggttatcagaaacaagcagcactcttccgggcagagcagtagcaaatgaatctcggaaacagagccatgtgttaacagaagggcgtattttcacaaataatcaggctttggagcatccccggttgtctgaaacctctgtttctccgaggaaagaatttcaccttcaaaatttggatcttgatcgaactacgtactgccgtggtcggaaatcaacagaaattgtgttcagtacacaagtgccaagctctccccctagctcaagagggcatcactattcaacctcccctgtgccatcaagaacatttgggcaatcccaagcatctcctactgcatggcaggatgattcgcgaagctcaagctcacctcaacctcttcctcttcctccaggctccccatgcttgccttcctgttctctacagtggaagaaggggaagttgctaggtagtggaacgtttgggcaagtatatctaggattcaacagtgaaggtggccaaatgtgtgcaattaaagaggttaaggtcatttctgatgattctaactcaaaagagtgtctcaggcagctgaatcaggaaatcgtgctgctgagtcagctgtcacatccaaacattgtgcagtactatggcagtgatctgtctaatgagacactctcagtctatctcgagtatgtttctgggggctctatccataagttgcttcaagaatacggcccatttggggaggcagttcttcggaattacacagcacaaattctttctggccttgcatacttgcatgggcggaatacagtgcatagggatattaaaggggcaaacatacttgtcgatcctaatggtgatatcaagcttgccgattttggtatggccaagcatatatcagcgtacacatctatcaaatccttcaaagggagcccttactggatggcaccagaggttattatgaatagtaatggctacagcctttcagtagatatttggagccttggctgcaccattcttgagatggcaacagccaaacctccttggagtcagtatgaaggggtggctgcaatatttaaaattgggaacagcaaagacatacctgatatcccagatcatctttcttctgaggcgaaaagctttctgaaactctgtttgcaacgtgatcctgctgcccgccctacagctgctcagctgatggatcatccttttgtcaaggaccatgctacacctaggagttccaggtctggcatgacaagagatatgttttctacttcaaccgatggaaaaaacagcacggtgcaaacaagcattgccatgtcatcatacagaagcttatctcctttaagagacataagaaacctgccagcaccaacatcccccatcccttcgacagcaaatcgcaggattgcagcaatcaacccatccaatgtgcggatgaacatgtccctgcccgtctctccttgctctagcccgctacggcagtacaggcagtccaaccgaagttgcttgccatcgcctcctcacccagcctattcagctggagcagccaactacagtcctatcaacaatgcgctctatccaatgcgaccaagcagcggtctcacggacccatggctcgaaatctctccactgaatacacaaacttttgattctccaagaagattgtagaggttccaaaaaaggaagcaatactttgtatacacacaggaaggaaaaaagtgttccataaattatgttgttattagaagaacaaaggaactcccccccttttttgttttgccctttctgtatgtatcttccacccaggatgcagtcgcatcgcctttgtacaaattcagagaagaggtctagtgaaaaaagtagcaattcagatcgcacctgttnnnnnnnnnnnnnnnnnnnnnnnnnnnnnnn

SEQ ID NO: 19956 - DNA, 450 bp, Setaria italica
  Peptide Sequence Number=SeqID_85930
gaatgtgtgaattagtttgttctttaaatctttttcttgctgatgcacagtttggttcattctgtaggataatctctctagaggaaacatgggagcagtaaaggttctgcaggagttatttccgcaccctgggagactacaattcatctttgctgatctgggggaccagaaatctgtatcctcacttatgcttccaaagctgctttgcttgtgcttcttatgattatggagttacatccaaagtcttgtttttcacttaactggctcccaggtcaacaagatatttgctgaaaatgcatttgatgctgtgatgcactttgcagctgttgcttatgtgggtgagagcacactggaaccccttaggtactatcacaatattacgtcaaacaccttaactgatcttggaggctatggcatctcatggagtcaagacccttatttactccagta

SEQ ID NO: 19957 - DNA, 582 bp, Setaria italica
  Peptide Sequence Number=SeqID_85931
aaaagctagaaaataggcagaggacatcatattagatttctcgaagtcaaggagctgacatggctgtcatgattttaagatattacaatgttattggatctgacccagagggaagattaggtgaagctcctaggccagaactacgagagcatggtcggatatctggggcatgctttgatgcagcattgggaatcattccagggttaaaggttaaaggaagagattatcctacagctgatggaacttgcataagagactacattgatgtcacggatctagtggatgctcatgtgaaagcactcaacaaggccgaacctagaaaagttggcatttacaatgttggaaccggaagaggccgttcggttaatgagtttgtggatgcctgcaagaaggccactggggttgacatcaaaattgagtacctcagcagaaggccaggagactatgcagaagtatacagcgacccaacaaagatcaacaaggagctcaactggacagctcagtatacggacctcaaggagagcctgtcagtagcatggaggtggcaaaagtcgcatccacacggctacgggacaaactaaa

SEQ ID NO: 19958 - DNA, 732 bp, Setaria italica
  Peptide Sequence Number=SeqID_85932
aagtaaggtaccgtttacggtttaaattagtaagttttagttaggtaattagtaccttagtactactagtggatgctcatgtgaaagcactcgacaaggccgaacctagaaaagttggcatttacaatgttggaaccggaagaggccgttcggttaatgagtttgtggatgcctgcaagaaggccactggggttgacatcaaaattgagtacctcagcagaaggccaggagactatgcagaagtatacagcgacccaacaaagatcaacaaggagctcaactggacagctcagtatacggacctcaaggagagcctgtcagtagcatggaggtggcaaaagtcgcatccacacggctacgggacaaactaaatatagccaactgatcaataatttcactgaatcgtcgatacgtattgattctttagttagtgatataacatcttgctgtgatactcctctcaaaatcactcgctgtattcttctctccctcattcttttcattttcaaaggtttgttggttttttgggtagccagacaaacagtgatttggatatgcttgaaatcctggaagcattcctgtaagagcaaatttcattgtttctgacacaaagtgttgattaaaaaatgtacatttcttcagccagtccgagctgcaaggctttttgactgaattgagttacggaataactgagctgtcgtgattgctaaaaatgtgctatgtggtttttgt

SEQ ID NO: 19959 - DNA, 1067 bp, Setaria italica
  Peptide Sequence Number=SeqID_85933
atgatcccgttaaacaggaggtcaagccttcctagggctgggatggagtacttcgatgcaaggcggaagcctcataatgttgcgaaaatcattgcagccctggtcctcacaacactatgtatatttgttctgaagcaatctcctggttttggtggcaatagtgtgttttctcgccatgaacctggggttattcacgtcttagtaacaggaggagctggttatattgggtcacatgcctctttaaggctcttaaaggataactatcgagttaccattgtggataatctctctagaggaaacatgggagcagtaaaggttctgcaggagttatttccgcaccctgggagactacaattcatctttgctgatctgggggaccagaaatctgtcaacaagatatttgctgaaaatgcatttgatgctgtgatgcactttgcagctgttgcttatgtgggtgagagcacactggaaccccttaggtactatcacaatattacgtcaaacaccttactgatcttggaggctatggcatctcatggagtcaagacccttatttactccagtacatgtgctacatacggagaaccggagaagatgcctattacagaagccacaccccagttccctatcaacccatatggaaaagctaagaaaatggcagaggacatcatattagatttctcgaagtcaaagggagctgacatggctgtcatgattttaagatatttcaatgttattggatctgacccagagggaagattaggtgaagctcctaggccagaactacgagagcatggtcggatatctggggcatgctttgatgcagcattgggaatcattccagggttaaaggttaaaggaagagattatcctacagctgatggaacttgcataagagactacattgatgtcacggatctagtggatgctcatgtgaaagcactcaacaaggccgaacctagaaaagttggcatttacaatgttggaaccggaagaaggaccgttacggttaaataagaaagtttaaagtaaaaggaaaaataaaaagaaaaacctaaaaagaaaaa

SEQ ID NO: 19960 - DNA, 303 bp, Setaria italica
  Peptide Sequence Number=SeqID_85934
gcgcggcgaggccccggcacaactcatctccaccgccctcctccccagccgcaggcgctcttccaccgagagcacgccgattcctcgcgagttgaccccggaggaggcgggcaatgggcagcgacgcggcggagaagttcaggttctgcattgacaggggcggcacgttcaccgacatctacgccgaggtacccgggagatcagagggctatgtcatgaagcttctctccgtcgacccgtccaactacgacgacgcgcccatcgaagggatcaggaggatcctggaggagttcaccggggaga

SEQ ID NO: 19961 - DNA, 596 bp, Setaria italica
  misc_feature (4)..(4): n is a, c, g, or t
  misc_feature (532)..(596): n is a, c, g, or t
  Peptide Sequence Number=SeqID_85935
cggngcgccgagaaccccaccgcggccgctgacatcgactgcggcgccgcgcatgggttcagccccgggggcgcggccgcgtcgtgcgacaccgttgttgccagccccagccctgccgcggcggaccaccatcccgacgacgcctccgccgtggccgcgccgtacggcggggactacgacgacgacgaggaggacgaggacggcttcgggtcgtcggagctgctggagcacaactacgcggtgttctcgccgccgacgctgctctacgaccaccacccgcacagcaagttcccattctgctaacggcagcagcgaggtccgtgcctttgaacttttactacacaatactggaatgaacccgtaggtgaaaattggtagcataagtcatgtgtgttgggtgtagttggtggtgcatgtgcaccttatctatctatgtagtaactatttattcctaaattatccttgcttgtctctgtatgtaccccaaactgctatatacgtgtagttaatgagaaagggatcatttgggccnnnnnnnnnnnnnnnnnnnnnnnnnnnnnnnnnnnnnnnnnnnnnnnnnnnnnnnnnnnnnnnnn

SEQ ID NO: 19962 - DNA, 726 bp, Setaria italica
  Peptide Sequence Number=SeqID_85936
aaatggtaataataatgtttaaaagaattatgtaggtaatgatgaaggattatgagatgaaaaataattttttatttattgatatgagaatttaatgttaatatatatccatacatcttaattatatctatttatttgtgattcttaccataaatgtaatggctaacttaaagtttaatttttttaatttgatgttaatattcatatatgctctaaaaattgtgactattttttgaattccgctatttgaacttaccgtccgctttagcatttgtcgtcaatatatctatgggctcacctgaagtttggacagtcctatataaagggctgtacaccgagatgtgtcagacatggagactacggtgcaggacggcgtggtctacgtagaggataagaactagtcaagtattaggaaattactcgtagcaattagaggaggactcactagtcgaatcggactaatattcttgtaaacaatcgacctgtaaccttgcccctagcaatataagacgaggcagggaccccctctaaacaagttcaatccaatccaatacaataaacacgtaggacgtagggtattatgctattcagcggcctaaatctgtctaaatcgtgtattcgagttcaccttcgagtttctaatctcagcgagtcccacacataaaacactacctcgggcacccccttggtaggttctcgggtctaaacaccgacagctggcgcgcc

SEQ ID NO: 19963 - DNA, 602 bp, Setaria italica
  Peptide Sequence Number=SeqID_85937
ttgtagtggacgagctccggctcagggaaccctccagcctgcacatcaaacagccacatccattgctgaatcgctgaactctgaacatcactatttcttgttcttggcgagatctctcattacctttgcgcaggcccgtgcgaggccgtcgaaggtgacgtacttggccccggagatgttgaagatctgctggctcgccttggggttgccgagcaccaggttgaacgccgtggccaggtccttgacatggccgagctgggtgatctggttgccggcgccggggatgggggatggggcggccttccttgaggcggtggaagaaccactcctcgacggggttgtagttgagcgggccgtagatgtacacgggcctgatcgacgtccagttcacgccgcgggaggtcagcaggctctccgtctccagcttccccttgtgacggctcttggggtccaccgcatcgctctcgcagtgtggaagaaggtcggatttcaggtacactccggctgatgagcagtagatgtacctggaagttgattttttggaatttgggacgatgagagatgcattggggggtactgtatgtagcttgtgaagtgtcaga

SEQ ID NO: 19964 - DNA, 1622 bp, Setaria italica
  Peptide Sequence Number=SeqID_85938
cgatgacgtggcatgttttgaattattggagaaagtttttaacgatatgctatgagctcatatattttagggggaaaagtttttagcataaccctcaataactcattttctaagagagctcttggagttgctttgcagagggttttttttgcacaacaaattacatctggaatccatttacaggtgaaacaacctacaagattcccaaacagtcgatgcacacagatccggaacctaaatcaaaattgagataattttccatatgtatcccccacatttacagccagcaaccgtattttcgccctaccagctgcacgtaccggcccttagccgtgtcacgtgttacagccatcgatcccaaagatcccgagaagctcagacggtggcaagcttcttgccgaggatcatgtcgtccgtggtgaagtcggcggccttccggaacgtgccgcggccgaagtcgaggttgtacgagtcggtgagcccctcgacgaggtcgaactccggcgtccacccaagctccctggtcgccttctcgatcgacgcgaagaagtgctggtccctgaacgggaaggccttcttcttgccgaagtcgaagtccttggggttgtagtggacgagctccggctcagggaaccctccagcctttgcgcaggcccgtgcgaggccgtcgaaggtgacgtacttggccccggagatgttgaagatctgctggctcgccttggggttgccgagcaccaggttgaacgccgtggccaggtccttgacatggccgagctgggtgatctggttgccggcgccggggatggggatggggcgggccttccttgaggcggtggaagaaccactcctcgacggggttgtagttgagcgggccgtagatgtacacgggcctgatcgacgtccagttcacgccgcgggaggtcagcaggctctccgtctccagcttccccttgtgacggctcttggggtccaccgcatcgctctcgcagtgtggaagaaggtcggatttcaggtacactccggctgatgagcagtagatgtactgttccaggttgggcaaggcttcgattatgggctcaacttcgacagcctcgcgtccgttgatgtcgtaaacgacattgtatcccttagcagcaaggcttgtcttgacgaattcgaagtccatcctgtcacctttcaagtgctgaatcttggaggagaactctgcgtactctgcatcggactctcctggcagctgctgggtgatgggtgcctttcctctagtgaacaatgtaacctgatggccctccttgacaaggagcctggacaggaagacaccaatgaacctggttccccccatgacaagaatgttcttggagtccgcagccgccgagacctgaatcctcgcccctctcggctgccatgacctcctcctcttctgcgttgagacggagacggccgcgccgctgaagtcggagataggagatgggaggaggaagctgctcttcagggacgccgtggccgccatgtcgctcttcctccgctctactataaaacgaagaagaaaacaagagagagaaggattgatggctgtgtatcgcttgtctggatcttgtggttcagtctgtgctaatggaacaagg

SEQ ID NO: 19965 - DNA, 553 bp, Setaria italica
  Peptide Sequence Number=SeqID_85939
gaagagatgaccgacggtggtggagcaggaagcggaggcgcaaccgagcaagggggcaggcagtggccgtagttggaacttcagcggaggacgagacgtcggcttcggcatagtgcatgtcagggaagacgaccgtagtgcgaagtagtggagatggatgccggcaccggagcagcgctcgacgtgacacggagacgtcagcaggcgacaagggcagcttctttgcgcctggctgcggagcagtggagcagtccaccgcttactagaggcggggtcggcagcggcgccagcgcttcgtggtcctcgtcgactcctctggatggcctcgtagctctagcctagcggcgatggtgcaggctgcagcattcggttgggccagtgggcctccaagcgagcttgctgggagggagcggacgacgccagttcacatcgctcctcggcgctgaatcagccggcggcagcagctgcgtagcgcttcctgatctcccctctcacgcaaggagacgagctgctgatgggattaatggagagagcgtctggaggagagctccaa

SEQ ID NO: 19966 - DNA, 686 bp, Setaria italica
  Peptide Sequence Number=SeqID_85940
tttgatgatccgatgctagattcacttcctttgaggtaatgtttttcttgagttgttgctaaaatctccagagtgtcttgtagcggaactggccacaagagaacacgacgctatggagggttcagggctactaccgaatctccgactcagtcgcactagtaggtcgatacacatgcgtccagaaacaccatcctttgctctcacaggtggagaactgtctggagaatcactagaaccagctaaaccagaagtaatatacggagcactgcataatcgatcgcgcaccaatggagagctttcaagtgggagagattgtgaattattgaaaagaccaacattgtggttagcgtagctggtgaaggctgtggaagaaacaatctccacatcgtcatccaatgctgccggtttctctaaatcgatgagacggtggtgagtggacctcccctgcgcactacaagggttaggttttcttagaatggaacccttgacatccaaattctcccatgtgatctcgtcgcggcatcggggggcttggttgcctaggtcatgacaatggcggaaaacacctggattgtgtgtggcacccaaatccacctgcaacggcaaaacctcatctgctggcagagcatcggaggagtggttccggaagggcggcacatccatgagattgttcctagaccaatacg

SEQ ID NO: 19967 - DNA, 738 bp, Setaria italica
  Peptide Sequence Number=SeqID_85941
cccgcgtcgccagcgtcggcggccggtgcagcacgttccagtgcctcctggcgcacgcgtggaagaaggtcacggcggcgcgggacctgccgccggaggagcccacgcagatacgtgtcgccgtcaactgcaggggccgggcccagccgccggtgcccatggagtacttcggcaacatggttctttgggcgttcccgaggatgcaggcccgggaggtgctgtcgtcgagctatgccgccgtggccggcgccatccgcgacgccgtggcgcgcgtcgacgccgagtacatccagtccttcgtcgacttcggggaggtggcggagcgcgccggggaggagctggcgtcaacagcggcgaggcctgggacggccttctgccctgacctggaggtggacagctggctggggttcaggttccacgacctcgacttcgggcacgggccgccgtgcgcgttcctgccgccggacctgcccatcgaggggctcatgatcttcgtgccctcgtgctcggccaagggcggcgtcgacctcttcgtggcgctcaacgacgagcacgttgatgccttcaagcagatctgctactccatggactgatcacctctactattacagtatacttgagtgcgacgattatgcatggtatatgttcaataaccaaaatgtttttgcaataatactgcaaggatgtctgtgtgactaaatccgcaactatatgtacatgtacacgtttgacgtcagt

SEQ ID NO: 19968 - DNA, 582 bp, Setaria italica
  Peptide Sequence Number=SeqID_85942
tttttttttttttttttttgaaaaacgctaatacttcattcgtactagcttattgagtactgataaataataacacaacatacatttatcagagatgtggcacattttcaaagcaacttatctgatgctgactagtgctccacattccactgataagacagaactaatccaaacacggctacgatgcacgaagattagaaccctagcatgcgtaatggtacaatgatgcacgaaaggcatctaataactaaaaataaaaccctaaacaccgccgactggtcgagcatcaacaatggacgcaagctgaggatgaccgccaggtgcatatcccgaaagaataaagatcagatccatagctattagcattttccggtgttattcacgcaatccaagcgcacttctcctttcttgatggagatgacagccacacagtggtggcaactgatacagaacccacaagaacggaaggatgaaaagaatcaagtacgaagagacccagagagagcatcccggctgagttgggtctttgtgttttcagagacaagttggcaaactgggcatcgaaggtctctgctattacta

SEQ ID NO: 19969 - DNA, 1494 bp, Setaria italica
  Peptide Sequence Number=SeqID_85943
ggttgtgcaattgacaggattttcataggagactcgcaacatcaaggacaacctgaaatctgaaaaacgctaatacttcattcgtactagcttattgagtactgataaataataacacaacatacatttatcagagatgtggcacattttcaaagcaacttatctgatgctgactagtgctccacattccactgataagacagaactaatccaaacacggctacgatgcacgaagattagaaccctagcatgcgtaatggtacaatgatgcacgaaaggcatctaataaactaaaaataaaaccctaaacaccgccgactggtcgagcatcaacaatggacgctagtttagtacctaaccctagtagtaggactagtacaatactaccaatcaataaagatcagatccatagctattagcattttccggtgttattcacgcaatccaagcgcacttctcctttcttgatggagatgacagccacacagtggtggcaactgatacagaacccacaagaacggaaggatgaaaagaatcaagtacgaagagacccagagagagcatcccggcctgagttggggtctttgtgtttcagagacaagttggcaaactgggcatcaaggtctctgctattactacgaacaaggacaggagactgttgctgttgctgctgctgctgatatagtgatctgagacgaccaatttcccgctcaaacatctcttgttgaaagcgtttaattagttgctcctgtgctagactctccaatctctgcttcaaagctttattttccaggtctaggataatattctgctgggtaagaaactccatttcagcagacacatctaccccttctgactgtaatgcctgaactcgaccctccagctctgcaatatactgaagcttgcggacgcgggacctctgagcatattgctgtttagcccgcttgttgtccgcctctgactgtgcatgcttcagcagcacaccttccttcgccccaaccttttgatcatgaccagcatcaccaggagttctcttgtccatgccatggtcatgatccctcaacgcgttaggtggcccatgatgccccccaaccttgtctttcgccggcattggcagcccgccgccatgcctgaaaccagccaaatgtggcatgccttgctcccatggccggccatgtgccctcccaaacgaacctgacttggcatagtactcctgaacaccaccccatggcgcaggctgcccgcctcctccccccatcccctcgaaaccattagagtaagcaccagcgctggcagctcctgtgtcaaacagcgcgaacgagtcgcttgacgacctgcggtgcccggcccggccgtgctgccgcgccgcgggcgtctcgggctcgttgagcaggtcgtcgagccacgacggcggctgctcctcgatgaagctctcggacgacgtgcgctggtggtgcccgtggccgtgccggtggtgcgcggcggcggcgccct

SEQ ID NO: 19970 - DNA, 1433 bp, Setaria italica
  misc_feature (1402)..(1433): n is a, c, g, or t
  Peptide Sequence Number=SeqID_85944
cgttttcttcttgttggttttgcaatccttggagggctttcttggttcttgagtttgcgatctcctcctgctctgtctctccgatccacaatcatccggtgcctaggaaattgcggctctttcttgcaccagtttgttttttctgttgatcttctgcgtttctgcatcttcgttacaatttctctaaggggaaaaagtttctgttcatcgaggaacaggaaacacaacactggtttcatcggatagagtaaggaaataggaaagtacaagcaaatccttggaattggcatcatttgcttgttccttgccctaattcaaagaatccaatgggggatgtgtcgttgaatcgacccatgaaggccgagccagctgccggtggcactgccaagggaaatcgaattctgaacatgatgtcggcagggtggacagatgagaggcacatgttgtatataagctctatggaggcttctttcgttgatcaactatacaatcacagacaccgtccgcataatacaaatggcaatggcttcaaggttctccgcaggggtgtgtgggagtacatcaagtacgagaagactaatgctcgtgcacaaagtgggacaaaatgctgtgtgcctgcaagtccctggatccggcatttcaggccacgtgattgcggtagcaatgcacaaagtgatgggctggaggcttcagtgggcgatcatgaatcaggtactcagacaaacggggagagactttcagtgtctcgtggaaggaaatgggaagcttgcaaaggggaaaaccagcttcttgatgaaagtacagaggtctctgatcaaaatttcgctgacgaggaggcagaagttgaagcggaatcaagtaaagcacgcaaggaaaggagattaagcagcacatcccactaccgtgatgaatgatcaagtaaattcgcaggaccagttagcttagtctgttgcaagaattgagatgactagctatcacaaaaggaggtgataagatgattggggtgggtccctcaaaatttctctgtggccacaaaagctgttggaagccaagatgatccaaaggaactttgtaagagtagttattagtaattttgtgacctatgtactggagcagttagtagcggcattttggtggattaagttcttgttatgtatatcggtgtatttttgcagtcttcatcagtagtgctgtttagtgcctcactcttctcgtcagaaggataataataggctagctctctacttggtgtatatatgtattggctgatctgatgaatgtaatgttttttgctgcagctttgtggggcagctactgttaaatttgcaatatgagtgagatgtacatgtttgccacaaaatgagaatcattccagatttccaattacccaaaacttaaaaannnnnnnnnnnnnnnnnnnnnnnnnnnnnnnn

SEQ ID NO: 19971 - DNA, 276 bp, Setaria italica
  Peptide Sequence Number=SeqID_85945
cgtgtaattgtgtcgaaatattccttttgctgaggtttgcgataacaaggtccttctgttttgtgactaaatcaggcatgccatcgtgacctgatttgaaatattggagtttatttttagcgttcgagctgatatatttttagaggaatgtttttagcaaagctcttcatacgtcgttttgacgaattttttgggaacttgagttgctcctatcgcttcagcgaaccccttttccccagtatctcctggcctacgacggcgccgccacctcccgcg

SEQ ID NO: 19972 - DNA, 242 bp, Setaria italica
  Peptide Sequence Number=SeqID_85946
tgcgtgagtgcgtgtgcaggagttactacaggtgcacgcacaggtcagaccaaggctgcaacgccaagcggcaggtgcaggtctgcgaggccgacccctccaagttcgtcgtcacctactacggcgaccacacctgcagggacccctccacgatcccgctcgtcgtccccgcggccggcgcggcgccagactgcgccaacaacctcatcaacttcggcaccagcggcaccaacaacaacgca

SEQ ID NO: 19973 - DNA, 348 bp, Setaria italica
  Peptide Sequence Number=SeqID_85947
catcaggatgcccacgaatttttgaatttcctactgaatgaaattgttgatatcctggaaaaagagactaggtctgcgaaggtttctcccgagaccacatctcctgaaaaggtctcaaatggggcagctgtgaatggagtcagaaaagagccactggttacatgggtacataagaattttcagttaccctttctctttgcagggtactttgaccaatgaaaccagatgcctaatgtgtgagacagtcactgcaaaggatgagactattttttgacttgagtgttgacattgaacagaatagttcactcacaagctgcctgaagaatttctttccactgagactttaaa

SEQ ID NO: 19974 - DNA, 376 bp, Setaria italica
  misc_feature (297)..(376): n is a, c, g, or t
  Peptide Sequence Number=SeqID_85948
acatcttgttctacgagcgcgttggtgggaattgtgacgagaaggccgaccctcctgagggtagcgtgtgaccttaggcattggatcttgtgtggtttagtgtacatatgatttagcaaactttaaattgataaagagtgtgaagctgctgtccattggtgtacaaaagtaaagttttttttcccctgagcacgaaaaatgagaggctagtttggacttcggagttcagattgaagttgttataaaggagcaatccatttgattttgtgttgaagggaaactaactacaacaactannnnnnnnnnnnnnnnnnnnnnnnnnnnnnnnnnnnnnnnnnnnnnnnnnnnnnnnnnnnnnnnnnnnnnnnnnnnnnnn

SEQ ID NO: 19975 - DNA, 271 bp, Setaria italica
  Peptide Sequence Number=SeqID_85949
atggagtcagaaaagagccactggttacatgggtacataagaattttcagggtactttgaccaatgaaaccagatgcctaatgtgtgagacagtcactgcaaaggatgagacattttttgactaatgaaaccagatgcctaatgtgtgagacagtcactgcaaaggatgagacattttttgacttgagtgttgacattgaacagaatagttcactcacaagctgcctgaagaatttcttgtcatccgcatttaaagtctcagtggaaaagg

SEQ ID NO: 19976 - DNA, 726 bp, Setaria italica
  Peptide Sequence Number=SeqID_85950
taaggtcttccctatattatttggttgtattcctaccttaaagtcgtctttcaagttacattgagcagcttggccgatataagaagctttcataccgggttgtattccccatggagctgaagctcagtaatacatccgatgacgtagacaccgagtactccctcttcgctgtcgtggtccacgtcggaagtggcccaaatcatgggcattatgtgagcctcgtcaaaagccacaaccactggttgttctttgacgacgaaaacgtggagatggtcgaggagcagaccctgcaaacattcttcggttcctcacatgaatactcgggcaacacagaccatgggtatatcttgttttacgagggccttggtgggaagagttaggttgttttccttggccttccctgttcctttttcaccctctctttggagcatgcaagttcactcttgtacctacacagctgctatttcatacctccatggaaaattgccaatcgaagaggttgtatgacatgaggacgccagattttgggtggtttcagtgtacaggggataatggaatcttgctcccagtgatgcataaggtgtaaatcgttttaagtgcgcctgaccagtttcttctcaggactaacatcttttttgttaaagaatggaacattgctattgggcacactgtacattaattctagttcaaatcttggatgcatttcccagttctgctgactttggg

SEQ ID NO: 19977 - DNA, 491 bp, Setaria italica
  Peptide Sequence Number=SeqID_85951
gtcagacgcctcctcctgacctcctccgccgccttctgccgccgcgacgcgcgttggccgagccgccggaaccctagcatggcgaagacggcgcgatcgcccacggcggaggcttccccgccggcggccgcggacaagcaccgctccggctccgctgccgggtcggggctccggtccctcgccagcgccgcctccgggtggtgggaccggtgggcggtcatgggctccggcctctccaagctcgagcgggccttcggcgaccagttccccgagggcgagcgctacttcggcctcgagaacttcggcaacacctgctactgcaacagtgtccttcaggcactctatttttgcattccattcagggagcagttactggaatattatgcaaataacaaaaatccaggagacgcagaggaaaatcttttgacttgtttggctgacctctttatgcagataagccaagcaaagaaaaaaactggtgttattgctcc

SEQ ID NO: 19978 - DNA, 1114 bp, Setaria italica
  Peptide Sequence Number=SeqID_85952
gagaaatcccaacgaaaggagcagctgctccagcgacagcagcagccgccgtagcgattcctttcctcttcctcctcgtcgtcgagttctcccgcccggatcgaaacccctagggtttcgcatcggcctcccaccgcccacctcctccacctctctccctccgccgcgcgcgcgcgcggggagccaccaaaccctaggacggcaaatccggtgcgatcgcccacggtggaggcctcgtcggcggccgagaggagccgctcagggctcgggtcagggttccggtacctcgccggcgccgcctccgggtggtgggaccggtggatggtcatgggagccagcggctccaagctcgagaaggccctcggcgaccagttcccggaaggcgagcgctacttcggcctcgagaacttcggcaacacctgctactgcaacagtgtccttcaggcactctatttttgcattccattcagggagcagttactggaatactatgccaagagcagaaatgttgaagatgctgaagaaaatttgttgacctgcctagcagatcttttttcacagataagtgcatcaaagaaaaaaactggtgttatcgctccaaaacgtttcattcaaatggttaggaaactgaacgaatattttcgcggttacatgcatcaggatgcccacgaatttttgaatttcctactgaatgaaattgttgatatcctggaaaaagagactaggtctgcgaaggtttctcccgagaccacatctcctgaaaaggtctcaaatggggcagctgtgaatggagtcagaaaagagccactggttacatgggtacataagaattttcagggtactttgaccaatgaaaccagatgcctaatgtgtgagacagtcactgcaaaggatgagacattttttgacttgagtgttgacattgaacagaatagttcactcacaagctgcctgaagaatttcttttccactgagactttaaatgcggatgacaagttcttctgtgataagtgctgcagtttgcaagaagcagagaagactaaaactaaatgtcgatttatttttcatctattaaggaattgagcctagctcggttagaaaaaggtgtgtttac

SEQ ID NO: 19979 - DNA, 1582 bp, Setaria italica
  Peptide Sequence Number=SeqID_85953
acctacaattggaagcaagtaggtttccatgagcatgattgtgacagattggtacttcatgggttttcccatgtgacaagaaacatactgcagagtgcagactgttgttcttcaaatgataatgttttatatcgccgagggccttctcgagcttggagccgctggctcgcatgaccatccaccaggcccaccacccggaggcggcgctacttcggcctcgagaacttcggcaacacctgctactgcaacagtgtccttcaggcactctatttttgcattccattcagggagcagttactggaatattatgcaaataacaaaaatccaggagacgcagaggaaaatcttttgacttgtttggctgacctctttatgcagataagccaagcaaagaaaaaaactggtgttattgctccaaaacgttttgttcagagagtgaagaaacaaaatgagttgtttcgcagctacatgcaccaggatgcacacgagttcttaaattttcttttgaatgaacttgttgatattctggaaaaggagtccagtgctgcgaaggactccccccaatcttcatctcctgaaaaagctccaaatggtccagttcaacctttagccaatggagttaaaaaggagccacccgttaccctggtccataagaattttcagggcatattgaccaatgaaacaagatgcttaagatgcgaaacagtaactgcaagagatgaaacatttcttgatcttagtgttgacattgaacaaaatagttctatcacgagctgcctgaaaaacttctgctctacagagactttaaatgcagaggataaattcttctgtgacaaatgctgcagtttgcaagaagcacaaaagagaatgaagatcaagaaggctccccacatattggtgatccacctaaagcgcttcaagtacattgagcagcttggccgatataagaagctttcataccgggttgtattccccatggagctgaagctcagcagcaaatccgatgacgttgactgcgagtactccctcttcgctgtcgtggtcatgtcggaagtggcccaaatcatggacactacgtagccaagatcaagagtcacgaccactggctgtccttcgatgatgacaatgtagagatgatccctgagtccaccctgcagacgttctacggctcttctcgtgaatattctggcaacacggatcatggctacatcttgttctacgagcgcgttggtgggaattgtgacgagaaggccgaccctcctgagggtagcgtgtgaccttaggcattggatcttgtgtggtttagtgtacatatgatttagcaaactttaaattgataaagagtgtgaagctgctgtccattggtgtacaaaagatccaatgcctaaggtcacacgtaggttgttttccttggccttccctgttcctttttcaccctctctttggagcatgcaagttcactcttgtacctacacagctgctatttcatacctccatggaaaattgccaatcgaagaggttgtatgacatgaggacgccagattttgggtggtttcagtgtacagggataatggaattcttt

SEQ ID NO: 19980 - DNA, 343 bp, Setaria italica
  Peptide Sequence Number=SeqID_85954
tccttgtccgtccttccgtttggtcgagcgcgatggccatgatcgccgccgcctccatcacccacgacagcgggttccacatgaaccccaggaacttgagaatcttgctctccttcttctcctcgagcttgttggggccgaagacgtcgatgcgcgcctgggcctcctccgaggagaggcctttgttggtgcatttcagagtctggaagacctcctcgacggggatgttctccagatcgacggcctcattcttgatctcctcgaggaggagaaggagagcaagattctcaagttcctggggttcatgtggaacccgctgtcgtgggtgatggaggcggcggcg

SEQ ID NO: 19981 - DNA, 560 bp, Setaria italica
  Peptide Sequence Number=SeqID_85955
gttgatgatcttggaaggcgccattattgataggaggtgttggtggaattgtgagtatttgttccttcctgttatttgattaagttctacatattacatggaaagccccatacacacacttgaattcagtttggcaattccactaaacatgaacactgacaatactaatattttaggtaatgtattagactacaactctacattagaataagataattggtaaacgtagtaactttgtgcatgttctgtcaggtttgcattcctatgttctaactaaattgccttatgttatctgtaacctgtaaatgcaggctctgtcactcttccttcttgcagcttactacaagatcctgaacaactccccctttgttgctgttggcgctttacttctttatgttggtgcttaccaggtctcatttggtccaattagttggctaatggtgtctgagatatttccactgcgaacaagagggcgtgggatcagccttgcggtactaacaaatttcggctcaaatgcgttggtgacattcgcgttttcacccttgcaggaattccttggg

SEQ ID NO: 19982 - DNA, 485 bp, Setaria italica
  Peptide Sequence Number=SeqID_85956
taaatttactaggggtaggttaacaattgcgtgtagcactttaccaagccttttgacaccaactttcaacatccacaagcatcaaaatttccatggttccatgctttgttaaaatgggattagtagcaattgaagatcattacagttgcaaaggagaatatgaatatttagctaggggtttgggagagtttatagaccaatactgtcctaaaacatttggtgttatgccactgaaccattatggtgctatgtgccacgcaatgcatggtgccccactttatattgcagagacttctcctccgcaaatacgtggaacattgatatctttgaaggagctgtttattgcgttaggaatactggttgtcgtttgaaaaccacaaactgcaaatgaaggttgctgcaacattatattaatgtgcagtgaggtgttgtctgttgtactatgagaagtgtagctgcacttcaattagtttcgccagtcgact

SEQ ID NO: 19983 - DNA, 1093 bp, Setaria italica
  Peptide Sequence Number=SeqID_85957
tgttttaaaacttgtgatgcttcaacatggagaagtcatagaatgtatgatgatgcagagtaatctaggatctgtttaatatttctgtacagactgatgcttgccatagcaatgcttcttggtgtagagtttcgagaataaacaaataaaaatggggtaatcaggaagcctaaccagattgcagccttgcagtactgatagatacccgttcttgttccctgcattgggcggtctccttttcggctatgacattggcgcaacctctggagcaacaatctctgtacaatctgctgatctcagtggcaccacttggttcaaccggtcatctgtgcaactaggccttgtggcaagtggttcactttatggagctcttggtggctctattctcgcacaccgcattgcagattttctaggaaggagaatagaattggtcaccgcagctgcactatatattcttggtgctttggtcactggatttgcccctaattttgtaggtctaatcataggtcgtatcctttatgggattggtattggtttgagacttctcctccgcaaatacgtggaacattgatatctttgaaggagctgtttattgcgttaggaatactggttgtcgtttgaaaaccacaaactgcaaatgaaggttgctgcaacattatattaatgtgcagtgaggtgttgtctgttgtactatgagaagtgtagctgcacttcaattagtttcgccagtcgacttaagatgatgaatctgtacttatctaacactcactcactatgaggtgatgttctaatactatgcttgtagctaacattttttacctaatgttctcaagtggtactgatcaagtgtagctacatatgttgcttgtctgataaaaaaagtagcaacctgttcatatagaatgtttttgagaatagtcaatattttaggttgtatagatacagctgcaatgaaaccttctcagtgatacattctttgacctaacctaggtcagggttgggcacttcaaatagaactctcatttgatgtgcatgtgtatatataaaaaggtttgatgaatcagcgctagcttcctgcgttaaaaaaaaaaaa

SEQ ID NO: 19984 - DNA, 1998 bp, Setaria italica
  Peptide Sequence Number=SeqID_85958
ggcgcgcgacacctgcacgcattggtgatcacggcggcgggccggggcctggggggcgtcgcagcctggtgcagctgcgactgggagcggccggggcacgtgaggggagccgtccctgcccgcgcggtcggccgctggccacgaccaaccccagttgacgggcatggatccacctccacgacgccgacgtcaccgcgcttctctcgccgccacccttcctggtgcggacccatgcgcagggcgagggcgatgctgggcgtggcgccgccatggagggggatgcggccttctcgtgggcacccgtcatactctgtactgatacatcactgttcggaacctaggttcttgttccctgcattgggcggtctccttttcggctatgacattggtgcaacctctggagcaacaatctctgtacaatctgctgatctcagtggcaccacttggttcaaccggtcatctgtgcaactaggccttgtggcaagtggttcactttatggagctcttggtggctctattctcacacaccgcattgcagattttctaggaaggagaatagaattggtcaccgcagctgcactatatattcttggtgctttggtcactggatttgcccctaattttgtaggtctaatcataggccgtatcctttatgggattggtattggtttggcaatgcatggtgccccactttatattgcagagacttctcctccgcaaatacgtggaacattgatatctttgaaggagctgtttattgtgttaggaatactgttcggatatcttgtaggaagtcttgaaattgacaatgtaggaggatggcggtacatgtttggttttggcgctccgcttgcagctatcatggctattggtatgtggactttaccaccttcaccaaaatggttacttctcagggcagttcaaggaaaggggtctatggaggataataaaaagaaggcaattcaagcccttagaacgttgaggggccgctcaacaagtgaaaaggttttagcagatgatgttgaagataccattgtctctattaaggcagcctatgcaggacaggaaggtgaagggaatatttgggaggtatttgaaggagctagcttgaaggccttcaccattggaggaggtcttgttctgtttcagcagataacaggccagccaagtgttctatattatgcagcttcgatacttcagactgctgggttctcagctgcatcagatgctgccagagtggcaattttgattgggttgttcaagttgctaatgacaggtgttgcggtactgaaagttgatgatcttggaaggcgcccattattgataggaggtgttggtggaattgctctgtcactcttccttcttgcagcttactacaagatcctgaacaactccccctttgttgctgttggcgctttacttctttatgttggtgcttaccaggtctcatttggtccaattagttggctaatggtgtctgagatatttccactgcgaacaagagggcgtgggatcagccttgcggtactaacaaatttcggctcaaatgcgttggtgacattcgcgttttcacccttgcaggaattccttgggccagagaatatatttttcctgtttggggccatagcagtgctctcccttgtgtttgtgatcctcaatgttcccgagacaaaaggactgagcttggaggagattgaatctaagatcctgaagtaaaatggcgtggtcaaggctccacaaaccccggttgttggccagaaagattaatgccgtttacaacatggatgctcactcataggatcagagtgcgtcagtctcagacttagtagcgcagttcacgtctagatgtaaagtttttccttcttgtaattaatatttctggatatgcatttgtagctaccaagtcataaccacgtcccaattgtccattgcatctcatcccatagcagcagtaagtaatcgactaatcgtcgtgttcttgtaagaaaaaaaaaaaaa

SEQ ID NO: 19985 - DNA, 529 bp, Setaria italica
  Peptide Sequence Number=SeqID_85959
caaaactgtcgtgtgaatagagcagcgagaggaaggggccagatctatcgatttctgcagtcggataccaagaccgaagtggtgatcttggcccaccatttggaagtgagcctatgtttgcaaatcaggtggttgagaaagcatccccatggaataaggtaaacaaccatgatgggcacaatgggatgagagctgaattcctcagatggactcgagagttctgtaccttgacttcctaaaggttaattgtaacgttagccaataatgttgccttgtaatttcaaccatacaggttggttgttgtatgtgcgttcattctgtgtaactgtgaatagaggaatgtatccaggcctgctacctggaaattttttgtattggtcgttgacaaatagaggcaggcagtggactgaaacaacttgacattgctcgttggagttaagctgcacatggattaatcgatcctacatcctagtacgcaaacaagttttgtatctaacatcaaagatgactgtatctctatgtgcgttat

SEQ ID NO: 19986 - DNA, 618 bp, Setaria italica
  Peptide Sequence Number=SeqID_85960
tttatacatttcgtttccacgcaaaagaacagcactatcaggagggaataacagtttgagcatctcatctactgatgtaacaatctaatagaagttaccagatatatatattacagttgcgggctgctgttatgtatgtacataagattgtgagcaactgatggaggtctgccctagcgaatgaatatcacgcccctctcacctgtgtgagcctgtggtttggtacaaggttaagtgagtataacagtagaggatgtcacagccaatagtcctttggtatcgttatatttgcaaatcatccagcgatagttcttcaattgagaacatctttaatttagtaatgaactgtagtggatcatcaagactagaagagccaaggatgatttctctcttcagtttgcctgacaacttgtgggcagcacgtaactcagaccgagtagcacccccaatcacaaagataaataagcgttggcccaacttcctgaagtcgcttgatgcatgcttcagcacagagtcacttgaataaccatcatcagagttccgatgtctagcccatgtgccacctattcgcctagatctcattgattgagctggcagcacatctgctcaaactagccc

SEQ ID NO: 19987 - DNA, 715 bp, Setaria italica
  Peptide Sequence Number=SeqID_85961
tgaagcaagctgatcagttcatgaagcacggagtgcgtgcatagttgagtgattggcaaacagcagtagtggctgtgtggtaattagaattaccaaggtgaaaagggtgagcgtgcatgcaggaattagtggaggtgatcctgcatgcacgtatgttagtgtagctagctgcatgagtgtccttggctgagttgtgcggctgagttgcagcatagcatattagcatgtgtgtgtgtgtttgcggtgttaaaatcagtgtaatgtcgtgttgaaatgtggtgaatttagttgtaaaagaggtactggtgtgcagcaccacaaaatagtgtgttcctcatccgtgagccatttcctagtgttgagtgtgtgatcctgggagctagaggctaacagttgatacatgttagtatctcgtaggtgcagctcaaacaacaattaccaagcgtgttcaagcgtgtttcgtaagaaattgattagttcttttgtcccagcatcaccaaacacaagatcttgctcaagctgcccaacgtctttaagatgttgttctttgattatgttattgagctttcctgcaacctgtagaaacatgtggaagagtgtatttgtattatacttacaaaatgccagattatgatttctatatctagtagggattattcaaaatgctaactgatgtgcacatccccccatcccaaaagaatacatcaacatagta

SEQ ID NO: 19988 - DNA, 1426 bp, Setaria italica
  Peptide Sequence Number=SeqID_85962
agttactaagcctttttaagaatttatacatttcgtttccacgcaaaagaacagcactatcaggagggaataacagtttgagcatctcatctactgatgtaacaatctaatagaagttaccagatatatatattacagttgcgggctgctgttatgtatgtacataagattgtgagcaactgatggaggtctgccctagcgaatgaatatcacgcccctctcacctgtgtgagcagtaatgaactgtagtggatcatcaagactagaagagccaaggatgatttctctcttcagtttgcctgacaacttgtgggcagcacgtaactcagaccgagtagcacccccaatcacaaagataaataagcgttggcccaacttcctgaagtcgcttgatgcatgcttcagcacagagtcacttgaataaccatcatcagagttccgatgtctagcccatgtgccacctattcgcctagatctcattgattgagctggctgattagctgggctagtttgagcagatgtgctgcctggaattccacggaaactaggactagggtcattcatgcagtggtactcatctttcggtagctcacccttactaagtttttcgatcaagttctccaggatgggataaaatcgggatagcatccatgttgactcttccccaatccgctcctttctgataccaggcttttccttatgaagatcaaatttcaatgtaaagctgccaactgaagactttttagtatcaggtccatgtaagcaatgcatattatttaccgcaataatgtcatcagcagataatcctgcaagctgcatcagctttgcacctttctcacttccaaacttctttgggttgattgaagcataaatcattagcaaacgcaacttattttcacgatttacatccaagcgtgttcgtaagaaattgattagttcttttgtcccagcatcaccaaacacaagatcttgctcaagctgcccaacgtctttaagatgttgttctttgattatgttattgagctttcctgcaacctcaacatgaagagtgagcttgtcaatttcatcactgtactgtggaagagcttgaaccattttctgcaactgtttggtagataactctacaccagatctcgtctgctgtagttgagctgcttcgttctttgatataaacttggtcatcttttcatgcaacctttcattaacatcagctatatgcgcatgccgaagctcaagccatactggatcatggtcctccaacaaaacctccttttgctcatttgctgaatcattcttacttggaacctcttgcacatacttgttgccatccatacacagtagatcatggcacatagcatcataggtccactcatgaataattggtgcaatctgatctatcgatcggtctacaatgacaacactacga

SEQ ID NO: 19989 - DNA, 535 bp, Setaria italica
  Peptide Sequence Number=SeqID_85963
tgtggaccaggaggcatgtcgcttccgaagctactgattgatcctccttccatttcatccacttgactactttttaggagagaattaactgccaaatgatggatcttaagctcaacagaaactcttctatacgcaccaggataagtaagtgcaggctgaatgacttcatcagcaaaacatgtgtctccttcataagtgcctcctagatcgggaattccatcatcagatatccatagtacctgctgttgatcacgcaatgcccttgaaaagaacacatcagcggtaaaaagaagccaatctagttcaaaattacccaatggcacatgagcatatctagcgagtgaaatccgttcattaaaccattgggctgatgcagcacaacgctgcatgcttgttcgaccagctgttgcttgccaaccgagagcctgatagttgttgtcccttgcattgctaggaatggttacacatgggaaatcgtcaagtgcccgtacagctgcctttatagcttggagtttagggcactcttattgtacta

SEQ ID NO: 19990 - DNA, 354 bp, Setaria italica
  Peptide Sequence Number=SeqID_85964
atcccactttctctctcgcagtcgcagggtcgcagcaggaggggagcccccaccaggacctcaccgaaatcccctcgcgcaccagacaattcctccagccaccgctacactcacgccgcgccctccaccaccgccacccggaggagctgctccctccgcacgcacaccggacctcggcttcgcgcgggaagagatccgggcgggccccgtggctcggattcgcccgtcctgaccgcgctggattccgcggcctcggcctcgattcggccgcagggctaccaatctggtattatggtcatgaagatggagatcgaggacgacggcgccgtcggaggaactggtggcacatggaca

SEQ ID NO: 19991 - DNA, 512 bp, Setaria italica
  Peptide Sequence Number=SeqID_85965
gctgggggagcagttcttaatatcaagtttgcattgggcccaggtcttcttaggatcagctggactaggtgctaggacgttcttgatctgccatgaatcatatgctgcattaagtatgaacagtggtgtgcgcaatgttggaactacatactgtgggaacatacacagctcaggtgattgctttgaggtacatgaagctggtaaatttttggttgatccatgtagattcacgacattcttataaattgatctggcataataattgccagagatatccttcccatcgacaaaatatccagcatcagaaaagcacttgacctttgtcgtcgctggaaacagatcatggaatctgtcacaatgcagtattgctgctagacctccagctgaacatccagaaaggaagagccattttgcgccttgttcatccccctcacagtttagtagatcatcgatgatggcacgccaaactctgaaacctctgtagtagagattcttcgcagtttccacggcct

SEQ ID NO: 19992 - DNA, 613 bp, Setaria italica
  Peptide Sequence Number=SeqID_85966
aaaaggaagtgtttgtgtctccttcacagagatagaggattcttgagcgcagccgggtgatggttcgctcaaaggaagccaaaccgaggcaatgaagcttaagctttttcctcagccactcttcacttgaagagagctcccgagagtcccttgcaatttctagccggtgcagaatctcttttgccatttctatctgaagcttgatattttcaatcttctttggccccattttttgtaaacccctactgaggcgttgcaatttgagaaaaagccgctcaactgcacagttagattgcaccggagcatcccaaacagcctgaaagaaaccgggcaccttggtccagaagctctcaaaatgaaagtgccgttttccactcttttggattttcaacccaagaatgagagggcagtggtcagaaactgtggatgctgcactttgcaaaactgaatcaggaaagataccttcccatcccaagcaacaaaaagcccgatccaacctgactagtgtgggagatgtacgctcattcaaccaagtgtatttgcgtcccaaaagggggatttctttgacctcaacatcataaaaccaaaaaagaaaaaacgaaaaaaccaaaaa

SEQ ID NO: 19993 - DNA, 450 bp, Setaria italica
  misc_feature (71)..(71): n is a, c, g, or t
  Peptide Sequence Number=SeqID_85967
tgcagtcctctcctgatgttctccctgcaacattccatctcttttaatgcaataacacatgccaacgtggntaaagaacatccttgttgactgatgagtcaaattgattgacacccccaagatccatcatcctccttggttctgcaatatccactcaacacattgtgggaagcatggagactgatgagaaccccgcaagggcaccatcgaaacccatgcagtgtcgtatgaagaaggtggcaattcaggtctctgcagctgattccttattctagcctctagttccttcctatgcatgttttgcaccctcacattttctgctaccaacctcttctcaggatatgctttgacgaccccccggcgaggagctctgctcgccagaatcgccccgcttggcgagcagctggctggggcggcggccgtaatgttgggcatcggggttcagtgaaa

SEQ ID NO: 19994 - DNA, 930 bp, Setaria italica
  Peptide Sequence Number=SeqID_85968
caatctttgctgctcgacgaagtcttattagtgataacaggtttcctctgtcttcaccttggcttccaacgacaatgctgcctactctttcctggtcggtggcattggaggattcttctatctgctgctgctccaaaggtccgtcgatgggttgcctgtgattagtttgccctcagaagctagcagcacacagccatctgttagtggtttcagtggtgtaagaaggccatggttaatattgtcgctggtaatggttgcgggagctgtcgcattgaagtatggtgctggtggtgacagcttcgagctgacaccaaccgagctctttgtcggcactgcagggttcctggcaaacaaggttgcagttcttttggcagctttcaaacccatgcaaagtgatttgaagggcgaagatggatctggggacagcacttaactgaaatgctacttgttgtttctcatgcaagctctatggtattcaatgaaggtacttagctaagtgcgaagggcaagtcatgaacgggaaatatataacttgtgactgtagcatcttggtaacttcgttcaagcttcaatcttctggacagtaggaggaggtcacaaaatcccgattcaggaaaaagaagtttgagatctacagaaacataaccagactctaaaatcaggggacttcaaatatcttgacacgtgaagaatctccatcctggtgatacggtacaattgctagatcaaaagacatgatggttctaccagaaccatgtacccattactgcacataaacctgataccattcaagtccattatacagtatagaataaatatattcttggtgcattctgtgtagaaaattgtgatgttgacaatatggtccagatgtgatgggcaatactctggcgctgatccaaaactcatcaataccaggaaatatttatt

SEQ ID NO: 19995 - DNA, 414 bp, Setaria italica
  Peptide Sequence Number=SeqID_85969
actgcttatttcttgctggtacaactgagtggaaaacgaagcaacccttgtttctttgaattctgcaatatgacatttgcacatacttctcatatcaataagattcattgatacttcgatccaagatggatgtatctgttgatgcaaaagtaattgagttaatgttgctttatgaattctacagttgcagcgcttcaggcattgacgaagaattggcagaatgtaccgcaaagctggacaggacaaactgatccctgtacctcgtgggatggagtttcctgttctaatgggagggtgacagaagtgtgagtgcttgattaacctttctatcgaagaattacacaacagtatccgcaaactgaaacttggtccttgtagaaaattaccaagcatcaatctgaaaattacttagta

SEQ ID NO: 19996 - DNA, 691 bp, Setaria italica
  misc_feature (1)..(46): n is a, c, g, or t
  Peptide Sequence Number=SeqID_85970
nnnnnnnnnnnnnnnnnnnnnnnnnnnnnnnnnnnnnnnnnnnnnnaaggttaatgatgatgactgaatcgatttcttcaaaaggaaaaaacaaaacaatgactgattggagctcaaaaggagcaatacttaagtaccgctcccttcgttccagattgtaagtcgttttgacttttctagattcatagatattattatgcactatatctagatatataataatatctataaacctaaaaaactaaaatgacatataattggaacggatggagtaccaaagaggaatgcaggaacgttgtctcaaacgatttcatcttctgatcagtcaccagttcaactgtgctggcctcacatcaccttggaggtcaggaccagaagtgcacaacacagtggcaactggcaatgcagcgcgtcctacttctgtccctgctcttggtaggcctccggccaagctccagccaaacaaactctcaagatggtaagccttctggatttcaacgggttacaggacgaatgctgcctccctatttggggttatttatttactcattgagtggatgttgctctctcatatcaataagattcattgatacttcgatccaagatggatgtatctcgtgggatggagtttcctgttctaatgggaggtgacagaagtgtgagtgcttgattaacctttctatcgaagaat

SEQ ID NO: 19997 - DNA, 326 bp, Setaria italica
  misc_feature (275)..(326): n is a, c, g, or t
  Peptide Sequence Number=SeqID_85971
tggttgctcaaatacatatgaacggtcattcttacccgcgtttcttttttccattttttgggcggggagcgtatgtaattctttttctcctcttctgtggttgacactgtaatatgtttaaaacactcaaatatagctgagtttgctcctctagtctcatttacatacccgctggctgatagaactgaggaacttagtataggatgcctgtgaatagttgtccaccaggattccaggaaataagatcatgtcgcgttctgctcgctaaaaaaggnnnnnnnnnnnnnnnnnnnnnnnnnnnnnnnnnnnnnnnnnnnnnnnnnnnn

SEQ ID NO: 19998 - DNA, 430 bp, Setaria italica
  Peptide Sequence Number=SeqID_85972
gccaccgtcacctccgtcgtgcagctcgagtcgcaggacctcgcgcagatcgcgcagcacgtgcagaagatgaccggcgcgcagaacgtccgcctcaagacgcagctcaacccggagctcatcgccggcttcaccgtgcagtacgggcgcgacggctccaacctcatcgacatgagcgtccggaagcagattgaggagatcgcgtcagagttcgagttgccctccgtccctctcgaagtctgatcggcttgcggcgtcattcctcgcccttgaagcctagctgctactctctgggaattgtaagaatccagcggggatgttggtcttctcccctccaaagttcaaacctgcagatcacataggtaggttagactaacaaaaataaacaaataaataagaaaacggtaacaaattaacttaaaacccgaaa

SEQ ID NO: 19999 - DNA, 446 bp, Setaria italica
  Peptide Sequence Number=SeqID_85973
gcgcagatcgcgcagcacgtgcagaagatgaccggcgcgcagaacgtccgcctcaagacgcagctcaacccggagctcatcgccggcttcaccgtgcagtacgggcgcgacggctccaacctcatcgacatgagcgtccggaagcagattgaggagatcgcgtcagagttcgagttgccctccgtccctctcgaagtctgatcggcttgcggcgtcattcctcgcccttgaagcctaggtcctttctgttgcttctctcccttctcttcttctgtatcattctctgattgaatgagtgaataatactacattactggattccagggaaaaaaaagtgtgcttatcttggcttcttagcattgttcgtaatttgaagataaagtgtatagctagttctgtagataaataactaacaattaactaggaattaccaaaggaaaaaaaaa

SEQ ID NO: 20000 - DNA, 1199 bp, Setaria italica
  Peptide Sequence Number=SeqID_85974
ccgcctggcaccgccccgccgccgcggggacctcgccaggccccgcgccgcggccgacgccgcggccgagagctacgcgaccgcgctgtccgaggtggccgccgagaacggcacactcgagcagacggtatccgacctcgagaagctggagaagatcttcgccgacgaggccgtcgccgagttcttcgacaaccccaccgtgccccgcgaggagaagacccagctcatcgacgagatcgccaagtcgtccgagctgcagccccacgtcgtcaacttcctcaacgtcgtcgtcgacaacttccgcgcggccatcgtgccgcagatcgtcgccgagttcgagaacgtctacaacgcgctcacgggcaccgaggtcgccaccgtcacctccgtcgtgcagctcgagtcgcaggacctcgcgcagatcgcgcagcacgtgcagaagatgaccggcgcgcagaacgtccgcctcaagacgcagctcaacccggagctcatcgccggcttcaccgtgcagtacgggcgcgacggctccaacctcatcgacatgagcgtccggaagcagattgaggagatcgcgtcagagttcgagttgccctccgtccctctcgaagtctgatcggcttgcggcgtcattcctcgcccttgaagcctagctgctactctctgggaattgtaagaatccagcggggatgttggtcttctcccctccaaagttcaaacctgcagatcaatggtggttgctcaaatacatatgaacggtcattcttacccgcgtttctttttccattttttggcggggagcgtatgtaattctttttctcctcttctgtggttgacactgtaatatgtttaaaacactcaaatatagctgagtttgctcctctaaactaaaaaaaaaaaaaaaaaaatgatagaactgaggacttagtataggatgcctgttgcttctctcccttctcttcttctgtatcattctctgattgaatgagtgaataatactacattactggattccaggattcgtattgtgtgcttatcttggcttcttagcattgttcgtaatttgaagataaagtgtatagctagttctgtgtcgtatccgcgacgttgctagatgttatttcaaattcagacttcagtggaaagagtccaaggaagaaactacttgaattcggttctaaagtagagaaagtggtgac

SEQ ID NO: 20001 - DNA, 469 bp, Setaria italica
  Peptide Sequence Number=SeqID_85975
atgaggctgtcctggatatgcaactctatgaaaaagctttggatgtatttgaggatgaccctgctacttctggtatactacacaagcatctgctaagaagcatgggcattccaatagttgacaaagttttgattacattggctaaggacagcaaattgaagaatggaatggaggttgaggatagtgaagaagagcacgttcaattgagcactgctgaccgaacctctctggccaaggaccttcctggtgcattgtcattgaaagctcaagctttaatcgaagcattggagggaaaggtaaaattctggtaacacgctagcagttgcatggtagcacctatcagttgtgcataggcttttgacaattaacataagagaaactatcatcgaagcaatgaagttatctcttcagaagttcttcagtggtggaacctcgaggcgaaacaggagatttgattcatttatggatg

SEQ ID NO: 20002 - DNA, 962 bp, Setaria italica
  Peptide Sequence Number=SeqID_85976
gtagagctggtgcagaagctgcaggagcgcggcatcatcgatttcgacctcctccacaccacctccgggaaggagtacatcacatccgaccatttgaagcatgaaattaagatggagatcaagaagcaaggccgtgcatccttagttgacctgtcagataccctgggggtagatctttaccacgtcgagaggcagtcacagaaggttgtctcagatgatcccactctaatgttgataaatggtgagatcatgtcacaatcttactgggacactgtgacagaagagataaatgagaagctgcaggagcgcagccagattgccttggctgagattgctgctcagctgcatattggatcagatctcgtcatcagtatcctcgagcctcggcttggaactattgtgaaaggaaggctagaaggtggacagctatacactccagcttatgtctcacgaattactgccatggtccgtggtgcggcaaggggtataacagttccaacaaacttgccatctgtatggaactctttacagcaacagcttcaggagatgcatggtgctagtggagtttcagtcgatggttcatgcttccagtccaataccaatggatagctttaactacttgctgtactgggatgtaatcggtattttcttaattatctatgtgcttattcattttttgttagcagtggcttgacatttaagaagcttgataaaagattagagaggtcaatgctgcattcctatcgcaaggtatgtttttttggctttctggactgcacaacagcgttcatagaactggcacgaaccggttggttccttgcaatcaaatacaagaacaggtttccaaattttaggcagctcatgccctgaaccacatgcatcccatttgatctgccaattcgtgaggagtgtgcatattatcactcatcagattattgtctattattaattcctaaactcaa

SEQ ID NO: 20003 - DNA, 742 bp, Setaria italica
  Peptide Sequence Number=SeqID_85977
gttctaacactataagataattaaatactccctgttgcaatatgtcattttcaaagtttacacatatgccatttaagagaacttttgcatatgttatgctactattatttccctccttccaggtgaaaggaaggctagaaggtggacagctatacactccagcttatgtctcacgaattactgccatggtccgtggtgcggcaaggggtataacagttccaacaaacttgccatctgtatggaactctttacagcaacagcttcaggagatgcatggtgctagtggagtttctgtggaaggttcattcttccagtccattttcaatggtttgctaaaagaaggtgctgtactgggatcaattcgtgcaggagggcagtggacaccagctgtttttgcccatgctcaaaaggagagtgtcgatgcttttttctcacagaactcttacattgggtatgacgtgcttcagaaacttgcaattcctcagcctaaacagtacttggaggcccgatatccagatggtattgcactggatgctgtttttgttcatccttctgtggttgatatgctcgatactgctgttggtgatgcaattgagaacggacactggattgattctctttcagtccttccatcatatattagtggccctgatgcaaccaaaattttgtccatctgtccatctctgcagaaggctatcaagtcttctaaagcagtggtatttggagaatcatgtgtctttag

SEQ ID NO: 20004 - DNA, 639 bp, Setaria italica
  Peptide Sequence Number=SeqID_85978
taattaattgtctaaacttcttatgaaaaagctttggatgtatttgaggatgaccctgctacttctggtatactacacaagcatctgctaagaagcatgggcattccaatagttgacaaagttttgattacattggctaaggacagcaaattgaagaatggaatggaggttgaggatagtgaagaagagcacgttcaattgagcactgctgaccgaacctctctggccaaggaccttcctggtgcattgtcattgaaagctcaagctttaatcgaagcattggagggaaagagatttgattcatttatggatgccttaagagatatactggaggaaagtggcttgacatttaagaagcttgataaaagattagagaggtcaatgctgcattcctatcgcaaggacttgacagctcaagtttcttcggagaatgatcccgtttcctttcttccaaaagtcgttgctttactttttctgcaggcatataataaggcacttcaggcaccaggccgtgctgttggtgctgttatcacactgctgcttgacttgctgccagctacaactttcaaggtattggctgattatcacagtactacagtgaaacttctagcactacaggctgctgccactgatgatgaa

SEQ ID NO: 20005 - DNA, 903 bp, Setaria italica
  Peptide Sequence Number=SeqID_85979
gaataataactagcctagtaggttttaccttctatacgctgactggatctggatactaggtttgtgcattaactataagctccaccactgaatatggttcagtgccatactttcaagatgccatatgccaatttcgtagaatacagtagcaaatctgtagttgctcgtattgtgcttatatcctttaatacgtactgctcgtattctattttctaataccaggtagaatgaatatgaaacctgtatccagaaaaggtatccatacacaaacataagtgttgaatttgttcttagtatatcatgtaacaaaaggttgtccaatggtttatgtttgatgaaatcatacttatgagatatttagcatacctaacaactaaactgctatatatgattgcatcatcaaatctacacattttcaaacatgtcagtgtagttcttattgtctaacaccaataaaagatgagtttgctgtcttggtatataaatgaagctgcttaacaccaaatatcagctggaatttatgctccgttctaaccttctatgtataattcgtggcagagatttgattcatttatggatgccttaagagatatactggaggaaagtggcttgacatttaagaagcttgataaaagattagagaggtcaatgctgcattcctatcgcaaggacttgacagctcaagtttcttcggagaatgatcccgtttcctttcttccaaaagtcgttgctttacttttccgccaggcttatattatgaacctttttcaccctttcgtgctcaatcttattctatattcttatattgatctgagttgcatcctatcttaatatttcgtaggcatataataaggcacttcaggcaccaggccgtgctgttggtgctgttatcacactgctgaa

SEQ ID NO: 20006 - DNA, 2398 bp, Setaria italica
  Peptide Sequence Number=SeqID_85980
aaacttgcaattcctcagcctaaacagtacttggaggcccgatatccagatggtattgcactggatgctgtttttgttcatccttctgtggttgatatgctcgatactgctgttggtgatgcaattgagaacggacactggtactgttagatttcatctctcaatagttaattgtgttttttcactgctatctactatgagcacctaacttgacacatattacacaaataagccactttgttctctttgattctctcccaatgcacatggtgtttaactaacaaacaggctgtgatgtaacatcatagtagaggaggaaatgatgtaaaatgatcaagtgataacgagttgtggaaacagattgtctagtaactttagttcactttgcagtaattaacaaatttatgttcactgaaacagctgggattcaaaagacactatctacaattttgagtagcatcattatctcttttgcagcattttcctagttgactgtaattactctgttttgctgccatgccaagtacatttttggtttcaggattgattctctttcagtccttccatcatatattagtggccctgatgcaaccaaaattttgtccatctgtccatctctgcagaaggctatcaagtcttctaaagcagtggtatttggagaatcatgtgtctttagtaatgtgtttatcaagggtatttttgatcgacttgagaaagatatggactcgtttggcattagacacagttttggtcaaggaaggcctgtgaatatgaatctgggtagcgagcacaagacaggatctggtcagtactcggacacaaaagatcttggtgacaatgacactagcagtactggtgtttcatcagacagagggtcaaagaagaaaagggggaaagggacagggtctaccaaaggtggatcacttgaaaaggatgatgacaatggagaaagtattcctgttaagggcaagaaagctcataggaaaaacaaggatgctggttcatcaggcgatgtaaaacacggtggtaaaaaagcaccagagaaaatgaaagatgagagtgcaaacatatttcctgatgaattaatagagcaaaaggttttggctgttgctccagagttagaagagttgggaggctctgacgactcaaatgccccgcttaaattgttatcttctcacttgaggccaatgcttgttgactcatggatgaagaaacggaacactatgctgtcaggaaatgctgaaaggaggcggaacttgcttgataatctgcagaagcagatagatgaggctgtcctggatatgcaactctatgaaaaagctttggatgtatttgaggatgaccctgctacttctggtatactacacaagcatctgctaagaagcatgggcattccaatagttgacaaagttttgattacattggctaaggacagcaaattgaagaatggaatggaggttgaggatagtgaagaagagcacgttcaattgagcactgctgaccgaacctctctggccaaggaccttcctggtgcattgtcattgaaagctcaagctttaatcgaagcattggagggaaaggtttagctttaattatgaactacaatctgtaagtggtcgacctcgaggcgaaacaggagatttgattcatttatggatgccttaagagatatactggaggaaagtggcttgacatttaagaagcttgataaaagattagagaggtcaatgctgcattcctatcgcaaggacttgacagctcaagtttcttcggagaatgatcccgtttcctttcttccaaaagtcgttgctttactttttctgcaggcatataataaggcacttcaggcaccaggccgtgctgttggtgctgttatcacactgctgaaggataagctgccagcttcaactttcaaggtattggctgattatcacagtactacagtgaaacttctagcactacaggctgctgccactgatgatgaagaagattgcacatcagaccgaatgcgagagaagaaggacgatcttgaagaaaggctgatgccggaactgaaatccctggtcctcggcacagctacggcgcatgcttgctgacccatgtctgcgtacatacacagagcaaccctcagcttaaaagctttctttgcactcgtctcttgcattttcacagtttggaagagagaaaagcagaactgacccgctgattgtaagaatccttgtttgtactaccgtattcattcctgcactccaggggttctatagtgacaacagaattatcctatcatgtaatgaagaatatatagtggaagttcagatcacatttggtagcagaagagatgcctagtttactactgaatccagaagtgttcgggattttaagctgagaaaaccatttc

SEQ ID NO: 20007 - DNA, 687 bp, Setaria italica
  Peptide Sequence Number=SeqID_85981
gggacggaggcacttggcgtactcgatcgccgcgggaaggaggggagcaagcacccgcctccaggtgccgttgtggtggcgcaaccgcagttagttgctattcgtgagcgagttaccacaactagttccaaccctcctgggtcagtgacgtctggttctgttgatggaaaaagagttataggcgctgcaaatcctggtccagaagatgcagctgatcttctgaggatgtgtctccaatgtggtgtgccaaagacttattcacatgctaagggtatggtttgccctctctgcggtgatagaccagcccagccgaaagagcccgaaaagaagaagggttccactgtcaaggacaaggagaagatcaagaggatgaaggggcaatcgtcgcacgcttcgtggaagagcgagacagagatggctcttcgacaacagttcgactgatagatagttagcatggtcaatgtctagatggaattctggggaaacctttgtcgcctgtgtagtgtaccgtatactgtccccgagtgccttaccctgggttccagatcgccagagccattgttttgcttgttgtatcagcagcatttttttttctgccaggaacagttttgtttactaagctgtcaaaattgaatctcagtagttagcacctggagcacgaggcgccgagacgcaactgatatggtg

SEQ ID NO: 20008 - DNA, 749 bp, Setaria italica
  Peptide Sequence Number=SeqID_85982
cccgcggccaggcgcggccgtgacgcagctgtcctgaccacccgagttgccaccaccgttgccggccgcgttagcagcagcggccgccgccattgcggcatgcgaggagtaattcggcatgtcggagtaggagtcgtccacgaacttggatagccactccagctccgcagcttcctcgctgggtatgtagaactcgtcggcgaaggagaggagcgacgtctggtgatccgacgagttggcggtgggcgacggctcacccatagctcccgagtgatgcccgttgtcagcagccgcggcccccgcggcggtggggaagaagtcgtgggcgccggcgccggtggagaggtcgaggagttcgtcgacgcgcatggcgtcgcccatgggcggcatcccgtagtaatggtggtgatgcgccgtggagtagctggcgccaccgctgtggtggctgctcatcggcgcggtggtgatgctggaggcgttgtggtggccgtggtacgtgcccatccccatgccgagctccactcccatggccatttcccactccgatgccatcgcgggacactagagctaagagctaaccgtacggcgtggtacttaattggcaccgggcagttccttgagacgagcaagagtgacgctgctcgttctagtacgagctagtagctgtagccttactaggaggagtgacgagagtgagtgcgtgcggaggggggggggggggggggggttagcgggaggggatggaatgg

SEQ ID NO: 20009 - DNA, 1344 bp, Setaria italica
  Peptide Sequence Number=SeqID_85983
tttttaaagttagtaactaattggtaagttggttaattttacaaggaacaaggatttactgtcacaaaccaaaatgttacatcgccagtgaccgtacattgaaagaaaaatttcctgatgcattacgcgtgtacagaatgtgccaaccgtcaagctgaacaaaaccttgtcctgcaacctatctcccgatactctgcacaagtgatcaatgaccccccatggtggtgttaccgtcagtttccagacgaggcgagccaaccaaaatgcgaggtactagcatatgctacaaaatagtcaaaatcgtcctgaagcctactcagtgtgaatagcctccatcgcctacaaactacgggcattctggcgagtgtgctttctccaccgcctcaacatgtgaatgcaacccccggctcccaacaggccacaggacgcaacgcccagaatggtcgaatttggaatgcttcgagggtgggcgccctgtaataggaaaaccaagatagcagcatttgctagcgacagtgagaagctcatcatgcccccacgcagctcatttggcaggtactttgttctcaatcttgctagtgaaggtaaaatgaagcctacacatgcatggaagatgcagaacagtatcaccaacgttccaatctcctggtaatcataagccacaatagacaaagcaagtccagcaccaatgtaagctattgtcaagctgtcctcattccgtaagggagctgtggctccataaaaccatggaaagccagcgcttccaagcattcttgatgccaagaaacaggggtagattactgacagctgagcataccttccgtcagccactatggttggtgcccagagaaaccaaaaggctgagatagcaaaatggatgcctgcttgagctaataccaggatcagtactcttttgtctgaaacacaataactgtggtcagaaatggaaatggaacatgtaagcactgaaaacttgacctggaacagaagtaacaatcatgattcactgtgggagatggacaggctgaaccccttcacataacaaacagctcttagatttgactaaagcaattgcaggtatcaaacccataaatatgtggcagtgcaccaacagagtattagatcatatttatttacagttatatctcatgatcaatattcacaatagtcatttatcaaaaaaaactcaccaaagtaaatgtaaatacctttaaaaggttatagaactgcatatgctatatgatgaaatcgtaaagtctactacataaggctcaaaagtttcaaacacaacgccatcaaacattgaccaacttatatttctcagtcacatcatctggatattca

SEQ ID NO: 20010 - DNA, 468 bp, Setaria italica
  Peptide Sequence Number=SeqID_85984
tttgtagctcttgacttgttctcatggagcagacacaggttgaaaattgctgatgctgcatctttctttgctatgatgttgccattgtcgagaagatcaaccagaggcccaattgcccctagctccccgattttctccttgttggagtcgagtgctgacagagtgaagatggcagctgcagagttgccacggctccccatgtctcctgattttaatgcccatatcagaaacgggattgcttctgggtcatctccaataaccttcttgttactatcatgaagtgaaaaattgagaattatggtcaccatgtcctccagaacttgtggatcgttttgcaatcctggagtggatcgagcaaagatcattcgtgagatggaatccggcctctctcctaacacagctctgaaatcgctgttctgctttgtagccagtcgaagatacttgattgcttgcctcatttcactactt

SEQ ID NO: 20011 - DNA, 300 bp, Setaria italica
  Peptide Sequence Number=SeqID_85985
tcccaccatgaagggcaaggccgacacctcgaagaagggcgacggctaggctcaaggccggcggcggcgccggcaagcggaagaaggccgccgcgagcggcaagcccaagcgcccgccgtccgccttcttcgtctgcaggtctgaattcaggcaggagtaccaggcgcagcaccctgataacaagagcgtcgcggccgtgagtcacttgcactctgttctccccccgtttttttttgggggtatttgcagatgtcttatttcttcgactcttcgtgttggtggattaggtgagcaaggca

SEQ ID NO: 20012 - DNA, 358 bp, Setaria italica
  Peptide Sequence Number=SeqID_85986
tagaatagggatactattagacttgtgtttcatgaggttgttagtttagtgcattagcaaagaaaagccggatgctgctagctgctccgttgcttttcttttgctaaccacttgtgtctcaacttgctgtacctgtttcattcactaatctaatgactagtcagctattagcttaatgttttggttttatatgttcctttggtgtgaggcgcgtgccctgcataaattgagatgttttaggttttatacgttcctttggtgtgcagcgtgtgccctgcataaatcgaggtgatctgttctgtcttatatggcgagtctgtgtttgtggcccatttcatttatgtgtctgtttgagacg

SEQ ID NO: 20013 - DNA, 865 bp, Setaria italica
  misc_feature (821)..(865): n is a, c, g, or t
  Peptide Sequence Number=SeqID_85987
tcaggccaccaccctccgcctccgctccctgattcgaaagccccccctccgtcctgtccccccgcaaaaccctagctccacccaccatgaagggcaaggccgacacctcgaagaagggcgacggcaggctcaaggccggcggcggcgccggcaagcggaagaaggccgccgcgagcggcaagcccaagcgcccgccgtccgccttcttcgtcttcatgtctgaattcaggcaggagtaccaggcgcagcaccctgataacaagagcgtcgcggccgtgagcaaggcagcaggggaaaagtggcgtgctatgtcagaggaagagaagcaaccatacgtggaccaggctgggcagaagaagcaggactatgagaagaacaaggccaactttgataagaaggagagcacaagctcaaagaaggctaagactcaggatgatgagggctctgacaagtcaaagtctgaagttgatgatgaggatggtggcagcgacgaggaaaatgaggaagatgagtaaatagagtctccatggtcatgaggtagcaaatggtgtgttaggtccccgattagcttactggtttgctatctttaatattaagttctctggaacaggtttgtatgatggggatctattagacttgtgtttcatgaggttgttagtttagtgcattagcaaagaaaaagccggatgctgctagctgctccgttgcttttcttttgctaaccacttgtgtctcaacttgctgtacctgtttcattcactaatctaatgactagtcagctattagcttaatgttttggtttaaaaataaaaaaaaaaaannnnnnnnnnnnnnnnnnnnnnnnnnnnnnnnnnnnnnnnnnnnn

SEQ ID NO: 20014 - DNA, 316 bp, Setaria italica
  Peptide Sequence Number=SeqID_85988
ttttcggttatatctggagcattgacagtaacttgactaattccgcgggaacggaagacgccagcccaggcagggaaggcggaaggatctcccactgcgtgccactcccctccgggaacgcgacgacgagaggacgaacaggggcgggtgctgggtaagggcaccctgctcggatctgcgtgggggatcgcgtcgctggccggatctgcgcccggcgacggcgtgaggaatggggggacagggagaacctcggcttgcgtcgactggtggtggtgctcgcgagggcgagtgcgattccttcccttttccctttgcg

SEQ ID NO: 20015 - DNA, 380 bp, Setaria italica
  Peptide Sequence Number=SeqID_85989
taaaagtaaaaacccctaaaactaaacaaaataaacaaaaaccttaagtaataacttacaattacgtttttagacttacaattagttagtaataacctttcgttatactgtacccaccaaccacaacctctcctcttggcattggagaatcagaaatagtataaccaccttcttcccatgaaacaagcttgacatagcagcaaggaagtggtggaccaacacggcccacacttgtgtcatcccattcagagaaagctgctccagcacaagtttcagtcaatccatatccttgacctactgggacacctagacatatattcataaaccttcttgttgttgttctactttgtattaaaggttgtcttacctacctacttaaa

SEQ ID NO: 20016 - DNA, 494 bp, Setaria italica
  Peptide Sequence Number=SeqID_85990
cccgagacaggctttacattacatcattaaactttttggtattaaacatttgcaatgtcctccagttattagcactacaaggaaaaaacactagatttatggtcgtgaatggacagaattgagcatccattgcccacggaagaacaagctcccgtagcagacatacacacagctcgcttattcattgcaggtcagtaggtcccatgctgcttcgatcaccttcagaaaacataaggtccaaacacccttctgtcgctgcttcagtgataaagcttgttcaaatcatctttgaatttggtttttatctgttccctcttcagtttaagtgctgctgtcactagcccagactctggagtccacggttcaggcagcaacaagatctttgctggagtccacggttcaggcagcaacaagatctttgctggtatctcaaatttctcaagcctagccgctttccagccaaaacttttaaaaaccaaaaagaaaaacaaaaa

SEQ ID NO: 20017 - DNA, 484 bp, Setaria italica
  Peptide Sequence Number=SeqID_85991
ttggcattggagaatcagaaatagtataaccaccttcttcccatgaaacaagctacatttgtttgacccaaaaaaattacagatggttagaggcctgaacatgctggtaaaagaaaggtctcaggaaaaatggaagtgttcagagtactcattagggaatcaacaccaaatgaatattgcgggaagtattcattgggaaaagtttgcacatgccaattgagaaaagttaaaagttataagcagtgcggctcattaggaggatccagaaacaggtgccaagcaagacaccaccgggcaagctctaatctcatgtcaattctttttaatgcaggtttcgtttattatcatctgacacaagaatatcaactatatttgttaactagtatgacagtatccagtatccaaagcaaacccataaacgcaaaccttgacatagcagcaaggaagtggtggaccaacacggcccacacttgtgtcatcccat

SEQ ID NO: 20018 - DNA, 594 bp, Setaria italica
  Peptide Sequence Number=SeqID_85992
ccaatagcagtaccagaagccaacatgacagtctctgctgctagctcaaagacatgagctaatggaaggtaagccagatacacatcgtccaagattaagaaggggacaaaaggagatgtttctgtactgaaacctacacttatgatctcagttcctgcaattttggatcgcatcagagatgcagtgtttaagaaggttggtgagaagggtggggtgacaaaaaaactgtttgattttgcatataatcgaaatctagcagcaattgaagggagttggtttggatcttgggcaccagagaggatgatatgggataaccttatttttaaaccgatacgggcaatgcttggaggacgtgtaagatttgttctttgtggtggtgcacctttatcaagtgacacacagaggtttatgaatatatgtctaggtgtcccagtaggtcaaggatatggattgactgaaacttgtgctggagcagctttctctgaatgggatgacacaagtgtgggccgtgttggtccaccacttccttgctgctatgtcaagctgtttcatgggaagaaggtggttatactatttctgattctccaatgccaa

SEQ ID NO: 20019 - DNA, 2764 bp, Setaria italica
  Peptide Sequence Number=SeqID_85993
cggtctagtcttctagttgcacttcaaagcaggagccggagacagctttacattacatcatttaaacttttggataaacatttgcaatgtcctccagttattagcactacaaggaaaaaacactagatttatggtcgtgaatggacagaattgagcatccattgcccacggaagaacaagctcccgtagcagacatacacacagctcgcttattcattgcaggtcagtaggtcccatgctgcttcgatcaccttcagaaaacataaggtccaaacacccttctgtcgctgcttcagtgataaagcttgttcaaatcatctttgaatttggtttttatctgttccctcttcagtttaagtgctgctgtcactagcccagactctggagtccacggttcaggcagcaacaagatctttgctggtatctcaaatttctcaagcctagccgcttttccagcctttgataaggattgctgaacctccttaattgcttgatcattttggcaaagctcttcaaagtctttataatttatccctgaattttgagcccacttctccaaggcctggtgtgccggaacaaccagggcaacacaataattatgaaatggatcggcgtaaaccatgatgttgtccacataattgcttgtcgatagagctgattcaaccttgccaagagagacatattctccatgttgaagtttcactatatcctttttcctgtcaataatctcaatgcacccatcaggatggaactgaccaatatcaccagtgtagaaccagcgcatgcccctctcatcaaccttgtatacttcattcgtttttgcttcattgttgtaataacctttcgttatactgtacccaccaaccacaacctctcctcttggcattggagaatcagaaatagtataaccaccttcttcccatgaaacaagcttgacatagcagcaaggaagtggtggaccaacacggcccacacttgtgtcatcccattcagagaaagctgctccagcacaagtttcagtcaatccatatccttgacctactgggacacctagacatatattcataaacctctgtgtgtcacttgataaaggtgcaccaccacaaagaacaaatcttacacgtcctccaagcattgcccgtatcggtttaaaaataaggttatcccatatcatcctctctggtgcccaagatccaaaccaactcccttcaattgctgctagatttcgattatatgcaaaatcaaacagtttttttgtcaccccacccttctcaccaaccttcttaaacactgcatctctgatgcgatccaaaattgcaggaactgagatcataagtgtaggtttcagtacagaaacatctccttttgtccccttcttaatcttgttcgatgtatcagtcatagtcagagctgtaccatatccaatagcagtaccagaagccaacatgacagtctctgctgctagctcaaagacatgagctaatggaaggtaagccagatacacatcgtccatgccaaggtttgggacgattgtcatgactgctgcagttgtggccaccatgtttccatgcgtgatcataacacccttgggaagaccagtgcttccactggtatacatgataaccgcagtatcagagcttgaaggtaaccttgcatcaatgtgtgatgttttgcccagttcctctacttcagtgaaagacaatgttgtccaatgcttcatttgattcagtgtctcggcctcgacaggttcatcctcaatatagataacatgcctaagactcttcaatttagagctgattgcaggtagcttcttaagttgctttgaatcacatatcagagttgaaacctgtgtctcatttagtgaatgcaccaatgcatcctcaccaagtgaagcataaattgttacagccgtcaaattttgtcggaagcatccctgggcagcaatgatccactcagctcttgtatcagagaagattgctgcatggctatctagattgtggcccatcttgataagtccagaagcaaaattacatgcacgattaaatgcttctgcataggtatcccattcatattcaccaagatgcagtttctcaaacttcttaccatcagcagattcaacaaattccctattaattagcttccttgtgccaagacacttccgtcgagagtattttttgctggccatctcaaatagagctgccatcgtggtggcaccctcccatgggacttgaactaaggaggaaaatctactgtttcgcatggcaagtcctggctccccacccacatcagcttgcactgcccttttctttgtctttctgctaaacactgaggtaagcaagaaaggaataactatagccagaagcacagcaccaacgactccattcagaccatagtctttcaaaaatggtacgtcacttgtagcgattctttgtagaatagacatgtctgaattattttcagtaacttctcccatggttttcggttatatctggagcattgacagtaacttgactaattccgcgggaacggaagacgccagcccaggcagggaaggcggaaggatctcccactgcgtgccactcccctccgggaacgcgacgacgagaggacgaacaggggcgggtgctgggtaagggcaccctgctcggatctgcgtgggggtatcgcgtcgctggccggatctgcgcccggcgacggcgttgtaggtaattggggggtactagggttagttaacctttcggttcttttagttacgtttacgtta

SEQ ID NO: 20020 - DNA, 382 bp, Setaria italica
  misc_feature (334)..(334): n is a, c, g, or t
  Peptide Sequence Number=SeqID_85994
gcgatgtggtgcgccagctgcctgacgaaatgcgtgagcgggaggcccgaggccgcgcccgcgacgaggagcctccgggccagcggcagcacgacggccccgtccagcgccgccgccgacaggaggaggcacccggacgccgggcagagcagcaggaacaggatggacgtgaacgcgtgcgggtccccgcgcagcacgcgcaccgtctcccgcaggatctccagcgcgttcatcggcggcagccgcacccctcccccggcgccccgcgtcggcgccattcctcccgactacctcccgcctcttcttcgcactccttagattcgcagcctcttcncagcgcgctgcccacacaagaccgcgccgacgcctcctcgctggtcag

SEQ ID NO: 20021 - DNA, 968 bp, Setaria italica
  Peptide Sequence Number=SeqID_85995
ccaataactctggaacatttttggtcctttcttgaggctaaataacgctctactcgagcttcttgggcagcacgcatacatgtttcaggattgaaactcggtacagatgacaaaagcaagtcacacggtctaagaaatctaagaagttggacttctcttcatgaattctttctttctttatttacataggaaaatgctgctgctttctcacagagatgattggtgtgcacatctcttccacctcccaagcttctcgcagcccttccgtggtttaatggctagctcattgtcttccataagaacagccctgaatcccaacggttccagtaccttctgatagcttaagtttcataaagcatactcatcaacacaatagtgaagaagaatgctacgggttttttatataaaataaagcagtcatgatactgagaaaatacaaacgttttaaactgtaaattaatcattccatgatggctaggcgataaatattcttactcagcaactgtattgttgtatggtggtcctccctcttgatcacttatcagataaatcaaagtgagaagctctccatcaggttttagaagccgattaactgtctctgcccaagccaccctcaagctcgggtcaagtgcacaaaagaacgtgtaatcaaatataaggtcgaattgttcgcttggtatccacttgaagaaatcttcagccagaaaagtaaaataatctgcattgggcaaagaggatgaccactgcttagccttcttaatagccaaatcagaaacgtccaaaccgacaacaaatcgttcagggcatgccagagcaaccacatcgtatcccattccacatccaggaaccaaagctcttcctttcgggagtgtccctgatctaacaagatgttctatgactggtgttggctttcccaaatcccacggggccacaccaaactcccaggacttctcccacccatctgccgc

SEQ ID NO: 20022 - DNA, 617 bp, Setaria italica
  Peptide Sequence Number=SeqID_85996
ttttagaagccgattaactgtctctgcccaagccaccctcaagctcgggtcaagtgcacaaaagaacctgcacacatagatacaagcgatctgagctgccatcaaagtaacaaactgacaagataaactgaaacctacgtgtaatcaaatataaggtcgaattgttcgcttggtatccacttgaagaaatcttcagccagaaaagtaaaataatctgcattgggcaaagaggatgaccactgtacacaaatggagaagataagcagacatattatctaagtcagcatcataaagggtcttgcctacaatcagaagacagtttttaagaaaaaggtatagtagaaaagctgtattccagttgtgattgttggaataatgtaattttgtttgaaaatgaactcaacatcaattatccaaagagtggtccaattgccaagcccattatgatcaatattgagtaagaatttacaatttcagaagttcataatgaaaaaaaaagataatgtcatgagcccttaacagcaaaaccataaagtttgaacatgtatgttatcttttgtgattaacattattttaaaaaactagcctgtggcatatatcaaacaaaactacttgaa

SEQ ID NO: 20023 - DNA, 1094 bp, Setaria italica
  Peptide Sequence Number=SeqID_85997
cccccctagaaactaacacagtagtaaaagctccattttcagctgacatctcttgtcctatttcttcttttttttgttttttaagtgctaataagaactgcaattctatctcgaaaccaataactctggaacattttggtcctttcttgaggctaaataacgctctactcgagcttcttgggcagcacgcatacatgtttcaggattgaaactcggtacagatgacaaaagcaagtcacacggtctaagaaatctaagaagttggacttctcttcatgaattctttctttctttatttacataggaaaatgctgctgctttctcacagagatgattggtgtgcacatctcttccacctcccaagcttctcgcagcccttccgtggtttaatggctagctcattgtcttccataagaacagccctgaatcccaacggttccagtaccttctgatagtcagcaactgtattgttgtatggtggtcctccctcttgatcacttatcagataaatcaaagtgagaagctctccatcaggttttagaagccgattaactgtctctgcccaagccaccctcaagctcgggtcaagtgcacaaaagaacgtgtaatcaaatataaggtcgaattgttcgcttggtatccacttgaagaaatcttcagccagaaaagtaaaataatctgcttagccttcttaatagccaaatcagaaacgtccaaaccgacaacaaatcgttcagggcatgccagagcaaccacatcgtatcccattccacatccaggaaccaaagctcttcctttcgggagtgtccctgatctaacaagatgttctatgactggtgttggctttcccaaatcccacggggtcacaccaaactcccaggacttctcccacccatctgccgcgtcgccggtgaagagctcccgcagcctccccaccttcgggttctcgccgggatccctcctgccgcccgccgccgccgacgaccccatcccccgccgcggccgcgcgcgcgacgccaaccagcgcacgggctcgcctacgcgagacagcgctcgcatatggctggctccaccgcagcagagacggaaacaag

SEQ ID NO: 20024 - DNA, 944 bp, Setaria italica
  Peptide Sequence Number=SeqID_85998
gttgatgtattctgaaaggttccacgggggcactttcttcaagagcagcagctgccttaaaacattcagaagcttcaatcgctgcgctgtcaccttcctcttcgtagagtaagccaaggttgaaccaggcaacatggttcgttctgtctaaccgcaacgcatcggttaggaagcatctcactgcaggcaagggtttcttgcaaagctgtcgaagaacagtagctgttgatgtcaaacttggcacatgtttaggatcaaggtctaacgctattgaatatgctcgcagagcctccttcgacaaacctttggcttcaagtagctttcctgtagcatgacaagccaagggggaatgtggactgatagcttttatcttggctatgcaaagttctgcatccttccactgcagcattcttaggtacagaagggcaagatcataccatgtctttatttccagatttttatcggtcttggtaccctgcaacatagaaaccccagcaccaaagctcttcatcctaatttggatcagagcaagaatctgggtatacgtctctattgctttcctaaattgcccctgggcaatctgaattttggctttagtttgcaacagatctccttgagaccacttcccagcctgatctagcgcagcattcacgatgcactcagcatcttcaaatcgtttttgggcactcattattcgggctataagcaaccaagtcttcaattctgacccagcctctaatttcaacagcttctttgcataacgaactgctgtatctaatttcctctgcacagcattttcaaggctgagactgtatattatcccgaaatctctgttacccatcttctttccagccttaccaagcacctctagcgcttcatgctgctgagaagctctctctatgtctgttgtagcatatctagcttgattggaaagggatatgcca

SEQ ID NO: 20025 - DNA, 2498 bp, Setaria italica
  Peptide Sequence Number=SeqID_85999
ccggcccccattccaccggattcggaaagctccaggacctcaggggcatcgatttcgccatgaacaagctccacggcgccatcccggaggacctcttccgcgcgcccaagctcgagaccgtccacctctacgccaacgcgctcacgggccccgtgccggaatccgttgccagcgcgccgtcgctctccgagctgcgcctcttcgccaacaggctcaacggcacgctgcccgccgacctcggcaggaccacgccgctcgtctgcatcgacctctccgacaacgccatctccggcgagatcccgccgggggatatgcgaccgcggcgagctccaggagctgctcatgctcgacaacatgctctccggccgcatccccgacgcgctcggccgctgccggagcctccgccgggtgcgcctctccaacaacaggctcgccggtgacgtgcccgacgccgtctggggcctccctcacatgtcgctcctcgagctcaacgacaaccagctcaccgggcagatctccccggtcatcgccggcgccgccaacctgtccaagctcgtgctctccaacaaccgcctgaccgggagcatcccgtcggatatcggatccgtctccaagctctacgagctgtcggccgacggcaacatgctgtctggcccgctcccgtcctcccttggcggcctgccggagctcggccgcctcgtgctccggaacaactcgctgtccggccagctgcttcgggggatcgactcgtggaagaagctcagcgagctcaacctcgccgacaacggcttcactggctccataccaccggagctcggcgacttgccggtgctcaactaccttgacctttccggcaaccagctcactggcgaggtcccgatgcaattggagaacctgaagctcaaccagttcaatgtttccgacaaccagctccgcggcccgctgccgccacagtatgccactgaggcgtaccgcaacagcttcttgggcaaccctgagctgtgtggagaaattgccggcttatgccccgattccacgcaggggaggtcgtccaagtaccactctggcttcgcctggatgatgcgctccatattcatatttgcggctgtcattttggtcgccggagtcgcgtggttctactgccggtaccggagcttcaacagatccaaactgatgagagccgaccgctccaaatggacgctcacatccttccacaagctgtcgttcagcgagtatgagatcctggactgcctcgatgaggacaatgtcattggcagcggggcatcaggaaaggtgtacaaggtggtgctcagcaatggcgaggtagtcgccgtgaagaagctgtggagcgcggcggtaaagaacagggatgccgagaacggtggctctgctgccgacgacagctttgaagccgaggtgaggacgctcggcaagatccggcacaagaacattgtgaagctgtggtgctgctgcatacacaaggactgcaagctgctggtgtacgagtacatgcccaatggaagcctcggggacgtgctgcacggcgccaaggcgggcttgctggattgggcaacgcggtacaagatcgcgcttgatgccgcagaggggctatcctaccttcaccatgactgcgttccggccatcgtccacagggacgtcaagtccaacaacatcctcctggacgcagagttcagtgctcgtgtggccgattttggggtggccaaggtggtggaggggactgggcgtgcggccaagtccatgtcggtgatcgccggctcgtgcggctacattgcgcctgagtatgcgtacacgctgcgcgtgaacgagaagagcgacacgtacagcttcggggtggtgctcctggagctggtgaccgggaaaccgcctgttgatccagagttcggggagaaggacctggtgaagtgggtgtgcagcacgatggagcagaagggggtggagcacgtcctggacagcaggctggacatggatttcaaggacgagatcgtgagggtgctcaacattgggctggtctgcacgagctcgctgccgatcaaccggccggcgatgcgcagggtggtgaagatgctgcaggaggtgcgcgtggagggcaggccaccgcggatggacaaggacggcaagctgtcgccctactactacgaggacgcctccgaccaagggagtagcgtgtagcttgtaaagtttgattcgggagcacaggcacagttgagaggtgctcagccattgtaggtagcaactagcaaggttcctttcaaggctgcaagcagtgtgttttgagtccggaatcgggtgcggcaatggtggtcggtgttgtggtttggtaccagttgctgctgtgtctgtggggtttgtcagccacaaccactgcattgattattcctattccttccattccggtgcatcagcttccttcctcttgagaaagaaagaaagaaggaaggagagatgtttgcacacacctacagtacatttgattgatt

SEQ ID NO: 20026 - DNA, 432 bp, Setaria italica
  Peptide Sequence Number=SeqID_86000
tacgtacttctagttgttgtagttagttcaaacatgcacgtctccatgaacaggtagaagctgtacggctggcggttgagacgtggacaggcaccgaggagcacgatgaactccctcatgtcgctcagcgcagcttccagggtgtccaccagaacagacagctcacctgtggcgtcactgcccggaggcaagccgagcgaccgcctcgccgtggcgtgcggtctcctcctgctgcgctcgacggctcgcctcgtgaaggcgtcgagcacgtaggcgccccggcacatctctcccctcagctggttgagctgcagcagcatcgcccggttggtgacctgccgcgcctcggcctcctcgacgacgacgcgggctcgcagcagcgctcgctgcagcctgacgacgtcgtcgtcggtggtggtggagccgggctcc

SEQ ID NO: 20027 - DNA, 399 bp, Setaria italica
  Peptide Sequence Number=SeqID_86001
ttattggatataagtaagttggactagctatgcgtctatagctagtccacaagtcctgtgttgacaccgaatcatcggacttctataattttggaacatgaagccttcgtacttcgaaactggggggcctgtgttgataccaaattttaatcgaatcccttaatacagaatatgaggccattggtgtcatatgcgactagtctctgcatgcgtatatatattggaaggtactaatcaatatgtgagttgatcaaggaaaaatctggtacgtacatgcaagttggctgaaacaagcaatgcatattagaggctcacgtgtggaagaaagaaggagcaaggacctgatggaagtatgaaaaaggaagcttaataattaggactttacgtaaggaaagttag

SEQ ID NO: 20028 - DNA, 252 bp, Setaria italica
  Peptide Sequence Number=SeqID_86002
gttagtgtccaccaaatccataacgatctccaactaatccgccacagtatcagcagtaagctcccttcagccttgactaccccgctccgcctccgagcgttcaggccggggctgcttcctcgccccgcccccgtctcgcaagccacctcttcagctcgttggtttcgcgaggttcctcttcaacacaagcaggtgataaggttctgacctacaagttccgatgacaatctgcagcagtgatgagatcattga

SEQ ID NO: 20029 - DNA, 887 bp, Setaria italica
  Peptide Sequence Number=SeqID_86003
attttcagtcacgtttgcatcgagtctcagcccaacaatcctcaactcgaaactcccatcccatcgagattccaccaggaagattggatctagctgcagtgtcttcagtcgaggacgtagatgcgcgaggcgacgtcttgaacgagccagtcgaagccctgaagcagcccgtcgccggtgaaggcgctgcagccgacgatctgccagtgacggctcttctccatggccgccagatccaggaccttggcgatttctgctggtttcagggcaccctgaatgtcctgcttgtttgcaaacaccaacaacgaagctccggctagtctctcttctttcagtagattgtggagctctgctcgacagtcatcaagcctccggatgtcagagctgtcaaccacccaaaccaggccgtcagtctgctcgaagtaattcctccagtatgagcggatcgtcttctgtcccccaacatcccaaatgttcaaggagtacttttgatacttgatggtcttgatgttgaagccaagggtggggctgattacactggtgtcctccccattgatcttcagcacaatcgttgtcttacctgaattgtccaggcccaccatgagaatccgcatctccttttccttgcgtttgatctttctgatgatgctaaggagacccatcttggaggggcggcccaggagatgagtcaagaggcaaggaagataaagagagaggctgaaagagtactgaattcttcaatgcagtagagccagtctttgtttgtgatgtcgctcaggttactatcagcaggtattcaagcatcatccccctatggttcgattgaacacagctattctagaagcgaggaggaggaggcggttcgttccccgtcttcggtcgtacgt

SEQ ID NO: 20030 - DNA, 351 bp, Setaria italica
  Peptide Sequence Number=SeqID_86004
caaatattgggacatcaatgtcaccggtggccgagcattctcctctggcagccctcaccacgagatctttgctcatcccactgggcagtgtcttgtagcatctcagaaagcgcgctgcggacggattcagcgcgtgattgtgctcaaggttcacatccgtcaggtgcagcaagccgtccccccacagcctggcgaccacggtggcctggcagttggttttggccgtcggcctggcctggtagcaggcgtcctccttaccgttccccacttgttgcagacaagcacgaggcggcggcagaggccggccttggtgaaggaggacttcttgacgcataccccgaagcccgtgcg

SEQ ID NO: 20031 - DNA, 306 bp, Setaria italica
  Peptide Sequence Number=SeqID_86005
gctccaagaaatctcccgagcgcgatggcggcgccggcgcagctgacccccggcgggctggttgccgtctccaatcacgccgacggcgaggggacgctgcagccggtgctgcaggtggttgacgtgcggagggtcacccagaagaaccagaaccccagcgcctccgagcgctaccggatggtgctctccgacggcgtccacgcgctgcagtccatgctcgctaccgccgagaaccaccacatccgggacggcaccatccagaagggctccatcatccacctccaggagttcacctgcagcaccatc

SEQ ID NO: 20032 - DNA, 523 bp, Setaria italica
  misc_feature (6)..(6): n is a, c, g, or t
  Peptide Sequence Number=SeqID_86006
cagtancttaagaaggcttcacgaaggtgaagcggttgcattgataagtgatgctggtactccaggcattagtgaccccggcatggaactggcaagactatgtgcagctgagaaaattcctgttgttcccattcctgggccttctgctgcagttgctgctctttgtgcgtcgggtttgccatctaatgaattcacatttgcatgctcggtcaagaagagataggcttgagatatctgctcgtgaagctgctacacaaatattctatgttcctccccatggcattcatcaatttcttgttgatgctgcttcatcttttggcgattcaaggtcatgtgttattgcaagggagataacgaaattacatgaagagttctggcgtggaactctaggtgaagcaaatgaagcctttgctactcgacagctgaagggagaaatccaactgctaatagagggacagtccctttcagttgatgaaactccatcagaggatttccttgagcatgaactaagagaattgacagc

SEQ ID NO: 20033 - DNA, 324 bp, Setaria italica
  Peptide Sequence Number=SeqID_86007
atcatgatgttatatgtggtcgtgcctggtgggcaattgctttcacgcatctgctcaaacagctccattgcccggtcatgccgccctcctttacggtgtgcatcaatgagagtgttccatgtgacaacatccggctcaatcccttcttctcgcatacggtcaaacgcatccattgcatgccccaggcagttgtacttcccaaatgtatctatcatgacattgtagaaatgccggtccggccttaccccactagcatgcatctctcggagcactgcaaacgccttttgccaatctcccctgtcaccggaaccctgcaaggatccg

SEQ ID NO: 20034 - DNA, 348 bp, Setaria italica
  Peptide Sequence Number=SeqID_86008
gctcaatgcggctagctgaaaagtagcaaaaaacgtgggtgctgatctgatctgagcctgtctcacggtgcgccggactttggtacgtgacggctgaaagcagcatcgcgatcttgcggagtgtatctgtgtatgtcgtagtggagctcggtcgaagtggtgatcttgcttgcggggatggggaggctccatggcttgcggaattaggaggacgggggagggattgcgcgtacgacgtggcgcaaggatcaccatcagatgattcccatctggccgtggcgcttcgccgtatcacaagctcgctagggacaacaagacgccgttcttagccggccaatcagatggatc

SEQ ID NO: 20035 - DNA, 251 bp, Setaria italica
  Peptide Sequence Number=SeqID_86009
caatgccacgctgctcgcgctccccgacaccgcctgcgcggccacctgtcgccggacagcgccctggtcgtacatcccgccgaggaggagagggtccataccgccgccgagcgacgccgtctgccgggacaggttgctcgctgtctccaccagcgccagctcccagtctgccttccctggctccgcggccggcgtctgccacgccgacgtgatcgccaccggagcgtcgtcggattccgatgggaacgcga

SEQ ID NO: 20036 - DNA, 382 bp, Setaria italica
  Peptide Sequence Number=SeqID_86010
gtgtgaattagtccttcctactattttggtcaattgttttgactatacgtccagccaaatttataagaggtagacaaattacatgccaattgccatgaaaccaatgagaaaccttgagtttgacctgtgcagggtgccttgtattactagcctgttaaaactccataaatggtgaatatcattttgactgcagcctcctccatctcgaattgtacaaccatagataaactaattataattgtcagcccttgctgcaaagctaccagacttaactggacacggtttgcaaagaaacacgacatgttccacaagagtacaagatctacttttatagaaatataataaagggaaaaataaatctccaccaaagcaatcaagaaca

SEQ ID NO: 20037 - DNA, 276 bp, Setaria italica
  Peptide Sequence Number=SeqID_86011
tgtacaaacaccaattcagaatagcaggatcttattgttattacggaaacatcatttgcattttgtaatgaaatgggaaaacaggatttgcattttttacacaaataaaggatagcgattagatgattctggaaattatcgcccaaactttgtgcacattgtgaagaatgcacactgaattactgatggaatgaactgccaccaagtaggagcagctaggttcagttgtttagcaaatccttgttttattttaatattatactattttggggtagg

SEQ ID NO: 20038 - DNA, 721 bp, Setaria italica
  Peptide Sequence Number=SeqID_86012
tagttcttcttaggttttttttttttttttttttttgttcaaaacctgtctgcatccatgttatttgtagtgccacaactttgcaacgacatacatatcgactaaacaaaccgccaaaattgatcagcaacacgctcaagaacaaattgttacgagttacaaccacagcctaacctagttggaggatgtcgatgaaatcttgctggtaaggagaacaagcagggctaccgttgcagcaaagctcagggccaagccgcaccacagaatcgtgtcaacatttaaccctctcctagttacaaagttcacctgctgttcctgtcctaccgatcgtgttacagcactgctttcacttgctttcgttgacccctctacgtttctcctcacaagcgtagactggattgcctcctgacggttaacatcatcaatggtctggtgtgcatcgggcgtattcttacattgttcagggacgcagttttgtaccacgtcagagcatgcacaggtgccacaagagtcggcgccacaacaatcagcttcctccacctgattctgtctgtgttctttctgcggtacaatgctgatttgcttaggtgcttctcctactacaacagatccttctattacctcgccgacgacagaccatcgtccaactgatgtgatcctcacaaccgctgatgttcctagcatgctatctggggcaatgaccagcacctggatatatccc

SEQ ID NO: 20039 - DNA, 1322 bp, Setaria italica
  Peptide Sequence Number=SeqID_86013
taccttacttaacgttttacttccttctaactaagtcgttagtacttggtatttgcctcctgacggttaacatcatcaatggtctggtgtgcatcgggcgtattcttacattgttcagggacgcagttttgtaccacgtcagagcatgcacaggtgccacaagagtcggcgccacaacaatcagcttcctccacctgattctgtctgtgttctttctgcggtacaatgctgatttgcttaggtgcttctcctactacaacagatccttctattacctcgccgaatacagaccatcgtccaactgatgtgatcctcacaaccgctgatgttcctagcatgctatctggggcaatgaccagcacctggatatatcccttggtatgtcccaccaagtgaacaccatcagtagctatcatggttacccagattcgctctaccttgccttccattccttggtagggtgaaaatgattcgaaaacagaagtcagttcacgactccgcttcttcacatcattgcttggcactttcttcatcctagcagcaggtgtccctggtctggggtaaaactgtgatatgtggacttgagggaattgatagtcctttacaagattaacagtctcggcaaaatcttcatcagtctcaccaggaaagccacagataatatctgtcgcaatttgcattccagggacaagctcacagagagtgtcaactaccttcctaaactcaccaacagtgtattcacgattcattcccgttaaaacagcatcgcttccagattgcacaggaacatggaggaaagaataaacacaaggatgacacaaaatggcagctatctccttcaaatgctctagtatgaaaggagggtttgtcatgcctatgcggagcattgtgcttcggtcagcaggaagctctgcaacaattgcgttcaacagatttggaagatttgtaccgatatccctgccataagcaccagtatcttcactgctcaaccatatctctcggacaccttcagagacaacaattttcacacgatccaccaagctgtcaatagtatagcttcccaaatgaccacgagcatgctttgtcttacagtatgtgcaggcgcctaaacaccccacgttaataggaagaatctcaataaacttgttctttcttaccttaggtaaatcaagtgagggcagtgttttccgactcaacagccgaacctcatggccttttaaggtttcctcaaccacttcaacaacccggtctatctgttgcactccaattatactaatgcaagaatgactccttgaccattagtagtggctggatgtgtaccg

SEQ ID NO: 20040 - DNA, 360 bp, Setaria italica
  Peptide Sequence Number=SeqID_86014
cttctctggttgctacttcatcgcctactgatgcgctaatcggggttttcgtgtcgctgcgcgcaggtaaggtgcacggatcgttggcccgtgccgggaaggtccgcggccagacgccgaaggtggcgaagcaggacaagaagaagaagccccgcggccgcgcccacaagcgcatgcagtacaaccgccggttcgtcaccgccgtcgtcggcttcggcaagaagcgcggccccaactcctccgagaagtaggcgccgcgaggccccccgcccgccattcatactcatgggttctcggccccttcttctgtttttgttcctgagacacgcaacagtggataggcaaggcacacaggggata

SEQ ID NO: 20041 - DNA, 629 bp, Setaria italica
  Peptide Sequence Number=SeqID_86015
ctccgatgggaactggaggagctgagcgtggggcccgcgagccgccgccgccgccgcatctcccagcatccgcgcccgcgcctccgtcgccgccgccgcgccgccgcttctcagccatgggtaaggtgcacggatcgttggcccgtgccgggaaggtccgcggccagacgcccaaggtggcgaagcaggataagaagaagaagccccgcggccgcgcgcacaagaggatgcagtacaaccgccgtttcgtcaccgccgtcgtcggcttcggcaagaagcgcgggcccaactcctccgagaagtaggcgccgcgcggcccccggcccgccctgccccggttcctcctttccgttcgcagtatgcttatgctcttgttggtagtagtttcattgtgcaagcaaaggaagaaccttttgtagtttcagtttcgttgttcgtgtgatgagatggaaacttgagatggtatgtgcacctcgttaagattttgagatatggtgatatgagcccatgactttaatcatgcttatggctgcgtgttttggtatgtggatgtgctgcaaatatgtgtcactttattggttttgcgtggaataatcagtttaaggctatcagacattagttctacaaaa

SEQ ID NO: 20042 - DNA, 538 bp, Setaria italica
  misc_feature (512)..(538): n is a, c, g, or t
  Peptide Sequence Number=SeqID_86016
gggggaatgggaggaggaggaggtgggggaagtggggggaggcatccaccgccgccgcaacagccctagttcctcgtctcctcccaaatcgcccgagcaccacagctccgccgccgccgccgccatgggtaaggttcacggatcgctggcccgcgctgggaaggtgcgtgggcagacgccgaaggtggcgaagcaggacaagaagaagaaaccccgcggccgcgcccacaagcgcatgcagtacaaccgccggttcgtcaccgccgtcgtcggattcggcaagaagcgcggccccaactcctccgagaagtagatctagctaggccagccgcctgattcatactcatgggttctcggccccttcttctgtttttgttccccagtagtttcgttcgagtaatcaagtttttggtgttgtgctgataacaagttgaagacctaaagctatcatctgaattgatgttactgcagtcttgttaagtacgatacgcatcgtttactacatgaaaccnnnnnnnnnnnnnnnnnnnnnnnnnnn

SEQ ID NO: 20043 - DNA, 639 bp, Setaria italica
  misc_feature (592)..(639): n is a, c, g, or t
  Peptide Sequence Number=SeqID_86017
cccgcacccgccgccgcgccagcagtaaaccctagccccgtccgccaccgccaccgcagcagccacagccatggggaaggtgcacggatcacttgcgcgcgcggggaaggtgcgcgggcagacgcccaaggtggcgaagcaggacaagaagaagaagccccggggccgcgcctacaagcgcatgcagtacaaccgccgtttcgtcaccgccgtcgtcggcttcggcaagaagcgcgggcccaactcctccgagaagtagatcgcctgcaggttcacataagggggtcaagattatgattttctcttatgggtttaggatgatgtatgaggaaaagaaacttgagatcgcattttggttgatgttgatggattgtgtgcctacttgaatcctccctacattatcatttccagtaatgttatcatcctgtgcgtttctctcatatatatctgtttcagctgagatcctaggacacaataataagatgtgtggtttttctgggttttactaagtagaatttgtgcgcttgaactggtttgtgtgctgaaacagttgttagaattgcaaaaaaaataataaaattgtgtagtaatnnnnnnnnnnnnnnnnnnnnnnnnnnnnnnnnnnnnnnnnnnnnnnnn

SEQ ID NO: 20044 - DNA, 370 bp, Setaria italica
  Peptide Sequence Number=SeqID_86018
ttcggaagatgcatagattccattgctaccaaagctaccgttaacccatcgaatgtaatgtggtcatacacctacaacaggaaatctgcatcctccgatgagatagttgaagctcgcaaaagctcgcattcagttcccaaggactggtgggttgaagatctgtgtgaactggatgtagacctatacaggcgtgtcatggttgcagtgaagtcaagggggaggatcccctctgatgttgttggagaagcactcaaggcatatgctgctagatggcttcctgaatgttgcgacatgctggtggacgatgtctacactgaatcatacaagcacctccttgaaacattgttggctattgccctcggacaaggga

SEQ ID NO: 20045 - DNA, 486 bp, Setaria italica
  Peptide Sequence Number=SeqID_86019
taaagtaacaaattaaccaaataactaacccaaaataacaagactaataaggagtaactggcgctttgtgcaagaatagaccaaaattgtgctctccgaacaaggatcgttgcagctagcggaagcgcgttcatgctcggtcctgatcagaagtgtgaagaggctgtcgtgatgccaagaagccaactacacattcagctgcagtggaaacaccacaattcacaagagaagggaggcgaaggaagggtcattgcaaggtttcttgtgttgctgcagtagatgtatctcaggagggaagtgatacctcgtttctgatgatgttaatatgttatagcctgtaggcatgggaacagatatgatcagggcgcctgaacccgtgctatgatgtgccagagtaggcttaagcttaaggggtgtttggatctttagttcgcactaaaattcatgtcacatcgaatattcggaggactaaacatgagcaaatta

SEQ ID NO: 20046 - DNA, 334 bp, Setaria italica
  misc_feature (306)..(306): n is a, c, g, or t
  Peptide Sequence Number=SeqID_86020
ttcgtcggtaacttcccagacgagcgaatagtcccgcggcgcgcggacgtggcggtagcggctgaggcggggcgccgggcgggcgcgcgcccgccctcgcgacgaggaggtggccgtggagcgggcggcagttgggctggcagtagtgcccgaggagggagaacccctccgggacgccgaccggccggtagaaggtgacgctgctgccgcccccgcccaccgccgcggcgacagggtgcagatcttctggaacgacgtggccgcggcgagctccagctcccctcgccgatggacatccctccccgngcgaactcccccacgtgggggccacggg

SEQ ID NO: 20047 - DNA, 807 bp, Setaria italica
  Peptide Sequence Number=SeqID_86021
catccgttggatgctgtacgggtgactgagctgttgcagtgtatccaacaggcatgtcattgcgattcttgaacatacgtactaaagattcagacgttggattgtcaaaatcatcttctgacaatgcaagatcatcctctccaccattcataggagatttatcaacatctttgagatctggagcttcctcctctcccaggcgccgcataaaatcagaatgagcaggagacttctccaattcctcttcaagctctgggattccctccttctcacgaagacgcctgatatcatcagcattctcaaagtcatgagcaagttccttctcatcatgaaatgagatctggttctcaacaggttgaaaaaggccaaagtagtcccaaggtggtgtcccgggaggagcttcaaatgtggaactgtcatccagatcatggatagcttgtctacgcacaggggatgatgtttgcagagtggctcttacaggttcaagcaacttctccttaacagttgtcactgagctccctccagctttcatatggttgacatggaaacgtcctgaagacaaaggtgatggaactggggagaaagagtcactagcatgatgtgaaagggatggggaaaggttcatcgatttctgcctgatggtgggaatctccggagtggcagatgttgatgtgaacagggatgaatctgttggcacttcaggctctatgaattttctcagagcaaatcctgtgtgcctaagtgactgaatataagcgaaatgagcagctgcaaaagcacatcttccatcaagagcttctctgacaa

SEQ ID NO: 20048 - DNA, 446 bp, Setaria italica
  Peptide Sequence Number=SeqID_86022
cgtcgttttcctcccagcccctttcgtctctccgcttccgcccgccccgcaccgcgccacctcgccgccaccgccgcgtccgccgccgcgatgcacaagacggcgcaggcctggttcaccggcggcaccgccgcctcttccgccaccgcgggcgagtcgcagccgtccctcctcgctgactggaactcctacgccgccacccgctccgacgcctcctcctcctccccgctccccttcgacatcgaggccgccgtccgctccgccaacgacactgtctctggcaccttcagctcggtgaccaagggcgtgcgggagctgccggggagcttccagagcgcgaccagcagcttcccctcggggaaggcgctcatgtacttcggcctcttcctcgccaccggcatcttcttcgtcttcatcgccttcgcgctcttcctccccgtcatggt

SEQ ID NO: 20049 - DNA, 914 bp, Setaria italica
  Peptide Sequence Number=SeqID_86023
gctctgtgaagatgacctaccatcaatgctgatctttcgtgggttattatgagatggcggtgtttccatctcaagttcaggctgtttcctcttcagttcatttagagatatgctttctgaactgtcaatgtcgaaacctctaaatcttgatgctggaacttcatcccctctgtatttccattgcaaaagatatcacatgtgaatttacatatatcgaaccaaaatgatgcattcatctatatgtaaaatttcacagatgtagagcggctaacaggcgactagagaagtacagatgcaagtactcttatggtgaatattgtgcccacatccctttctatagcgtactggtgtgtaatttactaatttactaataacattgaatctgattttgactaagaatgagcttctgtaagcaggtatgcaagtactgaaccttttgcagcatacatgcaaaacattctaagattaactttaccctcgcaattttcatcatcccattcagtaatacaatccaacataagtatgctagttcatatttcattaaaggatacagatcttgcatctcggtagtccaaataacatgtgcacaacaaatgaatttcacagattccctgaacattgtgatcccaaagccggtgttcattgtgaataccacagtaacccatgtgttcgaacaaattgaacttgtgtcagttagttaccttgacacacctggtacttactgattaatttttaagagctcctagttgtttcctttctagacaattacggagtatcattcactaaataaagccaagcgtatttcatgaaagatgaaattgccaaggtaacataacagagaagtagctaacctgctggagtttgcactgtcttgattatgactactaggtgacgctgatttcttgttttctact

SEQ ID NO: 20050 - DNA, 722 bp, Setaria italica
  misc_feature (1)..(21): n is a, c, g, or t
  Peptide Sequence Number=SeqID_86024
nnnnnnnnnnnnnnnnnnnnnaaaagttccaaaaactgtagtattcctcactgctctgtagcggaaccttacatcttacagcagagtagagcaacacatcaagagaaagatagcgattgacatctcagaatctcaccaggttaagaacaggcataccatcgcatggttaccagatccctagaatataaccaacaaaacagggcaaatcaccaactgggtacaactacaaatagagtacatgagctagacatggtcatagtaaactagaacctcatttttatttcttttgcctaagatgattgaagtcaagcttcttttcacgcttgtttgacttgtgtgatccacggccgttgctctgtgaagatgacctaccatcaatgctgatctttcgtgggttattatgagatggcggtgtttccatctcaagttcaggctgtttcctcttcagttcatttagagatatgctttctgaactgtcaatgtcgaaacctctaaatcttgatgctggaacttcatcccctctgctggagtttgcactgtcttgattatgactactaggtgacgctgattctgtttcacagtcacctcttgcctctgcatttagtttctacatatctaggcttatgtaagggaacacaaatctacatgggcacaatagccagaatgacatgtaacaaaacaaccttcaagactcacatcaatggatggattgaaattttgga

SEQ ID NO: 20051 - DNA, 246 bp, Setaria italica
  Peptide Sequence Number=SeqID_86025
tcaactagaagctcaacttcctccatcaaatgtgtaacattagatgatcaccattggtgctgccttgcggataacagcaacagcttcacttagaataggcttttccctctctatcaactgcaccactttttcatccaattttgtaaatccagcaactttggttttctcgcgagttaggaccgctacattatttgcatcttccaatgtgctagcagaagaataactcgcttgtgggacttcctcagt

SEQ ID NO: 20052 - DNA, 398 bp, Setaria italica
  Peptide Sequence Number=SeqID_86026
tctatttaactaagttcccaagtccatttgcatctgacaggaccctttctttcctgagcaaccagtgcagcccatcttttgtggaaacattccaaatacaaatttgcttcacgtgtattgcttgaacttagccatgttgaatattcacccagtatattcacagcatcatcaaaagctggagtcagaatgtcattctgaacaaatgacgtggctctggtcgaactgcctgtttttcctttaactgtgtacgtaaaaataaggtcaatgtttgacaactgaaggatagatttcatgagtgttactgctcgaccttttgctctctcaataagagatgaaatctgcttctgccaagaattgctatcagcctcaagcttggaagcataattgtttgcaccaga

SEQ ID NO: 20053 - DNA, 408 bp, Setaria italica
  Peptide Sequence Number=SeqID_86027
ataggaacagataaatagcacatgaattgaccatctgggtgcctctcacatcgttcaaagctttcagattcaatctcggaatatgatagtagcgtgatctcattagtcgtaggcacaactccttcctgaagatactgccttccaaggagagcatttataaaagttgattttcctgagttaaattcacccacaataaccaacaaaaatggctcactcaggcgagaagcagcatcaactagaagctcaacttcctccatcattggtgctgccttgcggataacagcaacagcttcacttagaataggcttttccctctctatcaactgcaccactttttcatccaattttgtaaatccagcaactttggttttctcgcgagttaggaccgctacattatttgcatcttcc

SEQ ID NO: 20054 - DNA, 464 bp, Setaria italica
  Peptide Sequence Number=SeqID_86028
aagagcaagcagatcttcaagtgtagttgacaaaacagatgtcaaaagagaagctgacaatccagcaacgcctagtcctccaaatgttccaaaagccacttctcggatttcttcttcaaaaaccttagcagtagaactggcgtcaaagccatccagtgcctttacagtgagtttctctccttcattaacaagtccatttggatctgacaggaccctttcttcctgagcaaccagtgcagcccatcttttgtggaaacattccaaatacaaatttgcttcacgtgtattgcttgaacttagccatgttgaatattcacccagtatattcacagcatcatcaaaagctggagtcagaatgtcattctgaacaaatgacgtggctctggtcgaactgcctgttttccttaactttgctctctcaataagagatgaaatctgcttctgccaagaattgctatcagcct

SEQ ID NO: 20055 - DNA, 892 bp, Setaria italica
  misc_feature (113)..(113): n is a, c, g, or t
  Peptide Sequence Number=SeqID_86029
gctcaagaaacattaaacgaaccggcacaacttagctctgtttgcttacacagttcaggtttgatgtgtggctatgtgaatgcttattccataaacatgcaaacccagttacntttaaaagatggaggtgggtactccctccgttccaaaatgtaggctgttttaagtcaaaacttctctaactttgatatagcgaacagtttgtcagcaacggtcatgctgcattagttgccagtttatttatgcattcacacctgaatcatatgtatacaagtatatgttgatcagaatatgacaaggttaagagtcagtataatatcaaacataccacagcatcatcaaaagctggagtcagaatgtcattctgaacaaatgacgtggctctggtcgaactgcctgtttttcctttaactgtgtacgtaaaaataaggtcaatgtttgacaactgaaggatagatttcatgagtgttactgctcgaccttttgctctctcaataagagatgaaatctgcttctgccaagaattgctatcagcctcaagcttggaagcataattgtttgcaccagaaactagatccttgatggatgttaagtcatcaacagccttttcatattctagtttcacaagtctttgacatgatgttagcaaacgatctgcaatgcctattggcgtttcaagtttcagccggaccctttcctttccattttctgttgaactatccaagaagctcagtaagtaatcctcaagttcacagaacttgctgcttctccatctaggatcattaaacatagcttccatcaaatgctttccaccaccgtttttggaatatgaaagcttggcttccagcgcggagcgtgaagatacaggaaacagtgttacatcctctgtgtt

SEQ ID NO: 20056 - DNA, 1461 bp, Setaria italica
  Peptide Sequence Number=SeqID_86030
ttgaataaatgatactgaacgcatccatctctgagattaggaaagaatatcaacatgacagtcaccagaaattcaatacttacttccttcaatttggaatatgaaagcttggcttccagcgcggagcgtgaagatacaggaaacagtgttacatcctctgtgttaagcaatttctttgcattttccttgacaaatgcagtagcttcttcaagctcatagctgttccgatagaggtccaatttgtttagaacaaatacaactttctttttccactgctggacatactgaagaaatccaacctcactttcagtcaatggtctatccgatgataggacaaagagtattaaatcagctcgcggcacgtattcttcagtaagtcgttgctgcctctgaagaataacattggttccaggtgtatcgactagattcatttccttcaaaataggaacagataaatagcacatgaattgaccatctgggtgcctctcacatcgttcaaagctttcagattcaatctcggaatatgatagtagcgtgatctcattagtcgtaggcacaactccttcctgaagatactgccttccaaggagagcatttataaaagttgattttcctgagttaaattcacctcaggcgagaagcagcatcaactagaagctcaacttcctccatcattggtgctgccttgcggataacagcaacagcttcacttagaataggcttttccctctctatcaactgcaccactttttcatccaattttgtaaatccagcaactttggttttctcgcgagttaggaccgctacattatttgcatcttccaatgtgctagcagaagaataactcgcttgtgggacttcctcagtcccatccacttttgagaaatccctttctataagatcatcagtgaggtgttggataccagccaaggatgtaacaactccagatgcaccagattggagcaacctggatgtgatgtcagaataagttgctccactgtgcgattcatttaaggtgaagaaaattggaatcttcacctgttgaccaacaccaccactcataacatccgcaatattgtcactgccagtatttgcaataagaaaatcagccccttcagaacttgaagcacttattgcagagtttgctgaccgtatcgttctagcaacaattggaagatatatggagtcagcatttgatttcatcatcatactccttgcaacaatagcaggaataccgtcgtccgcgagcacgacgccgctcgccccaaccgcggaggcgacgtcgacgcgctccgtgatcagcaggtacgcgcggtccccgaccgcggccctgagcttgaccgctgcctcgtacgcgcgcccgccaccctcctccccggcctcgagcacgacgatccccacgccgcgcgccacggcggcggccacctcatccccggaccgcagcgcctcctcggcgccaac

SEQ ID NO: 20057 - DNA, 1118 bp, Setaria italica
  Peptide Sequence Number=SeqID_86031
gggcgactgcccatcacttttagattatcacttgttctgaatttacaacatatattacagattatcatataccgtaaaggtaaaggcactagtcagtagtcactacgtcaacatcatctcaataaagtattaatcaacaaaaattgattagtatatccatccaaagaattaatgcaaataaacaaggtataaacaaaagtgaaacctcatgatccatgaagattttggatttcaactttcaaagtttggagcttacgctcaacagcagacagttcaccctgaacaccctgcaaccaatctattttttgctgacatgcttcctggtacggtttgctgataacctcaacaaaacggactaggttattagcactctgtgagatatccttttggatagcttcatcaactttccgagacaattcatcggcagccttgttaaccttctctattgcaagcttccgtcgaccagggaaacttgataaaacaataaacccgccagctgagcaaagtgcaagagcaagcagatcttcaagtgtagttgacaaaacagatgtcaaaagagaagctgacaatccagcaacgcctagtcctccaaatgttccaaaagccacttctcggatttcttcttcaaaaaccttagcagtagaactggcgtcaaagccatccagtgcctttacagtgagtttctctccttcattaacaagtccatttggatctgacaggaccctttcttcctgagcaaccagtgcagcccatcttttgtggaaacattccaaatcaaatttgcttcacgtgtattgcttgaacttagccatgttgaatattcacccagtatattctaacaaaagaaaggacttttaatgataacatgaatacgtaagcatgcaacacaaataattaaaatatgaagtaaatgtcagataacagttatgcggtataaatgcaaaattacccccttttgaagcaattttggagaactcacatattttgcacatattatcacaaaattacacttttagctaaagctgttaatttggacattgattgacatcctaggcctgcatgcaagacaccagttagctttaatgataaatgagctctaccagccttacatgtaggtc

SEQ ID NO: 20058 - DNA, 577 bp, Setaria italica
  Peptide Sequence Number=SeqID_86032
ccaaccaatgcggcatggtcttttctgtgtggcttgttgtgtcacaccctctacgatctagcttaattatgtacaatcagtcttcccctctgctgcttctttcctaatatccgccacgctaattaacaaccatcaggacctaagcccctctctccttgacgtagctcgacgtcctccggtgccgccgaagcgcgctgatgtgcgtcccgagttcaccatcccggtgcagcaccacgtcggcgtggaccgccgagttcgggaacttctgccggtgccggtcctgatggctctggcgcttctcctccaccgtagtctcgatcctcatgttaaccgtctcaccatcaggcatctcgcctttgccctcgtacttctcgttgatgtcctccactatgaccgtgaacacaaacgggccaatctgaaggtaatcgtccattttcaatatgggctcgagggctaggaccacctccctcatggtgggcctggactttgggttttggctcaggcacttgtaagccaccatagcggcccgttcggcccctttgcacgagtactggcattccatggccgggttcctatt

SEQ ID NO: 20059 - DNA, 255 bp, Setaria italica
  Peptide Sequence Number=SeqID_86033
gtattttaaattaaacctaaaacaaattactcatggagcttaaaaggcttggtatattgttccacatcattgtgacacttcttcctcaatatcgctcatcaagagaaatgagcactcgactgatgcattctatcaaacagatcctgatgctctctaaaatgcacctaagccaacatcaatcccagtcccaactaaacgccaatctaacccacggctctttccgcagcccaatacgcggattgagttatcaaaaca

SEQ ID NO: 20060 - DNA, 598 bp, Setaria italica
  Peptide Sequence Number=SeqID_86034
ccccagatgacatggcgaagaactccacctcaaggacctgcaagcgcttggccccctgactgtcctccgcgccgacctgaacatggaaggcagcttcgacgaggccgtcgccggctgcgattacgccttcctcgtcgccgcgccggtgaacctctcgtcaggggaggaggatccagaggtgcagcagacgtgaccaccagttgtgaagcttcgtttaattcgatcgatttcttctttttgtgataccgccgatggcaagctgattcgaaaagctgttttgaggttgatgaattgattgaattcagaaagagctgatcgagcccgctgtccggggaacgctgaacgtgatgaggtcgtgcgtgaaggccggcacggtgcggcgcgtgatcctgacctcgtcggtggcctcagtctacatcagaccggagctgcaaggcaacgggcacgtcctggacgaggattcctggtctgacgtcgagtacctcagggccgagaagccaccattgtggtgggcgtactgcgtgtcgaaggtcctcctggagaaggcggcgtgccggttcgcggaggagcacggcatcagcttcgtcaccgtctggcc

SEQ ID NO: 20061 - DNA, 539 bp, Setaria italica
  Peptide Sequence Number=SeqID_86035
tcgccgaccgcccgcaccacgcgtcccgaactgcctctcctttctgtccgtcttttcataccgctgcgtcgcgtgactatcgcaggcgacgaggcagagttcgccgtgctgagaggcatggagaaggagtccggcacggtgccgctggttcacgtcgacgacgtctgccgcgccgagctattcgtcgccgaggaggaggcggccgcggggaggtacctctgctgcagcctcaacacgaccatcgccgagctcgggcgtttcctggcgcagaaatacccgccgtacggcgtgaaaacccatctgctctccggcgaccgtcttgagaagccgagagtgtgcctgtcatctgcgaagctgctgagggaagggttcgagttcaagtacaagacgctggagcacatctacgacgacatggtcgagtacggcaaggccgtgggaatcctgcccaactgatgcgattctcctcttcctctgcttttgcggtcgatggtcacgaacttcgtcgtagttctagtaacttctagtaactactaaaaact

SEQ ID NO: 20062 - DNA, 507 bp, Setaria italica
  Peptide Sequence Number=SeqID_86036
cgcgcgtttcctatctgcaaattacccgcagtacactgtgaaaacaaagctgctctctggcgatctgcttgagaagccgagagcacgcctgtcatcggcgaatctggtcggtgaagggtttgagtacaggtacaagacgctcgatgggatgtacgacgacatgatcgactatggcaaagccttgggaattctgcccaatctatgatgctcctctgctttgtatgggtggttgatcacaactccaaaccagcaagcagttgcaagatcctccacatctatcatcacaatgtatttgttcaacgtactaatacattgtgatgatagatgtgggtggtttagattcattcgtagaaaatttgggtttattttcccataatggcaaagatgtgtaatttgaatatagattttagggtactttgggttattgtttatgatggcatatgtgagtgatttaaaagaaaattaattagatattattggtaaaccaaaaaaaaaaaaactaaaaag

SEQ ID NO: 20063 - DNA, 664 bp, Setaria italica
  misc_feature (186)..(186): n is a, c, g, or t
  Peptide Sequence Number=SeqID_86037
gacgaggccgtcgccggctgcgactacgccttcctcgtcgccgctccggtgaacctcgcgtcagaggatcctgaggtgcgcagtctggctcaggcatcccttaacagtcagtcagtcaccactgttctgtgttctgccggcctgttggctcgctcaattcaactcgatctgcgcgtggcagaaagngctgatcgaggcagccgtccgaggaactctgaacgtgatgaggtcgtgcgtgaaagcggggacggtgaagcgcgtcatcctgacctcgtcggcggcctcgatcatcatgaggccggagctgcagggtgacggccatgtcctggacgaggagtcctggtccaacgtcgagtacctcagagccaacaagactgctttctggggttacccggtctccaaggtgctctcggagaaggcggcgtgcaggttcgcggaggagcacggcatcagcctcgtcaccgtctgccccgtcgtcaccgtcggtgcggcaccggcgccgaccgcccgcaccagcgtcccgaactgcctctcccttctgtccggtgaggccgtgagcacgagcgctgagttgagctgaccggaagacagagaagaacttgtcgatttctctcgtacctgcagttcttttcataccgctgcgttctacgtcgtacctattcta

SEQ ID NO: 20064 - DNA, 629 bp, Setaria italica
  Peptide Sequence Number=SeqID_86038
tcgccgagctcgcgcgtttcctatctgcaaattacccgcagtacactgtgaaaacaaagctgctgtgagttgaactctaaataaagaatctgctgtgaagtaagaatcagaggcagttgctttgcactgaggagtgattatcgccttccactttgcagctctggcgatctgcttgagaagccgagagcacgcctgtcatcggcgaagctggtcggtgaagggtttgagtacaggtacaagacgctcgatgggatgtacgacgacatgatcgactatggcaaagccttgggaattctgcccaatctatgatgctcctctgctttgtatgggtggttgatcacaactccaaaccagcaagcagttgcaagatcctccattctgctagagaactagtactagtacgttgaacaaatacattgtgatgatagatgtgggtggtttagattcattcgtagaaaatttgggtttattttcccataatggcaaagatgtgtaatttgaatatagattttagggtactttgggttaattagtttttaatagaataggacaataatagtagaagtagaatttaaaaaagaaaaaattaaattaagaataattaattaggtaaaccaaaaaaaaaaaaa

SEQ ID NO: 20065 - DNA, 512 bp, Setaria italica
  Peptide Sequence Number=SeqID_86039
gcgtgatgtggccgtggaggtggaggtggcggcggcggggaggtacatctgctgcagcctcaacacgaccatcgccgagctcgggcgtttcctggcgcagaaatacccgccgtacggcgtgaaaacccatctgctctccggcgaccgtcttgagaagccgagagtgtgcctgtcatctgcgaagctgctgagggaagggttcgagttcaagtacaagacgctggagcacatctacgacgacatggtcgagtacggcaaggccgtgggaatcctgcccaactgatgcgattctcctcttcctctgcttttgcggtcgatggtcacgaactcgcgagtcagaactcagaacacaaaaaccatgcctatactgctagtcagaactcacgcagacagtaatacaggaaaaccaatagcacaacatcgttttgtccatagtagtgtctagtctaattgtactttcttccatctcaataaataagaggtttgctttagtgtttaactttttatatcct

SEQ ID NO: 20066 - DNA, 452 bp, Setaria italica
  Peptide Sequence Number=SeqID_86040
gtaccgcagtacggcgtgaagacagacttgtaagaatcggcccgggatcacttccgcagcggagatcattgttgttcgtagtggttttattgcgagctctgattcctgatactctgcagcaccgacgatgaagacagacttcaccgacgatgatcagctcctggagaagccgagagtgagcgtgtcgtctgccaagctggttagggaagggttcgagttcaagtacaggaccctggacgagatatacgacgacgtcgtcgagtacggcagggcactcggaattctgccctactgatgatgatgatgctctgctcccgacagattgtactcatgctagtcatgctctacaaaaagattgttcaagatgtttcgcaatcctgtggtgtttttatctcggcatgttattcatgctggacaacattgttggtagtttaaggttgagatactttcat

SEQ ID NO: 20067 - DNA, 374 bp, Setaria italica
  Peptide Sequence Number=SeqID_86041
aaggcgtagtcgccggctgcgactacgccttccttgtcgccgctcccgtgaacctcaagtcggagaatcctgaggtgtggggccactgttctgctgtaaaaatttggcactactgaacaatgccttgacttggtccactcaaatgaactcgatgcatggcagaaagagctgatcgagccagctgtccgaggaactctgaacgtgatgaggtcgtgcgtgaaagcggggacggtgaagcgcgtcatcctgacctcgtcggcggcctcgatcaccaggaggccggagctgcagggcgacggccatgtcctggacgaggagtcctggtccaaacgtacgaagtaacctacaagaagaccaaacaaagaactagacta

SEQ ID NO: 20068 - DNA, 655 bp, Setaria italica
  misc_feature (594)..(655): n is a, c, g, or t
  Peptide Sequence Number=SeqID_86042
ccgcccgcaccagcgtcccgagctgcctctcccttctgtccggcgacgaggcagagttcgccgtgctgagaggcatggcgaaggcgtccggcacggtgccgctggttcacgtcgacgacgtctgccgcgccgagctgttcgtcgccgaggaggaggcggccgcggggaggtacctctgctgcagcctcaacacgaccatcgccgagctcgcgcgtttcctatctgcaaattacccgcagtacactgtgaaaacgaagctgctctctggcgatctgcttgagaagccgagagcacgcctgtcatcggcgaagctggtcggtgaagggtttgagtacaggtacaagacgctcgatgggatgtacgacgacatgatcgactatggcaaagccttgggaattctgcccaatctatgatgctcctctgctttgtatgggtgggtgatcacaactccaaaccagcaagcagttgcaagatcctccattctgctagagcactagtactagtacgttgaataaatacattgtgatgatagatgtgggtggtttagattcattcgtagaaaatttgggtttattttcccaataaaatttaccnnnnnnnnnnnnnnnnnnnnnnnnnnnnnnnnnnnnnnnnnnnnnnnnnnnnnnnnnnnnnn

SEQ ID NO: 20069 - DNA, 1193 bp, Setaria italica
  Peptide Sequence Number=SeqID_86043
ggaacccggttcgattccttccttgaaccctcttatcgaacgtcagcgaattgctgcacatctgcattaactgtagttttgatcccgagcgagccagccagtgaatcctcagcgactctcggcagccggcgagaagaagaagacggcatgcgtgaccggagggaacgggtacatcgcctcggctctgatcaagatgctgctggagaagggctacgccgtcaagacgacggtcaggaaccccgatgacatggcgaagaactcccacctcaaggacctgcaagcgcttggccccctgactgtcctccgcgccgacctggacgaagaaggcagcttcgacgaggccgtcgccggctgcgactacgccttcctcgtcgccgctccggtgaacctctcgtcggagaatcctgagaaagagctgatcgagccagctgtccgaggaactctgaacgtgatgaggtcgtgcgtgaaagccgggacggtgaagcgcgtcatcctgacctcgtcggcggcctcgatcaccaggaggccggagctgcagggcgacggccatgtcctggacgaggagtcctggtccaacgtcgagtacctcagagccaacaagactgctttctggggttacccggtctccaaggtgctctcggagaaggcggcgtgcaggttcgcggaggagcacggcatcagcctcgtcaccgtctgccccgtcgtcaccgtcggtgcggcgccggcgccgaccgcccgcaccagcgtcccgaactgcctctcccttctgtccggcgacgaggcagagttcgccgtgctgagaggcatggagaaggcgtccggcacggtgccgctggttcacgtcgacgacgtctgccgcgccgagctgttcgtcgccgaggaggaggcggccgcggggaggtacctctgctgcagcctcaacacgaccatcgccgagctcgcgcgtttcctggcacacaagtacccgcagtacggcgtgaaaacagacttcaccgacgatgatcagctcctggagaagccgagagtgagcgtgtcgtctgccaagctggttagggaagggttcgagttcaagtacaggaccctggacgagatatacgacgacgtcgtcgagtacggcaaggcacgtcggaattcaggttaactaattacttagtacttagtactaagtaccttactaaactaacgtaacctaa

SEQ ID NO: 20070 - DNA, 1112 bp, Setaria italica
  misc_feature (64)..(64): n is a, c, g, or t
  Peptide Sequence Number=SeqID_86044
ggcgctggactgatggagcaaggatgcgtggttccttaaaacatacatttgcaatcagaaacanaggggaccaagttcaggaatcagcaatgtgcaagactaatactctcatccgattgatcaggattgtggcgctgctggagcggctggtttgggagcatttagaagaggctggattgccttcacgacgatggtcatgttcggtcggaagtcggattcatactgaacgcacaacgctgcaacagctgccagctttgcgacagcctttggagggtagtcgttgttgagcttgggatcaacacactgcttcactttatcttcactcaaccttggagtggcccaagtaacaagactttgctgccctttcggcatggtgtgatcgaccggtttccttcctgtcagtagctctaggagaatcacaccaaaactgtatacatcactcttttggttgatttggcccgtcatagcatattctggggcatggtatccaaacgttcctagcacacgggttgagtgcaaccgggcagcggtgtcggtcccctggttggtcaggttgaaatcagcaatcttggagctgaagtcgtcgaatataagaacgttgctggaccgaatatctcgatgcacaatcgacggctggactttctcgtggaggtactctagccctctcgccgctccgtaagctatcttcactcgctgcaaccagttcaggaccggaccgggctcggcaccctgaactcctttcttcccgtgtagtatgttatgcaaagaacccatggtggcaaactgataggccagcatgcggttgccatcctccaagcagtaccccacgagctcgaggaagtactcgttcttgagcttggagaccatcgctatttgcgcggcgaagtcggagtcggagtcctgcgatgcgctggtgtcgagcttcttgatgacggcggcgcggccgtcgctgagcgtggcgttgtagacgcggccgtaggagccctcgccgatgagggcgcggtcgctgaagttgttggtgatcttcttgagctcgtcgaagggtatggcgggcacgtcgatgctgacgggcttggcggggtcccccgggtccttgggtccggccccctcgg

SEQ ID NO: 20071 - DNA, 1086 bp, Setaria italica
  Peptide Sequence Number=SeqID_86045
ttggcagagtaaagttagaaattttgattgcagtgggggcttaaatttacccttgaatttttacacgtatgtttcgtacgtaatattgctaccccgggctcataaactattgctgaaaagaaatttcaggatggcaagatcgaatacattatacttgcgacactactgactcatacaaaccaaaacgtagaaaacaaagcccatcctcgctctttatttctgatctgccagtaacacagacgacaacaacgacattgggtagcctgaattttgcagatctccatatcttcctcagacacaaatgtcggtaaaacaaatttttagttgttcgacgaggcttcagctgcagcctgatcggcctgccttttcttggcgtactcgaccagtctgtcgacgtccgccagggccgccttggccacgtcgagcgcgccgaactgctccagccacgcgttcaggagtgggctccttgtggcgtcaaagagcctcattccatatatcttctcggcggcgtggatccacgacaccaaggccccgagggtgacgtccaagtagccgacggtgtcgccgccgaagaagggcttgcccttggagatctccttgaaggccccctccatgttttcaaccgcaacgagggtctgcttcagcccctccgccttttcctcctctgtctttcctttggccgactgtaaaaacgaggccagaagcttgtcgtcaatgtaggcaccccagaagcgagcaatggcgcgttcgtaggggtcgctcgggaggagaaggggaccggtgccggcgaaggcctcatcgatgtactgcacgatgatctgcgactcgcagacgggcttgccgttgtggaggagcacgggcaccttcttgtgcaccgggttggacttgaggagcagctcgctcttgttgccgaagaggtcctcctcgacgtcctcgtagctcaggcccttgaagccgagcgcgagcttcacccgcataacgaatgggctcgcccacatgcccagcagcttcagctcatcacttcctccggccattttcagtactgttgttttcagctcgtttcagcttgtgtgctattgtcctcct

SEQ ID NO: 20072 - DNA, 874 bp, Setaria italica
  misc_feature (1)..(30): n is a, c, g, or t
  Peptide Sequence Number=SeqID_86046
nnnnnnnnnnnnnnnnnnnnnnnnnnnnnnctacacaaaattgccaagtgaacattcacttggcaatcccatcatttggctacccacaatgtttattacacgacccaatccgaaccaattcacttggcggcagccgcagcggcagcgaacttattgacaaattgcaaggcctcgtccgcccccggcaccacttccttcgcctccgcactttcccggaatcgctccgcccacgcggccaagagcggagtcttgcttgcgctaatgatctcgactccgtacatcctgcgcaccgcctcgaaccagaacaagaaggagccgagcacaatgtcgaggtacccgatggagtcgccgccgaagaaagccttgccctcgttgcacttggcgaaggcctcctcgatttgcgcgatagcggcaagcgtctcagtcaccttctccgccctctcgtcctccgtcttggccttaacgatgccgccataccacgccggaaatagcttgtcgtcgatgaaggcggcccagaagcgagcagtggcgcgcgcgtagggatcggtggggaggatggacgggccgggaaacagctcgtcgacatactgcacgatgacgagcgattcacacagcggcttaccgttgtggatgagcacggggaccttcttgtgcaccgggttggacttgagcaggagctcgctcttgttgaacaggtcctgctcgacgtactcgtagctcacgcccttcgtgctcaacgccatgcgcacccggatcacgaacgggctcaccagcaggccgagcagcttcagatcctccttgcctgccattgtattcttctctcagtgttttcctccactgactcttggcttgggtgtacttaatttctttgtct

SEQ ID NO: 20073 - DNA, 625 bp, Setaria italica
  Peptide Sequence Number=SeqID_86047
gccgctaccggtaatgtctttctctggcaccggggacgccgtcaccttgttgtaaggctcggcggcgttgatcctgtgcttcctcttctggaggaacctctgcagcgatgccttccttgcgatgggcaggtcagggagcgccgccggtgggtttgaggctagcttctccgccgccgctggcgcggctttagtctgtggcgtagccgcggagcccgacccggccagctgcatcagctcctcggccttgtcggctgggaagtcctcgaacacaagcacccggccctcgtagacgatggtcagcggcgccttcgcctgcgcctccggtctctcttgagacggctgcaacgtgccggcgcgcgtggggaagagctgcatggtcctgccgtccgtgtcctcatccttctccgtcgtcgtctccaccagaggcggcagccggaacgccccgtcgagtgcccccagctgctgctccctcatgtactgccgcaggagcccgcacgtgacggcgaacctggtgttgccggcggccgccatatccgatcctcctcggtgaagcacagaagcagccgtgccgtggggcactggtggtggtggtggtggtgtggtagttccgtctcttctggcgcgg

SEQ ID NO: 20074 - DNA, 532 bp, Setaria italica
  Peptide Sequence Number=SeqID_86048
ttttttttttttattagagaacagatcactatttcttaataggatgcagttgtacattaagataacatcccaatggatgaaaaagacacggtctctatcaatcccagactgatggagctgccggccggcgcctagctaggtgccatcggtcgagcaacatataattaattagtaaaagaattcctccgagtagtgctgaagaattctcaaacagagataacctagattaggtagatcaccatgaaggaggatactagtcagtacttctaccccttttcatgaatgttcgatcggaatcctgaatcctgaaacgtttctagagcccgagccatgaggcagctgcaggctcatctgtcgcaggcttgccgctaccggtaatgtctttctctggcaccggggacgccgtcaccttgttgtaaggctcggcggcgttgatcctgtgcttcctcttctggaggaacctctgcggcgagtcgttacttgcgctgggcacctctttgttttcgttttattttttgggtttttcttttta

SEQ ID NO: 20075 - DNA, 365 bp, Setaria italica
  Peptide Sequence Number=SeqID_86049
ccggcagccgcaccaaaaaaccccaacggccgccaggacgccgccccgacccaccgcgccaccatgcccgccgccgcggcgctccggccgaccgaaccgctcccacttccgagcgggctctccctaacaccgcgcctcaagcttatcctcaccttcttccgtgctgacctcaccgtccgccccctcgacgagtggcagctcaagtctgccctcctcaccttcctccgcgacccgcccctctcgctcccgctcctccccgactccgacctctccgtgcgccgccttcccaacctccagaagcgccgccgcgaggagcccgtcgcctccggggccctccatgtccgcgacctatccttactacgccc

SEQ ID NO: 20076 - DNA, 931 bp, Setaria italica
  Peptide Sequence Number=SeqID_86050
ttttttttttagcaaagttcaactatcttccaagaagacatgacatctcatacaaaaaaaactcgtcaagagttatatttgtgttcacaatttattcactcgtgtcagtatcctagcatctcaaaaatctttgaagacaaacactgattcacaatacagacatgccatggagtaatggactaatggctgttgctacaaacactgattcctacagttcaaggatccttgcagtaattctctacaacaggtggctaacggatcacaaagttcttatgataatgctggagcatttctcttctaatttcaaagtttggtcaacatcatacaatcatacagaacttatgaacaacaagaacatgaaactaccaagaaaacttccactcctgatattggtaaatgatgctctgctatacttatttttcagtgggtcttgggatcggcttgtagtcgtagctgttgatgtcaaccttttgctgcaaagccttcagttcatcctctagagagagcttcttgggcttataggccccttccactggccctgtccggcttagagcttttgttgtttctacaacctcccattcaatgtcctccttttcctttgtcacttctttgctgccctgtataagatgcgccagcccaactgcaccaaacactgtcaaggaaatgagtggtaacccatagcggacgaatggatgttttcgccccaatcttttgaactgtgaggcttgtttgaaaaccttagcagatgattccactggattaattttctgagttgtactcatggtcataccctggtcaccgagatgaagcaaaggaaccgcgggtaaagggggtgccctgggctgctttctctgaagagcttggcgtcccgccactggtcgccggctgctgacgtgagagtgagcgggataggcgcgagggagagacggcg

SEQ ID NO: 20077 - DNA, 483 bp, Setaria italica
  Peptide Sequence Number=SeqID_86051
tattttagagattgctcgctccacaagctgatcaaatgttagcctaccattctgaagtaatccttcgagaagaacttctgactctggaatatccacacggacaacagaaaggaactttgagaagcgcagcctgtgcaggacattgtcgaagatggccaagtagaccgtgaccgtcttatcgccgctccctctgggggttgagtaggcttggacgcagttgtgctggatgaggacgaggagggagttcttcacctgccccgacgagagcccgaggcggcggacgatctcctgcagcgacagcgcgccgtggcgcaggaggcagccgcacaccttggatacgagggggccgaagtgatcggagatgatgctgacggcgaggaggatgccgtgctgcgacaccatggccgcgagccgcgcggcggcgagggaatcgctggggttttgggtgcgagatgcggtggccggtggtggtctcgccgcgcc

SEQ ID NO: 20078 - DNA, 1864 bp, Setaria italica
  Peptide Sequence Number=SeqID_86052
ttccagagtcccgttcgccctagacacgccgcctcctctcgtccacctattaaacgcctttcctttccccgatgccatcttagcctgcccgtgaccgaaggaatcgtcctgatccacgcagccctccccgccgccgccggcggccagggagacggcggtatggggaggatcccaaccctgctcatgggacgctacgagctgggcaagctgctcggcaagggcagcttcgccaaggtgtaccgcgctcggaacatggagaccggggaggaggcggccatcaagatcatggacaaggatcacctcgccaagtccggcgccgtgcagcggcaggtcatgcgcgagatcgacatcatgcgtcgcgtgcgtcaccccaacatcgtccgcatccaggaggtcatggccaccaagcggagcatcttcgtcgtcatggagttcgtcggcggcggctccctcgacgtctacctcgcccaccgcgccggccgtggcgtcggcgaggcccctgcgcggcgcgtgttccagcagctcgtttccgcgctcgactactgccactccctcggggtgttccatcgcgacatcaagccggagaatatcctcgtcgacggcgccggcaacatcaaggtcgccgacttcgggctctcggcgctcgccgaggacgagcggcgggaggcactgctccacactgtttgcgggacgcccatgttcatcgcgcccgaggtgttcctccgctgcggctacgacggcgccaaggctgacgtctgggcctgcggcgtcgtcctcttcgcgctcgccgccggccggtatcccttcaaccagagagacaccagcctctaccacatgattcgccgcgccgactaccactgtccgccatggttcagcaccggccttgcccgcctcgtccgccgcctcctgtgccccgacccggcgcgccgaatcgccatggcgcaaatcaaggagaacgtctggtttaagaagggattcaaggaggtaccacgaagcctcagcgagccggaggagcgcgactccgactccgacgatgattcgaccgtgtcgctcgcgtcgtcagaggatccgtcctcgccggtggtgcgcgcgcagcaccgtagctacagtagcggcatgcacacctcggtgtcggcgccgtccctgacgacgctcgagaatacgggcagcgccgctgaacccccgcgcatacgccggctgaagagcctgaacgcgttcgacattatcgcgtcctcgccgagcctcaacctgacggggcttttcgaggagcccggcgagcaaatgcggttcgtgtccgcggcgcccgtgtccaagatcatctccaagctggaggagatcgccgggcacgtcagcttcacggcgcgcaccaaggagtaccaggtgagcatcggggggaacgggagcaggggcgcgctgctcgtctccgccaagatcttcgagctcacgccggagctcgtcatggtcaaggtgtgcaagaaggccggcgacaccgccgagtacaggcagttctgctacaatgagctcaagcccggcctgcgcggcctcgtggacgggctgccggaggacggtggcgagcccatcgcttctaactctggatgatcggtggactccatcatcagggcgtggctcatgtatcttcagtttatttcaacagtttgatagtaagttttaggagttttgattgacagtgttaatgccttattggtgtgtcaagggtgtatcatggcactgttgttgttaggtagctaaattctaggtatgtacctactcatctagggtgtatacacttctcaatctttgtgagttgtcttttaggaaaagataatctattgtttagcacacctgttctttaaataaaaaaaaa

SEQ ID NO: 20079 - DNA, 720 bp, Setaria italica
  Peptide Sequence Number=SeqID_86053
ggctcgctccgcccaggtctctggtcgaatcgaatcgggtgggctcgggctcgtctcccaggaaagcgcaacgagattcctcgcgcgcacggcagatcgcgcgggagtggagggagtgggggaaacgagccgcgagtgcgcgaggagcatgggatcggagggacggggctggaacggcgcggccgccggcagcggcgacggcgtcggaggcagggaggagaagccgaccaccaccgccgcggtggccgcgggggcgccggcggacgtgcccacgtctgcggcctccgtcgacataaccctgccgctcccggagatgacgcctcgcatcataggcctctgcaaggagttggtcaaagggtggtcatcgctggacagctcctgcttctccatcgagacggtgtctggcggcatcacgaatctatgtgagttccctgctcgataccctgacagttgcacggcctgtcgcactacacagatttgagattcctcaacctttcacctgtgcggcggagtagcaaatgattctacaggccgtgatgttccagaagcaatgcacacgcagttgcttaaaatttagcacgtcgttgacctcaggacctcagctttttgtttccgctgtaacgactgcttggccgctgccttcttacttttttttataatcctgcttcgtgctacttattgttcctgtttgcataagaaggggcagatcttaatactttt

SEQ ID NO: 20080 - DNA, 268 bp, Setaria italica
  Peptide Sequence Number=SeqID_86054
gccgccgccgccgttgctgcgccgccgccaggcgtccatggcgcggccgacgcggcgctgcatgccggcggtgaccctcgccttgagttgcggcgacttgaggaaggcgccggcgaggccgtgcaggcggcgctggagcgcgccgccgagcaccaggatggaggactgccccatgagctccatgagcgaccgcgggtaccacggcacgaacgccgacgcgtccgcctgcagcaccgcgcggctcaccgtccgggtccgagcctccacc

SEQ ID NO: 20081 - DNA, 468 bp, Setaria italica
  Peptide Sequence Number=SeqID_86055
ccttccgatcttctggtacaacagagatcatccagtttcaggacatttgttggagagaggaggaccacacaggccgggttgccgatatagattgacgcctggtcatcgagcacttgcagctgatttcctgatggtatctttcctgtaagattgttatatgacatgttcaagtggcttaaagaagtgagagctgataagcttgttggaatttcaccagacagctcgttgtgtgacaggtcgagagactccacttgcaccagggcaccaatcttttcaggaatttttccagtaaaggaattccatgacacatttaagctcttcagtgcaacaagactaccgatctcttcaggaatatttccaataaaattgttacacgataaatccagattcaccatatatatgatttctcctgtatatagttgttcttgaccctttgtgactactgtgaaattgtcatcatactctatc

SEQ ID NO: 20082 - DNA, 496 bp, Setaria italica
  Peptide Sequence Number=SeqID_86056
aactggaacactatgtctaactgattgactaactggtacttaaacacacactaacaacaaaagattcacttcattaaaaatcggtgtttatattctgtgccagtcatgatggtcaatcaggaacatattcatgcagtaccagtatagcaattagccatgcacatcattctgaatttatctactgccactcatataaagctcaatccaatggcatgctagcaaattatgctggatatattataaaatatagattcttagccagtaaagtcagcaatatgcttaacatgtaaataggtcactggtgtaagtgtgtagacaaatagtcaccaatgggtcatccaggctagtaaataataactctgctatgtccttccaataaaaccaagaactacctcttttctagaaaaggccgcaaacaataaagaagttttaattgaaacagagaaaatgtgaggttatcctttactgctttaatgcaacagtttcgataaaggaa

SEQ ID NO: 20083 - DNA, 375 bp, Setaria italica
  Peptide Sequence Number=SeqID_86057
tgttccctattcttctttcctgcgcctgacttccattccttttattctcacaccaggaaattttgctgagccagtaatatattgaacccacattattaatgcgcactggtccaacactttacttattgtttgctgagaactttggagccattcaaaaaacaattgaggtacttccagtgagcaatttgtcaagtcctccatgaaggatgtccagttgctgcccttggttaggcttacaaactaaaaggtcctcaagagattggcgacgatgcactaccaagtatttaagtaaatcaaccgccaagttttgagctgttagtctcttgtcttggagaagtgccaattaattatgcagaaacacacattagatcagta

SEQ ID NO: 20084 - DNA, 399 bp, Setaria italica
  Peptide Sequence Number=SeqID_86058
cttccctccagttcaagatggagggaaggctcttcggttgcctggagggaaggctcttcggtgctgagcaggtccagggagggaaggctcttcggtgctgagcaggtccagggagaggacgaccttggcgacgacggggttggggttggcggcgtcggaggaggacgaggcggaggcggcctgccaggcgcgggagacgaccggggggcacttcatgagccagacggagcggtcggcccgcgccgtctccaggtacttggcctcctcgcccatcggtcgtcccgccgccgcggcgcgatcccgatccgcaaaggctctcgctgttctaccggagtcgggctgggaccggcggcaggaggcgggcggcggcggcggcgctagggctcggcctcgggcttg

SEQ ID NO: 20085 - DNA, 1339 bp, Setaria italica
  Peptide Sequence Number=SeqID_86059
cctatcccctgtgtgccttgcctttcccctgttgcgtgtctcagttttttttttttaacttttttacgctcaagtctctgagacatggttactcatcattcagactgtccatccagtaattcagactgttacatgtagtttcagttctttttttcctttctgtaaacaatttatatccagcttataaattccttacaaacaatgcctctcaaagcatacaaatgaaactgaatgatatcatgtttacatgtagcctgatttaccaacagagaactaatgattccgcatgtcaggccaacaggtgatcagtatctttcactcatgcaacaacatataagatggactggcatcttcaagcagcatcagtgtcgccggtggacttcttgtattctggcttgagctcatgcgtcccctggttcggtcctcgtttgttgtatacgcagagatcattcagtatctccttcaggaattgctctggctggtcagtttcttgcactagcgcctttagtgcccaattaggctgcctttcaaaaagcttgaatataatattttccatttccgtgcgatccctacgagttcttttcacatcagatggtttggttggtgttggcttcttcttctcctttgaaccagaaggtattagaccaaccatgccaggcagtggtctcatgctcattccatggtcattgtcaagtacctgcacttgtctagatttaaccatatatttttgtgtcctttcacggcataactttccatagttcaccaaattatcactgtgaggttccatgtcgaatttatgctcgacttttccttcgcacgaaagtttcccttggttcgattcagagaaaacacacataggcacgaaatcttggaacatattcaaagagtagcttttaggtgtattgccagcattattagtttgagccaactccatcttgaactggagggaaggctcttcggttgcctggagggaaggctcttcggtgctgagcaggtccagggagaggacgaccttggcgacgacggggttggggttggcggcgtcggaggaggacgaggcggaggcggcctgccaggcgcgggagacgaccggggggcacttcatgagccagacggagcggtcggcccgcgccgtctccaggtacttggcctcctcgcccatcggtcgtcccgccgccgcggcgcgatcccgatccgcaaaggctctcgctgttctaccggagtcgggctgggaccggcggcaggaggcgggcggcggcggcggcgctagggctcggcctcgggcttgcgatctgacagctgcggagggaggacggaagacgggaaagggacagcacgt

SEQ ID NO: 20086 - DNA, 627 bp, Setaria italica
  Peptide Sequence Number=SeqID_86060
agcctccccaagaacagacctgaaaggaaaatacagtagcataatttggatacatgatatatagtagtatgaacgtgtagcctccccaagaacagaccatgtagaagtatgagagagcattaagtgtcgcataatagcgtgatccggtgtttagtgtctttacgtataggtaaaacgtgaatattaaagcaaatatagctacagcttcattatcatagctgccagcaacagatcttgagatgtatgatgggacctgcatattggtgaggagtgataattaggttatttattgagtgatatttaaaggccaagagcatactgttaaacatctaaaaggggtgaaaatcgtatgaaaaaggctgatcctaaacatcataattaaatgagagtgaaacaataatcccgcacaaagaaaaggataccaattcatgacatgattctcaacaacaggttttcagcaataatcaatgaatgaagctcagaagtgagcttctcatttcaccactttgcatgcctttctcatgccaggaacagatctacttgtcagtgataggcaatgctactttggatgaatgagaaaaatcaaagaccaaagggcccttgaaggtttcggacatacaagctcag

SEQ ID NO: 20087 - DNA, 451 bp, Setaria italica
  Peptide Sequence Number=SeqID_86061
aaccgtaggtttacgtagaaaaacgttagaagactttcttgaaatataccgtgcagacttcgaaattggctgtttgcaaattgaatcacttggtgggttctcagcaacatggtcggcagctacctcccttgagcatgaactgttgaactgatcgcatcgcctgaagtccctcaaaagctgaagcagctggattgagcaatctcttgccagctcagttccattcactgataagtcaaccagggctgggatgataccttccttcatggcaagtgaacaaacctcagcactgtcagaacatactgcaagaaggataactaccgcatgctcctgttctctgtggcttcctgtgtcaagatgatctgaaatggaactgaggcaattgtctgttcttattatgaactctgtggcttctttcacttcacttaggttccgtaaaatcttcaaagaagac

SEQ ID NO: 20088 - DNA, 551 bp, Setaria italica
  Peptide Sequence Number=SeqID_86062
ttttacgttttttgtttaagtttagtttttctttaagttcttttctagtattaccttcttctaagttggtcccttgtaattttgtcttttctttgtttggagtgatgacatggattcctctcttgagccaatcataatagtgagatgcaacactagtgtctgctgtgcaatctaccaaaactctgttagggaagaagtgattctcagacaaatgatgaacaaacttgtcaagatcggccggttctgcttcagtttgcagcttctctttccactgggtcaaatcgattcctatatcacttaaaagcattgtccttgaaccagttatacccatgacacgcaggtcaatgttcatattttccttcaggacagcagcctggtccttcagctggttaagcagtgtgcgaccaatcaacccaggtcctacaattccaacagccagtgtggttttggagaggaagaaccttgagtgggcagctctcaaagcccgtacacagtcttcttgcttcaatacaactgtaatgttgtactcaactgacaaaccttagaagaca

SEQ ID NO: 20089 - DNA, 384 bp, Setaria italica
  Peptide Sequence Number=SeqID_86063
taagtaaccaggcaacacatccatactggaacacatgtccttcaaccatctagcagcggagatagataaacaaagatacgacaacagtaactctaagtggccttgtcggacttggcagcagtggctgcagcctggcccctgagacgaccggtcctcctccgtggggatgctccacggggttcatggccacaccacgcaccttaggccagcagttcctcttcacacggtacttgtggtaggcgttaccagccttcagcatgggcttctcagtcctgcctccaccagcaacctgacccaatccatggcacggcagctgctggggacaatcttcttggcgccagaggggagcttgatcctggaggttccgttgtcggggttgtggct

SEQ ID NO: 20090 - DNA, 439 bp, Setaria italica
  Peptide Sequence Number=SeqID_86064
cctggcagcgatgagaccaaccttctgccgggggtgcgtcacggcggacagtggaggcgtgaccaatgtgctggtggttacctcctccgtggggatgctccacggggttcatggccacaccacgcaccttaggccagcagttcctcttcacacggtacttgtggtaggcgttaccagccttcagcatgggcttctcagtcctgcctccaccagcaacctgaccaatcatggcacggcagctgctggggacaatcttcttggcgccagaggggagcttgatcctggaggttccgttgtcggggttgtggctgatgacgatcgcgtagtccccggaggccctggcgaagacgccgcggtcgccgacgtaggtagactaacgaaacgttaagaacaaaagaaaacgaaaacggaaacttaaaccctaaacgggaaaattaaa

SEQ ID NO: 20091 - DNA, 404 bp, Setaria italica
  misc_feature (404)..(404): n is a, c, g, or t
  Peptide Sequence Number=SeqID_86065
aaaaatctcaacagtagccacaaaactgataaatgcccacagtctcatcaaaatgacacaaaatccatgcaggaaatcatgttttaatctataaggtagattatgctccatatggcaaaactaactgatttaagtggccttatcagacttggcagcagtagcagcagcttggcctctaagacgaccagttctccttgcagcaattagaccaaccttctggccaggaggagcgtcacggcggacggtggaggcatgaccaatgtgctggtggttacctcctccgtgaggatgctcaacagggttcatggccacaccacgcaccttaggccagcagttcctcttcacgcggtacttgtggtagccaatgctcaaggctggcaatgcctaccacaagttccctctcn

SEQ ID NO: 20092 - DNA, 568 bp, Setaria italica
  Peptide Sequence Number=SeqID_86066
cctgaccaatcatggcacggcagctgcgtggggacaatcttcttggcgccaggaggggagcttgatcctggaggttccgttgtcgggttgtggctgatgacgatcgcgtagtccccggaggaccctggcgaagacgccgcggtcgccgacgtggtgctcgacgttgcagacgacggctccctcggggataccgcgcagcggacaagacaacgttgccgatggagagcgtggacgacggacggaccgcagtagatgaactggccggtgtaaatgccctcggcggcgacgaagaggctccttctggtgcttgtacctgaagggtggcggaaggtgaccttggcgagcggcgcgccgcggccggggtcgtggatgacgtcggtgacgacgcccttgaggtacccgttgcgctcgccgaagtcgagggagcggaagcgggcggggcccttgcggtggtgggtgtgggacttgaacacggaccccgcacccttacgttgcgcgcggatcacgcgacccatcttctccggcggcggcggcgcggcggaagggggatgcgagaatgggcgctgtg

SEQ ID NO: 20093 - DNA, 577 bp, Setaria italica
  Peptide Sequence Number=SeqID_86067
gttcattcctcgtcggagatctccacgacccccgccgcctcctcctctccctctacctcctcttcgtcatcctcctcctcgccctctccgtcgtcatcctcgtcaccgtcttcctccccatcgactgcctcctccccgtcttcctcctcaaccccctccttctcctcctccacatcaaccacctccgcagccttcttggccgccgccgccgccgccgccttcttgcgggcaatctcggccgcccgctcgtccgcctccacctccacctccggcttcatcccggctgagcagcctgtgatggcagatgcagacagggaggacgccggcgcgatggaggaaggatgcggacgaagaggatgcgagcgaggcgaacgggatgcagatgcgcgcctgaagtggatggggacggggtggacgccggccaccgacgggatctacgaggaggatggagcggaggacgtctaggccggccggcgggcggtgtgcagtcgccggtcgagggtcggggagacggggaatttgttttgacaaaggggattcgtgaactgtagtagtgcggctgattggggtcgtagtt

SEQ ID NO: 20094 - DNA, 991 bp, Setaria italica
  Peptide Sequence Number=SeqID_86068
ttttttttttttccttaggcaaaaacttacttttaggcataatgtaaaatccagacagcgaccaagaaaactgacacaatggtgaaccattgtgtcaggcaacacatccatactggaacacatgtccttcaaccatctagcagcggagatagataaacaaagatacgacaacagtaactctaagtggccttgtcggacttggcagcagtggctgcagcctggcccctgagacgaccggtcctcctggcagcgatgagaccaaccttctggccggggggtgcgtcacggcggacagtggaggcgtgaccaatgtgctggtggttacctcctccgtggggatgctccacggggttcatggccacaccacgcaccttaggccagcagttcctcttcacacggtacttgtggtaggcgttaccagccttcagcatgggcttctcagtcctgcctccaccagcaacctgaccaatcatggcacggcagctgctggggacaatcttcttggcgccagaggggagcttgatcctgcaagaacataaacatatgagtagctgcatccaggcaaaagactaccctcagatcatggctgcatacagacaatgacatacacaccacagaaacacaaatacaagggcaaaataatgacaaaatgaaaggctgtcaagtaggcacatgtattaggatcagtgacatcaacaaagttctatacattgtgactcaaatcatcatctacaagatatatcaaacattacatgatcatgaataggtaacaagtaacaaaatcatcaacacttatgaacacataagaaccacaaacatgacaatttataagacttgccaacattgcaaaccaaactgttaggctcataatcaacagaacagaaccaacaagacacgttaaacaaaaacccaaatcctcattataccaaaactgatgttaaaaaatactaactattaaactgatagaaccagcttaaaatggatggattct

SEQ ID NO: 20095 - DNA, 1217 bp, Setaria italica
  Peptide Sequence Number=SeqID_86069
gttcaagaaatatcagtgagagcactagacataaaacacaataacatacactgcaacttgtttatatagaaccaaaaatctcaacagtagccacaaaactgataaatgcccacagtctcatcaaaatgacacaaaatccatgcaggaaatcatgttttaatctataaggtagattatgctccatatggcaaaactaactgatttaagtggccttatcagacttggcagcagtagcagcagcttggcctctaagacgaccagttctccttgcagcaattagaccaaccttctggccaggaggagcgtcacggcggacggtggaggcatgaccaatgtgctggtggttacctcctccgtgaggatgctcaacagggttcatggccacaccacgcaccttaggccagcagttcctcttcacgcggtacttgtggtaggcattgccagccttgagcattggcttctcagtcctgccaccaccagcaacctgcccaatcatggcacggcagctgctcgggacaatcttcttagcaccagaggggagcttgatccttgatgtcccgttgtccgggttgtggctgatgacgatggcgtagtccccggacgccctggcgaagacgccgcggtccccgacgtggtgctcgacgttgcagacgacggcacccgtcggggatccccctgagcggcagcacgttgccgatggagagcgtggcgcggcgcccgcagtagatgaactggcccgtgtagatcgcccgtcggcggcgacgaagagctccttctggtgcttgtagcggaacgggtggcggaaggtgaccttggccagcggcgcgccgcggcccgggtcgtggatgacgtcggtgacgacgcccttgaggtaaccattgcgctcgccgaagtcgagggaccggaaccgggcggggcccttgcggtggtgggtgtgggacttgaacacgctccccgcacccttacgctgcgcgcggatcacgcggcccatctcagcggcggcagcggcgacgcggggtggcggcgccggaggggaaggagggaaagagggttagggtttggggggcgtgttcaagtcccacacccaccaccgcaagggccccgcccggttccggtccctcgacttcggcgagcgcaatggttacctcaagggcgtcgtcaccgacgtcatccacgacccgggccgcggcgcgccgctggccaaggtcaccttccgc

SEQ ID NO: 20096 - DNA, 1128 bp, Setaria italica
  Peptide Sequence Number=SeqID_86070
agttttttttgaagttccatggcctaacaaaccaataccatttagcacgaaatatccaggcaaaaacttctttaggcataatgtaaaatccagacagcgaccaagaaaactgacacaatggttcaccatagtaccaggcaacacatccatactggaacacatgtccttcaaccatctagcagcggagatagataaacaaagatacgacaacagtaactctaagtggccttgtcggacttggcagcagtggctgcagcctggcccctgagacgaccggtcctcctggcagcgatgagaccaaccttctggccggggggtggcgtcacggcggacagtggaggcgtgaccaatgtgctggtggttacctcctccgtggggagtgctccacggggttcatggccacaccacgcaccttaggccagcagttcctcttcacacggtacttgtggtaggcgttaccagccttcagcatgggcttctcagtcctgcctccaccagcaacctgaccaatcatggcacggcagctgctggggacaatcttcttggcgccagaggggagcttgatcctggaggttccgttgtcggggttgtggctgatgacgatcgcgtagtccccggacggccctggcgaagacgccgcggtcgccgacgtggtgctcgacgttgcagacgacggctcccgtcgggggataccgcgcagcggcagcacgttgccgatggagagcgtggcgcggccggccgcagtagatgaactggccggtgtaaaatgccctcggcggcgacgaagagctccttctggtgcttgtacctgaaggggtggcggaaggtgaccttggcgagcggcgcgccgcggccggggtcgtggatgacgtcggtgacgacgcccttgaggtacccgttgcgctcgccgaagtcgagggagcggaagcgggcggggcccttgcggtggtgggtgtgggacttgaacacggaccccgcacccttacgttgcgcgcggatcacgcgacccatcttctccggcggcgggcaatctcggccgcccgctcgtccgcctccacctccacctccggcttcatcccggctgagcagcctgtgatggcagatgcagacagggaggacgccggcgcg

SEQ ID NO: 20097 - DNA, 468 bp, Setaria italica
  Peptide Sequence Number=SeqID_86071
aagaaagaagaagagcagctgggagtgctaaagtctagaacaacagatctgtctaatgttgttcttcaagagcggaatgagttagttgatgagctgactggactcaccaatactattggggaggtaatttatggaggtgaaaacctgatgtcaaatttgagaaggatcacgcagaaagttaatgaagaggagccatacaatgacacgcctagctcagaaaaaactaatggtagaacttctgcacctttgatcaagaacaaatcagggcatgtcctagatagaagatcgcctttgaaggagcacaactactagtctttgtacctggtagatcagatcgtgtactgacactgttgtaacatctgtactctgttttccaagaatccgagaggcttcacatttagtccatagattactagatttgtaccttttctttccttccctaatgccatctgtgttacgttatttaca

SEQ ID NO: 20098 - DNA, 343 bp, Setaria italica
  Peptide Sequence Number=SeqID_86072
ctgccgttgttcgcggccgcaagaatcctcgcgctctcctcagctagggcatcgcagaaggccctgtgcgtgagcaggctgtccttcctggtgaagaggatgccgcagtcgcagcggtactcgcgcgtgccgcatcccttgacgtgcgccttccagtccgactgcacggcgtagcgcttcccgcaccgctcgcaccgccaccgcttctcgccgtgcttccgcgagaagtgcttcttgatccccgtcaaatcccccagcgccctcgcagggtcgtggtggacgcaggtgggctcggggcagacgtacacgcgcttgcgcggcgcgccgccgcggcgtcgccctg

SEQ ID NO: 20099 - DNA, 774 bp, Setaria italica
  Peptide Sequence Number=SeqID_86073
aaatttaactacatgaaaactaggaagccacaggtgtgaaggcatgaattcgaacacttatatgtggacaaacatctgatctttgaagttagttgtattgtttcgattatgaaggtagttataatgaaaagtgaaaaactgaagtaatgttgtaatatcaaacttacaattcaggaagatcagcatcagatatggcttcactaagcatatgcccatgttcttggatgttttgtttcatttcaagtgaaagcttttccattccatcaagtttcacaatgcttggatagtaagctctcgcaacaaagagctgatctttaagtctcttcactataaaatctttcatgacttccttatgttctacagaccaaagacaatagcttccaaactgaagctggcaggattttccattctcatcaccaggtaaaccttgctcaaaactgcccagatcagtgtcggtaacatagggcaatgaagaattttccaacactgtggcttgtcggatgggaggagctggacggattgagatattgccaataaccgtgtcggattgactgccatttgtttcggtccgctccttcgaaggaggcggcaccagctccttcacggtattgttgacctgcaaactgtcatttcccttcgacggaatcggctcccaactaccgccctcgctgccatcataaaccgacaccacgctctcgtcgaccaggtacatcgaggggaagcgcgcgtggaggccgaggagcacggcgaggggcacgacgacggagaagaagg

SEQ ID NO: 20100 - DNA, 286 bp, Setaria italica
  Peptide Sequence Number=SeqID_86074
aacgtgagggaaagaggctaaacagagaccttttgcgcattgcgcctgtttatataggaggctcctctgaaaatgaaaagtcatatcgtggttgggaatctgttaccttgagaacatgcccctattagtgccctcacaacaagtgtattaccggtaccagggtggccatgcagcagaacacctctcggaggtgtaagacctaaagagctaaagaactcaggatagagaagaggtagtatcaccacctccttcatgctctgaataacatcattgagcccagcaacag

SEQ ID NO: 20101 - DNA, 1378 bp, Setaria italica
  Peptide Sequence Number=SeqID_86075
tccaattcacgaccggctttggcattgcacgtgtctgggttcatcagaactgtgctgtttggagtcccgaggtttactttgctggtttggggtgcttgagaaatgtaagagctgcactttgccgtggaaggcttctgaaatgcagtcgatgtggcagacctggtgcaactattgggtgtcgtgtcgatcgttgcccgaaaacctaccatttgccttgtagtcgatcggaagcctgtatatttgatcaccggaattttcttatagcttgcaacgatcatcgtcatctcttccaaccccaaggagataagtatgttgaattactcagaaaactgaaggtaaaaaagatgaaggcagatgtcagaaagctgtcacaagatgcatggagaaaggacagagaggctgaggagaaatggttagagaactgtggggaagatgaagagttcttgaaacgtgagggaaagaggctaaacagagaccttttgcgcattgcgcctgtttatataggaggctcctctgaaaatgaaaagtcatatcgtggttgggaatctgttgctgggctcaatgatgttattcagagcatgaaggaggtggtgatactacctcttctctatcctgagttctttagctctttaggtcttacacctccgagaggtgttctgctgcatggccaccctggtaccggtaaaacacttgttgtgagggcactaataggggcatgttctcaaggtaacagaaggattgcttattttgctcgaaaaggtgctgattgtttgggtaagtatgttggtgacgccgagagacagttaagacttctatttcaagtagctgaacgatgtcaaccttctatcatattttttgatgagatagatggtttagcaccttgtagatccagacaacaagaccagacacacaattcagtcgtggcaactttgctttcattgcttgatggtttgaaatcacgaggctcggttatagtgattggggctacaaatcgccctgatgctattgatcctgctcttaggagaccaggaaggtttgatcgtgagatatactttccgcttccaacctttgaggatagatctgctattctgtcactgcatacgaaaaactggccaagtcctatttcaggtgcattcctgtcacttattgctagccaaactgttggatatgctggtgctgatctgcaggcaatctgtacacaagctgcaatcaatgctttgaaaagaacctgcccgttacatgaaattttgctatctgctgaaaaggagttgagcaggggacgaagttacctttaaccaatacaagttacttagtaggaaggaaaagaagaattaggttaagactagactacttagacaagactagacccctaccaaca

SEQ ID NO: 20102 - DNA, 358 bp, Setaria italica
  Peptide Sequence Number=SeqID_86076
gtggtgcgtggtgactggtggccgcgggttcgcggccaggcacctggtgacgatgctcctccgctccggcgagtggcgggtgcgcgtggccgacctggcccccgccatcacgcttgaccgcgacgaagaggaagggttcctgggcgccgcgttccgcgagggccaggccgcctacgcctccgcggacctccgcgacaaggcccaggtcgccagagcttttgaaggggccgaagtagttttccatatggctgctccagattcatccatcaacagcttccagcttcattattcagtcaacgtcgagggaacaaagaatgttattgatgcttgtatccgttgcaaagtgaagagactaatc

SEQ ID NO: 20103 - DNA, 299 bp, Setaria italica
  Peptide Sequence Number=SeqID_86077
ctattaccgaatatgttggattccactgtttccagaaaaaggaaacataatgaattgcatgtatgctataacacagttcactatccatagatatataagacatcttgtgaagcaaatggtgttcaacaagaaacaacaaaaacatcaagcatttgaccttggcattggtttaaatgaggtcacacatgaaagaagaacggaccaattggatgcacggtgagtgctggacggttggagactgcagtgtgcttgctgaggaatatgacctcggagacaggctctccagtggcttcctgcca

SEQ ID NO: 20104 - DNA, 586 bp, Setaria italica
  Peptide Sequence Number=SeqID_86078
ccgacgctaggattcattgttgagcgtttctgggagattcaagctcacgaacctgaagagttctggacgataaattgtactcatacttctgacgaaggcactgcatcttttggttggatgtaagatgcccttttagaagctcttctgacattttcattatgaaagtcttgtgacattttcttgttcttgtcagatgtggtcatttgtttgactacccatccgctgtttactttgtgatcaagatgtgcaattacttcaccaccaggaaatgctgcctttgtggcttcataggaaactttgatggagtgcttccacattccagcaacctctccagaagtctttccatttatttgggatggagtttccatcggcaaggagtaaccagagagtaaatgacccacccatacaccatctttgctgaaatattttcagaatgtgactgttaaaatataggtattcctcaagtacatcaaaatacccttaaatcaaagtctataaaagataaagatagatcacaggttttttcttatatctagtatcacatgccataaaaaacagttttagatcaaaatatttttcattaatt

SEQ ID NO: 20105 - DNA, 391 bp, Setaria italica
  Peptide Sequence Number=SeqID_86079
tttgtaattgatgtcactggggatgacaggatttagttctgagctatggtccttgtcagttccaacgctaggattcattgttgagcgtttctgggagattcaagctcatgaacctgaagagttctggacgataaattgtactcatacttctgatgaaggcactgcatcttttggttggatacgtggtcatttgtttgattacccatctgctgttatactctatgaaatgtgtgtggaagaaccaatggcaacagttcaaaatgttagaaatcaagaaaaattaaaataccccccatatccactaagtacattggagcttcaaaaacgtgcttctaggtacttcagaatgagttcagaacacacaatgaaggttggcttgtaagtaacttta

SEQ ID NO: 20106 - DNA, 1090 bp, Setaria italica
  Peptide Sequence Number=SeqID_86080
cggatattctttagctccaaagctgccgctaatagccttgacgcacataaaatgctacagttgatggcactaggcatgtcaatttatggaactggcattattaaactcaaaattatgtacaggtggttcgcaatccaaaattacaatgactaagctaaaaacgaatgcaatgaagtagcatcttctacagattagatgtaccaaactggtgaagaaacgtacttgtgatcaagatgtgcaattacttcaccaacaggaaatgctgcctttgtggcttcataggaaactttgatggagtgcttccacattccagcaacctctccagaagtctttccatttatttgggatggagtttccatcggcaaggagtaaccagagagtaaatgacccacccatacaccatctttgttgacaatatccatatgacgaggagcatagtgaccacctcctatacctagtagaaccttttcactattcccctgccaacttccaacagcatttccatcctccagaccaagacctttccgtagaactagagcaattgcctgtgcagcatcttgtctacccccgcacttcctggatatttatagcagtctatctcaacaaacatggtgggcgtgcttgtaatggtgagtagcctcaagcgtaatctcaaacagcagtcataattaaaatcagttgactgaaaaagatatgggtcactgacgaggagcaaactacctcaaactctcaagcgtgatcttgttctgcagcaatcttttgcatcaaccggagcaaagggccaattcgaggatttggaattgctgcccatccaggagtccctccatggggtggggtttcatcatccctcagatgtggcacacctttatatgtgtgtttaccagtaagaacacatgtacattaataaagcacttaggcagttgataaaaagaaatttccaatatatgtatttgcatgttgttcaagaaacatgttgctataactagaaaacggaatcataaggacaagtacattgctacacgtcagcggtctcataggtcatcccatgcagtgccacgtaggatatttgatgatgtggaggagagagagc

SEQ ID NO: 20107 - DNA, 739 bp, Setaria italica
  Peptide Sequence Number=SeqID_86081
ttaataagtcgcagcgaacggctgtatagttagcctaaatactagcacgaaacgaagataacttaagcttggcgcaggctacaccagcatcacaagacaacccgtcaattctcctcttgtgtgctccaatgttcctaagcggcagcctcgccatcttcgttgttgttgcggtaaggcaagctgactgccacccacatatcgtcgctgaaggggagcatggttgcgccttcagggatagccatgtcagtgttgcgagggtaaacttggattctgttggttaacatgtagcagccgcatccgtcggagctgacaggcatggtagcagttggcacggtgaggctagaggtactggttggggctacgaggggtgagtgaccattcacagtcggtgtgtgttccagggatgagtctgttgcttcaacttctgagcttgcctttggaatgggcggttcgctgactttcagagatgaatccatgacttcaacttctgtacttggctctggaatgggtggttcatactcttgcagagatgagtacatcagttcaagttctgtgcttggttctggaaggggcagtttgtcaactttcagagacgagtccgtaactttaacatccatgatttgctctggaagggacagtttgtcaacttctgatgatgagtccattacttcaatgcccatgcttggctctgaaaggggcagtttgttaacttctggagatgaattcattgcttcaactt

SEQ ID NO: 20108 - DNA, 594 bp, Setaria italica
  Peptide Sequence Number=SeqID_86082
atgctccggaacgggtagtccttgaggcacttgtggtagatgagcacgcccaccatggacgccaccgcgccgatggcgtggaccagcccgacgaattcctgcaaaaatccaggatttggtggtgttttgttagtgtaccagtagaactgcccctcatgggtgctgatactcaaagccagcgataggaacatgtaaagagatggtttccacactactggatactttatagtccgaaccattcccttcactgccccactaaccttgtttaaaaccttctctttagcattatgttggtatgttttcagctcatatataaaaaatccaaggaaaaccactgtagcaggaggtatagccatcacacctaatgcaccctgtgccccgagatggtggacaaacatgccacttgtggcatacccaataagtgcacctagagatgatgagaatgcacaaagactctgcatgtctggagccaatgccggcttatcaatactgttctttgcgatgcaagcatctatcgttacatcagcaatggcaactgctgttgatattcccaccaagcaaagtacagcagaactcactgggagtccggtaggt

SEQ ID NO: 20109 - DNA, 311 bp, Setaria italica
  Peptide Sequence Number=SeqID_86083
gccggccgtgcacgactgttccgttgccccctagccacttcgcggctgtcttaccggaccgcgctctcgccgtcgccgacctcccgattccatccctgctacccccgatcccaaccggctcgcgcgccgccgccatcttcgcccgcgcccaccttgctgccgcggctcgcggccccgtacgctcccgcgcccgcctcggggacccggcggctgccctcgatctgacccctcgggggctggatggacaaggggaaatcggtggtcgccgagctggcggcgtcgctcagcgatgtccgtgtcacgccgcgcca

SEQ ID NO: 20110 - DNA, 921 bp, Setaria italica
  Peptide Sequence Number=SeqID_86084
ggtcgtgcaagtgccccgaatctcctaatccacggtggtctcttcacctcattttttttaaaaaaaattgcagtcctgactcccgtttcctctgcctgcaatggttcccgaaaaaaggcgtgctgcaatcacagttgattgctcagtgatcggtctgcagagctgtttgcttcctctctatcatctaatcccaccggcttttttatggaataattcaaatcccagcgatgcgccccttgtacctcttcagtgaattgatacaatcccaaatccattgctaacttcagcttctgcagataagtcgtggatatgacttggtatggttggtctttgattagactgagctattaaggtcatgttgtttacgtggaaacacattctctgcaaatggggaatgctcctgatcctgctgatctcagtttcgaagcttgttttgtcttatggtcatgtttagttgatatcaatcaaacaatcgttagtgtcagatggtacttgcatcactatgtctcagctatctacatgttatcaatctgttttaacccattgcttcttttaccccatctgtgaatggccattctccacttgcaacaatatgtcactatggttcagcttatacctggatcttcctttccaactgaagctctctgactgtatggatggctagttggcgtctaactgtttaaggaatcggtttccctgtcccagttttacttactattagtttagggactccacacacatatttgacataccagtgaaagtgtttgagacttactttcaatccaccttgaagcacattcatgggcggtgcttttgacctctagagttaatagtttggaaattcttttctgcatctccctttctgtttattagcaacgcattcttttgtaacagaagccagcaaatatatttactctcaat

SEQ ID NO: 20111 - DNA, 506 bp, Setaria italica
  Peptide Sequence Number=SeqID_86085
atcttagatggagcaagcggcgctacaaagaagcctgttggaatcttacatgtgaaggtaattagagccatgaatcttctcaagatggacttgctgggaaaatctgatccctatgtcaagatgcgcctgagtggtgaaagactgccctcaaagaaaacaactgttaagatgagcaacctgaatcctgaatggaatgaacacttcaagttcatagtaaaggatccaggcacgcaactactagagctccacatgtttgattgggaaaaggttaaaatgcatgataaattgggtatgcaagtaattccgctccgtttgcttactccttatgagagcaagttattcacactcgaccttgttcgaagcatgaacccaaatgatccacataacaagaagaacagaggaaagctcgttgttgagttgacttttgatcccttcagagaagacagcacggccagtgtggcttcagatggtgaaggtactgccagtgcaagaagggaagcggacgg

SEQ ID NO: 20112 - DNA, 425 bp, Setaria italica
  Peptide Sequence Number=SeqID_86086
agagatatagagatgatggagggaggagaagagagagtggatcacatattggctagtgatcgaagtcgagatcgaacatcgcctgcccgagctgcaagatgttgctgtgttggtggtgctgatggtggaacgctaagcttggctcttgcacttgagctatatttgatgtggtatcaccggagactgactgggtctgagggaagcaagagcccgcagacgaagaatggaacgggaagccgtggtggttctgctgatggatgccgtgatgctgttgcatcgatgccttccctgggatccacagcttctttcaccacctctccaagatccatggcttgatcttgttctttggacaagagtgcactcccaagcatctgtgtacccaaacccgtcctccaactagtccactgttcttgtctgctacttcc

SEQ ID NO: 20113 - DNA, 413 bp, Setaria italica
  Peptide Sequence Number=SeqID_86087
ttaagttagttagttagtttggttattctactattatttggtcttagttgtattcgtaagttcgtagtattcgtaacattcgcctgcccgagctgcaagatgttgctgtgttggtggtgctgatggtggaacgctaagcttggctcttgcacttgagctatatttgatgtggtatcaccggagactgactgggtctgagggaagcaagagcccgcagacgaagaatggaacgggaagccgtggtggttctgctgatggatgccgtgatgctgttgcatcgatgccttccccttgggatccacagcttctttcaccacctctccaagatccatggcttgatcttgtttttggacaagagtgcactccccagcatctgtgtacccaacccgtctccaatgtccatgttcttgctg

SEQ ID NO: 20114 - DNA, 1117 bp, Setaria italica
  Peptide Sequence Number=SeqID_86088
tgaccaaggccaagcaagcataccctagcatcctgtacacagctacaatccagcatcattaacttagcacccaaattctccgctaacatcccctgaaacctctcttcactgacgttagtgaccagccaaagcaccctcactccaaaccacatgtgtattcacataagacataaccaaaccgaccgaaaccagctgttatttacagaagatcagcacatcacaccccctcgcgcagctgctccgctctcaagactccgacagagaatggagcagactttggtccataaaattcctgatttacctagccaaactagtagctgccactgatccagctctgcagccaaccccttgtcgctgctccctcaggtagccaagcaaagtctcagccttgtgcttggcacgggcagaaccggactgtgatagcgcgacaagcggagggatggcgccctcgcgtacaagaagcgcacggttatgcggggaatcggagcacagttgcagcagcgccaccacggcgaactctttctccttggcagggccgtcctcgatcgcctcgaccaacgcggggatcccgccagcctccaccacagcttcgcggccctcggcgatgcccgcgaggctccccagaaccaccattgccttctcgcacgtcccgctgccgcgctcgccgatgaggtgcacgaggggaacgatggcgccggcgctgaccgcgcgctccttgttcctgcgcgcggagcagaggcggtagagcgtggtgagagcgtccttcttgccgcgcgtggagcccgcggagagcagcgcgacgagcggcgggatagcgccgcaggccccgatggtggcgcggttctcctcgatgcccgacaggctgagcagcgcgcaggcagcgttctgcttagccgcggccgtgccggtgcggagggcgtagacgagcggcttgatggcgcccgccgcggtgatggccgagcggttccgctcctccagcgagaggttgagcagcgcggtgaccgcgttctcctgcgcgaccgggtcggtgctgcgcagcagcggcacgagcgccgggatggcgcccgacacgccgatcagctcccggatgtcggagcggtgcttcgcgtagtcagcc

SEQ ID NO: 20115 - DNA, 1027 bp, Setaria italica
  Peptide Sequence Number=SeqID_86089
cattatagtcgatggacgtgtgcatgaacctgtctggcaggaactgctcagggttctcccaagattccttgtcccttccaattgcccatgcgttgatgatgacccgagtcttggcagggatgtcgtacccgtggagcttagtgtcctggattgtttcacgggggataagcagtggcactggtggatgtaaccgcatggcttctttcagggctgcctgcagtctgctcattctcaacagctgctcctctaggactccttgtgcccctgcaatttgcctcacctcggcttgcactttggccatttctcttgggttcttgattagatagaccattgcccactctatcgccttggatgttgtatcgatacctcctataaaaaggtccaagatgagcccctttacatcaatcctatccaggttaagcctctcaccgccctccttgaccacggagagcaagtcgtcaaggagatcagcagcctcatcatcatttttgggcttcttctcatgctcctggagtgttctctcgagaacgtcatcaagcttgcttgccgttctctttatccttgcgtcgagccccatcgcccagtccacccaccgtagtcgagggaacatgtcgctcaccgcgatcatttcaagcagaccagtgacctccttcatcattgcacggaaactcccgggatccatgccaccgagcttgttcccgaaggctgcctttgagatgacagtataggttaagcttacgatgagctcgctcatgttgaccgctcggagtttgcccctgtcaccctccaaggcccctgccgcgctgatccgagccaccaacgatgcgacctcctcctcccggagcacacgcatggagtccacccgcttcacgctgaggaggtgcacgacggcgatgcggcgaagctggcgccaccgctcgccgtaggggctgaagccgacatccctgcagtcataaaggatgcctcgggccgtgtgctgctgcggacggccgcagaagacgtggtcctggttcttgagcacctcctc

SEQ ID NO: 20116 - DNA, 227 bp, Setaria italica
  Peptide Sequence Number=SeqID_86090
gaaaaaaataactgactgatggatcggagatttggagttggaactgcattgcgggagggaactggccacgcaatatgaaggcaaagaaatcaaagaatgggttctggcgctgctggtcatcgcctcgatcgagcggacgtcaacactgctgctggactggtacgggaaacgacgcaagaaaggcgatcaccgagtggttgaaggctaagcaaacgcttcgtaaaaag

SEQ ID NO: 20117 - DNA, 617 bp, Setaria italica
  Peptide Sequence Number=SeqID_86091
cgccgggcagctggcgcgcacggtgtacttgcgcgtcctcaccacgccgtaccggaacctcaccttggcgacgacgtgcacgtccaccgtcagcttcccggccgtgcgctccctcttgatgccctcctggacgtcccgcggcagcgtccaagcgtcgggcgccgcccgggcggcgacgtcgacccgcgtctcgtcctccggcgactgggtgaaccccggcgcgtgggcgccggcgaggtacgtgccgttgtaccacaccccgacgttgagccagcggtaggacacgcccgcgcgctcgttcgggttgaaggcgcgcagggtgaggtcgaacgcgcccgcgagcccgccggcggccgtgaagttgaagcccgtcgtggaggcgtggtcgacggagaggacgagcttggacgggtggaggaagagccagaggaggacgacgatgacgacgacgaccgccaccgccagcagcgtcgccgccgcgcaccggaacgtcgacggccgtgtgcgcctgggctctgccatctccgcaacacccgatcggtcgatcgatcaagaaggtttggccactggaactttgatttcgtgcttgaggttgagggagggcgtgcggttctttc

SEQ ID NO: 20118 - DNA, 768 bp, Setaria italica
  misc_feature (739)..(768): n is a, c, g, or t
  Peptide Sequence Number=SeqID_86092
gtgttagacaaaaacttaatcacatgattgatgaagacgagcccattcttgagaaggcgattgggactgaaattgaaatggtatcctggaaaagtgtttgacacagaaggtactacaaaagaagccaaagaagggttcaaagcacactgaacctatcataaagactgaagactgcgagagcttctttaatttcttcaaccctcctcaagtgcctgatgacgatttcatcgatgaggataccgctgagcaattgcaggaccaaatggagcaagactacgacattggatctactatcagggacaagattattccacatgctgtttcatggttcaccggagaggctcaagatgaagactatgacgacaccattctagaggatgatgaaaataacagtgacgatgatgaaggtgatgaggaagaggaagacaacgaatgacgattgtgacgtatggaggtctcattgtaataccaagcgagatctattttgtacttacacttgttgcttttctattttctactttgagtgagggagttgcagcagggtaagcggcctgctgagtgcacgcagcagtgaagcactggaaatttccgtttgcgagtcgaaaaatgtttttcttttacagaggtatgttaattgaaattttggtccatggagaggaaagttttgcagataataggagtagcatggcttgctttgtctgtactgtttatgtttaaagtttacacatggtgtgatgtnnnnnnnnnnnnnnnnnnnnnnnnnnnnnn

SEQ ID NO: 20119 - DNA, 775 bp, Setaria italica
  misc_feature (541)..(541): n is a, c, g, or t
  misc_feature (569)..(569): n is a, c, g, or t
  Peptide Sequence Number=SeqID_86093
ctttaatggggttgggtgtgtggcaaggctaaaatgaaggcaaaagtttgatgttcttaagactaatgcctttacatttcctccagacaagggtgttccagatttctggcttaatgcaatgaagaacaatgaaatactggctgaggaagtaagatgatattagcttgtgaatctctcctttgctgagctgccaatgttttatgttaatatactgtatgtacataaagtgcattggcctctatattgtcactggtttgtgctgctaataattcctgtgtttcttggttttagatccaaatgagggatgaggaagctctaaagtaccttaagaacatcaaatggtgcagaattgatgatccaaagggtttcaagattgagttttcatttgatactaatccttttttcaaaaaattctgtgttgacaaaaacttatcacatgattgatgaagacgagcccattcttgagaaggcgattgggactgaaattgaatggtatcctggaaagtgtttgacacagaaggtactacaaaagaagccaaanaagggttcaaagcacactgaacctatcntaaagactgaagactgcgagagcttctttaatttcttcaaccctcctcaagtgcctgatgacgatttcatcgatgaggataccgctgagcaattgcaggaccaaatggagcaagactacgacattggatctactatcagggacaagattattccacattgtcttgttttctattggtttctaccggtagtaggtcttctaagtatt

SEQ ID NO: 20120 - DNA, 396 bp, Setaria italica
  Peptide Sequence Number=SeqID_86094
tcgattcttgcatacagcatctgtggatttttcttaatcgctttattcgctttcatatttgtgtggtctgtgacttgctgaatgctcagaagctggtgctccattatggatagtacagaactcacccaccgagcaattgcttaagacaacattgtaccctatcctagttgagttgccgatggagaccgaaggtccaacgacggctccagaaccaacaacgacctccttaccaaggacagcaccggagtgcacgacggcgccagcctcgaccactgcggtggggtccacggatgccgccctgtgcaggatgcccccgccattgtgccacggcacgaactccactgaagcagcaccagcttctgagcattcagcaagtcacagaccaagaaaccaaaa

SEQ ID NO: 20121 - DNA, 236 bp, Setaria italica
  Peptide Sequence Number=SeqID_86095
ctatatgtttttgggaagattaatccatatggatttctagtatttcatcacacctcttaaaaccaaaggatgtgaagaagatgcatcagctgggtggtgggcccgggattagcagtgccagacaggtaggtcccagaggttgccctgggcccactcgtcattgtccgccgcattgccctcccatacaggcggggccatgagcatggcctcggccagctcagcccacatcttgggcg

SEQ ID NO: 20122 - DNA, 729 bp, Setaria italica
  Peptide Sequence Number=SeqID_86096
cacggcggctctgctgccccagcccccaatcatctgtccgccacccgccgccgccctcgccgtcgagcgattcgagccctcggctgagaccgcgccgccgccgccgcgtatacccctccaggaggaagatatagagcaaagtgttttgtgtgagactgaatttcgaaaatgaacaagggcaaaattttcaagttagctaagggattcagaggaagggcaaaaaactgtataaggatagcaagggagagggtggaaaaggcactgcagtattcatacagggatcggcgcaacaagaagagggacatgcgatccctttggattgaacgcatcaatgctggtacacgcctccatggggtgaactatggcaacttcatgcatggattgatgaaggagaatatccaactcaacaggaaggttctctcagagctgtcgatgcatgagccatacagcttcaaggctcttgtcgatgtatctcgcaatgcatttcctgggaacaggcctgtacctgctaaggaggggctagcaagcattctgtaaccgtttcttgcccaataatagaacttgatagctacatctgcttcggaaagtaaccttttggcatgtaacgttgcgaaaagcttgttatggtcattgtacgcgttactccatgtttttctgtttgatgacctgccggacagaccatggtattacatgttttgtacctcatgccccttactttgggtttgtgaa

SEQ ID NO: 20123 - DNA, 319 bp, Setaria italica
  Peptide Sequence Number=SeqID_86097
ttactttgggcggcaggcccttcgagacgaacgacttgcgggggtccggctcgttggcgggggcgctcgacggcggcggcgggtccattagccgggagcgcgtcttgctgcgcgccagaagggaggagccggtggacgtcgacgtgcagcgcagcacctcggcggtgtccccgtcgatgccactctggttgcggttgtcgccgccgtcgtaggaggaggaggacgccgacgacgtcgacggggagaaccgcttgtgggggttctggaacgagacgcgcagctccctggatgcgctgacggacgtcggcgcgcgcggtgg

SEQ ID NO: 20124 - DNA, 898 bp, Setaria italica
  Peptide Sequence Number=SeqID_86098
gtccaaatcagcaatatattttcttgtgccaaagatttcttggtacatgtcaatcgtattaatcggttctgtatttcagtgtaatgactaattactcaaaaatataagattgaacatcaaacattcaccagagtccagaaagctgcgtttcgttctgttgattgatgcacaagtgtgctcgtgtgttctctactctgtgagctgaacagccaagatggaaggtatcttttccctcagtttttgtgtcacagctactcgtactgtcattacaccagctgcaggtccaccgattctaatcttgacgacatatccatcgatctggaggagctcgatgcttccacctccggtaccggagaggtatggtctgatctcatcaagtaccttctccacgttgtcggtgttgagctcgaggccggtctcggtgtcgacgatctgctcgacctcgaggatgtcggggatcttgtcacggaggcgcgtctcgatgcccatcttgagcgtcatggtggagctggggcaggagccgcaggccccctgcagcttgagcacgacgacgaggccgtcgatctcgtgcagcgccacgttgccgccgtccgccatcaggctcggccgcacctcgtccagcaccatctccacgttctcctccgtcagcggaagcacgcgcaccgcccaccctgctcggtttccgcggtggttcggcgtcgtctgcagcgacgtgtggctgaagctgaggcggccatgggtgagggagcttggagaattcttgcggatggtggctgcgaggggggagcttgtggccgcggccgccgcttgccggagacagagcctcatctgattctctgctgtattttttttctccccgctcgtcacgaggcaaagtaacggtaagacgaggcaagtt

SEQ ID NO: 20125 - DNA, 1131 bp, Setaria italica
  Peptide Sequence Number=SeqID_86099
cattcagacgaggaaggaattctaagaatcatgaaagggatgatcaacaaacgcataagcgtaacacctcaaatttccctccttgcctaagagctgtcatccagatgaagaaggaatttccaatgtttacaaaagggaagaaataaaagcatatcgggctgacacatcaagctgcccttctgatcagatggtttttgcttggtttgtctttatgcgcgtcagagaaggattccttgcaggagtttgtacgttggtccaacgggaagctgacgaaagagtgggacaaaaatgtgactcatgtcattgtgggcaaaggtcctggtagctcatggaacagatcaattgaagtcctcatggcagtactgctggggaaatgggttatccattttgaatggatcatggactgctcctcagagatgcgtccacgtccagaagcttcttatgaggtaacatccagcatggattcactcaaaacaatggacggaccgaagaagggaagaatccgagcagccacaggggcaccgaatctgttctcgggactgcgcttctgcctcagcgcctacatgaaccctgacggcaggcaccgcgtgcgagacctcatcgcagccgccggagggaaggtcctggagggaggatttctggacccgccactcgaatgctttgacggctcttcttcggtgaagccgtacttcgtcttcgacggcgacgttcccggagaatttgccctgggcacgctgctgaaggaggtggaggaggcgaggaagcacgcggctgcgggcgcgcgggtgatcagccaccagagggtgctggatgccgtcgcggcatacgacgccgagatcctcaaccgctgaacgaggagaaggatggcttcgcgtcgtcgtgaatgactgaatgtgcgcgcgagtcgggggaagtcttcggcgattgcaaaaattgagtacccttttgttctgcgggagacgacgaaggctggtcgatgagtatattgatcggtccatatggactctaccctacaggtcaagtcagtacgcttcagaaaatgtgagttcgggtgttgctcgtactgtgtattgttccgtcagtcacgaggccggcgcattttgccagcgttcctctgagagacagacgctg

SEQ ID NO: 20126 - DNA, 620 bp, Setaria italica
  misc_feature (611)..(611): n is a, c, g, or t
  Peptide Sequence Number=SeqID_86100
ctcgcactcgcacagatcggagaaagagagagagagagagatggctgggaggctaaccgcagcggggtcccgcatcctaggcggcggcggcgcacgcgctgcggccgcagcgctccggcaccgcgccggcatgggcctccccgtaggccgccacatcgtccccgacaagcccctccctacgaacgacgagctgctgtgggacaacggcacgcccttcccggagccctgcatcgaccgcctcgctccgcacatcggaaagtatgaggcattggcgtggctgtgcggaggactggggttctttgctactctcggtgtggccgccgctgtgaacgacaaggcctccaagatcccatatactcccaaagtctacccgtacgacaatttgagagttgaacttggtgaccggccttaaaagactagttgcctgttggaacaagcactgtgatgaattgagcacagggaaactttgttgtttatcatgtttgtttttgttgggatcaccatgttgtaaactgccaccatatatgatctgctgaatcttgtcaagcatggctttgccctacaataatggaaccagtgtctttgagcgattcactgtgatgaataaaaanaaaaaaaaa

SEQ ID NO: 20127 - DNA, 510 bp, Setaria italica
  Peptide Sequence Number=SeqID_86101
cagtgtcatcttcctttgccaacacatctcgtgcagactgaacagctggggcttgagctgatttcggcgcaagttcttcgtgatggtggtggtactgtggctgcactgcggcttcacctgaatgtttctttcttgcagcgtcgggtgattcagcctggcgtgtcatcctcttctctgtatcgtcctgcaattcagaagtagcatctttgtttcctccggggaagtggacactgacgccgggagaagtagcagtgcgctcggcgacaccgccgtctcttggtctgcgaccttcagaattgtcaaagacctcctgattggcaacactctgatcatgttccctcttctcgatcactgcttcttgcccagaaacacgatcccttgccgacacaaggtcaccggactcgcgtcggctcgtcgtgtcagtgccttggcgcctgctgcttgtggcatcagcacccctgctggcacttgcaacatcatcagtgccatgacttgcaacatcatcagaac

SEQ ID NO: 20128 - DNA, 384 bp, Setaria italica
  Peptide Sequence Number=SeqID_86102
gtgtttccaaagcagacctgtttccatagtttcaacttgctcacggattgctgattccatactacccaacagccacacgagcactctatcattaatctgtttagcatctgtgccactcccctttatcttccctttatcttcttctctatcagtagcaatgagcaacttttcatagccatgagagcctaaaattaacttggcttgtcgagcccagctaacataattttctggtcctgacaactttacaggattaggctctagagcatatttgaaaatttctgaagtcaccttgggctgctctattattttgctaaaaatctcacacagcttttcaatactactattatcttgcttttcccccattgcattggcttgagaggatga

SEQ ID NO: 20129 - DNA, 1140 bp, Setaria italica
  Peptide Sequence Number=SeqID_86103
cgccggaccctctgttgtcaaattatcttcagccgatttcctccttgatggtgctctcttccttttcgtgacatcgccatgattttcagtggcgacagaacccgtcctcttttcgactacgccttcatcaccaacagagacagagcccctcatcctttttctggcagccccctcattgccaacaggttttgagcgcctctttctcttttttactacttcctcttcaccagagacagggtccctcgtattcgttcctgcctcattatcagcactgatagtgcacctcctctttctggcagccccctcactgccagcaggtttcgaacgcctcgttctctttttgactaccccctcctcaccgacagacgctgggtccatcattctatttgttcctacctcatcattagcactgacttcaattggaacagcctcattacctacagggatggaacccctcattctcttctgtgaagctgcattattgccagctggttttgaacccctggttctctttttgactactccctctacaccaacagacagagggtccattattctatttgttcctacctcattatcagcactaacagtgcccctcaattcgattggaacagcctcattacccacagggatagatcccctcattctcttttgtacagctgcattgctgccactagtagatttcctcttcctggatctactacggctgctagataaatcgttgagaccatcaggcacagcaacattctcttcattttgctttttcgatcttcttcctgttgattttctgcttggtcttcttgaactggtgtttgaaacagtattagcagcaacacaatcaggagcagctgaactgttgacaatattggacgcaactaggttttctttggtttgctttctagatctatctcttgtgttctcaccagattcgtcaccttttgattgcacaagtgatattaggtcgctgggggcaattgcaggccgctctttttctctatcaacaaaattggtttgaaaaacagatttctttagttgaatggctgctttaactgcaggcaggtgatgtttacaaagtttgggccttgctggtctaagattgctatgaatataattcccggccgtaatgataatatgtgctct

SEQ ID NO: 20130 - DNA, 1075 bp, Setaria italica
  Peptide Sequence Number=SeqID_86104
ataaacttagccagaggaataaagcagcaatatcaagaaacgttgattttagactcgctgaataatggaagtgccattggtgacttcagtgctgttgatatggcatatgcactgacaaatggtgttggtaattttgaggtgactccggagagtcttagatctgtcctaccattaataaactgggataaaatttctgctatgtacctgcctggtcgatctggcgctgaatgcgaatcgaggtggttaaactgtgatgatccattgattaatcttgaggcctggactgcccaggaggaaacaaaacttctacttattgttcaagaaaagggactgtacaactggattaacattgcagctacattgggtacttaccggactcctttccaatgtcttgttcgttatcaacgaagtcttaatccccacataattaacaaggcctggacaaaagaggaagaccttcaacttcgagctgctgttcatacctttggtgagaagtggcaacttgtatcagccagcctggatggtcgcactggcagtcagtgctctaataggtggaggaaaaccttgcaccctacaaggaccagagtgggaagatggcatctggatgaggacaaacgcctcatggtttctgtcaagctaattggatctggcagctggagtaagattgctccgtttattcctggccgcacacaaacgcaatgccacgagaggtggtgtaatattcttgatccaagtatagatcttgggaaatggcggcctgaagaagataccaagttattggctgcagtatctgagtttgggccttgctggtctaagattgctatgaatataattcccggccgtaatgataatatgtgctctagacgatggaataaactttgtaaacatcacctgcctgcagttaaagcagccattcaactaaagaaatctgttttcaaaccaattttgttgatagagaaaaagagcggcctgcaattgccccagcgacctaatatcacttgtgcaatcaaaaggtgacgaatctggtgagaacacaagagatagatctagaaacgcaaaaccaaagaaaacctag

SEQ ID NO: 20131 - DNA, 183 bp, Setaria italica
  Peptide Sequence Number=SeqID_86105
cctgaaagtccccaagctgaaagaacaggtaaatatgttccctatacatggttgagcgtaatgattattaccctatacaggttggatctgtacataccagaagataatagtaggccctgtccagtggtggccttcgtaactggtggggcatggattattggttacaaggcatggggtgctctt

SEQ ID NO: 20132 - DNA, 815 bp, Setaria italica
  misc_feature (796)..(796): n is a, c, g, or t
  Peptide Sequence Number=SeqID_86106
cccccgctcgcttgcccgctccaccgcgcccccaacccacccgcgcccgtgcccggccaaaagagaattcgaatctcccaccacaccaccaccgcgcctccgcggagaatcgcaatgcgggcctccgtcgaggaggcgggcgcgctgctggcgcggagcgactccttcggcggccgccgccgccaccgctccgcgtcgcccgtgcagtccgcgtccccgaggcccgggagcctcaggcgccagtcctcgtcgttccgcgaggacgtcggccacgccgcctccgagacgtacctcgtctcgcgcctcaccttcacgctcctccagtaccttgggataggctaccgatggatgtcacaactccttgcactcacaatctatgcaattttacttatgccaggattcatacaagttggatattactatttcttctcaagccaagttcgtagaagtatagtctatggagaacaacccagaaacaggttggatctgtacataccagaagataatagtaggccctgtccagtggtggccttcgtaactggtggggcatggattattggttacaaggcatgggtgctcgttcttggacgacgattggcggagagaggaataatagttgcttgcattgattacagaaattttcccaaggtacaataggcgacatggttaatgatgcttctcaggggatttcttttgtgtgtaacaacattgccaatttatggggggagacccttaatcagatctacttgatgggtcagtcagcaggtgcacatattgcagcttgtgcctcatggancaagcagtaaaagaatcgt

SEQ ID NO: 20133 - DNA, 734 bp, Setaria italica
  Peptide Sequence Number=SeqID_86107
cgtgaattaaactagtgccgcaaaagcagagcggaggcccctccaactccaagccaccaccgccgcttcttcttggttttgctgctgctggtgctgtggcggctgggtctctctccttttctttcccttcttctcccgtcgccgtacaaaagctgtggatagggagtagctgcctgggtaggaggggtggagagatcgggcgcaaaaagttgtttggcgctgtgttcgtcggctggaaagttctgggtttctttttttctgtgtctcggggttcgctggattgcttggggttgattcgctgggggtttgtgttgctggcttctgtgcgtgcggccatggcggggaggcggtggtagtggtgcgtgcgtgagcggtggtctgtgagggaggagaaaattggtgctcgggaaggggagaggaggaagttgccggattggggaaggtgagagagacagccggtgcggtgaggtgatgtatggctcgccggtgtccaaggatctgaacctgccggtgcagccgccgatgacttcgtccgggctgctgcgctacagatcggcgccgagcacgctgctcggcgaggtctgcgaggacttcctccagccggggccgcgcgccggcagccccgacgctggcgccgccgacgtcttctccaggttcctcgctgaccaccagatcagggacaagccgccggcgccggcgccggcgccgcatacccacttcccggacaccggccg

SEQ ID NO: 20134 - DNA, 446 bp, Setaria italica
  Peptide Sequence Number=SeqID_86108
tgcgttttaagataagggttttttgcatttcaagtaggtatgtgttatcgtgccatgattatggtaggttatatctgtttctggttattaaacctaatcgccagatgatttgctagttgtttctgggtttttagagtacgtagctgtgccagattttgtcttggaaataattcgaatttggcaatgtgcctcagttgttctttgtgctagaatgttctgcttggtagcatttagatggtgaatagctctttaagttgcttattgtaatttggcactgcagctaagttgcttattgacattagtaagctatgatctgggttgtgttgatatattatttcactttaatggatttcttgtgttggttgcattaatgatgatacatgcaaacctgtagctacagtttgtctccacatgttatatctctctccttttggattcattttgca

SEQ ID NO: 20135 - DNA, 220 bp, Setaria italica
  Peptide Sequence Number=SeqID_86109
gagcgcaggtggagcagcatgccgcccaccatccccggcaccgcggccacggtctctagcatcatcgcccggcagccataccgcctctggaagaagacgtcggtggggaagcgcagtgacttgacggtccagtaggcgatcttgtcgagcatcgtcttgggctcgtggtgcctggtcagatcgatggaggtgtccgcgtgtacgtctccatggcctaaag

SEQ ID NO: 20136 - DNA, 434 bp, Setaria italica
  Peptide Sequence Number=SeqID_86110
taatgctagaaaataaaataatgggccagttctgatttacaaaccattaaaaccaagaagaagatggagaaagccttggagttaagtggagagaagaaaagctctgagcaagttcctgggatcctgagcaaggatgacaaaaaggtgccgttgaagttggaacttttatctggagttagagctacatcatctgttgtggaacaagaagtgcaccgtatcatcaggatttgtcggggtagaggttactgtgcataagcaacaatcagaaggggatcacaatgcgggcttaagatctggcataacaagttcaggtgccatcaaaatgcaagacatgcaggaccttcagaagcaatcaaaccaaacttcaaatatgcaggatgttgctggtgcaccagatttacagattggtcagtcaaagtcacagatcatgaaag

SEQ ID NO: 20137 - DNA, 449 bp, Setaria italica
  Peptide Sequence Number=SeqID_86111
aggtgtgattcagaagttcgcagctgcagggtcagagaggcatagagttcagacacgaggcacacaagcgtgctactgcggctcatctaagctgtgagcgatcgggacaggatggcgtctcagctgggcgcgtacaccggcggcaaccggaggaggggccactgccggcggtcggcggcggcggcggcggcgaagcagctgttgtcgaggctgcggtccacgtggaggcagagaagcacggcacggccgaggcgggccgcggtgaggtcgttcgggtacgacctgcacagctactcccaaaacttcgacgatggcctcggctcctcctgccacatgctttcagtgatcccgactaactagctcgctcagtgattgtattcccggccggtgattagatagcggccacatccagttcggcatgcagttcctgtaattgactcgcttctctt

SEQ ID NO: 20138 - DNA, 339 bp, Setaria italica
  Peptide Sequence Number=SeqID_86112
cgagccggcggtggacgacgtgccggcggacgtgcgctgtgcgagctggcggctcgcggcggaggccaacaacctcgcgccgtggaaggcggtgccggcggggtgcgcggcgcacgtccgggactacatcgcgggcgccgcctaccgctccgacctcgacctcatcgcgcgggagtccaccacctacgcgcgcgccgcgccgctccggggcgacggccgcgacgcatgggtgttcgacatcgacgagacgctgctctccaacctcccctactacgccgagcacgggtacgggcttgaattgttcgaccaccagaagttcgacaggtgggtggagagggg

SEQ ID NO: 20139 - DNA, 320 bp, Setaria italica
  Peptide Sequence Number=SeqID_86113
tggttatgtgtgctactgtgtcgtatttgccacactgaactggacatgttcctttaatggaagtatttggatgttgatctctatgttcagcagctcttcatccctctagatgatatcacagcgattacatagcacgcatagtttttatatctccctgccatgttgacctttgaattatctaccacaaaagctgctaagtttcaaatttgccatgttgaacttgaaccataccgtgctactaggtctcaggattttgcgttactattgagttaccatacactctctgcacacgtagacttctttggtgattgcgtaaatgt

SEQ ID NO: 20140 - DNA, 388 bp, Setaria italica
  Peptide Sequence Number=SeqID_86114
atcctgggactggtgtccgtggtgcaggaggagggcctaacgtccgagcagaagctcgtcattgacactatggcgcggacagctaccgttgtctcgacgctcatcaacgatgtcatggagatgtccgctgtcaaccaggagcgcttcccgctggagacacggccattccacctgcactccatgatcagggatgccgcctgcgtggcgaggtgtctctgtgacttcagggggtttggtttcacggtgcacgtcgagaatacgctgccagaccttgtcattggcgacgagcgacggattttccatgtcttgctgcacatggttggcaatttgattggtcggatcaatgctgggaatgtcacgttccggagtagcttggcctccatggatc

SEQ ID NO: 20141 - DNA, 655 bp, Setaria italica
  Peptide Sequence Number=SeqID_86115
ggaggagctggggcgcgagggtggggtcgccggacttgagcagctcgttgccgacggagatggcggagacggtcaccatggtggggatgttggcggcggccggggaggacgcgaggttcggcacgtctccgttggggatgcccagcaggatggagatgttggagcccgcgagcgccgcgatcaggtccggctgcggctcgtagtggtggagcttgccgatggacgtggacatgagcaggctggccgtcgacgccgccggcgggaggttgtccgcgatcgtcccgtagttgaagccgatgaacgactgcgacgtcgccgggtggaagaggaagacatggaggaggaccaagatcgtagcagcagaaaccaaccacctccggatccccatgcgaccacttcccatggcaaccgccctacgcctctccaatggctagtcggcgtagtagcggcgaggaggaagacgaaggggccgaggaaagcaggcaaggcgcgcgaggttggcggggggcgggagacacgcaacgcaaggggtcgcgccgtcgcggaggtctttccgcctaccgcgcgtaaaagaagagacggagcgcgcgcgcgcggcaggacgccgtgcgttgtacgcgcagtagaaagagccccccggtcaccgtctctgccc

SEQ ID NO: 20142 - DNA, 494 bp, Setaria italica
  Peptide Sequence Number=SeqID_86116
ggcggggaggagctggggcgcgagggtggggtcgccggagttgagcagctcgtttccgacggagatggcggagacggtcaccgtggtggggatattggcggcggcccaggaggccgcggcggccggggaggacgcgaggttcggcacgtctccgttggggatgcccagcaggatggagatgttcgagcccgcgagcgccgcgaccaggtccggctgcggctcgtagaggcggagcttgccgatggacgtggacatgagcaggctggccgtcgacgccgccggcgggaggttgtccgcgatcgtcccgtagttgacgccgatgaacgactgcgacgctgcaaacagtgaacgggcgtgcatgagaagacgtacaagttacagtgcacgcacagttcatttcgtcagttcagcagttgcagaaaatcagcttaaaaactggagtagttgcagaaaacttagtcaggagctgcaaaactgatgacgaaacgaatcag

SEQ ID NO: 20143 - DNA, 1166 bp, Setaria italica
  Peptide Sequence Number=SeqID_86117
atctgaaaagttgtttgttaagataaaagatagagtgcaggcatcaggttccggagtaagacgatcagttctcaaaggcattgttgcctgcactctatcatcttaacaaacagctctagcaaaatcacactcaaaaaacatatgaaactcagtttcatcagaaccacagatcttgcaggtctgagagtagcagctctatgcccagtagcaagacaatgtctaattagtctccaacagaaagctttgatgcgaggcataattttatgattccagatcctataagaattgaaagagcagccgaagagatagagctaggtccgtgactaggcagagaatgagtgttttgaatagagaggtacttataaacttccttggtagagcaagtaccttggattgaatgtttccaacagagctgatcaacagaactagaagaaactttgtgaacctgaaggatagagtcaacagcttgatgttggaaggtggaattaatcagaatacgattccaagaagattgcttctgattccataagtcagaaactaagttcggaagttgtctatggatatgaggattttttaaatgggtgtggatattttcccaattctcacaccaagggtctgtccaaatattggaattaccttggtgaatctgcaccacacactgctcctgaagatgatatttaacctgcataacagaagaccaaaaagcagacctggtaccgtgacaagcagctctccaaaagctagtgttaggaaaatatttagctttaagaacagaagaaagaaaaggatctttattagaaacaattaaccatgcagaatgtaaaactaagctcttgttgacagtgtaaagatttctaatacccaaaccaccaacacactttggttggtaaatatcatcccaagacctgaagtaaaaaggtttagaagaatctttcacttgaacaccctgccaccagaaacgtctaaggatggaatttatcttctctgtaaaacttctggaaaataaaatattctgcatgtagttgataggaatggaagccaacacagaattaatataataatttcaaccagcatttaagaagaattatttagtccttgataccagtaaatttaatcatgctggtggaattacttatattaattctgcatgtagttgattaggtaaa

SEQ ID NO: 20144 - DNA, 269 bp, Setaria italica
  misc_feature (28)..(28): n is a, c, g, or t
  Peptide Sequence Number=SeqID_86118
cacaaatacaacagagcttttattcaangttttttttattaagctccaatgttgttgttgatcggggtcaaagcgcagcctcgcagtcccagggcaatgtcgcattggcgctcctggtcaggtccggtcgggaactgggacagaggacgacgacgacgggctaatgaaacacataaggcagagtacaacaccggcccagttccgagcatccgatccactaactccgacgtgggctacatacaacagttccttcaactgaaaagcccaaa

SEQ ID NO: 20145 - DNA, 318 bp, Setaria italica
  Peptide Sequence Number=SeqID_86119
cggatactttgatcaactcctcatcaatatatttattttttatcttcaattccaaatattcttctatgtaataatattctagaattttgaaggcaaagatttggcatcttgtaataagcaccaccaacttgtttagccacatcaaaaatacgtgtagttgtgataattatatatccaccattattagttggcaaagcacatctaatcaaaatcctgacatgaagaaactattgaagtgcatgctctatcaactcggcaagaaaagtaatgcaaacatccacgaatcaatattggatgagaggctgctcgtctatgaaa

SEQ ID NO: 20146 - DNA, 632 bp, Setaria italica
  Peptide Sequence Number=SeqID_86120
atattctaatcaaacgatcttttgccaattttcataaccttctggaaacacacttaaatataataagcaagtcttagatgggatggcagatcatcatagctaagtgacaaaatccttttcatattctcatcatcttgactatcttttgtggtagtaccaatagaattgcagaccttataccactcctttttatttcctcctttagtagccaacaatccagatatcataatgatagcaaagggtacaccaccacatttatgtagattttctcggatactttgatcaactcctcatcaatatatttatttttatcttcaattccaaatattcttctatgtaataatattctagaattttgaaggcaaagatttggcatcttgtaataagcaccaccaacttgtttagccacatcaaaaatacgtgtagttgtgataattatatatccaccattattagttggcaaagcacatctaatcattttccagacagagatatcccatatgccatcgacaacgatgaagtatcttcttttctgaagaaattcaatgagttcatagacgagcagcctctcatccaatattgattcgtggatgtttgcattacttttcttgccgagttgatagagcattgct

SEQ ID NO: 20147 - DNA, 881 bp, Setaria italica
  Peptide Sequence Number=SeqID_86121
ttttccaaagccccatccagcccctccgccgtcggccatggggcaagcctggggttccctccacgataaactccaagggcggcggtggaaggagcggcaggtgcggaagatcaccgacaaggtgttcgaccgcctgacggaggacgcccagaagcgcgagaaggaggcactcaccttcgaggaggtctacatcgccgtcctctgcgtctacaatgatatcaacaagtacttgccggggccgcaccacgatcccccgtccaaggagaagctcaaggccatgatggatgagtacgacgtcaacctggacgggctgctggaccgcgaggagtttgcggagttcatccggaagctgacggcggactcgctgtgctccatcagcctgaagctcgcgatcacgctggtggccgcgcccgcgcttgcgatggcgaccaagcgggcgacggagggcgtccccggcgtgggcaaggtggtgcgcaaggtgcccaacgcgctctacgcctccgccatcaccctcggcgtcgtgctggtgcagaaatccaccgagggcgtcgagtgagtccgcaaagcagagcagcggcacaccgttgttgtgtgtgctgtaggctgtagccgaggcaggcgacagcagggtatctaggattgttaagttgctgctttcgaattgttcatgggatgcatattctgatgtgttttattctggtttgggttgcagaattgtgtgggttcccgtggattgtcttgtcatgagcaatttattaggaagttgcagacaaagggcgtctggtctagcttatagctaactcagtctaattttttacttagttgaacagtgcaataatatttaaacagtgcaataatatgaaactagcattgtaaaaaaa

SEQ ID NO: 20148 - DNA, 462 bp, Setaria italica
  Peptide Sequence Number=SeqID_86122
tgttaactctgaaatcaccttatttacagagaatcaggccatcactctggaacgacaatcgaaaactgctccacgacagcaacatgttaaacaaatcattactgggcgccgaaccgctgtttatcttcatgccactttctcacagtgccatccaactctgggaacgcggctagaacaagcagctctaggagctcaaatgctagctgcttcaaacaaaccggggactgaagaaagaagtagatatcctgagcacatttttcataatcctttcggccaaccagactcactagtggagatggtgctttatctattattaattcacggacaaaatttgcacgacgagcagcttctagccgttgttcatcacttagatagttgcccagccattgttctgttcaccagaaggtggtggtgacgtttttctatttggatgttttgtcatgaaaattccatcaggccaga

SEQ ID NO: 20149 - DNA, 724 bp, Setaria italica
  Peptide Sequence Number=SeqID_86123
ccgacaaccagaaacagccatatccataatccacccatcagtttgtatcttcggttgatcaccatgcagattacacaagttgggtaccaccaaaaagaacagagaaaagaacaaagaagcataagaaagaatacagctaccctacgctcggaaaaaaaatactgcaccagtctcttcctatcaggcagcattacgtataccaaatctctcgagggaaaaacgacaccagtctatccggcacgaaaccgtcctgccatggtccagggaaaaaagggaccattcttacaccttcacccgttgctatctaaccgtattcacactgcacaaggccatctcctattctccttcaaactgagatatcaacaagcagtactctgaaatcaccttatttacagagaatcaggccatcactctggaacgacaatcgaaaactgctccacgacagcaacatgttaaacaaatcattactgggcgccgaaccgctgtttatcttcatgccacttttctcacagtgccatccaactctgggaacgcggctagaacaagcagctctaggagctcaaatgctagctgcttcaaacaaaccggggactgtatggagaaaaaaacaaatataaatgtaagacaaggatcagatagctgatgctgcttttcttttactccctccgtcccaagttgtaggtcgttttaacttttctaggttcataggtgtttgtatgtacct

SEQ ID NO: 20150 - DNA, 765 bp, Setaria italica
  Peptide Sequence Number=SeqID_86124
ctttgctacatcacaaattgcgcaaatagatgcacatgttatttcataagtcacctcacacacactcagttactgctcttgctacatcacagattgtgcaaatagatgcacatgttatttcataagtcaccgggagctacttctttattcgaaatcaacttcaggatttctgtcacagaaaaaaggctgcagagaaactaatcctgcagtacccagctaggctaacatcttgcctgaccaattggatgtaggcaggaaaggccttaagcagtaggaacaggcctagtcaggtgtaaatagttcatcgcaacataaccaatgtctaaatcacctgcttgaacaagatgtcaggaccccgatgctacttgaaacgcccatactttcggagtttgacagtaccagcatagatagcatacacgcgttcaagcaatgaaaacctggatcctatctcccatggcatcctcaaaatcaagcagtatctgaccattctggggattgtctgcgtcaataggtgcatttcgaagcctttccattatattagctccagccaagcctggaataattctcgtcatcccttctaagaacccggcaggtatcctggtatcaattttctggactccatctcttcctgtaatctttagtcgaagagttcgagaccaaattccagttgaaggtcctcttctgccactggaaccaatatcatagagctgaggcaatatgtcaataacaggttcttgtggtttttcagtcgtcgacctggcatct

SEQ ID NO: 20151 - DNA, 463 bp, Setaria italica
  Peptide Sequence Number=SeqID_86125
tttgatgatgtgaattgcagagtggatccaattcaattagttgtccctatttttctgtgtgttgcatttattttacaaagatgagcgtgaaccattactagatttcaagctacactaggcatgcaacgtttttaaacaaatggtaacttattttatttcccaggactcaatccaactttgtaaaatttgagacatgcatgcatatatatcctcccattgtttgcatttgttctagaagactaaatgcgtgtctgcatcttttcttgttctagctgtgcatgctaaaaaaaaaagttttaattcaggatcttgtgggcatgaagtttttgaagtattgactagtttgcatgtttcactgcaatgtttgttaaataaatggtaacttattttgtttcccaggattctccgaccaagtaaaatttgagacatgcatgcatatccaccagttgtctgcattttctag

SEQ ID NO: 20152 - DNA, 340 bp, Setaria italica
  Peptide Sequence Number=SeqID_86126
gggcggctccaagaataactgtaacagcactgagaaccacgtgcgtgactgctaggacaaagataaatatgtgtagctgatgaatggcttcagtagagaggattggaactttgcccttgttcaggcagtagtcactgttcttgccgccacctgcgaggagcctcctggtgctgcccaggacaccggtgaacacggtggcgccgtagtgctcggtggtcttggcgagcttcgacggcggcagcgggcagggcaggaggtggtgcatgacgctcctccggacgcatatcttctgcatggtgccctggaccacgttgagcattctagggtatttatttgttaa

SEQ ID NO: 20153 - DNA, 904 bp, Setaria italica
  Peptide Sequence Number=SeqID_86127
gttagtaacaagaaactcatgattgctgagaaggttgtacaccagctgcctcgttacaagtctattgatctcaacatatatttaactcgaagttttgtatcgtttctaatggtcaagcacatagctacaatatcatagcattcatgaagctctcctgggaggagacatattctgcagaagtctggtagttgtagctatgaccaccatttgcagcaggataccaagagcaacacgaacagcatcaaacatttcatagcttgtgattgcttctgtgttttgcttcataaactaggccaaaaacaaatgcaaattgttgatgatattcatactcccaaaagatagttgcaatcattacttcattgagcaaagaccaattcatacacaaaggcatggaaaaggaattgcaaagtgcaaaagtgatgcatcacccaatcacaccagctgcaggaggtaccgaggcgaaacgaaacaaaatagtggccacaaattgacaacacctacgattaactcgagtttatctgacactagaattctggcatgaatatgatagctaattttaggatgaaatgtacaggcctgagttattgagtggtggcattattgagattaagatatgtgtatcgcattatacctgtcaactagctcaggcatgtgggcatgaaagagacaaccatctttcacatctgtccagataatatcagttaccctttttattaaagaaaaagtagagggactatctacagatatttttctctgcctaacaggcttaactgtcttttcactgactatcaaacttctcaaatctaatgttgttatgtgctttacatacagtgatgctgataatatatcattactcaacatggcgaatccagattcctaatagctggatcatcccaaagactta

SEQ ID NO: 20154 - DNA, 443 bp, Setaria italica
  Peptide Sequence Number=SeqID_86128
agacatattctgcagaagtctggtagttgtagctatgaccaccatttgcagcaggataccaagagcaacacgaacagcatcaaacatttcatagcttgtgattgcttctgtgttttgcttcataaacttcaagaacaattctgagcggataatgcacgtcacagagaatgcaacggcaattgatgacaagctcgtgtaaagccgaagcagcactgccatagtccgccttcgccctaattcccccaccactatagccagcagtcccgccgccgcagacagcgcggcgaacttgttcacctccttccccttggacagtgatagcagcagcagcgcgtcgccggctacctggtgcagtgcctgcacaaggatgaggcgcgcgaggcgggatctgccctcggcgacccctctggtacccgggagtcgacgaccatggcggtaggaag

SEQ ID NO: 20155 - DNA, 1029 bp, Setaria italica
  Peptide Sequence Number=SeqID_86129
gactcagtgtgagtagtggactggataaaccaccgagatgaagacactacttgatgcacaatcaagccaggtccaaatttggatggacagctcttgcatctaacttaaaacaagccaagaccatgttgcattgcagttaagtatcaaacactgcccgtgcaggcccaaggttaactcctctgagtctcattcttgcaaatgtactcctcaggtgggacttcaactaggggttatctacctcaaataggtaagttttgcaaaatttctactatatgtttgattagttcacagttggactacccatgcccatcttgactcttgagcatgattctgggaagttggtaacagcattggcaggactaaagtgagaacaacaagactatgtaattgctgtttaagcgaaacctatacaactgaatttaaatgaagtaatggtctaacgaggcagactgcttcgtaaaaaattgaagaaggttgaactcaagctttacttggatagcatcaagaggcagaaaataataaactcccaagatatacatcttcacacacatcatttgaaaattttaagttttgaatttcatagcccaaaccttcaagaacaattctgagcggataatgcacgtcacagagaatgcaacggcaattgatgacaagctcgtgtaaagccgaagcagcactgccatagtccgccttcgccctaattcccccaccactatagccagcagtcccgccgccgcagacagcgcggcgaacttgttcacctccttccccttggacagtgatagcagcagcagcgcgtcgccggctacctggtgcagtgcctgcacaaggatgaggcgcgcgaggcgggatctgccctcggcgaccctctggtaccgggagtcgacgaccatgcggtaggagaaatcggagccgtccgtgcccgacggccggccggaggcgccgcgccgctgcgtcgccattcgtcggggggagagagacgacagacgagtacgctggcgctcggttaccctggcgtcttcgtactta

SEQ ID NO: 20156 - DNA, 451 bp, Setaria italica
  Peptide Sequence Number=SeqID_86130
acagagtttcatgcctgtgaatggtgttgtccaggagatatgcaacaaaccagcaacaaacgccttggacgagaatagcacatttactatgtcattgaactgtaagattagacagaataatgattagttcctccccacgtaacagtaagatatgtaagagactgctgtggtatacccatcttgaatgtgtgtgaacaggaccataaccagcaacagatgtgtactcgttgaagtactgaggaactgaaaggcccatgaaaactgagaacccaaggatgaacttggtcctaaagctgttcaggttacagaactgaaggaagccaagcccagcagaaccagcataagcaaagaagatacaatacagagctgcaaagattgggtcaggtattgatgcaaactcagctccaaatcttaagttactttaccttaaaattttttagtttacctttta

SEQ ID NO: 20157 - DNA, 1123 bp, Setaria italica
  Peptide Sequence Number=SeqID_86131
cctagcatacctggaaacagcaatgaatgccccagtagactccacgagagcaacaaatgatgcagccatcatcgcaaaagcttcacctgcatcaaaagttggagcgccccactgaaagggatatggcactcttatccagggtgcaccaccaattaatccagaacggtcagtgcggcaatgaaattgagtctttggcggtgcattcctgtatgctcctccaacagtgagaagatatgcgtagagccacactatggggatagtgaacaggacagcgaatcggtcgaagatagacttcagcatgtgtacagtgtgtggcaggtacattgcaaagatcaccagtaggatgagttcagggagaccaatctcaacacacttagcaaccgatggaaaaccaagctcatagagtccaaagccaactagtgccaccaaaggagcagctgaaagtggactcagatacctggcaacattacgccaaaggccactgaagccaactataatctgtaaggctgaagcaactatcaatgcaccttgtgttccacgcatgatgcggagaaatttagtgtgtggattaggttcattggcgtaacgtccagcaaggatgattgagatggtaggcacaacaaaagtgtacgacccgccaatcactgcaggcagcctggtaccaaagaaactctggaggagggtgttgatccccgccacgaacagcaatgtctggataaccactgccttgtcctcattgtttcctcccatttgtggaactagtgcggttggtatgatcacagtggtacccagcatgaccagataatgctggaacccaagaagaacggcctcaggccacggaggagggctggtgatgcagtaggagacccccgggagctggtccttcgacggggtgcggcgtgaggtcgtcctgcttccggcgccgccccgccgcctccgcctcctcccccgggccatcccgccgcgcctccgagatcacaccacacggggcaccgctcccttcttcccgcaatgcgagcccgaggaggaagcggcggcggcggcggtggcgtggtgcgcgagtggtggtggtgcgggcgctagcgcgcagcggcagtagagtattgtagtggtggcactggta

SEQ ID NO: 20158 - DNA, 270 bp, Setaria italica
  Peptide Sequence Number=SeqID_86132
caacgacacgcacgcacgcccgcacagtctcctgaactcctctcgcaggcaacacttcatcgtctgacatctgttccggcccatgtcctgcttcggcgccgtggcggggacgatacctgccgcctactactactcgtcgtcgtcggggatcaacggcggcggcgcccgcggcagcaggaggccgtggcggtggtggcgcaccaagtgcgccggcatcgccgcggccgtcgggtcgaggatccgcaagtccatcaagcggatcggaccggg

SEQ ID NO: 20159 - DNA, 289 bp, Setaria italica
  Peptide Sequence Number=SeqID_86133
aaaagcagagtcgagcgcaggaggagagatccaaatacacggccaactcctcttctgcatcgaagcgagcaggctcccgcggatctcgctccacgcgccgctgcctgcccttcccttcccttccgttctcccccggttggttgcttctcttcgcccttctcctacttcttcttcccgcgcgtgggcgggttcctttcgtgttaatcggtgcttgacggatcgggggcagggacagcagggccccgaggtttcttggttttattcttcttttgtctcattaaaatccccg

SEQ ID NO: 20160 - DNA, 1020 bp, Setaria italica
  Peptide Sequence Number=SeqID_86134
aggagcatttgttacagttaggcaaatctggtcatatctcataatttttcccttggcatcctagcatgagcatggattgtgttgtgtatcccttgcaataacgcaaccatagtagagcacttaaatcaacagatgagcatgagtgtgaaaattttgctccataaaaagaagtggcacgaccataattcttttagatgagtaaaaaagagctcacatcattttccgtgctattttgttctaatggatggtgtttgtgtaaacataatttcctcctcgctgacagtaaggatggaccggaagggcggaagctgtagtgatggtggtacggatcagcggccaaacacgccacggtcaaaacactctgccacagagcagcgcagacgcagcaagatcaatgacaggtttcagatacttagggagctgttgccacacagtgatcaaaagagagacaaagcaacatttctcttggaggttatcgaatatatacggtttttgcaagagaaagtaacaaaatacgaggcaacattcccagaatggaaccaagaaaatgcaaagatgcttccatggtcaaatatgtattttcgatcattctggaaaaatgagcagagtaagggacaaatcccaggagaatccctgcctgacccttcacatttcatgagaaatggatcctcccctggatctaatttcactgggaaactcgatgataatcacaacatggtgacatctgcagctgcatcaggggcacaggatcagactgaaactgatccaatggctagcatgtgcttcagatcagcagaaactccggcaaatattacaaataatactttatctcagtcccaaccccaatggacaggtccgtcccctgtggatgactgtgcagttaacagtgaaatgcttaacaaccagccgttggcgatcaatgaaggaacgatcagcgtgtccagtcaatattcccaggagttacttaattcgttgactcatgcccttcaaagctcgggtatagatttgtccctaagtcca

SEQ ID NO: 20161 - DNA, 495 bp, Setaria italica
  Peptide Sequence Number=SeqID_86135
gagagacaaagcaacatttctcttggaggttatcgaatatatacggtttttgcaagagaaagtaacaaaatacgaggcaacattcccagaatggaaccaagaaaatgcaaagatgcttccatggagtaagggacaaatcccaggagaatccctgcctgacccttcacatttcatgagaaatggatcctcccctggatctaatttcactgggaaactcgatgataatcacaacatggtgacatctgcagctgcatcaggggcacaggatcagactgaaactgatccaatggctagcatgtgcttcagatcagcagaaactccggcaaatattacaagtatggtcaatgatccactagtgatcctgcattattctccgaggtccgtcccctgtggatgactgtgcagttaacagtgaaatgcttaacaaccagccgttggcgatcaatgaaggaacgatcagcgtgtccagtcaaggattccctaggtagtttactt

SEQ ID NO: 20162 - DNA, 1458 bp, Setaria italica
  Peptide Sequence Number=SeqID_86136
agatccagcggcggcgcggggttcgacgacgacgacggcctcgccgcgcgccgggaggtctcctcctcgctcaaagtaaggatggaccggaagggcggaagctgtagtgatggtggtacggatcagcggccaaacacgccacggtcaaaacactctgccacagagcagcgcagacgcagcaagatcaatgacaggtttcagatacttagggagctgttgccacacagtgatcaaaagagagacaaagcaacatttctcttggaggttatcgaatatatacggtttttgcaagagaaagtaacaaaatacgaggcaacattcccagaatggaaccaagaaaatgcaaagatgcttccatggagtaagggacaaatcccaggagaatccctgcctgacccttcacatttcatgagaaatggatcctcccctggatctaatttcactgggaaactcgatgataatcacaacatggtgacatctgcagctgcatcaggggcacaggatcagactgaaactgatccaatggctagcatgtgcttcagatcagcagaaactccggcaaatattaacaagtatggtcaatgatccactagtgatcctgcattatctccgaggtgctttctgagactcgaagcagcacgggttacagatgagtctgcaaaaaatacaaataatactttatctcagtcccaaccccaatggacaggtccgtcccctgtggatgactgtgcagttaacagtgaaatgcttaacaaccagccgttggcgatcaatgaaggaacgatcagcgtgtccagtcaatattcccaggagttacttaattcgttgactcatgcccttcaaagctcgggtgtagatttgtcccaagccagcatctctgtgcagatcaacctgggcaagcgggctgtcaagagacctgctgctggtgtatcctgcaaggaaccaaccgatccagcatctagtgacgaaataggtcagcagctggcaatgttgggtggtggtgccgaagatctctcgcaagcagcaaagcggcataaaccgggcaacagctgacgatgatggttcccgccttgctcccggaccggattgatcattatttcttcccttcgccaacggaaggctctctggattggttgtacattgtgctagctgtgacaggcttcgtgatgaacgagacaccggcgcattctttcattttatcgcccccgccaccctacctagtccattgtttacttagtagagaagaaaacaaaaccatggagcttccatcgcggattgtgaagccgctcttgtacacaggcttccattcatatgagaagcttccccaccctttgacgaatcctatgatgtaggctcgtagtaacctgtaagatatctccaacaacactacctgttagtcaacttgttccgttctgctgggtgccgtggccccgtctttcagttgtaacttaaaaaaaa

SEQ ID NO: 20163 - DNA, 499 bp, Setaria italica
  Peptide Sequence Number=SeqID_86137
ttgacagtgcagttgaggcgtttgagtcaatgcctgtgaagaattcctggacatggacggccttgataaagggcatggcaagcaatggaaggggcagggaagcactagagctcttctcatccatgcgcaaggccagtattgagcccacatatgtgacattcatcggtgtcctcatggcttgcagtcacaactgcttagttgaagagggttgccagcattttgacagcatgactcaggattatggaatccagccaagaattgagcactatggctgtgttgtggatctgttggggcgggctggtttgattgatgaggcgtatcagtttatcagagccatgccaattgagcctaatacagttatctggagggcactgctgtcttcctgcgcacttcaaaaaaaatgttgaagttgggaagaagcactgaagcagatcatctcattggaccctagtcacagtggcgactacatacttctgtcaaacatctatgcatcagttgg

SEQ ID NO: 20164 - DNA, 739 bp, Setaria italica
  Peptide Sequence Number=SeqID_86138
aatgatgagaataattacatgtcatgttcctagatcaggtgaagccaatggctaacttcatgatttatagtaatttatttattagaaaaaccacgaatgcacaattgtgcatggcatttggtttacaggttcaattgcttccaatcctttcacaaaacaatgcctctacatgtcattcatgcaggatgattggttaataccaaagagcagaaaatagtccaagcatagcttcatgatcttgattactaaatggccacgatcaaggtctctcaagtttcccaccaaagcacggtcttgtcaattatgtggaatcaaatatgcagcttaggctacgtagtctctagactaataagtttatgacccaccatcaaccttttctgataatgctgaccataaatctataacgataagaaacatgatatatgtactcattattaattattcgcgcaaaaccactcttgtttgttgcataactcatttgattcacgttcataatgactcaagcgatcctagaaccaaacagatacatagccctcccatacattactgatccaatcgaagaaacaatatcagatatccacagccacaaatggcttcttgcttgattgcacaaggcattatttgacaagatcacccccataccaacgaccaacaggatcttcagggcgattatgcagtcagtattcttgcaatccaaacagctaaagtcgatgcagctctctacaagtgacaatcagtt

SEQ ID NO: 20165 - DNA, 962 bp, Setaria italica
  Peptide Sequence Number=SeqID_86139
ttttttttttttgtaggctgagacaagtcacacaattgattaacagcaacaaagttgttccttggttagggcaacttcttcggggtaacaaaattataaatttgtatatataatacacgagaattgactcaagaaagcaaggcacaatgagactagccactgtggtttctactcctgtgagacctaacaagcactttgcctcttccagaattacacgtgtaaatacagtaatataatggcagggaaaaacataagaaaggtacaccaaaacaacttaagcttccaatcagttatcatctgtactagaacctaggaggacttgttgggattcttgcagccccctgcataatatttgtacgccgtttccggtaatatacaaatgggccgcttactagcaacatcccggccattattacctcaaaaccgagaacagataacttctcttcaccctccaatggcacacaactcctgtaagtaatataatacttagggccaccggatgtggattttgtgccgcctgatgtggattttgtgccgcctgatgtggatgcatcatccaatatcttcctctgcttgcccttgtttccttcttttgtaacattttgcgcttgtacgcatttcaagggcaggcgatagccagtttcgctgcagctgtacttttcatcattcttctcagagtactggcatgggatgcagggccccgagggcgtgcactggtaggaggcgttcccttgcgcctccacgaagccgagcagcgacctccgcgctccattggccgtcgatgcggccgccgccgctgcagcagcagcgatcgccgggggaatccagcatagggcagccacggtgacgaggagcagcagcagaagtcgccaccgccaggaggtcgccgccgtcgccttgttcgccatggcttccgcggctgccagctgctctcggcctctcgccgacctcccttggtgcgg

SEQ ID NO: 20166 - DNA, 326 bp, Setaria italica
  Peptide Sequence Number=SeqID_86140
gaagcccacgacccctggctcgtcggcggcgctccagccggcgacggtgggtggcgtcggcgggcgcgctgcggccaagggcgcgaacgatccgaatccaagcgtgaggtcgaggccggccggctgctgctgctgctgctcttggtgctggtcctcctctcccgccacggtcgtagcctgctcggcctggctgacgtgcgaggcgtcggtgtccagcgacgccgccgacacctcctggtggtgcgtgtcgtcgtcggacgaggcgcggctggggggcgcgtggtccgctgtcaggtgggaatggtggccgtcgtcctccgtatcgg

SEQ ID NO: 20167 - DNA, 529 bp, Setaria italica
  Peptide Sequence Number=SeqID_86141
gttcatcagagattgcatggtggtatacatcgcatagcattgctctggctttggtcctttcatctccatacttgtaaattatagatgtcaatccatccatcaaagttctactactgggagggaaaataggccttctaggtacaacttctggaatgacaacaaatggtgttggcctgatacatccatcaatcgccttggcatcccgatcttcattttcagcctgttctgccaagtttctcattgcatcatacacttcttggggtttatagtaaataagttcaacttgatgcagtgcaaccttagcagaagccctaaaattcccaactctttccaggtaaccctgtacattttgtgaaacaaccataaacaagggctcatcctgcagcctctggacgtaatcttttgtgtgtggctcagtgtactgcaaactcttgaaatactcagagtccagtctctcaaggaaggcagccaaatcacctgacacatggatagttccaccataatcagcaccattacaagtctccttctc

SEQ ID NO: 20168 - DNA, 430 bp, Setaria italica
  misc_feature (1)..(68): n is a, c, g, or t
  Peptide Sequence Number=SeqID_86142
nnnnnnnnnnnnnnnnnnnnnnnnnnnnnnnnnnnnnnnnnnnnnnnnnnnnnnnnnnnnnnnnnnnnaaagtattgacctcccagtaccatagatatccgtttcatccttaatcgcttggttttttatcacctacaaaacactatgaaactaactgcaccctttaatgacccaaaggtaacaaacagacgacccaaaggtgacaaacagacgaatacgacggtgagtgactacgcagctcctgacgacgagtcggcacttcgaaagaaccgggccacgaccttcccgcgcagccctcttgccaatcggaggctcgaggcagccaggacacaccgtgcaaactagagaaacccaagcaaaagaaactggtgctttaagctgttcagcaacgcttactaacttattacgaaattgcagttcccatcagggg

SEQ ID NO: 20169 - DNA, 1404 bp, Setaria italica
  misc_feature (1372)..(1404): n is a, c, g, or t
  Peptide Sequence Number=SeqID_86143
accactcgaagcaaacaccccgagcgccgccgccgccaccaccgccggcccgccgctcttgccccatccagccgggcccgtttgccgccggcggccgctgcaccggtgctgagtgtcggaggatggcgtcgagatgcccggcgagggtaccgtctccgcggtccgcgccgcggcacggctgggcgggatcgcgagtttcggcccgcccgtcgaaatgcagggcctcgggaggacgttccgtcatctgtgccgctgttagcttcaggccatgcattgacatacacaaggggaaagttaaacagattgttggctctactcttcgggattcatcaaatgatggcacagcacttgtgacaaactttgaatcagacaaatctgctgcagaatttgcaaaactctataaagaagatgaacttgttggcggacatgttataatgcttggcgcggatcctgcaagccaggcttcatcactggaggcgctacgagcatatcctggtggtttgcaagtgggaggtggaataaatttggagaatgcaatgttgtaccttaatgaaggggcaagtcatgtgatagtaacctcatatgtgtttagtgatggcaagatgaacattgaaaggctaaggaaacttgttgagctggttgggaaacagaggcttgtgttggaccttagttgtcgaaaaaaggatggcagatataccattgtaactgacaggtggcagaagttcagtgatgtatttgtggatgaacctacattagaatatcttgctgcctatgcagatgagtttttggttcatggtgttgatgtggagggtaaaaggttgggaattgatgaggaacttgtggaactattggggcgtcattcgccgatcccagtaacttatgctgggggtgtgtcaacaatggatgacctagagaggataaagaaagcaggcaaaagtcgagtagatgttactgttgggagtgctctagatatatttggaggagatttgccctacaaagacgttgtcctttggcacaagaagcaaagtttagttggccaactgtgaagaaacatgagttatggcttgatcggtactatcagctatggttcaagctttgacagaagccaaactttctgaacactctattgcaaataattcagtgggctttcagtgatataatctgaagctgatgtgtatgatttgttcttgtgtgggcattagggttgatttagcaaaatagggggttgattcatgattaatggactgttgttaaactgtttcgtaccagtctgtaagcctgtttggttttcaagcacagctgatgatgacgaatatttacatcctgtgcggtcacaacacacacccacaaccacaagcaattttagtgaacnnnnnnnnnnnnnnnnnnnnnnnnnnnnnnnnn

SEQ ID NO: 20170 - DNA, 775 bp, Setaria italica
  Peptide Sequence Number=SeqID_86144
agggccatgatggcacagcatggtggacaaggggtttcacacttgttggcttccacatggtaactttgccacccagcatgccccaggcctatgacagcattataggaattgacccgcataacatcagttcgccccagacctgtcctataatttgcaaccatctcaccagtgctcacatcttggtagtgcagctgcccaaagctgtttattgaagccaagaggaattgtttagtcagaaactggagtttcaacgctttgccatgttccttcagacaatgaatttctgtaccatgtcgattatatatgtaagggtacttttttttgagcgactgcatacagctgctcattatgtaagaatgccacatcgcgaacagtttccctcacctgaaattccttgatgagatcaatatgcagcatatccatcatagcaagatgacctttacgtccgcctactagcatgtagcggccatttgatgtgtactctatagtataaggaccaagtacaggtaagatcatatcgaatggttttcttgaactcaaaagatccacctccttcacaatcgattcttgtggaaatctatatgtcttctccaaaccatcatcaggctctaagaaaccctcctcactaggcataagccactgttcagcctttgcagcagctttcgcagactggccatagagcttctctttgacaacgagctggcctttcaacttcttgtccttaagcgccttcaagtcagcacccttcccccgcgaatacttctcctaccaacct

SEQ ID NO: 20171 - DNA, 986 bp, Setaria italica
  Peptide Sequence Number=SeqID_86145
tttctgagaaacttccgaaacttctagattttccaaaagacctggctagcttagagttggcggcaaagatacagttaaagtcgttagcagaggaaatgcaggctgtaaataaaggactcgagaaagttgagcaagaacttactacatcggaaaatgatggtcctgtgtcagagatcttttgcaagacactgaaggattttctcattggcgcagaagctgaagttaggtctttgacttcactttattctaatgtgggcagaaatgctgatgcattagcactaagttttggagaagacccagcgcgatgtccatttgagcaagtagtcacaacactccagaactttgtgagattgttcacacgctcccatgaagagaactgtaagcaactggatcttgaaaagaagaaagctctgaaggaagcagaagagaatagtaagcaactggacctggaaaagagaaagctcaaaaggaagcagaaacagacaaaacgaagaataaatctgataatgtggaaggttgtaagaaagaatcagaaaatgataaagcttctataaaggaatcagcagatgagaaagctaagctaaacaattcgatcaaagagctagatatatcacttcagtcacctgcacaaactgccagtgccaaatgaatacagcaccggatgaactaagagcagtagcaacgggggaggaaaactggttgtgcttgctctcaatagtgctctctctcagttaatgtggatctggcattgaagtaaaactagccgcaacaaggaagccactaactgcactgttaatactttctcaggggattgttgaagaaactaccctggcgacaagatgtacagatctgacataataatagtctctcttttgggtaatagattatccttacaatttttgtttaatcttatttgattacatgtagctaatgtctggcatcatgtaaaaaaatatcaatagaatgactgctgatgtatgtctagg

SEQ ID NO: 20172 - DNA, 836 bp, Setaria italica
  Peptide Sequence Number=SeqID_86146
ttttttggtaaagaatatcaatgttgtgctaggataatcatgcagttgtacaatacaagcacgagaccgtgcgtgcaacaaaggaagaaaggggagcatccaccacccaccaaggctgaataaataactatgaacagaataaatcgatggcagcaacaacagcttgtcaacaagctacaaacttgatcttcagtcagttcagatcagttcaccaatctaggctaatgttcctcgagaggaagaggttatcgatgtactctataataggactagaagcatcaatgtatctcctcatctccttctgcacagagcaatcagtttcgttcagcctcactatcaactgctccctgcttggaagagtgtacatgccagcaccaacagcctttctgattgcccagctatgaaatggcgcgcagacctgcccgtaagctgtcgtggcagcatcatacaatgaacaaccctcggtggtgaggaactgctcgaagagagccttgatgaggccaagaccgaggcggaccctgcgcaggttccgggagtggctgccctgcttcttgacggagtcgttctcgatgtccttgtcgaggatgtcgctcagcgtgcggtacgacttgcccgcgccgatgaggtcgttcaccttggtgacgtactcgatctcggcgaacctgaaggccatgccgaggctgctgaagagcacggagacgagcgcgcaggtgtcgccgaagggcgcgaggcggagctccccggcgtcggcgtccatcccgcgcgccagctcctcgaacgcctccgccacctccttgagcggcgtctccatcccctgccgcgccgccacgacggcc

SEQ ID NO: 20173 - DNA, 1046 bp, Setaria italica
  Peptide Sequence Number=SeqID_86147
tgttcactgtatctgttagaaattagtttgttaactttgggttctactaaccttacgttctttctagttctacatcttgacttctaaaagataagccaagatatagatctgaaacaggaaccacccacacacaaggttggcattaacattatcacaacctggtaacaattaactgcaataaagtaaggagttaatacgcatactacaattgcgcctcccaataatctagttagggccatgccatgcgagcattgcatgatagctcaattaatttccttttttctggctgtcatcgccagaatgttgcagcttgttgttaaatcctgcctcatcagttttgtgttgtttgccttcaagtttttcctttagtgagttattctttgataggagttcctcgtactcttttctgatacggtttacttcatctctaagtgaagaattttcctgctttaaaacatcagcacgttgagccaactcttcacactcagcctgtttgcgcaacctagatctgcgtgctgactccctgttggactgcttccttctttgccttttaagttcgcgttcatcctgaaccagaagatagtcaacataactagtttcaaattttgaacccataactttatatatgaactgctgattgaatatctcatgtgattttcataagccatatgtcttctataaaacatatcatgcgtgcaggacttggatagaaacaatgcaaaagaaaagaagacagaaaatagcaaaacacagtcaaagacaacacacacttcattcttgatgtgtgtacacaggactaaaagtacattgaaccaggctactagcaaatacattcatacaacagtttgacatcaatttcaccaacacaatttattcttaacatatagattttctaatgaatacccgcattgcaaaggatcaggccattgaactgatcatatggtgcgtacaaaaaatgtaaacagatataacacaatatagaaggcaaaggtcttctgtaaacaccgttggacatttccgtatatgaaatggaaatggagttcagc

SEQ ID NO: 20174 - DNA, 1772 bp, Setaria italica
  misc_feature (1)..(28): n is a, c, g, or t
  Peptide Sequence Number=SeqID_86148
nnnnnnnnnnnnnnnnnnnnnnnnnnnnactactggtgtagaggatgaaacattctccctccaccatttgtcaattattatatcaaataactgggaacaaactgatgtaagcaacattatacataaactaggcagaagtgcaagcccagcaaaatgttcaacctgattgaattaaaagaaaccagtcttttgccaggtatacataacaacactagtcagcaatacaaatttgtaaatttgagtttatccactatttctaacagatacagtgaactgggtcacaacctacgtcttcagtcacatcttgacttctaaaagataagccaagatatagatctgaaacaggaaccacccacacacaaggttggcattaacattatcacaacctggtaacaattaactgcaataaagtaaggagttaatacgcatactacaattgcgcctcccaataatctagttagggccatgccatgcgagcattgcatgatagctcaattaatttccttttttctggctgtcatcgccagaatgttgcagcttgttgttaaatcctgcctcatcagttttgtgttgtttgccttcaagtttttcctttagtgagttattctttgataggagttcctcgtactcttttctgatacggtttacttcatctctaagtgaagaattttcctgctttaaaacatcagcacgttgagccaactcttcacactcagcctgtttgcgcaacctagatctgcgtgctgactccctgttggactgcttccttctttgccttttaagttcgcgttcatcctgtatccactgctctgctgggaccacagcacctgtacctgttgtaggggtcactttgccatgaattgcaggagtggagcttgctgtgttggcccaataatccatccctatattgaggtttgtagttggaccaactgggccacttgatggcattggcatgattgccattgtttggttcaatttcccctcagatggcgagcgtgatgcaccattctgggaacttcgaacatctccatcttgttcctgtccactttccttgtggtgtgaatcattctgagaatttccttcgctcccttcacttgtactttcactcccactatccccactttgagaagtggctccatttgctgatgctcctgaggtcttaccatgttcggtgggattctttccagtaagcatgttcaagctacctaaacttcctttggatctttttgttggacttttatctttgccttcagagggcttcccgtcagtatcaccagccgcagcagcagttccaggagcatcagcattgccatttggagaagtcaaggcataaggggtgaatggatgtgcacccgggggcatggatgggtgagcatatactccaggagggtacatgacatatggcggcggcggtgttccatatggtgggatcataggttgagctccccacatgtatggatgaccctgtggacttgatgccacaggtgaagggaagaacccatgtggtgggattggaggatatgcctggaagctggaccaatctgggtaaacagccggtgttgcagcacctgaggtagcgggtggctgttgttcctgaggggcagaagccttggttgtcttagacggtgtatctgctccactgcttcccattgtgaatcacagaaacgggccagcaattagtccattgtctgtggacacatgaaccagcataaagcaaaaacctggcggtacggtgtcctagttcgcccaatgccccgcgggggggcgaggaa

SEQ ID NO: 20175 - DNA, 423 bp, Setaria italica
  Peptide Sequence Number=SeqID_86149
caagttgttcctggacgctggacataacaaaccattggctgcacaatctataaagctacaataacacttaacagctagtagtatcaagcctatgctgcagacagtatctaaatagtgtactgatcccttcatcccaaattactttcattttgacttagatacatatctaggtgcataataaaggctacgcatctagaaaacccaaaacgaatagtaatttgggtcggagggaatacattacagtgccactgactgaaacgtttcataagcaaaatactgcagtaaacaggtgattttgcctgtctgtactccagatagttgtgagtccaacaataataccttaaattttggaagcccaatgagacatgcgcactcgaccacctcagctccagcacgttcaagaagcctaatcgcggcacacag

SEQ ID NO: 20176 - DNA, 526 bp, Setaria italica
  Peptide Sequence Number=SeqID_86150
tgtacctattcattcttatttatcagattcacgggactccaccagtacatagacaggctttccattgagcttgtagaaattagtgccactgactgaaacgtttcataagcaaaatactgcagtaaacaggtgattttgcctgtctgtactccagatagttgtgagtccaacaataataccttaaattttggaagcccaatgagacatgcgcactcgaccacctcagctccagcacgttcaagaagcctaatcgcggcacacagtgtcccaccggtagcaaccaagtcatcaacgatgatcacatgctctgcaggttcgatggctccaacgtgcatctctaaacaatcagtcccgtactcaagcacatatttctcggatatcacctcgcctgggagcttcctaggcttgcgcagcggtatgaacttggcgcctatggccaacgcaattgccgggccaaatatgaagcccctggttgtgctgctccgcgctctgcacgtggttggtgattgggggccgaggttaggtt

SEQ ID NO: 20177 - DNA, 570 bp, Setaria italica
  Peptide Sequence Number=SeqID_86151
gcagcaaggaatgaacacaccagcattcctgaccatcacttcttatttatcagattcacgggactccaccagtacatagacaggctttccattgagcttgtagaaattctgcagggaagttgctacctcggttaaccagtttgaatccgctttctagatcaatgagtttgaaatttgaagcaacaaaaatgcatgttctattgcaaattactaatgtcgccagttactgaaatagaattagatcaactgacaagcagaagtgagtggctgctgctgctagcctgctactcgttgcaaatgtctcagcttttatttatcctgaaaccctacaggatcgctatcctgaaaccatggtacaagatgcaggattgcaggcagtaatagcatccttcacccacaacttgtaccacaacagaggggtgtgtgcccccatgctataaacctataacaaagtaatatggccgaatgaaacgggtgcaatgcaagtagtaccttctacagtttttatttagacaatcacagacaatgcacatccaaatcttaactagtcatgtctatggtctatggatg

SEQ ID NO: 20178 - DNA, 996 bp, Setaria italica
  Peptide Sequence Number=SeqID_86152
acgttataatccatcataaaaatagtgtactaatactatgcacaagttgtccaggccaggccagctcaagttggcgcggcaacgccgcgcccccatgttttctagtaacaagctaacggtaacaggttcctagacgttaaccatgctgtcatgctgccgaagttcttctctgaagctccatctatatcctgattgctgacattttcaaattaaaaccgcacaattcaacaacaatggaacagcagcaaccttgtttcagctaataacaatgttcccggaagaactacaagcgccattactctggaaaaaaaactactcaacctacaagactacactctcaacactctaacctctccccttgccaagctagtcttagtaatgtaccgcatagttgtcgatgcccgtccacctctcaattgcagcagcaaggaatgaacacaccagcattcctgaccatcacttcttatttatcagattcacgggactccaccagtacatagacaggctttccattgagcttgtagaaattcttaaattttggaagcccaatgagacatgcgcactcgaccacctcagctccagcacgttcaagaagcctaatcgcggcacacagtgtcccaccggtagcaaccaagtcatcaacgatgatcacatgctctgcaggttcgatggctccaacgtgcatctctaaacaatcagtcccgtactcaagcacatatttctcggatatcacctcgcctgggagcttcctaggcttgcgcagcggtatgaacttggcgcctatggccaacgcaattgccgggccaaatatgaagcccctggcctcaatcccggcgacggcgtcgatgcccatcccgcggtagcgctcgacgaagaggtcgacggcgtccttgaacacgccggggcgcagcagcagcgtggtgatgtcgttgaacatgatgccttccttggggaagtggggcacgacgcggatggcgtcggagataccctgcagcc

SEQ ID NO: 20179 - DNA, 985 bp, Setaria italica
  Peptide Sequence Number=SeqID_86153
gagcgtcaggataagaaaacagcgcggccctgcacggagggcgaccgaccgaccgaccgagcggaggcagctcctccggcgactgcgagcgcccgagcatggcgtccctatccccttccctccacctcccttgcaattcaagaactggcttccttggaaagacacaagggattcgtcctcgtgttatccctgctggcagagttggatttgtcagaacagtagtggagtgcaaggaatctagaattggaaagaagcccatcgatgttccatcaaatgttactctcacattagaggaacagtttgtcaaagctaagggtccgctgggggagttatcactgagctatccaggtgaagtgaaagttgtgaaagaagaatctggtaagctaagactttataagactgcggagactaagagggcgaaccagatgcatggacttttcagaacattgaccgacaacatcatcattggtgtgtccaaaggattcgataagaagcttcaattagtgggtgttggatatcgtgctgcggtggagggcaacgatctcgtgatgaatctgggattctcgcaccctgtccggatggctgttccagaaggcctgcaggtcaaggtggaagagaacaccaggatcattgtgagcggctatgacaagagcgcaatcggtcagtttgctgctaccataaagaagtggagaccacctgagccatacaagggaaagggtatccgatatgctgatgaggttgtcagaaggaaggagggcaaagctgggaagaagaaatagaaactgtttctttgttttttgtggttttacactgtaatgatcatcacgtactaaggccgcccttagaaaatcccgtccttttcttatcatggcatgtagatctacactttcaccatcccacgattccctggccttccaagcattttatgctactccactgaaaagaaagaacagcagcactgatgatacttgacctgacaaaaaaa

SEQ ID NO: 20180 - DNA, 1514 bp, Setaria italica
  misc_feature (1469)..(1514): n is a, c, g, or t
  Peptide Sequence Number=SeqID_86154
aatcaatctaaacagcgaatcctttccaaaacccccaccggagaagattcatgtccaacttctggtggcaccgtggttggagcccgctgggcggcccctgcggcgaacagcagcccacgttcaaggtcttctgcaaggcctacgaggggcgctgcctcgctgtccgcgacggcgcccttgccctcctccccgccgaccccgccgacgagcagcagcactggttcaaggacacgcgcttcagcctgggggtcaaggacaaggagggcaagcccgtcttctccctcgtcaacaaggccaccggcctcgccgtccagcactccctcggcccgtaccgtccggtgaggctggtgaagttcaacccggaggacttcgacgagtcggtgctgtggacggagagcggccacttgggcagggacttcggctgcatccgcatgatgcacgacgtctgcttccgcttggacgccttcaccatcgacgacgagggcgagtaccacgacggcaccaccctcgtgctctcggatttggccgggggcgacacccggagctggaagatcctctactggaacgacgaggctaacacgaccctcgcagggcttgaggcagagcccacctgccgcatctactgcaaggccgacgagagtttcagcgtcaccatctgcgatggggccgtctgcctcgcgcccaccgaccccaacgacgtgtaccagcattggattcaggacaagaggcccgggaacatgatcaaggaccaggatggttacccggttttcgccctcgtcaacagggtcactggcgacgccatcaggggctctgagagggatggccgctctacaaagctcgtgccatacaacccgttctactttgacgtctcggtgctgtggacgacgagctgggacatggggcaaggctttcggtgcatccagatggtggacaacatcttcctgaagtttgacaccttccatggtgatgacaccagcgttgtgctatcgcattggcgcgagggtgacaacctgcagtggaagattgtcccctggtgtcttgtggtggaggatcttgaatcacagagttggaggagctcgtgtccaaaggatcagaggtcgaggatggagaaaaggagcaggaggttgcggagaaaacggatggagcagagttgccactggacatgctgaagctaaggctgggatagcagggcgatgaagattggaacgacttgaagtttgttgtgcgcttttgttgcaatcagaacagcaagagtaataaggtcacttgaccttatattcgggcctttatttttatgccaccaaatttcagctcccattttctgataggggctttaatttcttcccgccaattcagcacgagacactcgtggtgacaacaatcatagcgaaccatatattgacaaatggtaatgcttcaactcatacgtgtgaagtttgcacccctgaaattagatgtgcttttttagnnnnnnnnnnnnnnnnnnnnnnnnnnnnnnnnnnnnnnnnnnnnnn

SEQ ID NO: 20181 - DNA, 251 bp, Setaria italica
  Peptide Sequence Number=SeqID_86155
gtggagacgacgactcctgatcacattagatgtcaaaattttttaagtccgccgccggccgctggccgccgcagaggcggctgaactccagctctgttgaccactgctacggtgctagccaaccactccggaactgaactccagctccgttgaccatctacctgctgcccagacgttacatacttccattcccggcgctgcgcaggcaatcgagggagcaagcggtggccatggccgggagcagcgtatcc

SEQ ID NO: 20182 - DNA, 269 bp, Setaria italica
  Peptide Sequence Number=SeqID_86156
cctttatcgaactcatcttcaagactctgcaaaaccgaggggatctggtggtgcatgtagaggacgaagccgacgagctccttgacaacgtggaacacctccgatcgccgcagcgccgccgccgccgcttgcacctccacgagccctgcgcgccgctgctcggtgccggcggcggcaccgccgcctccggacgaggaggaggttttggtctccatctcgccgcgaccgccccgcccgcaccaccacccccgactgttgtctgttccgtt

SEQ ID NO: 20183 - DNA, 1691 bp, Setaria italica
  misc_feature (1)..(109): n is a, c, g, or t
  Peptide Sequence Number=SeqID_86157
nnnnnnnnnnnnnnnnnnnnnnnnnnnnnnnnnnnnnnnnnnnnnnnnnnnnnnnnnnnnnnnnnnnnnnnnnnnnnnnnnnnnnnnnnnnnnnnnnnnnnnnnnnnnngtatatcagtacgacaaaacgttgagatatataatagatattctcatgccgagaacctttaaaccgatgataattcttctgaaatgctaccgagtataactactatctgagcattctcacgatgtgctccgaccgaacatcgggctattatattcgtaagcgtgcaagtgcaaaggatcccttacacggggagttcactagtctacttgatcacggcctgcttcgtcaagtcatcaagtgatgagcatcctctactgtacatgcatatatcatatcactcactacaacaacaaaggcaagtttggtttactttgacatcttgaagccatatcacccttctagtgacgccttgcctggtaaacctcttattgtatgcttgcactgaaaccagatagaatcagaaagaaaagattctgaagtggaacatggggcatcagcaattgacattcggtgctggttattcccttgacagtctgctttactgcactttatatgcatttgaagaggtacaaccttcttgctgtaccgaaaatcacgctttggcaggaaatccagtggtaagttcaatgtactgggacatcgtaccagcaaaaataacttgctaggccctgtgtaggacaaactccctgctccacatgacacaagagcacggatagccttccgagaaacagattgagctaacttggttagagcatgatctttggcacttcctgaatcaaacgtaccatgagaaattgtaatgtcatacacaaataggggccgtacaaggcttcctccaaggatcaggacaactccttcaatgctagaaacttcatcaagtgcttgctgaagagcacatagtaagatagagatgcctttcatcaatttctcgtgcttctttattcgacgtctaacctcccgttttcgtgtgttgtactttctctgatcagatggtttgagctcagctggttgtaatgtcatttctgtcatttcctcctttaaacttgcgaactcatcttcaagactctgcaaaaccgaggggatctggtggtgcatgtagaggacgaagccgacgagctccttgacaacgtggatgatgaagaaattttaagatatatccaaattcatttgataattacacagcacagtacacaaccatcctacccttgtttctaaaaaaacactactatgttcttcaattgttatgcatggatatattaaggaacactcaacaacgttctatcatgagacctcctgcacctatgcaaaacaaggtttcctttgtgatcaacatggtagccccagacaaatagtgctttggagtacaaaatctgaataatgagttcaattgcttgtcaaattgttgggacagtgctcccatcaaacaagaactcctaatggatgggcgtacagatgtagggaacatgtgtcatgtgtttggatagtacaaacgcaaagacaaatccgatcgccgcagcgccgccgccgccgcttgcacctccacgagccctgcgcgccgctgctcggtgccggcggcggcaccgccgcctccggacgaggaggaggttttggtctccatctcgccgcgaccgccccgcccgca

SEQ ID NO: 20184 - DNA, 653 bp, Setaria italica
  Peptide Sequence Number=SeqID_86158
ggagcaacctcacttcatcattaacaaacagcataccactataatataggaggcaagtacaataatgtcagcaaggtatattaaccagtgaatcgcccagaagaacagacttagcaacttcaacaaccaaactatgacaataataacaggaagagcactctatacatctcgaaatagatgtttggacgctggaacaatacattaatccatcgaagttacagcctaaaaatacctggcccaatggttctcttgcaagttccaatacataatggtatcttagcataagcaaccaaagtacaaaacaatgcagtacgtttcctccaaaaagcctggcataaagaagtataagtttccccttggcaagataaccaataacttcaggtattgaagaagaggcccacaaacatgcctaaagagatcaagaagccccaatccgcaccgagatcagtggtggtgatggctgtggtcgtgggaggaggacgagcatctgccgctaccgctggtgccctcgccagcatctccctgcgggcagcggtgcccgccgccgccgccggggaactcgtcgtcgctgcagtcctcgtcgaaggggacctccttgtggaagatgcagcacttcttggagctcttgcggccgaggccctcgttgtccaccg

SEQ ID NO: 20185 - DNA, 556 bp, Setaria italica
  Peptide Sequence Number=SeqID_86159
tttcccttagctacttgcctcaatgacaaacctatgtaatgatgtacttcactctgaagagcttatcaacacttgtattcatgtttcagggtggtggagagagcctgaatcagttaactgagcgctgcgtctcctacttgaataagattgctcaggaacacataggagagcgggttgtggtggtctcccacggtgcagccatactggagatgtcctggcacactgatcctcccaacagcccgatccgcaggaacattcccaatacttcactgaatgttttccgtgtgtcaagcgtcactggacattggatccttgagaggtgtggagacgttagccatctcaacggaaatggcttcctggagaactcatttggcggaaacggggcctctgcgtaactctcgtgcatgcagtgagggtacatggcgatggagtcaacacaatcttcgtcagagatttaggcacgtgctagctgaagatttccgtgcttttcatattttctctgcatgcactctagtagtataacttgtgtgtgtgtatgtgtgatatcatgaacaag

SEQ ID NO: 20186 - DNA, 1174 bp, Setaria italica
  Peptide Sequence Number=SeqID_86160
taacggaacagcagcagcagcagccagcaagcacgatgagaagagagcggagatatgctagtggtagttaatccatctgttcccccgcagcatcccacaaggccgccggcatcaggtagaagaagcggccagcgccagcggggtcgtgccggcttcctggaagctgccgttgaccccggaggaatatcaggtaggtatcctccttatccgctgcggctgcggctagcaggagcaggggccgccacgacctacggagccatgtcgcccaccccggcgcccggcggcggcgaggagttcacggaggtggtggtggtccggcacggggagacctcctggaacgcatctcgcatcgtccagggacaaatggacccagagctgaatgagatcggtagacagcaagccgttgtggtggctcgtcggctgtcaaaagaagccaaaccagctgccatatattcctctgatttgaagcgtgcttctgagactgcagaaattatagcaaaagtttgtgatgtatcaaatttggtgctgaatgaggcactgagagaaaggcacatgggatatctccaaggcttgaagtgggacgatgctgtaaataagaatccagatgttttcagaggcttcgatatttttaaaattactgagggctctgatcctgatagtagaaaccaagaaatacctggtggtggagagagcctgaatcagttaaccgagcgctgtgtctcctacttgaataaggttgcccaggaacacaaaggggagcgggttgtggtggtctcgcacggtgcagccatactggagctgtgccggcacaccgatccacccaacagctccattcgcaggaacattcccaacacttcattgaacgtcttccgtgtatccggcgtcactgggcggtggatccttgagaggtgtggagacgttagccatctcaacggaaatggcttcctggagaactcatttggcggcgatggggcctccgcgtaacgcgtgcagtgatgagttcattcatggagatggagtcaacacaatcgtcgccggcaggctcgcgctagatgaagggatctccgtgtttttacattgccattttcttgggcgtgtgctgctttgcagctgcctgctgctgctcggcagagagcggcgcagctgcagcggcagcagcagccgttcgaacaag

SEQ ID NO: 20187 - DNA, 477 bp, Setaria italica
  Peptide Sequence Number=SeqID_86161
tgttggagccctcccccagcttctggtagaaggccatgtcgcagaaggccccgccaaagttcacaccaccatcatggccacccacggcgccaatgaagccagggaaattggcgccttgcgccatcactcgacaacaagaatcctagtttccacaatcactccactcctctccctgctccccaacacagcaccctggaagcctggtgattggttacctttggctctcccaggacacgccctccgctccgccgccgccaatcgatcgaggccgggacgggagccgcggggttccggcgatccggaggtggcccgatcgggggagaaggacgcgcagggggagcaggtgccgacgcggcgccgggacgacggggaggcccccctcgccgctggaccgagcaggcaggccggggccggggccggggcgcggcgaccggtgggtggtgggggtctggctggcgctggctctgggagagggag

SEQ ID NO: 20188 - DNA, 288 bp, Setaria italica
  Peptide Sequence Number=SeqID_86162
tgaacggaggcgacatgccggccttcgaggtagtcgtacacgtgcagccctggagcggaggcggacccgaggacgacaaggccggggggcagttgctggagtgaggtgatccggtggaggtgggtccggaaggtggagaggtgatccagcgccggggagtaataggtgacctgcccggcgccgtgggcaaggcagagggacccgtcgtggtgcggcgcgaaggcggtggggaacggctcggaggcgggggagagggtggaggcgagggagacggagaagccgcggagg

SEQ ID NO: 20189 - DNA, 416 bp, Setaria italica
  misc_feature (353)..(353): n is a, c, g, or t
  Peptide Sequence Number=SeqID_86163
aataggaacaggagccgcaccaccagcatcactgccactggcaacaccttcttcctgctgctgctgctgctcttgctgtgcgatcttgtcagagaacttgcccaccagtggaggcaaggtgctggactcctgcgtgctcacctgagcacagtccacttcgcccaaatccttcggcacggactgagactgttcctggacgggcgacggcactgaggtgaagccgtcactctccgcttttccggggccagcagccagcgccgtcgctgcgctggtgaacagagcagtgcagcacgagccatccgcgccggaggtccaggatgcctgagccggcttgcggacaatgtcgggggtcnccggcgacctccccaactgaggcccaagatctgcctctgcctctgccactgccgccatggcaa

SEQ ID NO: 20190 - DNA, 521 bp, Setaria italica
  Peptide Sequence Number=SeqID_86164
tgggctacatcatctggagacattggttatacagggccgttgtcccaacttcctcatgatattgtccatttgcctgctttgtcatatttgaaggttgttatgtccatagcttatcctgatgggattagcaagatgaaatctcttcgtactctgaagcaattcgatgcaagcaagcagtcggtcgataatttaagggctctcggagaattgctgaatctaagggagctgcacatgtgtatcactgatcctcagatggaaacacaaaatgatgctctgtttattccatccagaagttaatcaatggcaatttgaggcatttcactgttaacgcacatcacgaagcagatggccactatgatgagttccatgatgggtggaactcattgtgctggtcagactgtcgtctcgagcaactccacctgaaattccagtttccaaggttacctatgtgggttggtcagcttagcacggtcagcaacctggatatccgtgttgacaagctgtccaaggatgatatttct

SEQ ID NO: 20191 - DNA, 412 bp, Setaria italica
  Peptide Sequence Number=SeqID_86165
ttgttggtattgatggcccgaaggaagaggttatcaatttgttggaaaagcaggtggataatgcgtcagtgcaagagctaagagtcgtgtctattgttgggtttggaggtctaggaaagaccacacttgcaaatgaagtatacaacaagcttgggaaaagttttgcttgcaaggcttttgtatcagtgtctcaaagacctgacatggtggtgcttctcaagagtttggtcacacagattttggggccagggactgatatttgcgaggttaatgggctcatagataaccttagaaagtatctacaggacaaaaggtatttggttgtagttgatgatttatgggatgcatcagcgtgggaaattataaaatgtgctttccccgagggccactatggtagcaaagtgttgacaac

SEQ ID NO: 20192 - DNA, 2692 bp, Setaria italica
  Peptide Sequence Number=SeqID_86166
cagtcagaatggcagagaagatactggtgagtgcctcagtgggagtgatgaactcgctcctaggaaagctagccacacttatgggggaaaagtatgccaagctcaaggatgtgcggaaacaggtggcgttcctccatgaggagctcagcagcatggccgctctcctggaagatctcgctgacatggaggacctggataaccaaaccatgcagtggaggaacaaagtgagggaaatgtcgtacgacatcgaggactgcatcgatgagttcatgcaccgtgttggaggttcctgcgacggtaaaggattgttgcgccgtcttaagacgctaagggcgcggcatcagctcgccaaccaaattcaagagctcaagatccgtgtgcaagaggctagtgcgcggcgcatgaggtacaagctagatgactgcaagactagatccggtggtgttgctgtcgaccctcggatatctgctctttatgtggaatcgtcaagacttgttggtattgatggcccgaaggaagaggttatcaatttgttggaaaagcaggtggatgatgcgtcagtgcaagagctaagagtcgtgtctattgttgggtttggaggtctaggaaagaccacacttgcaaatgaagtatacaacaagcttgggaaaagttttgcttgcaaggcttttgtatcagtgtctcaaagacctgacatggtggtgcttctcaagagtttggtctcacagattttggggcgagggactgatatttgcgaggttaatgggctcatagatagccttagaaagtatctacaggacaaaagacatgcagttgtagttgaagttggttgtagttgatgatttatgggatgcatcagcatgggaaattataaaatgtgctttccccgagggccactatggtagcaaagtgttgacaactacacgaatcaaaagggtggcagtgacatgttgcaattttcagtgggaatttgtttacaggatgaaacatcttgatgatcatagttccaggcagttgttttatggtagagtttttgggttggaaaacacatgtcctcatccatttgaagaaccatctgaaaaaattctacaaaaatgtggtggactgccactagcaatcatcagtgtagctagccttttagctagtcaatcgaacaggtcagtgagccaatggaactgtgtccttaattctttacgttccgatctgaggtcaaatccaactttacaagggatgagacagatactaaaccttagttacactcatcttcctcatcatctcaggacatgcttattatatattggtatgtatccggaggatcatgatattgaaaaggatcacttagttatgcaatgggtagctgaaggatttgtctgtggaatagatgggagagatgcattggaaattgcagggagctatttcaatgaattggtgaataggagtatgatcatccaggttgtggaatatcgtgctttgaacacggagcgtatctatcataaagttcatgatatggttctggatctaattgtgtccaagtctgcagaagagaattttctgtgcgtggtagaaaacatagagacaatcaccagtagacagcattgcaagactcgccggctctctctgcagcttggtgaggcagaacttgataaaatcgcacctcgcatgagtctgacacatgttcgatcactgtgtatttttgggtcgcgtcatcgtagcattgaactgttggagctgaagtttatccgagttctgtttgtttgtaaggttgatggtttggacctcactccaattgggaaactgtttcaactgaggtacttaaatgttcaaagctactgccttatatcgagcatggaagcaactgcctaaacaaatttgtgggctacatcatctggagacactggttataaatgggtggttgtcccaacttcctcatgatattgtccatttgcctgctttgtcatatttgaaggtttctgcccgcaaggcttatcctgatgggattagcaagatgaaatctcttcatactctggacggcttcgatgtaagcatgcagtcggtcaataatttaagggctctcggggaattgctgaatctgaggaagctgtacatgcgtctcattagtggcaacttgcttactatggaaacacaaatggatgctctgttttattccatccagaagttactcaatggcaatctgaggcatttcactgtttctacatgtttaacaacgtcccccggaagcttctatgattggtggaactcattgtgctggtcagactgtcgtctcgagcaactccacctgcaataccagtttccaaggttacctatgtgggttggtcagcttagcacggtcagcaacctggaaatcgacgttgcggagctgtgcaaggatgatatttctgtgcttgcagggttacctgcccttgcccgtcttgtgctatgggcaggttatgtccctgatgaagggattgtcttcagcagcagtgcggcgttcagatctctttattacttcgaatctcgtcgaccaggccactccttccacttccaagctggagcagtgcccagggttgagaccctcaggtttggattgcgtgtgcttgaagtgaagactagtggcatcaggcttgctggcgtcgagcatctaacgaatctgaaaagagtagccatctgtttgtggtgcaatagaagtgaagag

SEQ ID NO: 20193 - DNA, 353 bp, Setaria italica
  Peptide Sequence Number=SeqID_86167
gcgtgtatatatgctgctcacgtccaccatttcctcaagccgtggcacaatcataagcttccatcgctccctcagcccagctagcttagcgagctaactgcctcttcttccttcctctaggcctctactactactactactaccaccattcttaaatcttcttgatccgccggtctgcgcatcccagcatgacggcgaaggtgcacccgaacgtggccgtgccgaccctcggccagcagccggcggcggcgccggccgacgaggagcctgtgaccctgacggtgtggcgcaagtcgctgctgttcaactgccgggggttcacggtgttcgacgccagcggcaacctggtgtac

SEQ ID NO: 20194 - DNA, 398 bp, Setaria italica
  Peptide Sequence Number=SeqID_86168
actgacccggctccccgcaaccgcatctcccccgtcttctcgcctcttcctcctagttcctaaccaccaccggcaccgccgtccccaatcgccaaaccctagccccgccctcgccgccggcggccatggccgagaccgtcgacgacaaggtcagctacttccaggccgtcaccggcatctccgacccggacctctgcacggagatcctcgcggcccacaactgggacctgcaggtcgcggtgtcctccatcaccgccaacccctcctccccctccgcctccgcctccacgtcctcgcgggagccggccccgtccgccccgctggcagatgcggagttcgtcgcgcccccgccgccgatgccgccgccgccccagcagcagcagcagcaacagcagcac

SEQ ID NO: 20195 - DNA, 572 bp, Setaria italica
  misc_feature (491)..(572): n is a, c, g, or t
  Peptide Sequence Number=SeqID_86169
ttgtcgtcgtccggtcgtattctattcggtggcgatcatcggtccctacggtcgtacggcgccgtgctgcgccagcctgcgctcccaggagccgtgcttctgccagtacgcgcacaacccggcgtacagccgatacatcaacagccccgctgcccgctccgcgctcaccagctgcggcattaccatcccgagctgctaggcgccgcgcgccggcgctgtgtgcgtgcgtgctctttgcctggcttgtactcctacatgcgtgtctggatttccttgtgtgttgtgtggcttgaataaactgtgtgaacctgttgatcgtcgtggagtgcgttgcttagccgattgatgcatgtcgatcggtcttactgtatttgtgccttatttggagagtaagtactacagagtgatgaactactgctactttgtattgagtgattcttattttctcagtgtcactgtaccattcatttaaccaaaaaaaaaaaaaaaannnnnnnnnnnnnnnnnnnnnnnnnnnnnnnnnnnnnnnnnnnnnnnnnnnnnnnnnnnnnnnnnnnnnnnnnnnnnnnnnn

SEQ ID NO: 20196 - DNA, 528 bp, Setaria italica
  Peptide Sequence Number=SeqID_86170
gctgtcgccaccgccgccacgaagcctctggagctggatccggcacccgcggatgaggcaccgactgcgccgtcctgcgcgtcggagccggccgcggcgccgtcgcccaaggagcggtacacggcgtactaccgcgacccgtgccgcgtcgggtgctgcgacgacgcgggcgacgaatacgcccgcggtgacgacgaccgggaggatgaagcggaggagcacgacgacgacgacgacgcaggcgcgtatcggactcgatcgaagacgacgacgggccctttcggatgggacgaggtggttcggtcgctgcctctcagtctcagcccgtcggcggcgaaggtggagatggggctggggccgtaccgtagcccgacggcgctcggcggcagcgtggtgcagctgtgggaccaggtcgcggggggcgggttgacgccgacgtcgagcccgcggtggaggaaccgagtggccgccgccgccccgggcttctgaagccatcaaaagtagcaataaatttggcatttttggtcg

SEQ ID NO: 20197 - DNA, 356 bp, Setaria italica
  Peptide Sequence Number=SeqID_86171
gggacacagaaactaatgactatgttgctgtgaaggtgataaaaaaccagcctgcattttaccatcaagctatcatggaggtttcactgttaagaacgttaaaccagaaatttgatcctgatgataagcataacattgtccgtatgctcgattatctctcatttcaaaatcacctgtgcatagccttcgaaatgcttgggcaaaacctgtaagctgatcttgtaaaagctttttacccaatagctttgtccattgattagttttttgttcgaactgcactttaaactctcatttcaggtatgaactactgaaaaggaaccacttaagaggtctgaaagtgaaatatgtgcgggccc

SEQ ID NO: 20198 - DNA, 620 bp, Setaria italica
  Peptide Sequence Number=SeqID_86172
tacttcccacggctaaagcttgacagactcatttatacctatccttggaacaattcagaactgacaggtttgtttatttattttcagtctctaggttacattttggccccttgctgtcttggcatagcatatttactctttgttagtttcagccaagtcactgtaattttagtgctttgctgtattcatgtttcttctattatttagtgaacaatgatgttggtgtcttcttaagttgtgtacttcctccctttgctaaaagcatctttttctttcatgtcattcttttgtatgattatagaagataattaaagttagaaatgcatgcttgaattcatgtttgacatttttgagctggtctcctcaatatgcaaatgagagttcttacaataaagcttgcaagtttgatattatgttctcaggtcttgcattttgattcagagacagaaaaaacagatcgtttggcattagttgatttcttgaaggggcttcttgaatttgatccaaataagcgatggtcaccggtgcaggctctatttcatcctttcataaccggcgaaccgttcaccggtccatatgagcctgtacctgagactgcaagaattcctgttgctcgtgct

SEQ ID NO: 20199 - DNA, 431 bp, Setaria italica
  Peptide Sequence Number=SeqID_86173
ttcttggtgacttttgttaattctaatatactttttcaatgaaatgcttcctttaaggcatgttccttggttcattttcaagtagcttgcctgaaccttaacacttaccagatatacaactgcgattgacatgtggtctttcggttgcatagttgctgaactatttattggtttgccactatttcctggagcgtcagaatatgacgtgcttcagcgaatgactacgattcttgggcaagtttctttatctatagttttctcacccaactctgcattttgcacgcaacatggctgcatgttaaagttttattgagtcccatgtagtcaaatgtcattatttaggtccgatgttcagctacgaatttaaatcacctggtggcatatttttagggggcaaccaccagatgacctgctaagagaagctaaaaaca

SEQ ID NO: 20200 - DNA, 3167 bp, Setaria italica
  Peptide Sequence Number=SeqID_86174
ctgctccagcggacgctgtgatcgtcgcgattggaggtggtggtgggcggggtgctgcgcggcgggcaggagatctccccgagcgccagtgagagctgaggaggagctggttggttatggaggagagtggcggcaggcaggaggacgcggctccgccgtgggcgcccagcgaggccacggcgttccgccgttttgcggcggccaccgcgtctgggcggtcgcaggaggcgaccccgtcggcctcgggcaatggggctgcttcccgcgtcagcagccttcatggcgtcaggcggaaaccgtttgttgcaagattaacagcaggcatcattcagacatatcaacagtgtgatcctacatttaagtactcagatgagaacatcccaaaacgctttctcaccagtccttctatccctgcccacaacgatggacttgacaatgcaaattgggacctcatattgtatgtcaacctagaattggttaataagatgtcaaaccgaaggtttatcgtcaaggaaatgcttggccagggaacgtttggtcaagttgtcaaatgctgggacacagaaactaatgactatgttgctgtgaaggtgataaaaaaccagcctgcattttaccatcaagctatcatggaggtttcactgttaagaacgttaaaccagaaatttgatcctgatgataagcataacattgtccgtatgctcgattatctctcatttcaaaatcacctgtgcatagccttcgaaatgcttgggcaaaacctgtatgaactactgaaaaggaaccacttaagaggtctgaaagtgaaatatgtgcgggccttctcaaaacagatattggatgccatggttgtgatgcgagatgctggcataattcattgtgatctaaaaccagaaaatattctcttggcccccagtgtcgcaaccgctgcagcagtgaaagttattgattttggatcagcatgcctggagggtaaaacggtttactcatatatccagagccgctattacaggtctccggaggttctccttggctatccatatacaactgcgattgacatgtggtctttcggttgcatagttgctgaactatttattggtttgccactatttcctggagcgtcagaatatgacgtgcttcagcgaatgactacgattcttggggggcaaccaccagatgacctgctaagagaagctaaaaacactggaagattttttaagcatgtcggtagtatttttcctggcagtgaggcacatgatggtatttctagtgcatacagatttttaagtgaagaagaggttgaagctagagaatccaagaggccaaaggtaggaaagtggtacttcccacggctaaagcttgacagactcatttatacctatccttggaacaattcagaactgacagagacagaaaaaacagatcgtttggcattagttgatttcttgaaggggcttcttgaatttgatccaaataagcgatggtcaccggtgcaggctctatttcatcctttcataaccggcgaaccgttcaccggtccatatgagcctgtacctgagactgcaagaattcctgttgctcgtgctgcagcaattgatcacaatcccggaggtggccactggctacattcaggtctttccccgcaggttggaagtgtgaacagatgcctacctctgaataatgcctatcctccaaagatgcccttttcttatgggagtagttatggaagcttcggtagccatggtagctatactggtaatgctggttttgctaacagctatggaagcattggtgatgttaatactagcaatatgtattactcacccttaggttcttctggatttacacaaattggctctagtccagatattagactaagaccccgtctcccacatgatagaggtattagattaagccctggtagtctaggacctatgtctctgggagccagtccatcgcagtttaccccaccaaactaccagatgcaaatcccagctaattctactgggaagcatggttctggttctcctgcaagtggaagcattcatggttctccattgggaaaagctgctacggcaggcccgtataacatgaggaggaacgtgccaatgccgccacatgattatgtatctcagcatggacaagtgcgatacggagatggtgtcagttttagtcatcctgatggttatgttcgaggacatacaggccactctcagaatgcaggacccagttctggtcattctagttggagaccacaaataagttcaagaagtggtttttccttggatgcctcgtctagtcacgggccttcgcaggccctccattcgcaggctccttccaactcatttgacttctcaccaaatacatcagcttcatcagcacttgatcctgctgattgggaccctaattatagtgacgagtcattattgcaagaagatagttcattgtcagctgatctaagtagcagtctccaccttgaagatgcaactcgtcaagcgagtggatctattagatcagccaatttccaaggccatgtctttgcaacatctaaccctgtaccaacaaaccaaagaggagatcaattatttcgtgcctcctatcaaggagggagttctcattccagtgttcccgtcaactatggcggttacaaccctccaagttatcctcagcaaagtctccgtcctcgtcctggacagccaattcttcagcagcgatacaatcagccaacttctggtccaatgcggctgatggggagccatcacagtgggcagcctgtgtggcccagtacttacggcatgggcgaaggagtgccctggggtggaacaggagggcactcgtttacatcgagcgggctgccgccatctcttgcaagaaaagattatgggagcatcttttagcgtggatcggaggaatggcattgattcattgcaggcataaattatttgtacttgcgagattggagtttcgatgtttctagctgttggttgttttcccgatgttgttggattccattcctccatctgatcctttgctaagacaagactccgtatatacaatatatgatcgatgattatagcattctttgcgtgttctgattattgtatttattgttatcgtattgatggtatgtagaagttccgcattgaaatacaaaaaaaaaaaaaaaa

SEQ ID NO: 20201 - DNA, 1356 bp, Setaria italica
  Peptide Sequence Number=SeqID_86175
aagttgcctaagagtgagtaattttcttattgtaacaatttacctagtcaatgatattcatggattctgcactaaagaggcttccgatttccttgcttttgtactgagatagttcctcttttatatgcactactttttctttgtccctctccagcaacgaagttttgctaggaatgtctttaaggtgactagaactggtagaaggttgattgttgtactcttcagaatcataactgattttacatgaaaatccatgatcaagtgaaggttttttcttactgtctttgttcttgtcactaatgtgtccttttaatggacccttttttaatccctgcatttgatctgatgaaatctcacccgtaaaattttcagactcctcgactgaatgttgtgtctttatgattgtaggtaagaagtttgaagcagtatcatgtgaaacatactgtaactgaggcttagttcccttattcacagcagatggtttgttaactctgcattttgaactcttgaaattgggaaccctgtctttcttttcatcagacttgatttccttgccactcttatcattgatatccggcgtagcagaggttgtatggccccgatctctatgcaattctgctttatcatcatgaaattctggtgcttcgtgttttaccatagcttttggcttttgtctcagttctagaacatttcctgtgaggggtgagagcaagtgtcctccaggaataaaatggcaggtcattatctcaaaaatggtatgcggagattcatcaggcaaaacttcaggcaccggagccccatcagtcccatctaggttgtcttccgtggatgatgacggggaaatgtcaaggcccaagccactgtatatagcagcagtatttcttgccaaacttccattgttattcaccttgatacgtattttcagtgctttctgctcagaaccactgactgctccatttaacatctgctgtgagagactaccattgcattcatcggatatttgatagtagtcatttttcctgctgctgtctaattcggtcttaataaaatggttcttttgcgcagtctctgttggcaaatatggtgatctagaggcactgctatggtttggtggatctgcaggaatcctacattgaggaaaggccaaaggggaatgtgggtgtgctggcaagaatgaaccatggcccccatatagcgaacccaaattctccggagttattgcgccttcaaatttcttacagaaatggcccaacaaattttgaatctttttatcgatgtaggtgagcgcgtcgggatcaacgagctcgccgttgccgtacccgtccgcgccgccgagggccgcctcgccctcctcca

SEQ ID NO: 20202 - DNA, 338 bp, Setaria italica
  Peptide Sequence Number=SeqID_86176
gtcgcaaggccgccggtcccttctcctctctctcccccccccacgttcccactgctcgccgctggatcctccgcccgccgcgcctcctctcctggaccccgccgcggcgcctggccggagatccgcccgccgggaggggggagacgggtggggtcgctcctctcctgctcccgccggtggttgctcttcggccgctggagatcggcgggcggcagcggttgacgccacagggcttcgtggtgccgaattccccggaaattttgggggttcaacggaacccccatgccagacgccgcggggcttgaaatgggccataacggctctaagggaactccaat

SEQ ID NO: 20203 - DNA, 465 bp, Setaria italica
  Peptide Sequence Number=SeqID_86177
gacatgagcaaaggcgtaggtaaggagaccttggaaaagtacgagcagaagattccgttacggcggagggggcagccagcggaggtggcatccgtggtgtcgttcctctgcacgccggcggcctcctacgtcaccggccaagtcgtctatgtcgacggcggcggaaccataagcgcttgagagagaagctagctagctagcttcacgacactacattggggcttgggggtgtgcatgcgccactcgtacctgctgagaccactgacatgtggacccacgtaagtcggcatgggtttcggaaccatttggaatcgaagctggtcttttttttttattaaaacaggatgttttatgtatgaaaataaaaaagagtagtgaactcgtgtagttcatccaaaagaatgttgtacgtgtagctcaacaaattaaaattgtgttgtcccaaaaaaaaaaaaaaaaaaaaaa

SEQ ID NO: 20204 - DNA, 242 bp, Setaria italica
  Peptide Sequence Number=SeqID_86178
tgctgtcttgaagaattcgatgcaatctgtggcttcctggaatgcaatgcttgccggtcttgctagaactggacagagtggaagtgcaatccaccatttctctgtcatgctgcacgagcataaggtaattccagattctgtaacctatgcaaatgtaatttctgcttgtgctgagctacgcaattctggctgtgctgctagtgttcatgcctacctaattagaagatctatctcttctagat

SEQ ID NO: 20205 - DNA, 324 bp, Setaria italica
  Peptide Sequence Number=SeqID_86179
gacgggcgcggggcagatggtgaacgtgccgacgccgacgggcagcggcagcgcgtgctgcttggcggccaccggctggtggtggtgcctgctgtccgcgccggaggcgggcagcgtcggcgatggctccggcggcggcgcttccggcttctccaacggctgcagaaagtcgtgcgtcttcaagaagaaattaccttgagagggaggaggtgacttggagtcgtggagctggagaggagagtccttagcggcggcggctgtgtacagcgagaggaagtcgtgctcgtgcgtcgccgccttgttcccttggatgcccataatcgc

SEQ ID NO: 20206 - DNA, 507 bp, Setaria italica
  Peptide Sequence Number=SeqID_86180
catctcctcgcgccgcttacggtacctaaccacctcccaagccccaaacccctgcagccctgctcgctcgccacctcccgccctttttaaaccaccaccgctgccaaatttcctttgcctccccaccaccgccgctttgctgctgcggtctagctaataagctagcaatactagttaggccacgcttagtgtagagatagccagctgccgcggcacgacgcgacgcggagggaagcgacacgaggcctgcggctctcgggaattcaaggcgggtgttgtcgtgctggtctggtttctttgaccgatcgatggggtcgtccacggatcacggcggcgccggcgggaggggcaagaagcaggggtcgcagttgtggaagaaggcgctgctgcattcttgcctctgcttcgtcatgggcttcttcaccggcttcgcgccgtcgtcggtgtccgactggacgtccgcggcggtctcggcgggcgggatgggcagcagccacgtggtccggg

SEQ ID NO: 20207 - DNA, 284 bp, Setaria italica
  Peptide Sequence Number=SeqID_86181
ctaatgagatatgattgcctgaggcagcaggcagctctttatccccataaaaatgaaagcaccctcgccacacatactgtatcctgtactttggaactattgttttcgggtgggtgcgccctgatggtttatatctggttgtgttaatcattttttggctgtcatgcgacaggagttttcgctgatcgcttttcgctgactgacgatccattgatgctatgacgttggaatctgggaatgaatgaataccgagtacggtttataaattaaaaaaaaaaaaaaaa

SEQ ID NO: 20208 - DNA, 568 bp, Setaria italica
  Peptide Sequence Number=SeqID_86182
accctcccgacggcgtcgcgcacggcgcggtcggtgatctccgggtcgagcgcgcccgtgcggatgtcgcggcacaggcgcggccagtgcttctcgaggaagcggatggcgcggaggaagcccgaggcgaagacggcgcccacgcgcaggacgtcggcgcggtggacgaggccgcagagcagctgcgcgtacatgctctggtacgagtccacgcacaggatcgcctcgttggggctcgtgtagtcggtgtaggggtcgtgcggccgctccaggaactgccggctccggtagtagctcgtcagcaccggccgcgccacgagcccgcccggcgtgcgcgactccgccttaacgaacagcaggtacatggccttgcccttgtcgagcccgggcaccgactggctcatcaccggcatctgcaggctgtacagcagcgacctcctgtccagctcgtcggcgatggtcggcatcagcttcctctcccctccggacgtgccagagcttgtgaggaactcggagatgggtttgctggagaggatcggcgacgtatcgccgttgcaatgcggagtat

SEQ ID NO: 20209 - DNA, 1474 bp, Setaria italica
  Peptide Sequence Number=SeqID_86183
gcagttggtatggggctgaaccttaacattaggagggttgtattttataacttggccaaatacaatggggaaaggatggtaccagttcctgcctcgcaggtaaagcagattgctggccgtgctggtcggaggggcagtgtttaccctgatggactcacaacaactttcttgaaggacgatttggattatttgattcagtgcctgcagcagccgtttgaggaggcacagaaagttggtctttttccttgctttgagcaagtggaaatgtttgccagccaattcccagacctttctttcaatgacctgttggataaatttcgtgataactgtcgcattgataagacatactttatgtgccagcaggacagtatcaagaaggttgctaatatgctcgagagggtccaggggctatccctcaaggatcgctacaatttcatttttgctccagttaatataagggatccaaaagccatgtaccatcttctaagatttgccactcactatagccaaagccgtcgtgttagcatcgcaatgggagtgccaagggcttctgcaaaaaatgacactgagcttctggaccttgagacaaagcaccaggtcctatcaatgtatttgtggctgtcacatcattttgaggaagacaactttcctcaggtgcagcaagctgaggaaatggcaataagtattgctgatttacttggcaagtcacttgcaaaagcatgctggaagcctgaatcaagaaaacaacctaggcagcaacgagaagacaacaatgagtgcaatgaggaacaggcatcaaatgacagtgcaaaagatgtttctaaagatggttatgaacggccaagggcacttgccgaaaacaattgtgaggaaatggcaagataaggtcaaccagaactctcctcctcccttgaacttcgcggcttgaaattcccatgggttgatcaacagatcaagcccaattggatgctatgaaaagaccctgttgagccaagttgggacagctcgttcaattccagttgacttgggctagttttgtctgttggagctcagatttgttatcctggaacgacactgaagcctcaccagatggtgtgctgaatagctgtctatttcaatggcaccacgggagatctaccctgactagctgaatagcttttttttttagggtcaaactagctgaatagctgttgtgcaatagttgattgcacggcaagcaacaactacgagggtcaagatgttaaccgcagttaaattatttatttcgtgttatgctacattagaatagtggtaatagcctaataggtaggaactgccatatgacagttttcatcaattatgtattcaggatgtttgtggttgtttagttacctcgacgctctttatattgtaatttttggagagcacattaaatacaacaaacaaattttaaggaacttaaaggaaacgtaaagtaaaagttttaaaacgaaaa

SEQ ID NO: 20210 - DNA, 283 bp, Setaria italica
  Peptide Sequence Number=SeqID_86184
ggtcgcgtccgggcgcggcggaggcggaggcggcggctcggcggcgaaggccgcggccgcggctggtcgggtacgaggagctgcccgattacctccaggacaacgagttcatccgcggccactaccgcgccgagtggcccatccgcgacgcgctcctcagcgccttcgcctggcacaacgagaccctcaacgtctggacgcatctgggagggttcctgctgttcctggcgctcgccgtcgccggaggggcgagggaggccgccgacgaggccgcgccggggat

SEQ ID NO: 20211 - DNA, 793 bp, Setaria italica
  misc_feature (767)..(793): n is a, c, g, or t
  Peptide Sequence Number=SeqID_86185
gaggataacctcaaagagggcttctgaaaagcttcaggttggggagccattgaagggataaagaagatttcaggccacacaacctgagcgaaggaagaatggaaacggcggcggcgaccgtagcccggccaccggagtgcggctccaccggcggactgctcagtggcaggaggaggtcgctgctgccccaccggcgatctggtgccgtgagcttttccacagcctcgctgaagcgacctccgagaattcaacaccacggatcccaggtttgcgtggcgcggaggcggcgagcggacatccagtcggacacgtacgtgctgatcgagcccggcatggaggaggagttcgtgtcccgggaggagctggaggcgaggctcaagggctggctggagaagtggcccagggacgcgctgccacccgacctcgccaagttcaacacggtcgacgacgccgtctcctacctcgtcagggccgtgtgcgtgctcgagatcgacggagaggtcgggtccgtgcagtggtaccaggtcgagctagaatagtcgggggtgtcatggctgtgcagctccttcttaacgtcctcctaagagtgtaacattcccggggaaaattcccaaacctggattggaagacacaactactctcaacttgtaccgtgcaaattgcaaagggtcaattgatgatgcaggcctttcccactcgagcaaactgagcgagtaaagttgtttcggattattattcatgtcagattgggagtatttacgatagtnnnnnnnnnnnnnnnnnnnnnnnnnnn

SEQ ID NO: 20212 - DNA, 443 bp, Setaria italica
  misc_feature (50)..(50): n is a, c, g, or t
  Peptide Sequence Number=SeqID_86186
atcttcttctgacgcttccaacaacggttcaatccaatgcaagttggagngttttatgcaccgcggtgatgttcagatagatgccgttaggatcatagcagggagatttctgatgcattattggtgtggtcatacgaccgttgcagttctatcgtagtgttcctagcagtactaatatttaaaaagttgccttgagccattgtggctgggtcctatctggtcagctacattctgaactaggattgagtacatgggcagcagcagcactaaaaacattgatactgctaagtcaactactaatgatatatgattaaacatctcgattgcttagtactcctagtagttgtctagtcgagcttgagtggctgcagtcccattctgacggtgcatggtcatgtagcaccagctggcgagatcgcccactacgtacgacaaggacaaga

SEQ ID NO: 20213 - DNA, 255 bp, Setaria italica
  Peptide Sequence Number=SeqID_86187
gaaggccacatagtgcggtattcccttccaatgattgtagtgtcatgtttgagaagacaccgctctctgggatttgtccatagagtctattgaaagagagatttaggcttgtgagatagctgagattggcgaaggacttggggatggtaccagacagggcattgtatgaaaggtccaacgttttaatgcttcttagcttgccaattgcattgggtacctgatcttggaggctgttctttgataaatttaggtagg

SEQ ID NO: 20214 - DNA, 431 bp, Setaria italica
  Peptide Sequence Number=SeqID_86188
caattcatcaattagtcgagaacctggacggagttcaagatggtaggtgtttccaagtataatctggcaacctatatcctctagttggtcagtagtcaagccctttattgtaccttgagttccaacaggcataaaaagtggtgtttggcaagtaaagtgaggaagagttaaacgagcggcccgggcacgattgaatcttcctagtatctggaaccgaagcgccatgggggaaagaaagcttcaaccacaaaatcggaacccggattgatgcgccgccaccaaaagagcacaagtccgcgacaaacaacaagaagaaatcaaacacgaagtacggacgagtagatctccgctccgtgccggtccagatgggtggcggcggggccaacgacggaggcgaggacgcccgacgccggagaggagggagctaggtg

SEQ ID NO: 20215 - DNA, 581 bp, Setaria italica
  Peptide Sequence Number=SeqID_86189
agacctatcacccatacaaactcatacacagagtttgcggagctccacaagactgcgcccagggttcttcctcactccatctttgaccattgttttcctaagcacatgaacatctgcccatctcccaacagcagcataaaggttcgagaggagaacgtagtctccactatgccctggatcaagctcaatcagccttgcccaagcagcctccccaagttccaacttcttgtgcatcgcacaagcacccaacaaggtcctccacacgacagcattgggctccaatggcatggtgactatataatcataagcttcctcgatcttaccagctcttcccaacagatccaccatacatcccaaatgctcaatccttggtgtgatgccatattcctctttcatcctatcaaaatacataaatccatcatcaaccagcccacagtggctgcaagcgtacagtactccgaccatcgttatttcagtcggcacaagcttctccctctccatcacactgaacagttccagcgcttccttcccaaaaccattcactgccaagcccacaatcaatgaacgtccacgagacaaca

SEQ ID NO: 20216 - DNA, 591 bp, Setaria italica
  Peptide Sequence Number=SeqID_86190
ctcgcggctgctcgtcgccggcgacgtcggcgtgacgcccctgtagttggggttgctcccgtacaggctctgtatcccctgcacgtcgtcggcctccagctccaccttcctcgtccccgtccggatcgtcgggtacatgatggcctccggcaccgatgagtggccgaggcccaggaggtgcccgatctcgtgcaccgccacggactccaggtccaccacccccggcgaggacgcgcgcgacacgtcgccgccggccacccacgcctcggcggcgtccaggtggaacctcccgtccgtcggggagaaggcgtgcgcgagcgtgcccaggggcccgtcgaacggctcgccgtcgccgtgcgagccggtgtagaacccgatcgtgatgtcggcgtcggactccgacgccgtctccgcgaaccgcaggttcgtggccgcggcccactgggcgaaggcgcgcgcgaacacgtcgctcagcgtggaccggtcgatggacgtcgccgaggtcgcggtgatcgcgtacttgaggtcccgccggaacggcggccacctcggcccgccggggaagtaggcgtagaggtgcctgccgtgggc

SEQ ID NO: 20217 - DNA, 721 bp, Setaria italica
  Peptide Sequence Number=SeqID_86191
catactatgtcaatactaataattaaagagaaatggagcctcgtcgcagcctcgccgacggcctgactgatgaggcgatgtgcatctccggggagctgccgtttcgccgccaccatcgtctcatttgacgtcgccgtcgatatggaagcatctctgcactggatccggtccgccgtcctcctatgtacagtacagtacaaaacagtagtagatcggtaagcaggtaaacacccagtcccgccgcacgcggatccatccgatcagcacgcgggcaccagcgccggggagtcgcacgacgccgcaaccaccgtgcttatttcggtggtggccgccggcgccgcctcctcgtcgtcttcttcggcgtcccacaggaagctggcgtacgatcccagcacgtagcagtcatccggcgcggcctgcacggcgcgctcgaagtacgcctcggcgcggtccttctcctggttcgcttcccagatgacgcggccgtagaggctgagcaggtccgcgtcgccggggcacgccagcagcgcgcgcgcgtagcacccctcggcgccggcgaggtcgccctccacctcgtgcaggtacttgccgtagttgcgcaggagcagcgggttctcggggtccagcagcagcacgcggcggtagtactcgcccatgtcgcagccgctgccctgcccgccgcttcctccacggcccccgctgccgtcgccggggctgttgc

SEQ ID NO: 20218 - DNA, 251 bp, Setaria italica
  Peptide Sequence Number=SeqID_86192
ttttttcagaaaactactgaacaaatgcattaagccttcgtatcagctaaacatgcagcttatgccaaccacaatcagaatcagatccatattctaatatagcaacagatgtactcaacagatgcacagagcctaccttatcatcaaatgcaatctttatctggggcaagcccctcgccttgcgcttcatcctgtacatcctcctccccagcacgaccaggccctgagactcaaggcacacaggggatagg

SEQ ID NO: 20219 - DNA, 1514 bp, Setaria italica
  Peptide Sequence Number=SeqID_86193
tttttttttttttttaaccttttgtagcagtctagcatccaaattaacaagaaaagaacatatgtatgtaccaatgacaaatccagactccaccaccgaccgaggactaaaccgagtaagggcaaaagacggaaaccaggagtacaagaagtggttcctcaaaaaagaaagaaaaattaaggaaaaaaaaggaagagtacaagacgtggtagctattgcatcaggcactacattaccagcctcctcccagcgttgtctaaaagtaaaaggtaccatggcaaagccaattcagatgctcgcgttgatgctcatcatccagatcagttgcttaccgggcagcgggaccttcttatggagcttcgagcaggttggctcatctctcctgaaccattgaccatggaagcacggcacctgatgaagttcttagcagaggtacacgcctagctaccaagaaggcttcgttgagtcgtgcagcacggtccgcaaactgggaggtcctcttatcataaaatgcaatctttatctggggcaagcccctcgccttgcgcttcatcctgtacatcctcctccccagcacgaccaggcccagcaacgccgcggcgatggagaaggaccacaccggcttcaccttccaagcacagtagtgcagcagcctgaacggcagcttccaccagaccaccacttgtttgtcgccctcttcagcgcccggtgtgtgagccagaggcaaatcaccatccttcgcctcgccatccggctcatcggaaccggatgcggcactagcgttgcccccttgctcctgctcctcttgttcaccacgaatcccatcacttgccacagcatcctcgaggcacgagctctccacacccgcatcaatttctccaccatccaattggacaggggaactctccgtctccgatccctcgatttgtagcgaggcacctgtgggcgtggctgcatcagaatccagagtttctcccaacccatgatgcgcgggctgcagcaccgagcccaattcgccgtgatcaatcacaacattactctcctgctcaatcagaccatctaccacctcggcttgacttccatcttcgccccaggttacaccgcgcgcaacggtggcttcaagaatcgggccttctcgggcctcatcgacgccgcctgccggcacctgctgctcactccaaaccccagcggcaagatcgaagcttgctctcggattctcatcatccagtaattccaacccctgccaggggtccccggtctccgtccacgggccctcgccggggaacctggggtcggggccggcgggggcgagggcgaagtggtcgtggacgtggaggacgtcgccgcccccgccggagacgaccacgacctcgctgtcgtcgtcgtcggctgcgccgcccccgcagccggatgccgcggagagcacctcccagtcgctgatctcggaggcggcgtcgtccatggccgtggcggctcctggctctgccatctcaacctccggcaaggcaaaagga

SEQ ID NO: 20220 - DNA, 548 bp, Setaria italica
  Peptide Sequence Number=SeqID_86194
ttaacgttacgttacgttaattttagttactttttagttaatttttttccttaattttccttgtattcgttgtcctaggtcgtaggtattcgttgtattcccgttctgcgtagtagttggttcctcgagttagttctgtataagcagttgttccccgagttcgttctctgaggaagatgatgtcctcagatctgggagtttcgtggtttggatctgatccggatcacgattatgtggtgtagtaactgaataggatttgcgccccctggaattcgcatcctctgctctcgttttgggtcagagtttcagatctttctggctgatcgcggttaaatatggtcttgttgttcatatcattttcgtgagtaaattcatattggattagaggtcatggatctggttcctgtccatcattctgtttgggctctgtccctttttttcagtataaaccgtactttacataatgagaatgggatcacaattggtttggtgcctttggtggcttaataattagtgagtactccccaatttgtatggttccacaagaa

SEQ ID NO: 20221 - DNA, 238 bp, Setaria italica
  Peptide Sequence Number=SeqID_86195
tccaaggacctgcgtcggccagagcttcgcgctgctggaggccaagatggggctcgccatgatcctgcgaggcttcgcgctcgagctctcgccgtcgtactcgcacgcgccgttcccagcgccactgctgaagccggagcacggcgcgcaggtcatgctcacgaagctcccctgagctgcctctgcgtgaacatagttttgtggaagcgaggaacaaataataattgggttgtctaga

SEQ ID NO: 20222 - DNA, 1979 bp, Setaria italica
  misc_feature (30)..(30): n is a, c, g, or t
  Peptide Sequence Number=SeqID_86196
ctcgtcctcccgcctccgcctctgacgagngggccccacctgtcatcctcccctcccccgccgccgccgccgccggacggcagggcgccgagggtccccgttacctcccctctcgcaacagcatcgtttcccgcctccgcggtcgcgcgccgccgatccgggcctgccgctacccgcgctgatcgcttcgtccgcctccgcctcctagggtttcggcggtccccatcgctcctcggggctccagggaggcggccccagggatctcgatctccacggcctcggggccctcttcacggcccggcagttggttccgctcgattcgccaccgggaaattagagaggcgtgtcccgccggaggagctcgctcgcgcggaggaggggccatggcctcgacgctcagcacggaccggagatggggtgctgctcctgcaaggaaatctggtatgactgttctaggaaaagtcccaaaaccgattaatttaccaagtgtgaggtcggaaaacaatggtcttgatcccaacctggaaattgttccaaagggcaccctcacatggggcagcaaagcaccttctgcaacaccaaatgcatggggttcctcatcaattatgtctaccaagaatgatggaagttccagttcatccagccacttcaatggccggccctcctctgggggcggctcaaggccatcaacagctggaagtgaatcacttggttcacccaatgcttggggtccaaattctcgcccatcttcagcatcaggcacattcccatcatctcatgtaccagtggctacaaatcgtccccgaagtgcggaaacaagaccaggaagttcacagctttctcgattcgctgatagtgctccagataatatgaaagcatcgataaggactattgatagatcgggatcttcatcacatgggcatggttttactctaagtactggtgatttcccaacccttggctctgaagttaacagtcaacgaggccatagttcgaaagggcgcccaacttctagttctggtaaagaggcaccgcaagtggaacaagtgaagagcctaacagctggaaacgctgaagtgatttcgtcatccaataatcatgctgttgatatcatgaagacagagcagcatgcccacactggaggtgctcctgcccctgtcacaagtctgccaactgagggcctgcagccacaaccatatccacaaaattttcatatgcctcctccacagttcgattcatggcgtgcacctcatggtcaaccccccgagggaatgtggcatagaggagcagcaccaggtggaccatacagacctgtaggcccccctggcagtttccctgtcgaaccatttggttattatggtcagttcccacccaactctgaagccgcagcaaggcaggggtcagggcatggtggatatcaccctaaaaatggtgatgtgtatcatcctatgcctcctaattcctatattatgaatcagcctgttattccagtcagaacagtttatcagggtccagtgccttatgatggatattatggccctcgagcaaatttcaataatgccaatgtgagggatcctaattttgttggaggtcctcgtcaacctggagtattgaatcattttccaaatcagaatgacaagttccaccctggacattctcaaagcagaccagacaaacatgaaacggttctgagggagcagctggaacctgataaagtaaatgtgtttcgtcgaggacaacctgggagtttacatgataaccctgatcgcctaggaggttcccatgaatttgaaaggaatgtgaagccagcaccgccacttcttccgcatcctgatggaaaccggactgatatgaacatgaggacagatacaagggacacctatggtgaaagaaatagggtacttaacaaagtcggtgcctaaccagagaggtcccgttggtacggaccattcatcttgtttctacaaaatagaacaaac

SEQ ID NO: 20223 - DNA, 579 bp, Setaria italica
  Peptide Sequence Number=SeqID_86197
gagcttcagacgagaaagaccaaagtctgcaacctttacagtccagttcttgtcaaccaacaaatttgacgattttaaattcgcggtgaacaataggagggctacagtggtgaagataattcatgccccttgcaatatctatagccatgtgaactcgacgtcttgggtccagctttccggtgttcttttgaagtaagcggaacagactccctcgtggaagaaattccgtaactatacaaagtcgttctggagatgcaactgcacccatgaagagtataatatttggatggcgtagtttcttcatcagtgatacctcttgtctgaaggtatctatcatttcttctgaatactctttgctttggagaatactttaaccgccacatccgaggcataccactgagcatgatacactgttccgcaagaaccatgacctacttgttctccaagtacaaggtcttcccacagaatctcataatctaggcaatctgcttcatggtctactctctcaatagcactgctattagtacttatactgctgtccatactactcaagctgtcgttattgaaacaccaccagga

SEQ ID NO: 20224 - DNA, 538 bp, Setaria italica
  Peptide Sequence Number=SeqID_86198
gtccgcctcctccctcccctccctcgtcgtcctcctcctccgcccatagtggcgagcacgccacccgccacgcccccgcttcgcctcggctccaatcattcgcctcccccacccccaaccctctcccccccgcccccgtttacgccgggtgattaacggattattagttaatccggaggcttcgtctggctttcgcggccccgtccgccagccaccccgctaacgccagcccgggagcgcgctaacggcagcagcgacagcaacccgctggctagctagtcttccccacgattggacgccgccaccgtccaccccggccgagcacaccttttcttctcttgtgaagcaaaagccaccaaggactagcccgacaaaatctaggggtactatggctgtttcaatgagggaggtggatcctgtttttcaaggcgcgggtcaaaaagatggattggaaatatggcggattgaaaagttacaggcggttcctgtccccaaggaaacatatgggaaatttttcacaggcgactcgtacataata

SEQ ID NO: 20225 - DNA, 266 bp, Setaria italica
  Peptide Sequence Number=SeqID_86199
gtcagcagcgagttgaggaggccgtgcagcttgcggcgccaccaggagcttccgggcggcagcgggcggagcgtctggaagacgaatctcttgccgtcccagatccctagccagtcgtcgtcgccgccggccttgacggcgaggcccaggaggtcggcgaagcggcgcgcgtggaggttgcgggggtggatgatggagcccccggcctcgaagtggtcaccggcgacggcgacggtggcgaggcgtccgcccaccctgtggcggcg

SEQ ID NO: 20226 - DNA, 703 bp, Setaria italica
  Peptide Sequence Number=SeqID_86200
tgccggtctggtcctagtctcccaggcataacacgggtgcacgcctagtcaccaaagcgcatgcttcgccagggcagcggagcggccgggcggcaaaggaaaggagcgcgggataaaaaggagagctgtatgggacaaaaggggaaggcctagaaaggaacagcgagcaaccagcccggggcgcccccagcaggacaagagccaaggctcatttcgcgagctcttgccggccgcttccacttggccatttcccacctgggtttcggtcttctggagctctcgggctgcaaggagggttgttgtttcgactcttggagcctctgaatcagctcacgaagaaccagcccaatgggagactccgaaggaagagagacacttccacggctgctagatcttatccctgatgggaaagaatggaaggtgagggaagcacaaggtgaaggaagatcaagaaacacaggctttgtgagcgaggaggacaggaagctagagctgaaactcagccttcctggtctcgtagaagaagagacagcaactgtgtcaagacatgaagggatacagcgagagaggccagctctctctctttgttgcttccatgaaccctcaaagccgacaacaaacactactacaactgggacaaagagggtgttcttagacaccattgaggtcaaaacagaaggttgtgatgagcagaagcagcagg

SEQ ID NO: 20227 - DNA, 912 bp, Setaria italica
  Peptide Sequence Number=SeqID_86201
tttttttttaatttctagatgtgttttatttcatcatatatcataaatttgcagcctgtgcctatcatttccgattggccccttgtatgctcatcgccgattcgttgcatccaagtcgtacacctcaaaaggaccaacggtggagcagtacagcctctttttacaattttacatttacatcctccattagaccattagcctgactcaaattcaccgttattgttactggctactgctcttgttcccgccttgcgttggatgtccgctagctttgggatcactaggtgccttgtcggagcctaagctccatggatgcacaagcacattgcctttttacactaaccgtggggatcaaaacctcgctcactcccaggcctcggtgccgctcgcgcaccagccgaagttgaggctggaggcgtgctcctcggagaagaagctgaccgcgccgtcgctgccgatcacgtccgagctggcgagccattcctccgtgaagccatagccgccgccggccttgtacgagtcgtatgggtacgtcggcccctgctgccacttggtctcgaacatggggagaggcgagcagcccgtcgttgccgccgccgtgtccaagaacggcgcaccgaacccgagtaatccaggctgctcgaacgccgcgccggagtacggcgacgcctcaacgtcgttgaacaccacgctcgagtcgctgtccgaggagccgtccttgcagaccgccgcgccgaccgtcgcctggcgctcctctgcggcctcattggcgacggcctcctcgagcttcaccgccgtctccggcctgctggacagcttctgcctcagctcccgtatctcggcggcgagggcgtccttgtcgcggcgcagcgcgtcgcagtcggcacggagggcgtcgtggcgggcgcgcag

SEQ ID NO: 20228 - DNA, 330 bp, Setaria italica
  Peptide Sequence Number=SeqID_86202
ctgatatatctcttcactgcaacaacatcatagtcatcatcaagaatccctctatacacttctccgaagccaccttttccgatttgaatgctaaagtttctagtaatccatttaatctcatcttctgcgaaaaccttaatattctgatggatgtctacttcaaacttcaatttatcatcgcatcgtgcgatatttccagtcataatcttattttctgcaagttctgttgtatgccaacattacagatcccttaatgctgaatgccctgtctcaagagcgcctcagcgataggctcccaccagtttcaggacctcaacgccggcgatcgga

SEQ ID NO: 20229 - DNA, 568 bp, Setaria italica
  Peptide Sequence Number=SeqID_86203
aatacaaaaccaaagaaataattgtcaaggtatggagttcgtgccttcccgactcttttccttgtgaactctacaatgcgtgttcgctatcatggatctcggacgatgaattcccttgctatgttttataaagatgttacaggtactgtttctcaatgttctgatattgcgaaagcaatggtacacatcttaatatttactgttattgactaagttcaacagaaaggttgattattcattcagatgttatgtactgcagatttagcatgcattttgtctataaatgtagatatggtggtattttagtaggtatccagttcccagtttgagccactctagcatttattcacctgcccataaagttttcctatatttcaccttccttttgaaattatcaaggtatgaatcctgtgtcattggatgcattatcccctggagagagtggaggatacggtaactacaattgataatgacaaaaagagcgaaatggaagattctctgttatcatgggcaagatcaccggacaggttacttcatcaagatacatgtcttgcgctggctagctact

SEQ ID NO: 20230 - DNA, 1319 bp, Setaria italica
  Peptide Sequence Number=SeqID_86204
aggacggacggaacgacctcggggaccccgggtacgccacgccggcgtcgtggagggtgatgatggggctctgcaaaaggcaatagcacttgtgctgcataacagggaggattttgttgctattctcttttatgcttcgtggtgtcctttttctaaaattttcaggactgattttcaaaagctatcgtcctttttcccgacaattgctcatttttcttttgaagaatctcatatcaaaccaagaatattgtcaaggtatggagttcgtgccttcccgactcttttccttgtgaactctacaatgcgtgttcgctatcatggatctcggacgatgaattcccttgctatgttttataaagatgttacaggtatgaatcctgtgtcattggatgcattatccctggagagagtggaggatacggtaactacaattgataatgacaaaaagagcgaaatggaagattctctgttatcatgggcaagatcaccggacaggttacttcatcaagatacatgtcttgcgctggctagctcttttgtcctcttgcggttgcttcatttcattcttcccaagctcaatgcatgcatgaagcaagcctggaggatgcgactttatgaattgaataggttgtttcctagcttgtcttgaggaaggcaacgtggacttggaaacttgaattgactgtctaagcaaggcagcttacacacaagtgatgcatgcaggaaacgagatcatgaggggttggggttctgtcaatgtcagctcaaaggctaattaacatttatgtctcatggctgactagtgaaaaagatagttctagcagctctgtatctgaaggtctcatctatgtatgtagcatatcccctccatctcaaattctgcgtgttaaaattatttggtctttctttgggagatgtcttgatacaagctcaagtggcattcttggaaatgctgacgtaaatggtgatcatctgtaccaacagtaccctgtacccatcgtcctctgtgcaaattcaaatttgtaacttgtcatgtattgtaagaaagatggttcttttaggctagtcataggcatggcatgattagtatgtttgtgattcacaaacttgaggggattcatactgtctttatatttcacaggaacacagccctgttgaccaactggttgttctagtgaagtttactggatgtaaaggaaattactgggtcacattgatgttgaccaactggttgttctagtgaaggaaattgccgggtcacatcgacataaaaaagaaaaatttttactaaactaaaagaagaactagaccaaaggaca

SEQ ID NO: 20231 - DNA, 299 bp, Setaria italica
  Peptide Sequence Number=SeqID_86205
ttagatgagttgttctcagtgaggatgccagagaactgcaattttgacctcgtttgcgttggagtgaaaatgttccggacctctaggttcccaacttcttccattggctgcctatctttaggaaatacagtgttgcattgcgttttctaattctgtatatgcttgggcttgactgtgtgcttagaatgttttcgggttctccttccttcttagccaatgcagccttgaggcaagcaatctgttctttgagctctctaacctcgctgtctttctttattcgtcttttgctgcacctagct

SEQ ID NO: 20232 - DNA, 327 bp, Setaria italica
  Peptide Sequence Number=SeqID_86206
tagaggcttaaatcaggcccacctcgtctgggcagacacaataatctcaaaactccaaatctaacagatttgaaccagctcctgttcaagttttattgactgaagagattagtggctctcttagaaagctaaaggggtgttctaatcttacgagggatcgctacaagagcattgagaaacgaggattacttgcaccaagcaggagaataagcaagcgtcggtagagaagcaagttccggtggatgataaggtgatcttaaccttgtgttccccaacaatatcgaggggactgaagaggcatatgagattggtgctggcgaagatgag

SEQ ID NO: 20233 - DNA, 503 bp, Setaria italica
  Peptide Sequence Number=SeqID_86207
aaaagcaaaagaggcgcatacggcgtactgtgattaaagaggagaggcttaaatcaggcccacctcgtctgggcagacacaagtacaattctaaactaactgattagtttgccttcagttatgccagtgattcttatatatttttcatgcaattcatgatgaaaatgtctatgcttttctagatgctttgcaaatcactattatatttatatcttacatttaattacatttaatgatgtgacagtagattatgagggtacattgaggcattatccatagcagtgttttaaaggtgataaggcgaccttggaaatctgtgcacgccttatcgcctaggcgacaaggcggctggtttcccaaggcgagctgggaccgcctggactaggcgacgcctttgaaacaatgatccatattccatagtacatttaatgatgattttttagttttctggctagtaatctcaaaactccaaatctaacagatttgaacctagtcttcctgtt

SEQ ID NO: 20234 - DNA, 301 bp, Setaria italica
  Peptide Sequence Number=SeqID_86208
ttattaaacccggtcaacacaaggctataaacgacgagggtgtgccacaaagagacggcccttcatgaagggccgtctctttgtggaattcaacgtcgagtttcctgaatctggcacactctcccctgaccaatgccgggcgcttgagaaggtgctgccacagttgcctaggggacgtctgtcagacatggaggtggatcagtgcgaggagaccataatgcacgatgtcaacatagaagaggagatgaggcgtaggaagtaccaaaggcagcgggaagcctacgaagacgtcgacgaggat

SEQ ID NO: 20235 - DNA, 420 bp, Setaria italica
  Peptide Sequence Number=SeqID_86209
gttaagagcatccaagattcaagaggaaatatgatgacctgttcattgagcacacagtttctctgacggaagctttgtgtgggttccagttcattctgacccatcttgacggtaggcaacttctaatcaagtccaatcctggtgaaattattaaacccggtcaacacaaggctataaacgacgagggtgtgccacagtatggccggcccttcatgaagggccggccatactgtggcacacccttcatgaagggccgtctctttgtggaattcaacgtcgagtttcctgaatctggcacactctcccctgaccaatgccgggcgcttgagaaggtgctgccacagttgcctaggggacgtctgtcagacatggaggtggatcagtgcgaggagaccataatgcacgatgtcaacatagaag

SEQ ID NO: 20236 - DNA, 680 bp, Setaria italica
  Peptide Sequence Number=SeqID_86210
tcttgatcgcagcctttctgtatgctttttgagctcatcctggcttgcagtactagagacgccaagcacctcatagtacttggtgttgctgctcccctgtgtcgtcctcgtcgtcgtcctaggttctacagattcagaattgcaattatcctgtgatccaagaaatgtttgggcggtgtgccaaggaggagcaacaacaccaagtactatgaggtgcttggcgtctctagtactgcaagtcctaggtattgagctcaaaaagcatacagaaaggctgcgatcaagagccaccctgacaagggtggtgacccagaaaagtttaaagaattatctcaagcttatgaggtgcttagtgacccagagaagagggagatatatgaccaatatggagaggatggtctcaaggagggaatgggaggaggtggtgacttccataatccgtttgacatatttgagcagtttttttggttggtggttcctttggggaagtaggtcaagagtacgcagacagaaacgtggtgaggatgtggtgcattctctgaaggtgtctttagaagatgtgtacaatggggctaccaagaaattatcgttatcacggaatgttctatgctcaaagtgcaaaggaaaaggaaccaagtctggagcacctggaacatgctatggttgtcatggtataggaa

SEQ ID NO: 20237 - DNA, 672 bp, Setaria italica
  Peptide Sequence Number=SeqID_86211
gttgagcggtagtacgctgctcccctgtgtcgtcctcgtcgtcgtcctaggttctacagattcagaattgcaattatcctgtgatccaaagaaatgtttgggcgtgtgccaaggaggagcaacaacaccaagtactatgaggtgcttggcgtctctagtactgcaagccaggatgagctcaaaaaagcatacagaaaggctgcgatcaagagccaccctgacaagggtggtgacccagaaaagtttaaagaattatctcaagcttatgaggtgcttagtgacccagagaagagggagatatatgaccaatatggagaggatggtctcaaggagggaatgggaggaggtggtgacttccataatccgtttgacatatttgagcagttttttggtggtggttcctttgggggaagtaggtcaagagtacgcagacagaaacgtggtgaggatgtggtgcattctctgaaggtgtctttagaagatgtgtacaatggggctaccaagaaattatcgttatcacggaatgttctatgctcaaagtgcaaaggcagtgttttaaaggcgacaaggcaaccttggaaatctgtgcacgccttatcgcctaggtgacaaggcggacggtttaccaaggcgagctgggaccgcctggacgcctaggcgacgcctttgaaa

SEQ ID NO: 20238 - DNA, 1446 bp, Setaria italica
  Peptide Sequence Number=SeqID_86212
ggcgccgccgccatcccctcgctcccctctgattcccttttctacgtcgacaagcccgccgcctccacttcggccgccggcgcctccgacacaaccaccaaagatattcctgccaaaaggaagatcgagaaaaagagagagaaggttctttatcacgagagtttgttgaagcggaacccgtttatacagccaatcccatcttctgtggtcagcaagaaggataagaagaagacaaagaagaaggaattgcacgagacacagggagacattagtgtccccatggaagatgattctgctggaaagaaccttgacatatgggcgggggatgataaaggagatactaaggctagaaagagatctactaagtcattgattcctgctgttgaagttgagccccaaggatgctcatttaatcctccatttgaagcacatcaagatgctcttgctcaagcagttgcggatgaaaggcacaaaacactcatgaaagagttggggcccacacctgtaccactcataatttctggtgaacctataactgaagaagataaattcttccttgatgctgatgatggagatgaagatgtcacggacgatgatggagaacaggatgctgatacttcagttggacaaaggaagaacaaaacaaaaagagtaacaagagtagaaatgaacagaagagctcgtcgtaaggagaggttaagagaagaggcagaagcaaagaaaatggaaagtatttcaaaagaaattgatagcttgccaaatataattgatgagatagctaaagaggatgaggaaaagcaaaagaggcgcatacggcgtactgtgattaaagaggagaggcttaaatcaggcccacctcgtctgggcagacacaaatttgaaccagctcctgttcaagttttattgactgaagagattagtggctctcttagaaagctaaaggggtgttctaatcttacgagggatcgctacaagagcattgagaaacgaggattacttgcaccaagcaggagaataagcaagcgtcggtagagaagcaagttccggtggatgataaggtgatcttaaccttgtgttccccaacaatatcgaggggactgaagaggcatatgagattggtgctggcgaagatgagaagaccgcgttataagcgaagggcctgttttactgcatttgtttttccttttatgtgttccatgtctaatagggcaggcaatcttttgccctagcaatgttttgtgagttgcctgcgaggcaaaattttgcaatggatcttaggagttgtagtgcttatcagttgctacatgatgtaagagcatatttgtatcagttctgttctagtcgatgcaagcgagcactacactattgccatagacgcaaatgtcaaaggttcatgcacggaaatttaccaaactattttcacaacacgatttcagcaaaattttt

SEQ ID NO: 20239 - DNA, 1509 bp, Setaria italica
  Peptide Sequence Number=SeqID_86213
ggttccttttcctttgcactttgagcatagaacattccgtgataacgataatttcttggtagccccattgtacacatcttctaaagacaccttcagagaatgcaccacatcctcaccacgtttccgtcgcgtgggttgagcggtagtacgctgctcccctgtgtcgtcctcgtcgtcgtcctaggttctacagattcagaattgcaattatcctgtgatccaaagaaatgtttgggcgtgtgccaaggaggagcaacaacaccaagtactatgaggtgcttggcgtctctagtactgcaagccaggatgagctcaaaaaagcatacagaaaggctgcgatcaagagccaccctgacaagggtggtgacccagaaaagtttaaagaattatctcaagcttatgaggtgcttagtgacccagagaagagggagatatatgaccaatatggagaggatggtctcaaggagggaatgggaggaggtggtgacttccataatccgtttgacatatttgagcagttttttggtggtggttcctttgggggaagtaggtcaagagtacgcagacagaaacgtggtgaggatgtggtgcattctctgaaggtgtctttagaagatgtgtacaatggggctaccaagaaattatcgttatcacggaatgttctatgctcaaagtgcaaaggaaaaggaaccaagtctggagcacctggaacatgctatggttgtcatggtataggaatgaagactataacaagacagataggattaggcatgatccaacagatgaatactgtttgccctgaatgtacaggatcaggtgaaatcattcgtgaaagggacagatgcccaagctgcagagccaacaaagttgttcaagagaagaaggttcttgaggttcatattgagaaagggatgcaacatggccaaaagattgtattccagggcgaagctgatgaagctcctgacacagtgacaggagacattgtttttatcttgcaagttaaagagcatccaagattcaagaggaaatatgatgacctgttcattgagcacacagtttctctgacggaagctttgtgtgggttccagttcattctgacccatcttgacggtaggcaacttctaatcaagtccaatcctggtgaaattattaaacccggtcaacacaaggctataaacgacgagggtgtgccacagtatggccggcccttcatgaagggccgtctctttgtggaattcaacgtcgagtttcctgaatctggcacactctcccctgaccaatgccgggcgcttgagaaggtgctgccacagttgcctaggggacgtctgtcagacatggaggtggatcagtgcgaggagaccataatgcacgatgtcaacatagaagaggagatgaggcgtaggaagtaccaaaggcagcgggaagcctacgaagacgtcgacgaggatgaggatgctggggccaagggtgcaatgtgcccagcagtaagaagcaagaagatgtttaacg

SEQ ID NO: 20240 - DNA, 1406 bp, Setaria italica
  misc_feature (1)..(148): n is a, c, g, or t
  Peptide Sequence Number=SeqID_86214
nnnnnnnnnnnnnnnnnnnnnnnnnnnnnnnnnnnnnnnnnnnnnnnnnnnnnnnnnnnnnnnnnnnnnnnnnnnnnnnnnnnnnnnnnnnnnnnnnnnnnnnnnnnnnnnnnnnnnnnnnnnnnnnnnnnnnnnnnnnnnnnnnnnnaaaaggtttttattaaagtaatggtactgacgattgatagaacattcatcagtgctttttcctccaataactacatattggaaggataaaattaccatacatcaagtcacaaagaccaggcaaatgcatgacacagctaagaaaaaatagggactaccaacatctacggaatgccatgctgccaatgcaatgaagttctgtgccggcgggaagaacaaaaacagatgatgaatccaacctaatgctgtacagaatatcctttacagccaagctgccactcaagacgcggataaagggtggttcaaggggattggctgatggatgtctaatgccatgccctggtggatccaactatccaaacaacagatcaccccctttgagctgactgacgatgatgatactgaaagtattgaatgctgataaaatgcttcaccctctggctggcttatttggaatttgttttcttgcatgtggtggacccatatcagttggcttcaggatctgaaatgaacacattaggctctcatctatgctcaatagagcacccacattatcgaattctccacaataatttggagcagaaaagattgtcactaatcgccgttgtgcgaagaactcatagccatcttcaactacctgatgagctcgacaaataagatcaagatcattcttctccaaaaactctacaagcttatctgcaccaaacgtacatgaaacacctctgtcactctcaccccatccttctccatctgggctaggatcagaccaaagcaaatcacaaaggagaccataatcaggaatctcagcaggcctctcaatatcctttatctgatccaaactcgtcaattcgggtgagagaccaccatgcatgcacagtatcttgtcatcgatgagtgctgctataggcaggcagttgaagcaatccgagaatatcttccacagccgaacattgaacctcctcttgcactcatcatagaacccatatactctgttgattttcgcatcttcatggttccccctcagcaggaaaatcttttcagggtacctgattttgtatgccagcagcaagcatatagtctccaagctctgtttgcctctatcgacataatctcctaggaatacataagttgaagttggaggataaccacccaaatcaaacagtctcaaaaggtcaacaaactggccatggatatcaccgcagatcttgacgggggcgtggattcggagcaggttgggctgggagaggagcacccgcttg

SEQ ID NO: 20241 - DNA, 866 bp, Setaria italica
  Peptide Sequence Number=SeqID_86215
acaactacaaggcccagagatctccttcagcacacaacttggtaaaccaagagccagattagccacattgagtacgcgtccaccactataaaaacctgacctcttgatatttacaatgaacaaacaaattatcaagctacaacaaagacaacaaaaggattttgcaagaccgacagagtttccaactggtggacaaaatctacagcctacactcctctgattcgagaccttgcattgtgaaaccaaaatgcctattgcaaaatgagccacttgaaatccagtagatgcaagttttgacctcagtggaaggatgaaacccatcccgttatattaggaaaagtgggagtgcgttgagttggacaatatgcttgttgctcctgctgaactacgaataacttatcttcccttattcaattgtgccttgaactcccatccaataagtttttttctatgaaactatccaataagttttccttgcttaattctgaatctttccatgcatagctgacacaaaaggggtgatcatgccattaattgcgaccaagatctttcaggcctcaatttcgtcaccaacaaagatcgattttagttcttttgtgaaatgattgaaccagtctgaaagagaagcaaacggcaggaaaccagtcaaggctgggataataaaccccagcacagcataaaatacccaccgacgaatccaatatgggaaccaaacaacttccttgctgtgagatactgatataggaccatgaagaacacggtacaagacagatggataacaatttccaagtagatggatggaacaaagaacctccagcatatgagccagatgttcccatcaccaccaagagtgttggcacagaacc

SEQ ID NO: 20242 - DNA, 1157 bp, Setaria italica
  Peptide Sequence Number=SeqID_86216
gcttctctttcagactggttcaatcatttcacaaaagaactaaaatcgatctttgttggtgcgaaattgaggcctgaaagatcttggtcgcaattaatggcatgaaaccagtcaaggctgggataataaaccccagcacagcataaaatacccaccgacgaatccaatatgggaaccaaacaacttccttgctgtgagatactgatataggaccatgaagaacacggtacaagacagatggataacaatttccaagtagatggatggaacaaagaacctcccagcatatgagccagatgttcccatcaccaccaagagtgttggcacagaaccttccagcaatgccgcacataactcccaaaagaatgaagttgaaagttactggcatatttgatccagacaccgcagaacgctggaatgctagccaagcaattgccataatcattactatgccaaagcccatacgtgttgctgctatgaaatgacatcttaggaagagcaacccggaattgaaatttgacactgaatttggcatccaccatgatttaggtccccttgaagtggctgagcatgctgctgtaatatcagttattctttggtatgaatagatataagttccataaccaaagcatactgacatgataatcactgcactaacaagaaaatctattagtgtcctcagtatttgtgcatgccttgtgtcctgcatctgagtcttgaatttctcccctcggaaggaagctttctgaaatcccaaggatattttcatcttttctaacatgtgtgagtaggagttaagttctagttgagactgttttagttgcaactttctcatgctaaggcctatctcaaattccttgagctcgtttgaccgtgtttgctcttttaaagatctctcaaatgcattaaggatgcgctgatcagcttcaggagaagatatgccacgagtgcggcgagtcagctgctgattgcttccagcataaagaacaagccgactttccactgagttcaaaacatcctgcctgatttcctgtggggattttgtggaccaccagtgctcaacatgcttgctgctgcagagtcttcatgcttagaagaacattggggaataggactttgttcaaagacaggcatctcattaacaagattgaagtcta

SEQ ID NO: 20243 - DNA, 240 bp, Setaria italica
  Peptide Sequence Number=SeqID_86217
ggtcagacgaatgcatcattgtatatttgtatccacaaatatgcagagacaccaacactacatacagacagtaatacgttttaacatacttgcacaagtacagcattttattgagagccatggcccatatatgggacagcgctgaatgtcccgcttggccacatctccatgatggatgtcctcgagctggactagcagcagcagcagatggtctcgaggcagcactcgcaggtctcgtag

SEQ ID NO: 20244 - DNA, 441 bp, Setaria italica
  Peptide Sequence Number=SeqID_86218
gtccgcttgatattagaacatctctccacatagaccctggcttcaccaaagaacgttcaaacttcttcagatttatggtatcaatcctcaagccagaatttatcttcgcatctgaactctcaggctcaacagtatgcttgaaattccagcttaatatctgaaacatcaggcgcaatcccgcagaacatgctctctcctcaggtatagtttcatttgaattcaagattttgtccgcagtattgaatacagcagattgtgcccagcaatagaaatccttcaaaaagtgcagttcaagtgaacattcacattgctcatggaattccttaggcaggcccatagcagaagcagttgaaggcgaaaattctgaaaccaagttttccaagaaattgatagcagcaaactgtcgattagggccatggataccccggatggattgctcaa

SEQ ID NO: 20245 - DNA, 674 bp, Setaria italica
  Peptide Sequence Number=SeqID_86219
gtatctcacaaaatcgagaccccctctcccagatcttggcttagcaagcaattccgctcatggaatccggagggaatcggatggaatctcagcgtttgggaccggtcgctagcggcgccacggggcgacgcctggccgcgggcggcgccacaggacgaggcctggcgcgcgcggcgctgctttgattctgaacggcaacgccatgcgtcaagctagctcaggatttgaaggcaatgttggtgctgaagttgagaaaatgaggtgattgggctgctctctccgctgcctagaaagaaggccattgatcccaccagagatgctggaccattggccacgaaacctcctacacctcctggcaggtactgcccaatattgactgggaaagggcctccatggtagcttactggtgtgggagacaagctctgatagcttggacctggaaatgggttgacattctgtgggtaatgaccatggaaatttggatgaacatgtggaggcaggtagttcaggggataatggtgtggccaaaaattctggtgctgctgctgtgtgtgtttgtatcttgtggatctgaactaaagatcgaggagttgagaaagtttgtgaggctccctgaagatgacttatccatgtcaatggctggtttggtcgtttgtagtattctagtgtgtatg

SEQ ID NO: 20246 - DNA, 255 bp, Setaria italica
  Peptide Sequence Number=SeqID_86220
agtgtatctatcaatctgggtacgaagaagcctccggaagcacattcagagtctaaaagtatcgactgtgggggtcggtgctatgggctacattggtaataaggcaagtttctataagcgacatcactctcaaatcctttcttattcatctaaagaaattctgctgctgcaaaactgagtttcaaatgcatgcttttaagagaagtgtatgtatttgtcttcactaattctaatgtagctggcgttcttttgtag

SEQ ID NO: 20247 - DNA, 843 bp, Setaria italica
  Peptide Sequence Number=SeqID_86221
cttgcaaggcaatggtcaaaacttgttgcttgttaggtaggcaaacaaatgaaagaaagtgaattcaatgaagattttccttcagctttgtatagtaaatctgattactgaacatacatgacacagttagttcccctcttgtatgtacgccgctaaatggtgcgttgaacaagttttgcacatgatctggtttaatgagcattgttaacctgactttaaatcttgctatttacttactgagtggattcagcgcggttaatccaaacatgatatcttattgaatttattggttatgaattccttgagtttcagttaagcactggtgaatagatgatatactaccaatctgccttaccattgcgatacattttaacatgtaatttttcctgagctatatcggtgcttatggttttgtttattctgctcattcaggtttgaacctactttagaaatacacaatatggctgcggttgatacagctaccaaggagatggaggcattgcaagttggacaaaatgaagaaaccaaagagaatctgattaaagaaggcaaagctgcaaacagcaatggtgcagctcctgcagctcagtcctcaccgccagaggatgatgacgaggcacaagctgatggtgcatctcaagatggagcaccagaagctgcaaagaagaagaagaagaagaaaaacaaatccaaaaagaaggaccctcttcagcagacagatcctccatcaatacctgtcgacgagcttttcccttcaggtgactttcctgagggtgaaatccaacaatataaggatgataatttgtggagaacaactagcgaggaaaagagggagctttgaac

SEQ ID NO: 20248 - DNA, 1067 bp, Setaria italica
  misc_feature (1005)..(1005): n is a, c, g, or t
  Peptide Sequence Number=SeqID_86222
cgagagatgccacaaatacagggatcatattgtagtacagttttgttcacccgccatttggtactgcaggctggcattgcctttccaactggatgctccttgaattgggttgcagctcactggactccaaatgcgggtgacaaaactgtactacaatatgatgatgtgatgaagctggattttggaacacatatagatgggtacattgttgattgtgcatttaccgttgcattcaatcctatgtatgatccactgcttcaagcaacgagagatgccacaaatacagggatcaaggaagctggaatagatgcacggctttgtgatgttggtgctgcaatccaagaagtaatggagtcatatgaggttgaaatcaatggaaaagttttccaaggtaatgtaaagcagtcatatacagcttctgattttacaatctgcgaaaataatgtaaagtgaaaaaggaactgataattcaaactactttgttgcttgtgtgatagtaaaaagtgttcgaaacctcaatggacatagcattgggccatatcaaatccatgctgggaaatcagttccgatagtgaaaggtggagaacaaacaaaaatggaggagggggagttctatgccattgaaacttttggatctactggaaagggatttgtcagggaggacttggaatgcagtcattacatgaagaactttgatgttggacatgtgcctttgaggttagcaaaggctaagcagctacttgggaccatcaacaacaactttggaacactcgctttctgccgccggtacttggaccgtcttggtgagacgaagtacctcatggctctgaaaaatctatgtgacaacaatattgttcagccataccctccattgtgcgacgtgaaagggagctatgtctcgcagttcgagcacaccatcttactccggccaacctgcaaagaggtcatatccaagagtgccaagttatttgtccgattgcgacatgtcctatttttccgtaaacngatggtacacaggttgcgcaaaacagtgtactcgttgcataaacaaccggtacagaggagcc

SEQ ID NO: 20249 - DNA, 492 bp, Setaria italica
  misc_feature (486)..(486): n is a, c, g, or t
  Peptide Sequence Number=SeqID_86223
ccggtactggaccgcctcggcgagactaagtacctcatggctctgaaaaatctctgcgataatggtatcatccagccgtaccctcccctgtgcgatgtgagagggagctacgtctcgcagtttgagcacaccatcctacttcggccaacctgcaaagaggtgatttccagaggcgatgactactgatggaggctgcagctgttcctttgtactggttgtttacgttaacgaagtacacaccgtttttgcgcaatctgtgtaccatctgtttacggaccaaaggaaatatcacggtgggataaacaatctggcacggtggcaccttagtcaaatgttttgattttggaacttgttttacgttggtctagaattgcgaccccgttgggtaaccttgataacgaacatcacctgggagaactaataccatgttttggaacatggattttactgcattgttggacctagacaaaaaaaaaaaaaaaaaanaaaaaa

SEQ ID NO: 20250 - DNA, 1507 bp, Setaria italica
  Peptide Sequence Number=SeqID_86224
tttaaattttattttatttttgtttagtttaagttcttattttattttaagtccttggtaattgtttaattgatggtccatctcaagatggagcaccagaagctgtaaagaagaaaaagaagaaaaacaaatccaaaaagaagaaggacccccttcagcagacagatcctccatcaatacctgtcgacgagcttttcccttcaggtgactttcctgagggtgaaatccaacaatataaggatgataatttatggagaacaactagcgaggaaaagagggagctggaacgactgcaaaagccaatgtacaactctgttcgccgagcagcagaagttcatagacaggtgcggaaatatatgaggagcatcataaagcctggaatgttaatggttgatctatgtgaaacattggaaaacatggtccggaaacttattaaggagaatggactgcaggctggcattgcctttccaactggatgctccttgaattgggttgcagctcactggactccaaatgcgggtgacaaaactgtactacaatatgatgatgtgatgaagctggattttggaacacatatagatgggtacattgttgattgtgcatttaccgttgcattcaatcctatgtatgatccactgcttcaagcaacgagagatgccacaaatacagggatcaaggaagctggaatagatgcacggctttgtgatgttggtgctgcaatccaagaagtaatggagtcatatgaggttgaaatcaatggaaaagttttccaagtaaaaagtgttcgaaacctcaatggacatagcattgggccatatcaaatccatgctgggaaatcagttccgatagtgaaaggtggagaacaaacaaaaatggaggagggggagttctatgccattgaaacttttggatctactggaaagggatttgtcagggaggacttggaatgcagccattacatgaagaactttgacgttggacatgtgcctttgcggttagcaaaggctaagcaactacttgggaccatcaacaacaactttggaacgctcgccttctgccgccggtacttggaccgcctcggcgagactaagtacctcatggctctgaaaaatctctgcgataatggtatcatccagccgtaccctcccctgtgcgatgtgagagggagctacgtctcgcagtttgagcacaccatcctacttcggccaacctgcaaagaggtgatttccagaggcgatgactactgatggaggctgcagctgttcctcttgtactggttgtttatgcaacgagtacactgtttttgcgcaacctgtgtaccatctgtttacggaaaaataggacatgtcgcaatcggacaaataacttggcactcttggtctaaaatttgagtttcaaatctgtggaatcgtgtatttttcattgagctgaaattgatcccctcgttgtattgtgtttgaaaacctgaaacgattatctacgttgtcctggaaacatggttctgctg

SEQ ID NO: 20251 - DNA, 250 bp, Setaria italica
  Peptide Sequence Number=SeqID_86225
gcgacgagaacctgtagaggagttagcagtcgtctcggcggccggcatggtggccgtgcagctgggcgctctgctcctggcgcttctgctcgcgctgtggcgcctcgcgtggcggccgcgcgccgtggcgcggtcgttcgcgcagcagggggtccggggcccggcctacaggttcctggccgggtccctgccggaggcgaagcggctgctgctggccggccgatcgggtgcgtggcgcccctgacgccgg

SEQ ID NO: 20252 - DNA, 368 bp, Setaria italica
  Peptide Sequence Number=SeqID_86226
gttttggctttgggttttgccttagcattcctcagtgatcttcacctaatctgagagtctttttattattttgttttttctttgaggtaagggttagataggtggatgcttttaaaacaatgaatctgtttaagcaggttgtagaaattggcataatggaagcctacagtttgcagcctacggatatgccagtttcagtgtttgttcatgggatgttctgatttgcctctttgccagcctgatgattacctcttcaatagtataatggagattggaatacacttgactgtagaagctggcttggctgctgtggtggaccatatactccctccgttccaaattactataagtccatccatccatgtaca

SEQ ID NO: 20253 - DNA, 255 bp, Setaria italica
  Peptide Sequence Number=SeqID_86227
cgccagaatctttccccatttcgtttcgcccaggagccagaggcgcgggcgccactggagagaggggaggagatgcgagaggaggtgaggagctcgtctggggcggcggccgagccgccgctggccgtagcccgctcctcgtcgccgccgcacaccccggtggccagttccgctggtgcctcatcgcctgctatgcaaactaacattggcagacaagcttccagagttgactcgtcatcacaagttgctgcacat

SEQ ID NO: 20254 - DNA, 403 bp, Setaria italica
  Peptide Sequence Number=SeqID_86228
atcatcctgctggtttcaactctcataggggtttgcttgctgatgaatatgccacttaccagggacaccctcctgtattcatcagcaagcaaacccctatgagagttgaaaccagcaggatgatccccgtaatccatgccaaactctttcgaacaagtacaacagaggctgtagcaatagtttggcaccatcttcattgctgtcttcgagacaactagaaggatggtgcctcaattatggaccctaagaatgatgaagcctcctgtgtggataccaccagcccaacaattttccctatttggttgttacagccaaaaccagatggtcatcagtgtgtcccctttttttgcaggtagcaaaggtaataagtacaaagttcgaaacaaggaaccggcttgattaa

SEQ ID NO: 20255 - DNA, 348 bp, Setaria italica
  Peptide Sequence Number=SeqID_86229
acttctgatacgatccctccaaccagtttgccaatctggaaagttcactatcagtaagatctgatccagtatgatctagagattcatctgaatgaatgataattagttcatccttatctgtaagccctgtagcagcattgtttgcaccttcaatccttgtcttgaaaatgctgccagcttcagatacgaagctatcagcactggacccagcaatttgcacgaggaaaacagcgcgcggtctatcgaatggattgggaagaagcactttgtttaactgcgaagaagaaagcgccggtagggcggttggcggtgcaaaaccagcaagacggaaacggcagcagaaacttc

SEQ ID NO: 20256 - DNA, 546 bp, Setaria italica
  Peptide Sequence Number=SeqID_86230
cttatttaccggaacccaaccaataaaacaagccgatacagtttttttttcctttcacaaaaaatagaaaaaaaggttcgttttgtccaacagcaaaagcatacgtctctatccaaaaccaacccataactacacaagccaaagttggccgcaaagaatggccggccccttgtcgatagcatcccttccctccaaactaatcaatcttgacatttgaatacaggagggtgtccctggtaagtggcatattcatcagcaagcaaacctgcacaatcataaatgtggtttagggtaaataagtttaggcagccaagacaagtaataatgtttcaatctcctgcatatcaaacaaggttccggctcaccccctatgagagttgaaaccagcaggatgatcccccgtaatccatgccaaactctttcgaacaagtacaacagaggctgtagcaatagtttggcttgcttcttctagttgtcttcgaaatgtgcaatgaagatggtgcctcaattatggaccctaagatgatgaagcctcctgtgtggata

SEQ ID NO: 20257 - DNA, 423 bp, Setaria italica
  Peptide Sequence Number=SeqID_86231
atcctccagagcctttatcccagtgaagtggcatactaataactctgcagggctgattacacctgagaagtcttcatggacctgaatagccctttctatagttttaagaagggaagccaagctggacgcaaactccaagtctgcttccttatgaagtagcagagtaagactatttccactctccaagggaatgactagttcaccactagacttctgatacgatccctccaaccagtttgccaatctggaaagttcactatcagtaagatctgatccagtatgatctagagattcatctgaatgaatgataattagttcatccttatctgtaagccctgtagcagcattgtttgcaccttcaatccttgtcttgaaaattgctgggtccagtgcctcagctgatagcttcgtatctgaagctgg

SEQ ID NO: 20258 - DNA, 558 bp, Setaria italica
  Peptide Sequence Number=SeqID_86232
acacttagtagaactcagttacccaatttcaaattacaaactaacaatttatgtgttacctttatcccagtgaagtggcatactaataactctgcagggctgattacacctgagaagtcttcatggacctgaatagccctttctatagttttaagaagggaagccaagctggacgcaaactccaagtctgcttccttatgaagtagcagagtaagactatttccactctccaagggaatgactagttcaccactagacttctgatacgatccctccaaccagtttgccaatctggaaagttcactatcagtaagatctgatccagtatgatctagagattcatctgaatgaatgataattagttcatccttatctgtaagccctgtagcagcattgtttgcaccttcaatccttgtcttgaaaatgctgccagcttcagatacgaagctatcagctgaggcactggacccagcaatttgcacgaggaaaacagcgcgcggttcttattcgtaattggtatttgggtaagtaagtctacttttgttttaacttgtcgta

SEQ ID NO: 20259 - DNA, 1581 bp, Setaria italica
  misc_feature (1)..(38): n is a, c, g, or t
  Peptide Sequence Number=SeqID_86233
nnnnnnnnnnnnnnnnnnnnnnnnnnnnnnnnnnnnnntttttttttttttgttttttttttcttttaggacatatagcactcttatttgaattcgaaatcacgattcacagatttattattcatacaaggcaggagcactctgcaacaatcgtttcttcaaccactcctctggcttatttaccggaacccaacaataaaacagccgatacagtttttttttccttcacaaaaaatgaaaaaaaaggtcgttttgtccaacagcaaaagcatacgtctctatccaaaaccaacccataactacacaagccaaagttggccgcaaagaatggccggccccttgtcgatagcatcccttccctccaaactaatcaatcttgacatttgaatacaggagggtgtccctggtaagtggcatattcatcagcaagcaaacccctatgagagttgaaaccagcaggatgatccccgtaatccatgccaaactctttcgaacaagtacaacagaggctgtagcaatagtttggcttgcttcttctagttgtctcgaaatgtgcaatgaagatggtgcctcaattatggaccctaagaatgatgaagcctcctgtgtggataccaccagcccaacaattttccctttatatgctccatgtagggactgaaacgctttggtgacagctctctgaactatttcggttccctgcttaacaatttccgtggaagcatattcatcctccagagcctttatcccagtgaagtggcatactaataactctgcagggctgattacacctgagaagtcttcatggacctgaatagccctttctatagttttaagaagggaagccaagctggacgcaaactccaagtctgcttccttatgaagtagcagagtaagactatttccactctccaagggaatgactagttcaccactagacttctgatacgatccctccaaccagtttgccaatctggaaagttcactatcagtaagatctgatccagtatgatctagagattcatctgaatgaatgataattagttcatccttatctgtaagccctgtagcagcattgtttgcaccttcaatccttgtcttgaaaatgctgccagcttcagatacgaagctatcagctgaggcactggacccagcaatttgcacgaggaaaacagcgcgcggtctatcgaatggattgggaagaagcactttgtttaactgcgaagaagaaagcgccggtagggcggttggcggtgcaaaaccaagcaagacggaaacggcagcagaaacttcatttaacgacattgaagcctcctggtcgtcggttggctgatcccgcaggtagcggtgcgacgccgcatcgatgaagaccgcggaggcttctccatggtgaccctgcccctgccccggagcagcagcagccacggcaagaaagagggagaggaggaggaggaggagatggtggcagcgagccatggtcgccgaccttgctcgagatcgatgggatcgtcgagtggcagcagcaagattggatctttcttggccctgcccttgcccttgccctggggggattgatttgat

SEQ ID NO: 20260 - DNA, 302 bp, Setaria italica
  Peptide Sequence Number=SeqID_86234
tttacgaatgcatataaaaaagaattttctggggatgataagtacattcactcaagctgagtaacctgacaaaattgttataaacttataatgtcatgatgtctcattatagttttctgatatgctaatcatttactgaagtgtgaagtagcaaaactaattgatgttactatagcttgatgatcatgttctgatataactaattatggaataagtagatataaaacattcctgcacttgattattctgatattccaataatggggtagtgaacatattcactggtacgccgcaaaatcaag

SEQ ID NO: 20261 - DNA, 565 bp, Setaria italica
  misc_feature (16)..(16): n is a, c, g, or t
  Peptide Sequence Number=SeqID_86235
gggacaacggatccancaggaaccaaacgcccaaacccactgctgcctgcgcacgcagcagcccactggaaaatgcagcgcacaagcagcagtcgccagcagaatcatagcgctttaacaagtggaaaccggagcaagtggacttgttaacggtagttaaataattcagttgtgcagcttagtgatcaggtcgtgcatggctttcttgttgccggacgcggacaggccaagaaagatgtatatatattaaatatagtaaggaaattaaactgtggtaactgtcgtaaggttgataaaactgacggaacggtgcctatggctattggagtgggcgatgggcgctttcggtgagggatcaggagggctgacagatctagacaacaggtggattcaggctagatcagatctgataaaataaccggcgtccttggcactggaggttttggagaaaaataatgcgtgtagagagcactcaagacaacagtgacagggagaaagggaggcctggccggggcttatcaggaaagcttggtccccgtcatgaccccgactaaccacaagcaaa

SEQ ID NO: 20262 - DNA, 722 bp, Setaria italica
  misc_feature (721)..(721): n is a, c, g, or t
  Peptide Sequence Number=SeqID_86236
ggggtggacgaggaggacgccgtggtgggggagcgcgtcgccgttggggtgggggacgaggccaccgggaacttgcttgctcatctgtagcttttgcatttgaaaggagcacaagtcctgccacacatgtccctgcccccacaaactgccagaaagaatatcttgtgcccagagcgtaccaggtgagtatgatgagtacaatagtccaacagtccagcaaagttacgctggtgatgtacgagtattggtaggccttgacaacagcatcataattttcaggatgacaatatgtttagatgctcatcttctgcatagaaaagcatctcactgaaagttatcggtggcatggattctttgtaaatgctgtgatccttgtactcagtactcacaaagatagttcccctgtacatcgatgaaggccagggccagataccaataccaagcaacttgcagcttccgccgtcgatacaggacaattggcacaaaaactgagatcagcaaaaggtacgtgaagaaagatttgtcgttgtagttggttgttcttattcaactcgagattagcaattagggaggagctgaagcttgacgcagccaaggtgaaggcgacaagctggccgaggagtagcacgagcagcagtccccatacatccttcctcttgacctccatgtaaccttgtagtctagtcgtcttggtccgtcttggggtatttctagtattgtnt

SEQ ID NO: 20263 - DNA, 1435 bp, Setaria italica
  Peptide Sequence Number=SeqID_86237
tactaaactaaacgtaaagtaaagcgaaagaagaagagacgaaacaaagaaaacgaacttatatgcaacatcatgaacaagttggtgcaacacccgattgttggcaggtcagactgttgcaaaacagatccggggcgttgggtgctcccggttggttgaggacgtcggagttgggggaggggcgccgccagggtggggaacgaggttcccggagtggaggagtgcgccgccgccggggtggacgaggaggacgccgtggtgggggagcgcgtcgccgttggggtgggggacgaggccaccgggaacttgctgtgtgtggagagagagagagctgttggaggactatcttgttcggtgaataagatcatggggataaatatgtgaagggataagattcacgtggacggtaaagagccacgtcgcgtccgatattttgctggcgtcggacgttaggagcttagcattaccgtaggagatttgttcttggtactgccattatgttataagtagttacctaattaccttgctcatctgtagcttttgcatttgaaaggagcacaagtcctgccacacatgtccctgcccccacaaactgccagaaagaatatcttgtgcccagagcgtaccaggtgagtatgatgagtacaatagtccaacagtccagcaaagttacgctggtgatgtacgagtattggtaggccttgacaacagcatcataattttcaggatgacaatatgtttagatgctcatcttctgcatagaaaagcatctcactgaaagttatcggtggcatggattctttgtaaatgctgtgatccttgtactcagtactcacaaagatagttcccctgtacatcgatgaaggccagggccagataccaataccaagcaacttgcagcttccgccgtcgatacaggacaattggcacataaactgagatcagcaaaaggtcgtgaagaaagattgcgtgagtggtgcatcaactcctgcatagatatgtttatgggaacgaattgatgctctctatcgacataatattggttatgaaggattccatcaaacagaaccagtaattcagcgtatacggggtcagcccgatgagaaaattgaggaaatcgggtaccaagattagcaattagggaggagctgaagcttgacgcagccaaggtgaaggcgacaagctggccgaggagtagcacgagcagcagtccccatacatccttcctcttgacctccatgaacctgagcagcgctggccgctggggattcagatgcagaagcaagaggtacagacactgtgtagaacgacgaagacggagctgaagaatgggaggtggagtgcaggactggcagatgcacgtgtcgcatcaataaactaaccctggtcaggtctggatctatcgttatacaagcctcgtactatcgcaatattc

SEQ ID NO: 20264 - DNA, 378 bp, Setaria italica
  Peptide Sequence Number=SeqID_86238
ggcagatgcatggtatccatgtttgggccagtggcagctcgtgtctctcgcaaacagttctgagaacgtcaatgatctccggtacaattgctcggtaagaagtatcagccacatttaagctcacgtttgcatggggatcacttgaaacatcagtgcttctgagatctacctcctgcaagtttgcataaacacaatcttactgaggcaagaacaccaccaaacaaaggaaagtgaaaagacggattacttcggggattggtgtgcccggtagtagcacgtctcttcctaagggcataccatcaaacaggttaagagcataacagcatagcctgcagtctgcagagaagtcgggattggaggatcggtagttcggtagta

SEQ ID NO: 20265 - DNA, 692 bp, Setaria italica
  misc_feature (640)..(692): n is a, c, g, or t
  Peptide Sequence Number=SeqID_86239
agactaataacatacaattcactgatgacctcatttgtcaagaagggttatctgaaacaggtgtgggcaattcttcacgagaggggcggacagctctgccctaatgatgtagcaacatataatctaatcattcagggtcttggccagatgggaaaagcagagtttgctagcacaattattgaccggttgtcaaagaaaggtgtttacatggacattgtcatgtataacacactgatccatcagtttgggaaggttgggaaggttgaagaagcaagctgcttgtttgagcagatagtcagaagcgggatgaagccagatgttgtcaacttttaataccttgatcaatattaatgcaaaagctggtagattaaaggaagctgacaagtatttgaggaggatgattacagaaggcattgcgccaaaccatgccacagaaacaatattggttttccttcataaggagattgaaaagaaaaaggcagaaggccaaatgaactagcaaaaaaatatgaacaaaaacagtaccataacatctgttatctgtattgatcatcacaaggcatgttctttctatattcaaactgaaaaactgcagtgcaaatcatgattatgtagtataaaaaaatttgggtaaaacttnnnnnnnnnnnnnnnnnnnnnnnnnnnnnnnnnnnnnnnnnnnnnnnnnnnnn

SEQ ID NO: 20266 - DNA, 346 bp, Setaria italica
  Peptide Sequence Number=SeqID_86240
tacttcttttgtctattgttgtctaattttgtcctaaatttgtactttggtaattcttggttctaggggtattattccatacacgagggtttgtcaaagccaggaaagctgcgcccctgggatggccctttcctttgtcacagttgccaggaaaagaaagaggcaatggaggggaagcgtcattcacgagactcctcatcaagaaatagcgggtcaagtgaatagtgcccaaggccaagttatcttgaggcaactacctagcggtgtgcacaaccacacaagggctaatgctagttgcaattggcattatcatggtcctggaacagatgtcaagaatagttaggaa

SEQ ID NO: 20267 - DNA, 583 bp, Setaria italica
  Peptide Sequence Number=SeqID_86241
ctttgcatgtgcaatttgccaaattgacttggaatctggtcaggggatatccatacacgagggtttgtcaaagccaggaaagctgcgcccctgggatggccctttcctttgtcacagttgccaggaaaagaaagaggcaatggaggggaagcgtcattcacgaggtataaatttgttctagttctatttcataccttttatcaaatccagcagtatcagcaatcaaatctttaatattacatatgtagactcctcatcaagaaatagcgggtcaagtgaatagtgcccaaggccaagttatcttgaggcaactacctagcggtgtgcacaaccacacaagggctaatgctagttgcaattggcattatcatggtcctgaaacagatgttggaggcgctgtgcttatatacattgaagaagttatacagttctggagtgtagttgcaatctgatagactcttgatacccagcgtctttggtgggacttctggcagtcgcagacatgtataatgccaagagattgttagcgaagcatgtcaacaaaaccgcagcttatttgttctacttctactaccttcttatt

SEQ ID NO: 20268 - DNA, 774 bp, Setaria italica
  Peptide Sequence Number=SeqID_86242
gcgcgtcgcggcggcgggggccggcgtcgagcggcccacggtcgcggcggggcaggccggccgcgccaagaaaggcgaggacctcgcgctgctcaagcccgcctgcgagcgccgccccggcgcgccgtccacctccttctccgccttcgccctgttcgacgggcacaacgggagcgccgccgcggtgtacgccaaggagcacctcctcggcaacgtgctcggctgcgtccccaccgatctcagcagggacgagtggctcgccgcgctcccgagggcgctcgtcgcggggttcgtcaagaccgacaaggatttccagaccaaagctcactcctcggggacgaccgtgacactcgtcataattgatggctccgttgtaactgttgcttccgttggtgattcacgctgcgtccttgaggccgagggatccatctactatttgtcggccgaccatcgttttgactctagtgaagaggaggttggacgtgtaacggaatgtggaggtgaagttggaaggctaaatgtcgtcggtggtgctgagattggtccccttagatgttggccaggtggtctatgcctgtcaagatcaattggtgatcaggacgtaggtgaatatatcattcctgttccttatgtgaagcagatgaagttgtctaattctggagggcgccttattattgcaagcgatggtgtttgggacgctttaactgccgaagtcgcttttagttgttgcacggggactttctccagaggctgcagctgatcaaattgtcaagg

SEQ ID NO: 20269 - DNA, 1407 bp, Setaria italica
  misc_feature (1393)..(1407): n is a, c, g, or t
  Peptide Sequence Number=SeqID_86243
tagtacgttacctcgcactagttccgactcagtcgcactagttctactatttgtcggccgaccatcgttttgactctagtgaagaggaggttggacgtgtaacggaatgtggaggtgaagttggaaggctaaatgtcgtcggtggtgctgagattggtccccttagatgttggccaggtggtctatgcctgtcaagatcaattggtgatcaggacgtaggtgaatatatcattcctgttccttatgtgaagcagatgaagttgtctaattctggagggcgccttattattgcaagcgatggtgtttgggacgctttaactgccgaagtcgcttttagttgtgcacggggactttctccagaggctgcagctgatcaaattgtcaaggaagcagtggaatcaaaaggattgagagacgataccacttgcattgtcattgacataataccaccagagaaaccaaaatccactatagaatctccaaaaacaccaggaaaaggccttggccttctcaaaagcttctttttgaggaaaacagcatctgactcattatctcttgctaccaaagataattattccgaaccagattttgtggaggaagtctttgaagatggatgtccatccctttcaaggaggcttaattctgaatatccagtccggaatatgttcaaactctttgcatgtgcaatttgccaaattgacttggaatctggtcaggggatatccatacacgagggtttgtcaaagccaggaaagctgcgcccctgggatggccctttcctttgtcacagttgccaggaaaagaaagaggcaatggaggggaagcgtcattcacgagactcctcatcaagaaatagcgggtcaagtgaatagtgcccaaggccaagttatcttgaggcaactacctagcggtgtgcacaaccacacaagggctaatgctagttgcaattggcattatcatggtcctgaaacagatgttggaggcgctgtgcttatatacattgaagaagttatacagttctggagtgtagttgcaatctgatagactcttgatacccagcgtctttggtgggacttctggcagtcgcagacatgtataatgccaagagattgttagcgaagcatgtcaacaatggccaatagtcatgtatatcattcatcgtatagaggtgtgagtgacaaatagctgcggttttgtaattctcgactagaattaggtattgagaccctgtaattcatctgagcagacctcaattaaaggtcaacgacagtgtagctcgtcctcgtcgtgtagaatgtatgatgccctaaaatcttcatgattcaacacactgtaattactacatctaagaagatcgttgcagatcctatgattttgtttacattaaaaaaannnnnnnnnnnnnnn

SEQ ID NO: 20270 - DNA, 342 bp, Setaria italica
  Peptide Sequence Number=SeqID_86244
ctgaacaccattctggccatttctttgctggcaccctcatctgaaccgcgtggtcaagtatgagggggtgctatctggctcagttgctggccaacctatctttatcttcaattgattgattaattgccagacacttagacgaccaaccaccagagccattgatacttgatcgcataccaccaccagcaaatctccaagatggctgtctgtccacggcatgcatcccaggcccctcatcctcatgccagccactgcattctgatctgatctgaaacccgaatgcattctgatctgacaaacagtatactcaaccgcccccctgatcattatccaaacaagaga

SEQ ID NO: 20271 - DNA, 1598 bp, Setaria italica
  misc_feature (1)..(42): n is a, c, g, or t
  Peptide Sequence Number=SeqID_86245
nnnnnnnnnnnnnnnnnnnnnnnnnnnnnnnnnnnnnnnnnnggacacgaactacaatgaataagctcatcctatatacatggttcttcttttcactatatgcgctcattagtattacaaagaaaaacgataactggaacagaagccccaactatattcagcatttctttttttcttccacaccatatgtacctcatcccgtttagaagaccaggttgcatcagtttcctataacctgacagtacagagtattcttacatcgcagacatgcctggatatttctaacagaaccttttaactgccgtgacttcacatcatccacacttcgcctatgtcccttgtttttatcctcccattgccagaacattggaatgacatgtaaaaatagcaccaggaagcagacacaacaaggacagggaggatcactgtgtttgatctccagcttgaacaatgccattatgtccgttcattttcaaaactgtacagtcgagaatctgatagaacagaaaacatctgtgtctccacaaagagctttacaaatgggtgatcttttgaggggaacgaatcaatgaaactgtctttcagaagcaaagaaaccctgtcattgttggactgaacatttgtgatggtatgaaagcgcaagtcagagcaaagtgattccaagtaggatctcattacatttaagaactgccaagctgcttcagcctgaacttcattgcatttatagatgggatgcctcttagccaaagcattctcacacgatagtctggcatgaattggaccgagatcagaaacaagctccttgtaacgtggaagttgaggcaatgaacatgccttcacctgatctttctgtacattgattctgacaagactagatcctttcatcttcatatcagggggtttatgttgtacaccagcaatgaaaggtacaggggcatcaagaaaatcaatcaatttccttggtagaacgggaagtaacaaactttgccactggaatggccttatcattggtataattgataaaacaattgcggacaggacacccagatttgggcatattaccacagtttgcttctccagcagaactccagcaaataatcactttccagagatagagcacgacaaagtgtagctgtagtccatatcgataatgcaagagcttcttctgcagccgccaaacgtgcattgaccttatttgtttctgccaaagtcaaaccattgtctaaaattgtctccccaaaacccaacaaggataatcctgcccgggagtatttcacaggttggagatgttcaagggggcggaatacaagttcaccaccacgaggtggcagaggaagagcatggtaaccacaaacaatttgtagaggctcattattgtgtgccttagcccatcctataactttttcatcatcaacaatcatttcatgcttcaaacttacttcatcttcgtcatctgaccgagcaactttgactgaactgtctaaaaaagactccacgctttgtgcacgctctaatcttctagagataggagagtgcatggacagaagatctggggaagtttgtccattatcatgtatgtaattttccctcccaaagct

SEQ ID NO: 20272 - DNA, 459 bp, Setaria italica
  Peptide Sequence Number=SeqID_86246
acaataagactaataggctagggattcacttaggcaccgagaagaggccaagaagaagcaggctgagctcactgaattggagaacgaggccaatgagctgaagcagaagaatgaagaggagcgggtggcgatccagggcttggaggcactcctaataaagaggaagcggcgagttgagaaatgccatcgcttggcggaggcccagtccaactacaaggccgtgctggagaagatgatcagagatgccatgcaccagtctgttgtgtacaaggaacagcttagactgaaccaagccgctaccagcacactcatggccagattggaggcccagagagcaatgtgtgactcatctgaaaccgagctccgtaagaagtaccagcagagagatgatttggaaagacagataaagccagaaaggaagaggtatcgtgttgatgatggattgctcgaggaaaggcg

SEQ ID NO: 20273 - DNA, 922 bp, Setaria italica
  Peptide Sequence Number=SeqID_86247
cccccgtgggctccgtcgtgggcgcgctggggaggtggatcagcggggccgtgccgccaccgccgccgcccagggtgtgcgggacgccgggggggccgccggtgacggcgcccaggttgcgcctcagggacggccgccacctggcgtacgcggagtccggggcgcgcaaggaggacgcgcggttcaaggtcgtcatctcccacgggttcaccggctcccggctcgacaccatccgcgctgcgccggaagtggccgaagagctgggcgtgtacatggtgggcttcgatcgcgccgggtacgggcagagcgaccccaaccccaaccgctccgtcaagagcgcggcgctggacgttgaggagctcgcggacgctctgggactcggccccaagttttacgtgatcggcatctccctcggatgccatgccgtctggggcgccctcaagtacatccccgacaggatcgctggtgcggccatgatggcgccagtggtgaactactggtggccgggtttccccgctgacctggtcgcggaggtgtacgcgaagcaggaggtgggcgaccagtgggcgcttcgcgtgtcgcaccacgccccgggcatcctccactggtggatggagcagagctggctgcccacgtcgacggtggtggccggcacgacgccgctccccaacaagcgcgacgccgagatccgcagcaagatgaaggaggacggcacgttccagcagaagatggagcaggcgacgcagcagggcatccacgagtcctactaccgcgacatgatggtcatgttcggcaagtgggagttcgaccccatgagcctgccggagccgccgtgccccgtgcacctgtggcagggcgacgaggaccggcctcgtccccgtggtgttgcagcggtacctggccagccgactcagctggctcg

SEQ ID NO: 20274 - DNA, 588 bp, Setaria italica
  misc_feature (582)..(588): n is a, c, g, or t
  Peptide Sequence Number=SeqID_86248
agtacaatagttacggacaagcaagatgaaggaggacggcacgttccagcagaagatggagcaggcgacgcagcagggcatccacgagtcctactaccgcgacatgatggtcatgttcggcaagtgggagttcgaccccatgagcctgccggagccgccgtgccccgtgcacctgtggcagggcgacgaggacggcctcgtccccgtggtgttgcagcggtacctggccagccgactcagctggctcaactaccatgagctccccggcaccggacacttcctgtcgccggtgcccgggctgggagacaccgtcctgaggacacttttcggttgatgagcaggtcgtgcaggagccagaagcagcaacagtttcagaacgtaaggacgggtgctaaacctaaagtatagagttgtggtgcattagtttcatttgttgtaaggctgttggttagttgtcgctgattagcgatgataaaatgatcatgatgataatatagatgcaaggtcgcagtgcctgcaagtatatgctcagagttctgccagctgtgtacctgtgatatgcacgcacaacgatcaggcggnnnnnnn

SEQ ID NO: 20275 - DNA, 325 bp, Setaria italica
  Peptide Sequence Number=SeqID_86249
gaagtccgcgccgccgttgctggccgccgcggctgcggcggcggcgacgcgctggatggccttgggcgacatggcggcggggggcatgtcgaacgggaggcgcagcgggaagttgaggtcggcggcggagcccttgaggcagagcagcgcggcgtcgtaggcgcgcgcggcggcctcggcggtggagtaggagccgagccatatccgcgtcttctggttgggcgcccggatctccgacacccacgagccccagctccgcatccgcacgcccttgtactgccgcttcccggcgccctgctgcctcgccgccgccgccgccgcattc

SEQ ID NO: 20276 - DNA, 1495 bp, Setaria italica
  misc_feature (1)..(67): n is a, c, g, or t
  Peptide Sequence Number=SeqID_86250
nnnnnnnnnnnnnnnnnnnnnnnnnnnnnnnnnnnnnnnnnnnnnnnnnnnnnnnnnnnnnnnnnnngttcagcagcccccagcaaactctttccatttcttaagtagaactacatccaggatatacatgttttgtacaattttatcagtcttgtatcttcctttttctcccacaagacctacagcaatagctgtcatctggggccagacagctcaattggctctattatgaaggacgacgagtcatgaggatcctcgtgccttatggagaaactgtaagtgcccccataaggaacaggttccctatgcaactcaatgctgctctcagccagagtgacgttagcttcaagagcgtgtagaacttcggacatcttaggccgcaggataggatttgtctgcgtacattggatgatcacgtcgaccgaacactctagctcagcaacatcaaatgaatccttgagatccctgtcaaccagcttatccagtttcttttcctccttcagttctctaacccaatcaagaatcatgcccttctgagagtgggcatgtccattgctcaaggttttaggaccagtaatcagctccaacaggagaataccaaacccataaacatcagtcttttctgaggactgtccagttgagaggtactcaggagcaatatgcccaatagtgccccgaactgcagtagtaacatgtgattcttgtcggtcaagaagttttgccagtccaaaatccccaacgattgcttcaaaactttcatcgagcaatatgtttgcagctttgacatccctgtgaatgatcttaggattgcattgttcatgaaggtagagtaatcccctggcagccccaagagcaatccgcatgcgtttactccaatcaagagatggttttccattacagtaatctctcaatcggtcagcaacactgccattatgcatatatggatatacaagtaatcgttcattcgaggtcatgcaaaacccatacaagcgcaagagattcctgtgcacagcaagaccaatcaactcaacttctgtttgaaattgaacttcaccggtaacatcaggatcttttagtctcttcactgccactaaagtttcatttctcagacagcccttataaacaataccaaagcctccttgacctaatatattcttcgaattaaaattgttcgttgcactttgcaggtcatgaaatgagaaatgcttcagatgacccaattcaaactctagatcttgatcagcagaagcaaaaggcaagcgccatctgcagcaacttagccaatacacgaacaacaaaactaatattgtggaacaagtgacgcttagagaaattgccagcgctaattgatgatggttcttggccttttgcacctgtctagacaccgtcccattagtcattgctgtaagatccgaacaaccatgtataacggatgagttgcaaaggaatcgatttcctgcaagactgtagtcatgtgcatactaattggttagta

SEQ ID NO: 20277 - DNA, 633 bp, Setaria italica
  Peptide Sequence Number=SeqID_86251
accttacaatttgtactacattgggaaagatgggttatttatacagacggtggtagcattaattatcttgggcaatgaaggaagaaagaaagaaaaaggtgccgagaatttcttggatggcttacatctactaaagaattgagaaggttaatatgacttacatttgtagtcaaagggagtagggtattcccccaaatgtatattagtcttttgtggtgtttacctgtgagctgataaaagtattacttattagcatgtcaggaagggtacaaatggtggagtgaccttacaaggacttcttgctgctaccggaggaggcctgctcattggtctcacattcattattgttggactgttgacagctgaatgttcttttgatgtggccctccagcagctcctagtactacccatctctgctgcggctggtttgcttggaagtctaattgattcattgctgggagctacacttcagttcagtggatactgcagtgttcggaagaaggtcgtcagacaaaagtggtcctactgttaacaaagatttctgggatgactgtccttgacaatgatagtaaatgcacacaaaagctgtaagtatagttgttagtaggatagatactgcattaatagcatcat

SEQ ID NO: 20278 - DNA, 1401 bp, Setaria italica
  Peptide Sequence Number=SeqID_86252
actcccccaaaattcgctccaccggcggctcctcgtggtccggtcgcagactgcagctgagtgctgaccccgcgcggcaccgggcgtccacgccatggtgatccctgccgccttctcctcctccctcgtagtccggtcggccgtcggcgtgttgctggcggccgccatcgcagcgcgcgcggtccgccggcgctccctggacgcctcggggcgggatcgccggcttcgtcgtcatggcggtccacatcgcctgcggctacaggtacggcgcggtgctgctggccttcttcttatcctcgtccaagctcaccaagatcggggaggaccgcaagcgccgtgtcgaggaggagtttaaggagggcggtcaacgcaactggatccaagtactagcaaatagcacaattgccactatactagttgtgatatttgaaataataactggagggcaagatcagtgcttggactcaaatggctcaaagattataactggtattatgggtggtattattggccactactgttgctgcaatggagatacttggtcgtctgaaattggtgtgcttagtaatgaacaaccacggcttattacaactctgaagcatgtcaggaagggtacaaatggtggagtgaccttacaaggacttcttgctgctaccggaggaggcctgctcattggtctcacattcattattgttggactgttgacagctgaatgttcttttgatgtggccctccagcagctcctagtactacccatctctgctgcggctggtttgcttggaagtctaattgattcattgctgggagctacacttcagttcagtggatactgcagtgttcggaagaaggtcgtcagcaaaagtggtcctactgttacaaagatttctgggatgactgtccttgacaatgatgctattaatgcagtatctatcctactaacaactatacttacagcttttgtgtgcatttacatcttttaaaaatgatttgtgaagtttcttcacttgtttctgatcttcgttctcatttacaaacacaaagggtctcagaataatagtgacatgagtatacctagccacatagggctgcttgatggcaaaatctgttcgccttgatgacttggagcaaaacttggtttgaatgctagtatgagttgaaaggtgttggttatgtaagcatacatgtctgtataatcatgaaactagacatagataatcttgaacagagcaatgtattgcaccctttccttgtcatgacactggaacaatttgcaacttctatgtattttgatagaattttttgtggcacaaagctgtaagtatagttgttagtaggatagatactgctattaatagcatcattgtcaaggacagtcatcccagaaatctttgtaacagtagg

SEQ ID NO: 20279 - DNA, 409 bp, Setaria italica
  Peptide Sequence Number=SeqID_86253
accacaacaccttacgccatggcaaccgagagcgagttcgtgacggcgccgtcaacaccggaggcggacagcttgaagatcgtggttgagcaaaggcttctcctccacgacgacggcgagggcgggagcagatcgacgaccatcttccgggtccccgcccatgtccgcgacgccaacaaggagctgtacgagccacgcctggtgtccgtcggcccctactaccgcggtcgggcggcgctgcgcgccatggagcagcacaagtggaggtacctgcgcgagctgctgagggagcgtcgtccgcggaccttgctggcgaggtgcgtcgaagccgtccgcgacgtcgagcaccgggcgcggtgctgctacgttgagaggacggacatcttcgacgccgccgccaaggcggccg

SEQ ID NO: 20280 - DNA, 532 bp, Setaria italica
  Peptide Sequence Number=SeqID_86254
ccgtcgtcggccgcgcgcctcgccgcggtgggcgccggcgggtccccgaaccaagccgccgtcgtccgtggaggtcggcgcggacggcgcggtgcggctgcggatgcggctgcccaaggcggaggtggcgcggctgatgaaggagagcagggaccccgccgaggccgccgagcggatcatgcagctgtgcgtggccagggaccagggcgccgccgcggccccgccgccggtggcgcgttccgcgctgtccggcaggaacgcgacgacgacgactgctggcttgaagagagagaagcgtacgaggttcatggcggttcctgacgagatcatcggatgacacggcggggatctcaaagcatactcttgctttgcctttcttcttgggtttttctccctttagtcgtcgatcgatctcttcggcgagagagggctagaggagttgctggggcttggaacatgagaagctgctcggacacctatggcttcctatctaatctccctagcaattccccaagttctttttaagcttagg

SEQ ID NO: 20281 - DNA, 528 bp, Setaria italica
  misc_feature (511)..(528): n is a, c, g, or t
  Peptide Sequence Number=SeqID_86255
cgcgacgacgacgactgctggcttgaagagagagaagcgtacgaggttcatggcggttcctaaagaaaaacgaaagaatacaatcggatgacacggcggggatctcaaagcatactcgttgctttgcctttcttcttgggtttttctccctttagtcgtcgatcgatctcttcggcgagagagggctagaggagttgctggggcttggaacatgagaagctgctcggacacctatggcttcctatctaatctccctagcaattccccaagtctttttaagtcttaggcaatctcagaaaaaaagaaaaagtatatgtagtagtagtagttaattaggaagcagagaaaaatgaagaaaagctttgtactgtactggtgtgagacatggcatctgcagactgcagcaaccaccatgatcagacgatcagtgtgaatgagtcactgaatcagaatgtatatatataattagcaagatattactacatattactttttctttttttctgagatnnnnnnnnnnnnnnnnnn

SEQ ID NO: 20282 - DNA, 1943 bp, Setaria italica
  Peptide Sequence Number=SeqID_86256
aggaggctacaagttggtacaatagataattttatttcacagggttaacagtttgatacggcatttcaactgctgaaatgtgaaagctgaggagcgagtgttttagagtaggaatccttttttaaataaactgagtacggttttcatcaaaaagcatatcagcatgaggataatagttattgcaagaagcagaactcatgtgcatggtactattatttgaattttcattgtgaacttcccattcccaacattctaacttgctcaattgtacatgtactacagatgtgctatgcgcctatgccgtcctcaattccactatggccaaaaaatgaaaatagatagaagaactgtagccaaatagtgtaaaatccaacccccagctcgaattttcttcttggacagcatggatgaggatgcagatgaaggtagtagacctgagacaccgatgtcatatgaaatccttccatcaggaaggaacagcccatagtgcttctcggagccagctccaggtttcccattctcattaaacaaggcaaatatataagctttcactggtctatttggcttcagaggagttcccttcctcaggaagagccgcttacggagattgaaattatatgtccttgcattctcagatgaagctcctgcttcactttgatctccactagaagcccagcctgtctctgccacccgaacctccatgtcatcataccctgcggcatgtagagcagcataagctgcatctatctgagcatcaaacatgttgtcatagtgcaggctgttattcggatcaacaattccattgttgggtttaaagagagcataattgatatcaatatgttctggatcataagtgtaagccaaaaaggggtacgcgttgacatagaaagatgagtgagtcgttgcaaataagtccaggagaggtttcatgtatggcatgagttcttccttgaagacacatgcagagggcggataagaagtagcaaaaacagcttcagaatgaggtgtgaaaatctcaatctgtttctccaagtggagcctcttaagtccattataaacattcttcacagcatcaacaagtggctggtacaagctctgatcttggcctcccagaacctcgtttcccacagtgatcccaataatgcgcgtctcagggagataaggcttcacattctgatttagccagtccatcgacttgctctcgtttgcagccatatccttgacaagcccgttggggattgcaatgaccaggttgagcccggaccctttgaatgcatcgagaacgctgtgatcagagtcatatatcttgacatttcttatctttgacttcctcaggagctccaccactttatccggggaagggaggttgttcgctattctcccatagtttatcccataacccccgacaaaatcttcaaccgctagcgaacctggtagcgggaacgccaggaggcagcagcagaggagcagcaacgtcgtaggcgccatcctctcagtgccgcaatccctcagcgaggagcaagaaccaagcaggagactgccacagcaggcaccagcagcgtcagaggggcaggcaccagcagcgtcagaggggcaggcaagcagcgccttgctgcgcacttcaattccgagccgaagcgtggcgccggggccgcaacttccatagacggactggggccgctccaaggccgggcaccggcggctgctctccccccgccgccgctgccacttcagccgtcgcacgggaaagagaatcgccaagaacggaaaagaacaacggatccctcacttcccacacaccgagactccacggccgccgcaattaccaaccaccaacaagggcacggcaagaaggaatcttgacccccgcgccgtcctctaacacaggactgtacaggtagcgcagcacaggactagcaaagcgaagtggtggaaggatgcct

SEQ ID NO: 20283 - DNA, 391 bp, Setaria italica
  Peptide Sequence Number=SeqID_86257
agaactgaccctcagaacgatccatccagctgcttccttaccaacaaaaggagaaatgcgcccgactacctccgaatggatctgcacttcctgtacaagcccggacgtggctacagtggcggcggcagtggaggaggatggagaggggaactacagaggggtattcgagccggcgtgcttcggtggaggtagtcaactctcaaggagcgctcggtggcgcggccaggcgaggacgggctcgtttggtagtggcaggcgccagcggtgagggcgacgacccggccgccggcgaggcgccggagaccggccaggcgaatctgggatcaggaggaggcagggggcagggaggacagcgaggcgagtcggcggagttgggaagagccggcggcga

SEQ ID NO: 20284 - DNA, 364 bp, Setaria italica
  Peptide Sequence Number=SeqID_86258
tgattaccgtaattgaccttcacgttctgattcaacgggagcaacagccagaaaactagacagccatacagcacattagtttgatagcctatttggatatgcagtgatcttcaactttgattctaaatccttgatacacatacacacactgaactaagatactttatttttcttcccagtagagcacctaaggtaacttttagtgtacctcgatagaatgccgaagcaaaagcccccaccgaatcaacacagctcgttccttctcccagtcacctagtaggaatcggggctccgattcgggtcccctcccacctcccaggcggctttcgtcgacccgggcgaatcccccgccgctccctgttcc

SEQ ID NO: 20285 - DNA, 703 bp, Setaria italica
  Peptide Sequence Number=SeqID_86259
agccacacaaataatggagcatgtggatgttcgttccttgataccgatagaacagaaatagctgctataatctggctcacattcacaataagctcaattgagatccagaagccagaattcagaattctggcttctggatggcctcgatctcttcttgcagaagatgcattttgagagttaggtacgtcatgcgtgccagaagaactttctgggactgcgggaatttcatccggcggacttctactgtcatgaaactcatccaagtcactgtggtcgtcctggtgagatgctgatggggaggtaacatcatttcttggtatgtcaattgtgtgatcacgatggcctaaatttccagtgtggtccatcaataaagggtgattaccgtaattgaccttcacgttctgattcaacgggagcaacagccagaaaactagacagccatacagcacattagtttgatagcctatttggatatgcagtgatcttcaactttgattctaaatccttgatacacatacacacactgaactaagatactttatttttcttcccagtagagcacctaaggtaacttttagtgtacctcgaggaaagtaaagttaataccaagagtcaaataactgccaacctgcttgcttaaattatgatggactttgtctaaggtaagacacaatatgtgactagacagaattagactagaagg

SEQ ID NO: 20286 - DNA, 352 bp, Setaria italica
  Peptide Sequence Number=SeqID_86260
gctccaaaggccccaaatctttcttcctgctcaaaccaatttttatccatcccatccaagaaagtgattggatagcgcgcgcggtgcaggcgaggaggagacctcgaagccgaagacatcttgcttccggccggcgatgaggaacccgccgggcaggcacctcctccgcctcagcaaccgcgccgtgcgctcttcctcctcctcgtcggggctcggcgccaacgcgggcgcctcaacctccgttgcatccccgcgcccactccccgtcgccggcggccgccccctccgcgccagctcgcctcccccgccctccgcggtcgccgccgccgcgtattgggagtcccgcgcgctc

SEQ ID NO: 20287 - DNA, 179 bp, Setaria italica
  Peptide Sequence Number=SeqID_86261
catttcgagtggtgctcaaaatgaacaaataattcaaactagcatattctagtcaccttatacagtaacaccaccaacaactgcactatgctttatattactagcctggattggtttgaacagccagccttgtgtagttgttggtggtgttactgtataaggtgactagcatattctag

SEQ ID NO: 20288 - DNA, 781 bp, Setaria italica
  Peptide Sequence Number=SeqID_86262
gatagagtcgacaccaaagttagccgggccactttctgtcaatgaactttcctcaccacctgtgcatacatttttcctaggtatgaaaagtgggtaaactttgctctgggactgtcgtgtactccagtaagaacttcgctgccaaatttgtgagcatgaacccttaaagcctgatacatgaagagcaggtgcagataggatatgaactgcaatattgatgaaatgtagcatgtacctgggtctgaaggaggcgaaggagctggtggagaaggcgcccgtcgtggttcgcacggggttgcccaaggaggaggccgaggcgctcgcggccaagctcaaggccgccggcgccgccgtagcactcgagtgatcccaccaaggtgtcccctcttttgttcctagtgttcttagacgatgcaacgtacgcgtgcgccttatttgttttgaattggaatttgatgggattgcagcggtcgggcaggggtattgcgttcttgtagcttttgtccaacctcaagcttaatcactgatatgagtgatagatttgtccggaatcacacgataagttcttcctgcactatgctttatattactagcctggattggtttgaacagccagccttgtgtagttgttggtggtgttactgtataaggtgactagaatatgctagtttgaattatttgttcatttcgagtggtgctcaagtgaaatgcctccattctctttgttttggtgcatgacactatttgtgattgtattattaaaggtaaagcttatgttaaa

SEQ ID NO: 20289 - DNA, 400 bp, Setaria italica
  Peptide Sequence Number=SeqID_86263
cactggtccccgcttccgccgcctttccacggcggcggcgaccgccgccggcgaggaccctaagctgtcgcggatcgcggacgagctcctcgccctctccccagccgaactggacgactacgccgcgctcctgcgcctcaagctccgcctctcgctcacctccagcgcggccgccggtggcgcctcttcggccggggccggggacgcttccgcgggacccgaggaggccgccgcggcggtgaagacggcgttcgacgtgaagatcgagaagtacgaggccgcggcgaagatcaagatcatcaaggaggtgcgcgcggtgacggacctgggtctgaaggaggcgaaggagctggtggagaaggcgcccgtcgtggttcgcacggggttgcccaaggaggag

SEQ ID NO: 20290 - DNA, 1418 bp, Setaria italica
  Peptide Sequence Number=SeqID_86264
ttttttaatattcaaccaacaatcaggcattttattacctttgtaataaacgatataaacttatatttacaatttacagggatgaacatgtacatattcagcagatcaaccctatcctacaatgcccttctgcagtctacagtgtgaatgactcagccacacggtgagcttcgttcagtactgaacccgaacctggtcaggtgcacatatctaactgaagctcttgcagtgttgtatcagtttggtcttcagagagttgtaaatataagtcatttctttttggtaccaccatcagcatacatggctctctcccactgcgcgacattttcaacgtccgagggcggtggcggtaggacctcacgctccaccagatcccagctatccaagatgttgtctggcacgccaccgtgcttcaccagcttaccggtgtacaagaagctctcatttgagttcagaaggaggttatccagagtgcttggcatgatggctgtgtgaatgctgtccataaaactgctgtcagatgatatggccgagcttgccttccaaatagatttgtttagctgctgtgcttgcttctctgaccttgaagcaatgttcgattcaagagcagctcgaagggcctttgacgatgataacatatggagcaactttgcaaacgcctcaaaagtagaaagattggatggcacatccaagcccagtgagttataatagtaggtagtaatggcagtaacacttgtctttaatagtgatattcctctttgcaaatattgatgcctttccatggagtgggaagatccaccagaaaagttgaagctattgcttctcttcgaatcaaaagagtgtttcttgacagaatcgatagagtcgacaccaaagttagccgaaccactttctgtcaatgaactttcctcaccacctgtgcatacatttttcctaggtatgaaaagtgggtaaactttgctctgggactgtcgtgtactccagtaagaacttcgctgccaaatttgtgagcatgaacccttaaagcctgatacatgaagggcaggtgcagataggatacgaactgcaatattgatgaaatgtagcatgtaccccaaagcagctgatagctcttctgatggaacagaatgtggatcaagaccacgaggaagacgagccccgcatatcgaatcatatggaccagtgtagtcttctttcttttctccctctttaataactcgtcgcattgggaacagtctgcaaagttgctttacagattttgattgcattttcaggcgctcggaggtggttgccatgagattcatctgtgcgactttcatggcattggtgtgcatcgtcactgcgtcagctcgcctctttttcagcgtaacaaaagccaaattcagcgatgccgtttgtgccttgagatcactcgatga

SEQ ID NO: 20291 - DNA, 2251 bp, Setaria italica
  Peptide Sequence Number=SeqID_86265
ctgcaatcaagctgaagtggttccaccaaccagcactcttcgcacccgagggcctatattacaccgttaatgcacaatcaggaattcaaaatgcaaacagaggataagaatgcacactttgatatagattaagaacccctaaatgcatctaaattaagcactaatcatcaaaacgtccccatatgaggatacatccaggttacatgcgaaatcatttatctttactacagtatgtaccaccaggtaggccacaactgctggtgtgttctcgttggcatcaaaacttctagcagaggggcaaggtagtagctaggggccatcttcacacaatggtgaacctctgactgtcaggaaactcattcctctgtagatggggtagcaaatcttgctcttctgtattccttgagaagatcaatctccttatacagtccttccattctgctccacagtgagttgacagagagggtccactcgtcaagctttaagaaccattcgttctggaatttttcaatcattgcatttgccgcagcaagtttttgccgctcctcctcaaaccgcattctctccaactcactcacactaagaacaagacccccaccaccagtaacatcgccataaagaggcttgttacaagggaacttcttcctgtactcttcaaaagaagcctgggtctgtttcaaagcttttttgtagccagtgaccaactgggccataacattcagatcatgctcaaagcgtctaagctccgcttgatacttattctgttgctcaaaccgagtggagtttagggtttggataatcgcgtctttctgctgcagcatgtcagaccaatgttgtttctcaaactgcaaattttgaagttcttgctccttctgctcatagagcctgcttgcctcaaccatcaagttctgtataggtaccgaaaagtttgcattaaaaaagcctgatccaggtgatatgctgctactgttgctatgccgcatcctcttttgctggttgcactgaggaaactgttcttgtgcctgcagattgccattgtacccatcaatatcaccaatttgcctcttaccattattcccaaataaatatgagcttcctggttccaagtccactccattcttatgtgcatcagcccccatagacaagaattccccagataggccatgcacattctctgttatgttgtacgatgagggaattgagttcatagcctggaggaggtttgacgatgtcatcctttccaaagatccccttccagagaaatcatcaaaccccagctcatccctcatctcggcctcccctttattcaagttctcaaactccattcctccaaatgtattacagcgctgtaaggagtgtgtcatttcctcgtcctcgttgccatccccactgtcgtccccaattctccaactcatgtcctttccaccattaaccccctcaaatccatcatcctctgactcctccgcgtcttcattgtcactgtctccttcatccagattttcaatatgtgtttcctcttccacatccatactatcataaccgtttgtagaattaaaacccaagctcaaccccatcgcatcgctctcttcctccccatcagcctcctcatctcccacctcctctgctacagccaccacttcctcctgtgtcacaactactgtctccaccaagggctcttcaccgtcttcttctgaagcccctgccacatcatcaccctctgctggttctgcatctcccgcatcctctttgtcgtcaggcatcgcctcagcagacaccgcttcaactgccacaaatcccaaacccgaaccatccatgtttgtgccatttacatgcccatcaatcatccctgattcatccaagcttgtacccttatcatcctcatccaccgcctccaattcatctaagttcttgcccctcccatcctcatccactgcctccggttcatctaagctcttgctcctcacatcctcatcaacagcctcagatttatccaagctttttccccttgcatcttcatcgaccacctccaattcctctatgttgttcctggcatccgcatcacccagacccaactcctccaagaccttgttccttgtaacaagatcccccaactccatctcgtccaagcccgcactcctcacatcagcatttcccaattccgactcctccaagctcttgcctctcacatccatatctgcatctgcctctccatcccccagctccagctcctccaagctcttgctttcacatc

SEQ ID NO: 20292 - DNA, 286 bp, Setaria italica
  Peptide Sequence Number=SeqID_86266
ctcggcacgaaggccggacacagagaaaaggcgggggcttggctcacctaggggcttgacggggccggtcaggtatttcgtcgaacacgtgttgaaggcgaggtggatggcagccgtgttgtggtagaagaaaggcagcagcttggatggatggctcactgatgggctcgtgggggttcgaggcgatgcagggaggcgtgggggccgtggcgaggtgaggcagggcctgctcggtgcaggggcagcagaccggtgtcgcggcgagctcgcggttcccctggctcgg

SEQ ID NO: 20293 - DNA, 476 bp, Setaria italica
  Peptide Sequence Number=SeqID_86267
tcttgttgcggttcggcccttggccaagctcgctaaaactgggcgacgcgcgcgccatcatcacaagcggggcgggcgtgccgcgtgcgtgtgctgctgatggggaccgtgccttgtgcaggcgacgcacgtgcgcgtgctgcactggtggccagcgaagaagtatccgcccgcgccgtcgagttggttctctcttggcagttcggtactcatgactcctgcagcaacagtacattgtttcaacatgtatcacctgcttcttgcgagcagcttctttctggtggtgaagaaatggacttatatcaatacaaccattgcgtttctcaactgagttgtaagttgtaactccaaggttagttcgaaacacttaacttcaccagcaaatttagtttgttccaatcacagtgacaagttcataagggttcaaaatttttaagtacgaactcataaaagaaactgtcagttaacttctcttt

SEQ ID NO: 20294 - DNA, 1347 bp, Setaria italica
  misc_feature (1)..(60): n is a, c, g, or t
  Peptide Sequence Number=SeqID_86268
nnnnnnnnnnnnnnnnnnnnnnnnnnnnnnnnnnnnnnnnnnnnnnnnnnnnnnnnnnnnctaaaatgtcacgcaagtttagacagcttgattatttactacaattagcagaaaaaaacttagacttaaaagtcaaacgtgccgaatatgaggaaggctttagacggcttcatgtgcttaccacacttaggttctgaatggaaactatcagtgtgccgttgcaatggtacaaattccggacatacaaaacttgttctgactaaaaaattgtgaacaagaaaactttctgatagccttctgttgctttgactactccccacagtacaaagctaccagcccagagaagtttggatgttattttacacgttacagcttatgactggacatatcaagagctctatcatataatgcacatgcatacccgatgtaggactatccaagtgaagcagctcatctgaacaaaaccgaagatggaaatccaataagcacagttggagggcacactcaagtcctcttccttctcttcttacttcgcctcctttcactctcatcagagcttgattccgactcggactcagaactggaccctgagccggagctttctgaaccagattctgatccgcttgattctgattcagatgattccggcttctgctgctgcattatgaggcgcggcatgttcttcaagtactccctcaggctctccgtgataccaccaagaccaatggaggtgaagaaattgatggagaaccttgtattctttggatgatccttggggaagattgactcgaaggaaccttgcatgttaggatcattaagtctctcattgagtaggcgtatgcccaggtgctccgataactcctggaatagaatttttatgaaaatccgagaagaggatgttgtgtcttcctctgtcagccggatgtaagccaaaacgtgccaagggagtgcatcagtccccaacaaatgtgcaaagaacttggcaacattcctcaacttgttcgtttcaaggcgatgaatcatcgaatattgttgcacaaaacatttttcaaagttctcttggtacactttgttgatcatgcaaaaccgctgtcctagcagcccataataccgaagatatgtcctctcttgactgcaacactcaagcagcataatacacagctccatctcttgaccaggctcaagtttaattttcataagcttgtgaccagcttcttcaaaatcaacactggacataatagtcaaatatatagttcttcttagattcacaagatttgtctctgttctatcccttatctccatctcttcctcgtcctcttcttcatcagattcttcctcttcctcatc

SEQ ID NO: 20295 - DNA, 1488 bp, Setaria italica
  Peptide Sequence Number=SeqID_86269
cgcgctagggtttcggatggggaggaggatggcgaccgccggagaaggcgggctagggtttccgacgacgagaaggaggatggccgccggcggaggcgggctagggattcggatgaggagagggaggaccgccgcggcaagcgcgaccgggagagggacagccggcgccaccgccgccgcagcgccagctcggagtcgggatcctcacccgatgaccgccgccggcgccgccaccgccgagatgagggctcgaggcggcgggatgaccgaagacgcagggatgacgaccgtggggagcgtcggaggagccctgagaagaaggaaccgacgccaccccttcccccacctccgccgctgctgccggagatgatccctgggcgcacgggtgggatttacatcccaccattccgcatggcgcagatgatgcgggaggtggaggacaagtcgagccctgagtaccagcggctcacctgggatgctctcaagaagagcatcaatgggctggtgaataaggtcaatgcgaccaatatcaagaatatagtgccggagctctttgcggagaaccttgttcgtgggcgggggctcttctgccaatcgtgcatcaagtcacagatggcctcacctgggttcaccgatgtttttgctgcacttgtcgcggttgtgaataccaagtttcctgagattgggcggttgcttcttgttcgtgttgtgctccagctcaagagggcatacaagcgaaatgacaagccccaattgcttgcagcaaccaagttcatagcacacctggtaaatcaggtggtggcacatgagcttgtagcgctggagcttcttacggtactccttgaaaatccaactgatgatagtgttgaggtggctgctgggtttgtcaaagagtgtggggccatgctacaggacctatctccacaaggtcttcatgctatttttgaaagatttcggggcatacttcatgaaggagaaatagacaagagagtacaatttttgattgaaggcctttttgcaattagaaaggctaaatttcagggattccctgccatccgaccagagttggatcttgtggagcaggaggaccagtttacacatgagatatcccttgaagatgacctagaccctgagaccaacctaaatgttttcagggcaaatccaaattttgttgaagatgagaaggcctatgagaacctaaagagaagcatcctgggagcagaatcttctgaagatgaagaaggatcagatgccgcttctgatgatgaggaagaggaagaatctgatgaagaagaggacgaggaagagatggagataagggatagaacagagacaaatcttgtgaatctaagaagaactatatatttgactattatgtccagtgttgattttgaagaagctggtcacaagcttatgaaaattaaacttgagcctggtcaagagatggagctgtgtattatgctgcttgagtgttgcagtcaagagagg

SEQ ID NO: 20296 - DNA, 591 bp, Setaria italica
  Peptide Sequence Number=SeqID_86270
tcagacggcaaatccatggagatcgggcgaactatggatatcccaaccccactgctgctctccaccttggcagtatccgtggtcatatgctacgtcctcttctggaagcaggtggcgaccaggaagcgtgcgccgctgccgcctggcccgaggggctggcctgtcctcggcaacctgccgcagctcggcgggaagacgcaccagacgttgcacgagatgaccaaggtttacggcccgttgctgcggctgcgtttcggcagctccgacgtggtggtcgccgggtcggcgcccgtggcggagcagttcctccgcgcccacgacgcgaacttcagctgccgcccgcccaactccggcggggagcacatggcgtacaactaccaggacgtcgtgttcgctccctacggcccccggtggcgcgcgatgcgcaaggtgtgcgcggtgaacctcttctccgcgcgcgcgctcgacgacctccgcgccgtccgggaacgggaggccgcgctcatggtgaggtcgctcgccgccgcggggcaggccacggcggcggtgccgctcgggagggccgtgaacgtctgcactacgaacgcgcta

SEQ ID NO: 20297 - DNA, 628 bp, Setaria italica
  Peptide Sequence Number=SeqID_86271
acttcgtccaggacctgctgcacgcactggcaccgccaccgagcagcctgccgctgcccaggttctccctcgtcgcgaaagcgtcccctgccacgagccccagggtggtggcgccggccgcgccgtcctgcaacgtggaggctgccgccgccgacggcatccacggcctcctccgcctgtaggagaaggcttcgctctccgccgtgtttggtattctataatatttccctccaatattatttttttggttgggaaaattaaatgcgtactataaaggtagaaaaatattgggagaaaagatgtgatgctcgagccatggtcggtcgagttgtccgtagtgtgactgtgatggtggcgttggatggatgctatctctggcggtgcaaaagcgagaggaagaagacgatgtcagctaaggttttattagtttgtgtgagacgtcgtgtggtagatatctagggttttacgtgatgtctaccgacgtaagtacgtaactgtgtgcgtagttctgctttcttgattgggtgatgggtttttgaattaccttgtatcaagagattactacatatatatggtgtatgcaagcgtgactttacttatatacaaaaaatgtgttcttgataaaaaa

SEQ ID NO: 20298 - DNA, 1118 bp, Setaria italica
  misc_feature (1044)..(1118): n is a, c, g, or t
  Peptide Sequence Number=SeqID_86272
ttaggttatttacctaggattacctctgacaatctgaactcaccatttgagacattagcaaacataatggagatggtactgaccagcaccgatgatcgggggcgtcgggaaatgaaagccctggttctgaatcttctcaaggacagcagccattgcactgatggatcttcagacatctgttccgaaacattgtacagttcgtgccaaggttgcttggacaggctccatcgactatttacagaagcatctgaagaggattattcagtgagtgtcacgcggcggataactcttgagactgataatctcctatggctggtggagattcttgttacccagcgaatctgcgacgactttgtggtgatgtggtcaagccaaacagagcttgccgaattgcattccaaattgccaggagcctctcgccacacagtgagctgcatcacggcgaggctttttgtcggcattgggagaggggagatgcttccatccaagaacacccgtcttcgcctcctgcaggtatggctgcaagcgttgatcgacgactactcgtggctgcaatgcagctgccggtcgtttgacaggaagctcgtcgaggacgggatcgggcagacgatcctgacgcttccattggaggaccaaaggtctatactactgtcatggtttgggaggttcttgaaattgggggataactgccctaatctgcaaagggcatttgaagtgtggtggcgaaggactttcgtcaggccgtatgttaatcaggctgaggcaggtaatgttttaacatcagatagaagctcaccttgaagtggcagggggattaaatttagctgaccatagaatctttgtatcctgagggtattgtcttggttggtcaatctgacatgagaactggttggaatttgggtgttttctttcctcgttctgtaaagtttggtggtggtagaaatttgtgtaagactacttgtttaacttgtgtgtaaaatcagatgattttccctatttatgagaagaaaatcatcatcaatgaatcctctccattgtaaaccnnnnnnnnnnnnnnnnnnnnnnnnnnnnnnnnnnnnnnnnnnnnnnnnnnnnnnnnnnnnnnnnnnnnnnnnnnn

SEQ ID NO: 20299 - DNA, 264 bp, Setaria italica
  Peptide Sequence Number=SeqID_86273
tctaaacaacctacaagcgccgacgagccgcggagcctccgtgcgggaggttcatctctcccagtctctgctggtgccggatcctccaaccgcggaccgccgtccctctccactctccgtctagttgattggagtttcgtttcatcccaaaggcgcgcggattggtttcttccctttcgctggtattaatcccatgtcagcactcatgatatgctccttgccacaaattgtggcagcacctactgcaactacactattcgcagg

SEQ ID NO: 20300 - DNA, 363 bp, Setaria italica
  Peptide Sequence Number=SeqID_86274
gatacatagtctgtcacaaagagtttcagcttcttccatggaatgtgttgtgagaatgattgctctatcctgctttgcttgcttcactgcacgccagagactcttccttgaagctgggtctaatccggtgctgggctcatccatgtacacgactttagcatctccaatcagcgagatggcaacactaaggcgcctcctcatgccaccgctgtacttcttgacttgcttatctggagcacccccatgaaacaaatttacactccttaaagactcatcaacggcgagatccaaagatgaaccactaaggcccttcagtcggccataaaactggagatgttccctgccagttagcgtctcccaaag

SEQ ID NO: 20301 - DNA, 2009 bp, Setaria italica
  misc_feature (1957)..(2009): n is a, c, g, or t
  Peptide Sequence Number=SeqID_86275
cgcgatcacacgagttggccgagtggggtagtcaggcgagctcctccccgccgccgccgccaaaaccctcaaaaccccgagacgccggcggggaggaggaggagagggcggaggcggagatggcgacgcgggtgaaggacgtggcgcggcggtcgacaaagaagtacgtggaggaggcgctgtaccggcggctgttccggaaggggtcgacgccgcaggcggtgcgggaggaggtggacggcttcctcgacagccggaagcgggcgttcaagtgggaggtgggcgtttgcgtccgccgcatgcggcggaatgcgctctatcgcccggcgctcaagctttctgaagttatggctagaagaggcatgaatcctactatcagtgatcaagcaatccgcctggatcttgttgccaaatcaagaggcattgctgctgctgagaagtactttttggacctcccagaaacctccaagactcatctcacatatggcgctcttctcaattgttactgcaaagagttgatggctgagaaggctgaggccctcatggaaaaaatgaaggagctcaattttgctttcactgccatgtcctttaacagcttaatgacactgtacaccaaagtcaaccaaccagagaaggtccccagtatcattcaggacatgaaagccgatgatgtattgccagatatcttcacttataatgtttggatgagggcgcttgcagctcttaaagacataccaggggtcgaaagggtgattgaagagatgaaaagggatggccgtgttactcctgattggacaacatacagtaacctggcctccatatatgttgatgctggactgtttgagaaggcagaagcttctcttaaggagcttgaaaagcggaacactagcaatgacattgaagcctaccagttccttattacattgtatgggaggacgcaaaatttagtggaagttcatcgtgtttggcggtcattgaagcggaattgtcctagaaaggcaaacatgagttatcttaacatgattcaggttctggccagtctgaatgatttgcctgcagctgaagcctgtttcaaagagtgggaagcacagtacatccatccacctaagaagaacatggaggactctggggcatccactacagaagcagattcttcaactactgtgcctagtaatcagtctgatgtcaagggaaccaagggagtggaggagctcgaactgaagcatccaaaatatgatatccggattgcaaatgctatgattaaagcatacattgcagagggtatgcttgacaaggctgttgctctgaagaagcgtgccaagatgcgtggcggaagactgaacgccaagacatgggagattttcatggagcattacctcaaggaaggggatctgaagatggctcactggtgcgctgaccgcgcgatcaagaaggggcacagcagcggcaggatttgggtgccgccacgcgatgtgacagagaccctgatgggctacttcgagaagaacaaagatgtagatggagccgagcaatatgtcgaggtcctgaagaaggtgcagaaggatctgggcacgctggtcttcgaaccgctggtaaggacgtacgcggctgccgggaagaagttccctgggatgaggcagcggctcaagatcgagaacgtggaagtcggggaggaagctgccaagctgctcgattccatctgcgttgaccaatagatgggcctcggtttttttgttcgtcttaataacggcagggtgctttcgaatactctcagctatttgttgtgtgaaatctgtgatgccagtatgtacactgcaatttagccaccttttttttttcttcatcatatggttctacgaacgtgggagccctgggacatgaaaatgccccgcagacctcagttccaaatcttgtaactttcggttcttctgcctgtttgctcaatttgggcggttgnnnnnnnnnnnnnnnnnnnnnnnnnnnnnnnnnnnnnnnnnnnnnnnnnnnnn

SEQ ID NO: 20302 - DNA, 585 bp, Setaria italica
  Peptide Sequence Number=SeqID_86276
gcttgttctactatgacagtccagacagcaaaaccgcagtttttgttttattggaaaggttatctttgttgcgtacacaaatactagctttgggaattgtttcacttatttttatctatcttgctacttgacaggatggttataactattttactgtggccagatgattctacatgtccctgcttggcacttataaactttttaaagctgattctggctactcaattacacttatggtcaaagttttcgtaggaaccttgatttcctccacctatcgtttcaaaaatgaaacagtgctttgtacaactatttagattttcaaaaggccatcttgtggcttgcaagactattgtaaaagacttcatgtggatttaaagaactgcggtattgaaggacattacttatttcgtattttctgtgtacggttttcaaaaggccatcttgtggcttgcgagactattgtaaaagacaagtggatttaaagcactgtggtatttaaagacaataatgttttcgtgttcttttatgcggtttttaaaagtctaccttgtggcttgcgaagaactaattaagtaaaaataagaa

SEQ ID NO: 20303 - DNA, 472 bp, Setaria italica
  Peptide Sequence Number=SeqID_86277
ttcgcggcggcgcggctgggctacggcaacgtccccgtgcacgtgtcggagacgggttggccgtccaagggcgacgccaacgaggccggcgccaccgtggagaacgcccgccagtacaaccgcaacctgcttatgaggcaggtcagcggcgaggggacgccgctgcgacccaagctccgcctcgaggtctacctcttcgcgctcttcaacgaggacatgaagcccgggcccacgtcggagaggaattacgggttgtaccagccggacatgagcatggtctacaacgtcggcctcaaccagctgtcgaccacgtcggcggcgtcgctctccctcgccacgtcgccggccaccaggaccgatgttaggaaggactttggcagcctgtgtctcgtcacatctctggccatcctgcttatcacccaagctttgctattgtgatagcaaaagcacccaatagcggccgactgcaagg

SEQ ID NO: 20304 - DNA, 344 bp, Setaria italica
  misc_feature (21)..(21): n is a, c, g, or t
  Peptide Sequence Number=SeqID_86278
cttgctattatcttgtaatcngtaatcactgtcaacaatattgaatcatcagcaatcgccatgtcagtcaatccattttgttttgaaacaaaataacggggttaacgcctatcttcactcgtcagtcaactggaaagccaagaaacttgttgatcagggtgacaactggtttggcatcccctggcacataaggaacgagcgtccctaggtccattgctcggatggtctctcccaatgtttgtgggcgtgcacagaagaggtgcttcctctcagccaattcttctgcaagctcactttggtgattgtccatcaaatcttcatttacaacaacgattagaggtttg

SEQ ID NO: 20305 - DNA, 271 bp, Setaria italica
  Peptide Sequence Number=SeqID_86279
cgagtgcgctgtgtgcctcgccgcgttcgaggaccacgacgagctccgggtgctcccggcatgctaccacgtcttccacccggactgcatcgacccctggctcgacggcgccgtcacgtgcccgctctgccgcgccgacctcaccgtggccccgcctccggccgcgcccgccgagagctgcgacctgacggcgcgtcagggggcggtgcgggaagaaccggacgacaacgaggaggaggacgagcgcgacgaggcgtgcctggtggcggcg

SEQ ID NO: 20306 - DNA, 1229 bp, Setaria italica
  Peptide Sequence Number=SeqID_86280
ccgacaactgaaaaatgagctttgcatggtcgacgggatgatgccgggaatgatcatcagttggtgtcgtcggtgggcatccagtacctgttggtgagccagagcccgtcggcgacgaccttggcgccgtcctggttccggtgccacgcgtagtatgcatgcgtccggttcttaatctccagcgtggcgtggccgaagctggcctcccggaacgccgagtagctcggctgcgggcgcgtgaagttgtcggcgatgccctcgatgttgccgccgtcgccgatggtgacgtacaccggcgcgccctggtcccgcaccggcgtggacttgccgttgacgatgtcgtaggcgacgttggacacgcggtggctgcgctcgtaggcgtggacgtggccggcgaggacgaggtcggccttggcgtcgacgagccactgctcgaactgcacccgcatcgtctccccctccatgtagtggtacccgttgctgttgtaccacggcgagtgcatcagcaccagcagccatggcgtggtcttcctgtccacgcgcttcagctcatcctgcagccacgtccactgcggcgtgtacttgccgtacgccgagtaggaggcgagcacgatgacgtgcgcggaggcgatcttgaccgagtaccagaagggctccgtgctgccggcggcgcggtacggcgtcgggtagcggtgggagaagggcttgaacggcgtcgtctcgccgagctccggcgcgaagtccagctcgtggttccccgccgtccagatccatggctggtaggcgacgctgcgctccacgaagcgcgcccacgtgtcccaccggttgttgtcgtggagagggtggttgtcggcgtaggagaggtcacccacgaacagcacggcgtcgccgccgttggactcgtagtgggacagcgtgcggttcgagtcgaacgtctgcccaaggtcccctatgaggccgaacttgtagggcgcatcaggccccggcttgggaggcgtggtgaaccagaaggtcctcaccgtgtgccgaaccccatggcgtagtagtacttgctgctatgcttgaggttcttgagggtgcagtgatggatgaatccggaggtgtagttgaagtagtcgtagcgcgtgtgcgttccctccgcccggagctccagcttgtgcggcgcgccgccgtacatcaccgtgctgctgcccagctcgctgggcgtcacccacgacacgatcatcgcc

SEQ ID NO: 20307 - DNA, 718 bp, Setaria italica
  misc_feature (174)..(174): n is a, c, g, or t
  Peptide Sequence Number=SeqID_86281
ctggcatacatatcagagatgtcaacataagcatgttagttattttactgcacataaacctgcatgtgtaagcgcaacagtggatatttacttcgcaaccacaccaataccgaaaatgagtgatttcagtatgtgcagtgctatataaccatgtagccttttcaaaaaaaattntaacaatgtattttaacagctgtatattccatattattgagactattttctgttatttactgcattcagcaagcaaccttagtaaactgtccatcgtgcctctgtcgtcgaaactgctatacatgttgagaagtgattgtatcactgatttggacaacaacaggccctttttgacaacgcatgcgtgaattgcctttccacaatgtacagaaactgcagttttaacagcaaggatcactgctgaatagactgttggactgggtgctgactctacctcctgcatcttgcagtatagatttgttacctcctgatgcatgccagttttggataagccgcttattaacaggctccaggtgcgcagattggggcgtgttctagtcagaagcatctgtttgaatacttctagagcgtcttcgaactggccatttcgtaaaaaagctgaaattactgaatcccaacatgctgcagttggggacatgccttcgagctgcatatgatctaaaagcttcagagcctcagagctcatgccacgatctgcataagt

SEQ ID NO: 20308 - DNA, 445 bp, Setaria italica
  misc_feature (403)..(403): n is a, c, g, or t
  Peptide Sequence Number=SeqID_86282
ccccaatctatattgtccccaaaacacctatgctcgtgacggggtaaatcatcaaacccataaataacgaaagccgttttccccgagcttttcccctcgcagcttgcgaaaaagatatctcaggtgaaaggagggattcctcgccgagctcgtgcagtcgtgctctccgtcatctccggagaggaggcgtttctgcatcaaacgggaagaagcaaagctcgctcgcgcccttttttcgcggttcatatagcgcgcggctgcgggccggggcgggctcacacaaccacagcgcgctggtcagatctacgtgggagagggagatagaggaaccccggaaccgagggatggggcccgccgtcgtcgccggcgaggacaagggcgtgtcctagctccgagaaaaacntcgtgtggacctcgagagactaacaatgacgtcgcaacctag

SEQ ID NO: 20309 - DNA, 361 bp, Setaria italica
  Peptide Sequence Number=SeqID_86283
aatatgtaaagacagaaaaaactgaatgtacaaacaagaacacaacagttaattgcagagcagcagagctaaccagcaaatctccatagcacgacttataagttacaccactcctttaagctcttcctgttcgggggtgggttgatcacaggaagatccttcctcctctcgaaaagacatttcacgatgactgtcagcttgagcatggagccgcggctggcagcatcgctgggtgagctactgctgtgggcggtggcggcggagatccgccatgtagcgaacttgctgctcggaagcgggccaccgctttcttgctcggcatcttgcgagctgtggcaacggtccttgtcggcggtggcag

SEQ ID NO: 20310 - DNA, 284 bp, Setaria italica
  Peptide Sequence Number=SeqID_86284
ccctcttccccgccgatccaatactaccaccgcgaaaccctagagagagcaagagggagaggcgatccagagatcggcgccatgaacgacctcatgaccaagtccttcatgagctacgttgacctgaagaaggcggcgatgaaagacctggaggcgggcggcgacgggatcgagctcccggagtcgggcgccggcggcgtcacggacgagcgccttcgtgggttcttccaggaggcggaggcggtgaaggcggagatggcggccatccgtgacgcgctcgaccg

SEQ ID NO: 20311 - DNA, 555 bp, Setaria italica
  Peptide Sequence Number=SeqID_86285
gcaggcgcagcggcctcctctcctcgagcggcagcgtcagcaggcggactcccgccggacgagggggcgccaccggcgttcgcgccgtcgacggggcttccgctgcggccgctgtcgccgcagctgccgatgccgcgctcccgcccccgcaggtcacctggcagatcgtcgtcggcgccgtagctggagtgacgccgttcgtggtcgcaggggtcgagttcggcaaaagaatcgtccaacaaaagaaatgtgaaatctgtggaggttctggcctggtaatgaagaacgactattatgttcggtgccaagggtgtggtggcttccttccatggcaatcttggagaaggttcttcacaggctgaaccctgatcatcacgactttgcttgcgctgtttctaaagacggatgatgatattaggaaaatttgtgagatataagttgaacaactttgtgtttgaaacaatacagacatgtcgaatgctcgtgcatgccgtcgacttgcgcacggcgaaatcgatgctgttgggatgctcaaaattgcgttcccgtgtcccg

SEQ ID NO: 20312 - DNA, 549 bp, Setaria italica
  Peptide Sequence Number=SeqID_86286
catgagaacataattgaaatgatcgatgcttttgaaacccctcaggagtttttgtgttgtcacggagtttgctcagggagaactgtttgaggtgctcgaggacgataaatgccttccagaagaacaagttcaggctattgctaagcagctggtaaaagcattgtattacttgcattccaatcgtattattcaccgggatatgaaacctcagaacatccttatcgggaaaggatctattgtaaagctctgcgacttcgggtttgctcgtgccatgtcagctaacactgttgtattacgctccataaaaggaacacctttatatatggctccagaacttgtgagggaacaaccatataaccacacagctgacttatggtcccttggggttatcttgtatgaactgtttgttggacagccccccttttatacaaattcggtctatgcacttatacggcacattgtcaaggatcctgtgaaatatccagataacatgagtgcaaactttaagagcttcctgaagggtttactaaacaaggtgcctcaaagtag

SEQ ID NO: 20313 - DNA, 367 bp, Setaria italica
  Peptide Sequence Number=SeqID_86287
ccaaaactgaagaatatcgcatcaatccagcagcaagaaggcgagtctcctcattacgaacagcagcaagagcctccatcagggagacacagggatggcgagcaaccagctgtgcacgaagtggctcaaactcatcccgaagacgcgtcaagaagtcgtaggtgcgacgaagctcaagagcctgctgctgacccaggcaggactggcaggtgctagaagacaacggaggactaagagtgtcgagctggcgccaaatagtagaaatctgaccatagaaatcatcaacggtaccatcaccctgtcgaacgagctgctcctgacgaatggctgcaagaaaagtagattgaccagtgggctcataacgtgt

SEQ ID NO: 20314 - DNA, 550 bp, Setaria italica
  Peptide Sequence Number=SeqID_86288
aataccaaactaatcagatgctcttactgagatgagccatggtcagtgggagggctgctcgaaatcagaaatttatactccagaaatgcttaatctgatggacagcacgcagcctgatttctcagcaccatcgggggagtccctcaggcaggtacagtttcggatgatggaattcctgaaccggaccatcctaaggctaccagaaaaggtagcaatgggggacacactatcgcagcaaaatgaggcaaagtggttctctcggcagagctccagcaattctgtccaagatggtcctccttgggatctactttacaggctcaacccgcatagcctccaaagaaagaaatctgggaagagccggctccaatttgtcacttcaggggacaatgaccccgaggatgacttctctcctaaagatataaaccagaggcacatccttcacaaaggaagtttagggagctctgtaacgacctccattgcgattttcagccatgcgacccccattcgttgtctgattgcaggcctgctggattgcaatcctatgatgtca

SEQ ID NO: 20315 - DNA, 942 bp, Setaria italica
  Peptide Sequence Number=SeqID_86289
cactcgctgcgttcccctttcagttccccacacacaccccgctccccggttcccgacgagctcggagctccccctcccccgctcggtgctcaccgcgacagcagcagccatggacgccgccaaccagctgaccgccctcctcaacaacatgttcgccacgggtttgctggacgagcagttccagcagctgcagatgctccaggaccccagcgccccggacttcgtctccgaggtggtcacactcttctgccaggacggcgagcgcatcatcggcgagctcgccaagctgctggagaagcccactgtggattttgacagggtcgacgcgtttgtgcatcagctcaagggtagcagtgctagtgtcggcgcccagaaggtgaaaaatacatgtgttcagtttagggaggtctgccagctcaagagcagggatggatgcctgaagactttggacttggtaagaactgaattctatgatctgcgcggcaagtttcagactatgcttcagctggagaagcacatccaggggttcaagtgaacccgagttggggaacggagctgcattttgggatgacgcctacaccgctcaagcttcagaacatgccggatgcgttcctcagctgcagcagattatgagctgacacctttctgtttccttagtccgtcgccatcgtcttagtgttgttgttgtcgggtgatccatcttcctgcaagcagttgcaggtcgtctggtcactcctagtcctagtcgccatttcgtagtctcttaggtccccaaactgcctaccggtttgggctttaaatggtgtcaagctagtcggtcagtcagtcgtatcctagttgtgttatggtaaagcaaaacgatgctgtggttaatttgaatgaatctgctgcttattggtaatatttgtgctgtctgtgtgatactaaaaaaaaaaaaaaaaa

SEQ ID NO: 20316 - DNA, 452 bp, Setaria italica
  misc_feature (450)..(450): n is a, c, g, or t
  Peptide Sequence Number=SeqID_86290
gggacgagcgccaggagcatggcgtaggggatcgcctgcagcgacgccggcgggatggcgaaggaggaggagcccggcgcaagcctcgtgtccatgatgctgccctgctgcaccgagaaggtctgcagctgcgccagcacggtgttgaagacgacggtgcacgctacgatgggcatcacggcgaggagcgtcttcgcctgccgcacctccgccgccgtgcacagccgccacgggctctccggctccgtgtcaggctccggcgcgatcctgatgcacgccttgtccaagaacctgaatttattggcgtgacggaagttgtcgtcgacgggcgccgccgggtcgccggctccgccattggcaggattggaggagccggaagggcagatttgcttcctcttggtgaaggcagcaacgaaacccttgcaatcggaagtaaagatgctgccccgngg

SEQ ID NO: 20317 - DNA, 214 bp, Setaria italica
  Peptide Sequence Number=SeqID_86291
cgccgccgcagccggggaggcggaggcggaggccccagcggcggaggctaccgatgcctcgccggacgatggagcgccggcgaggcccgttgttctgttgacctgcggcggggggatccggtcggcgggtctcgcggctctcgtcgacgccctcgttgccggcggccgctgcgacgtccacgtgtgcgcccccgaatcggacaagccagcctgt

SEQ ID NO: 20318 - DNA, 260 bp, Setaria italica
  Peptide Sequence Number=SeqID_86292
tagaaacaattagggaacaggaacaggaaacttaacgcccaattgaaatccatgatgttaacttagtggaacaggacagccacgagaggcaacgcaccatggtccggcgggacgacgaagctgagctcccacatggacgcgagctccctctccatggcgagtgcgcgggcggggtcccaggagccgatgatgggctcggagccgtagacgtgcgggacgaggtcgccgctgatccgcgcgttttccatcttgagcgacac

SEQ ID NO: 20319 - DNA, 349 bp, Setaria italica
  Peptide Sequence Number=SeqID_86293
ccctcatcggtaggaagtgcacagctagtgttgattaggatgacacaaggaaaatgcggcaggaaatctggcacattcaagcatgcagcactgcttaaatcagccgcaaagtcacgattaacacacaagatagccaccaagtaaacagggacaatttagtcttttcatcaccctccataatctgtctgaaaaagtctaaacacagctatattctgggatggagggaatactgacctttgaactaagcccagatgccagggagtatgcactggctgattttggaagcttaggagagccaacgcccctgtcaatgaacagccccttttgaccatctggcttttgcagtggt

SEQ ID NO: 20320 - DNA, 343 bp, Setaria italica
  Peptide Sequence Number=SeqID_86294
tgctgttttcttcagatttgagccgcttttctataaagttggctagtttatttgcatacagctctccagcttcactgagcgccattgtcagccatttaaaagaggaattattagttcaatacagcaagataattcctgtaagatcaatacatttacatgctgctttctttatggtgcaataactaaacttctaattgaaaaattaccatggattttaatattttacttgccaaactcaaaatggcatactaagtgtggaaagtatcatatgaaggaatcaggttgaaatttagggaaagcataccttaggactgaatcaccaccaactcgtcctcttacatta

SEQ ID NO: 20321 - DNA, 2665 bp, Setaria italica
  Peptide Sequence Number=SeqID_86295
ttacatgaccaactgatttggctgctcatatatcttatgaacagggtctggagttgtttatttcaagtttgtctgcattcttcacttgccagttgtggcagtaagcgtgttatttttacagttccttattagtaatatgtttgcctttacaatgatcaaatacgtattttcaataaaatttacaacggacttggtttaacaccgtctgggcaaagttaaaaatcgggtaactgtactccagtatttgtgttatctatatttgctgtgtatgactatacaaaacagccagcctgctgcctttatgtgtattcacaattcagtccatgagcttgtacctcttctcttcgacaccagtgactcccatctgtatctcgattatggtatgtagtggcatctctatgtttggaacttctctcaaaggcctgtctgcgaaatatgcgtatagtgctcgcagtacagcctggtgagatatgaccaccactggtgcctgctggcgttctagctcgatgatgacgggttccaacctctgtatcacgtcgaggtaagactctccacgagggtagcgatatctaagcttgtccttcctgcgtgactcatactcctcgggcataattttctttatctcttcatatgtcatcccatcacaaactccagaattgatctcatcaagagcacgccattgtatctttgggaatccaataattggacttgctgtcaaaattgttctctgaagggtgctagtccatatagttgctgttttctcagatttgagccgcttttctataaagttggctagtttatttgcatacagctctccagcttcacttaggactgaatcaccaccaactcgtcctcttacattatgtaaactctcaccatgcctggtaagcaaaataggccgtggtgtaagatgagagttcaccaagaaaaagacaatccgcccagggagataaccactgatattatttacctgtaactgaccaccctgcccctttaccatgtcaatcattttgatgtaagaaccttcccccactggctcatagaccttctcataattcgtcaagcgttccttgaagtcctgcagtccagcttcataatctggctggtcagcatagtcaggactttgttgtatcttcagccgtatatttgtttcaattattctgggatcattacatattgtctccaaaaatataatcttacagttaccttcagccattttcattagcatatgtcttcgttttcttgtgctgtttgttgcatcaaatataccgacctgacctccaccatgcatccaatctatcatgtcctccattgctaaagcagccacctcattacgtgcctcaataccttcaggattatcatcacggaaaaaatctgcagcctggtttgctccatgcttcagacggcgatacttcccaacattgaaatgtctagtttcatgacccaaccaacgaaggtaccttgtaagcttaactgcagtgaaggttttaccacgagctggcaagccaaccaaaacaatggccagcttccggtcctcctttgacccatgtaagcgatcagctacagctgcagctgcaacagctcctgctgcttctggcatggtctttgaactaagcccagatgccagggagtatgcactggctgattttggaagcttaggagagccaacgcccctgtcaatgaacagccccttttgaccatctggcttttgcagtggtgtaaaggtaccaactgattttgactcaatgagtccagaaccttgtaattttttagaagaatctgttgcccaggcctcaatattctttttgaggttattacagccttcaaaatccgcagaaacagtacttggactctgaatcccatcactaagaagcatatcatttgtccacgatgctccagtttgaatcaaggatgcaggagtcgcagtaaggtttgcagcgtattcatttggtggtgcagttggggctggaacaacataatgctccaagtcaagttccaaagtagccgctgatccttcctcagttgcatgagtgggtgcgacattgatactgatatcagggattccccggactctggagggttgaaagttctccttgtacaccctccagctcgcagcgagttcgagcggtgacacgatgtccgccttgttgaacaccctgaactcgagcacctcatcatctccattaagcttgaaaagtgcaaccctcacatcgccctcaagcatgcctccagtaaggagccgcgttggcccttcctcaatgatgcacggggttgctgtgtctttgggcttcagcaagaatttgaactccaccgtttcatggtccggcgggacgacgaagctgagctcccacatggacgcgagctccctctccatggcgagtgcgcgggcggggtcccaggagccgatgatgggctcggagccgtagacgtgcgggacgaggtcgccgctgatccgcgcgttttccatcttgagcgacacgtagagctgcgccccgccgtgccacgcctccgcggcgccaccgccctcgcccgcctccccgtcgccgcccgccgccccgacccccgccgcctgagagccgaggccacccacgccgtcgatgcccttggaccccgacgtccccatggctactagcacaagtggagcggcacaagcacggcgggcgtg

SEQ ID NO: 20322 - DNA, 438 bp, Setaria italica
  Peptide Sequence Number=SeqID_86296
agcgaacttgtgacgatcttatgtttgtccttgcatacttcgcgtgaggaaagtggagagacagtcgatgaaccttttcagaaagtgacacattcctccgataacaatcaagtaccataatgaagttctcttctaaagacttctgcactacaagatcacgtaccacgtcatgaactgaacaggacaccacctcactgttgtatctgatatctgcaggttgtaggaatcttctagcaataagttcatggaaatagctttctgcaatccccacctctcgccctccggttgcatcgataaaaccttcagccacccattgcttcaccaaatcatccttacataccatgcagccatctggatacatactaagatagagcaagcatgtcttcaaatggtgagtcaggttattgtagctgaagtttactattagtttcaataacc

SEQ ID NO: 20323 - DNA, 720 bp, Setaria italica
  Peptide Sequence Number=SeqID_86297
ggaagttgggcggaggctaatgctgacgtacggatagagttcttgttgccacaggcaaattcagagagtgtgtatagagttcttttcttttcttgtttttgaaataatgagttttgttcctggataaaggaaaaaaaggaagcgcaccagcaaaggttacgagctaatccagtgcgtgcgtagggcccacggtgccggccactcgaacaggatgtgaacgttgttatgttggggatagctagcagtttcacctcacagccgtagccgtggccgctcaagtcttcaatgtgatagccttagcttttcttttccacatttgtgtgtactagaccatagcggaatttccagatgcttcttttcaaaaggttaattacccaaagatacgatggtcctttttagaggcgatgatgagcacacaacccaacatcttcattaattcttcatactcattttgtagcagaattttgtggcagtcgtccaactgatgtgtgctcccgctctgaaccgaaacttgcagggaagcagagttccaggccggagcctgatctccatgggggagacgagaggccgcctcatctccctaagatcacctcgctttcgcgtctacgcggtaacacccagcacctttgcatatgcacatctcttgtctcttgactttgtttggaaatctggaacgatggtgcctgtggaggttccattactatctgactgaacaatata

SEQ ID NO: 20324 - DNA, 792 bp, Setaria italica
  misc_feature (753)..(792): n is a, c, g, or t
  Peptide Sequence Number=SeqID_86298
taagctttcgtcctgtccggtcggctgcgctaggtgaccgcggaggagcagctccgatggcctccctgtccgccgtctccggcaaggccgccgccggctactgcaagccactcgccctgagctgcaagggaagcagagttccaggccggagcctgatctccatgggggagacgagaggccgcctcatctccctaagatcacctcgctttcgcgtctacgcggcgaaggaggagacggtgaacaaggtgattgacatcgtgaagcagcagctggcgctgggcgcggacgcggcgctgacgcccgagtccaagttcacggacctgggcgccgactctctggacacggtggagatcgtcatggcgctcgaggaggagttcatgatcaccgtcgaggaggataacgcccagaacatcaccaccatccaggaggccgccgacctcatcgacaagctcgtcggctgatttatttgtttcacttactttttgggaacgtcgttgttgttgccaagattcgattattttctccttcctcctcctcgtaagtttccagcgtagcgtcgttcgttgtttggatcccagctcctgtacgttttcgccaacttttagctgtgcgtgatgcgcacgagtgtctttttaaaggatttttgttaggattcaaaaacatgtttttgtgcgctaacgcatataattcatgccattttgttcccagttggaatcacattaggtgtgtagaagattatcgaccaaaaaaaannnnnnnnnnnnnnnnnnnnnnnnnnnnnnnnnnnnnnnn

SEQ ID NO: 20325 - DNA, 573 bp, Setaria italica
  Peptide Sequence Number=SeqID_86299
aaagcttattggcaccttagattacctcaccttccaaatccctgaacccttttacttaaaaaaaaaagaaatccctgaacctctactgcccagtgctaccaaaattcctcaagcaccaccattgcatctatcctcgatcctggaaggctccatgtacctctgctgacacgggaccaactgatcggaaggctccaagtatctctgcagatacagtaccaaccgatcttgaccattagatatgttctggggagtttcggtgtcactgtagtgctcagctccacgtctggatcatgggaaatgctgcccttgcatggcatcaggcgatggaaattcattcagattatggcaaaagtgttcaattgtccatgccactgacgccaatcatgttgcagaggaggtagagctgatgccaaacttggatttttatgctctttctccctcttggatgccactagtacctgcaaagagaagcacaacagaaaactccgaagtctgaacatgtccagcaccagagactgaattcaagcaacaaatcatttcttttgccaatttttcttctatttagcttctccg

SEQ ID NO: 20326 - DNA, 353 bp, Setaria italica
  Peptide Sequence Number=SeqID_86300
cggccctcgccctcgccctcgccctcgccctcgccctcgccggcgacggggagcccggtttgcaaacccttctcgccgccttcctcaaccacgaacccagtcagctcctgcggcggcggcgaatcccctactctgttttctccgatggccaccaaatcccacaagaagaagccttctgccgccaaccctcctattaaccccaaagccgcctcttccgacaagaaatccaagcccccgaagcccaccgaggaccagccggtgcaggcggcggcggaaaagaaaccgaagaagcagaaggcgagggacgagatcgatgagatcttcagcgccgccaaggcgagcaagaagcggaa

SEQ ID NO: 20327 - DNA, 1044 bp, Setaria italica
  Peptide Sequence Number=SeqID_86301
ggtgcaaatattgtctttgtttatgtttctacctatcatttgcattcacacttgcactcacgtacactcattaggtttttgtttttatttactaaattagctatgccacaagttaaagtattagggatgttgttggtttgttggcaattacttctactcctgacaatcacctcgggggtagtttgtgcacttaaattgttttgcaggcatggtgaaacgctttcatgaaaagagaagaaattaaagaacaataaaggtgacaaaagtgaagaagcataaaaacaagctccagacgctgagaataaggatttcaacaatcacaaaatgcttcatctttttcttctatgcctagcacaatgctaagcatgcgaggacttggcagacaaaaaatcaaggatcagagtcgtgagaagatgctcatttttccttcttctatgctaagcacaatgcttaagcatgggggaggctgcgcttcacttcatcacaaacatcgaaaggatggaggggaagtacccctactgtcagtttactgcaagaaaagcatacaaacacctaacaggctcaaccatatcatattatggagcaactcagggatcagctaagagtaccttttttcatggaaatcatattactcatgtgctggagtatttggattagtagaaatgatatcatcttcaaagggattatctccacagttcaatcttgtttaggcctcttcagaggcgatttagagagcctcaatggcttaattcttcctcaaccttttctttgtctatctctttctaaaacttcaaccatagacttgatgcaacctttgtatatctctcgataataacatggctactaggagtacaacctagcttttgttttctttaaatcatgatcaccatcaccttgtgctcaccacggtgtttataattttggtataatcttgcttatgaaaaaatgatgaaggttgccgctttgttttacctacacaatgttgtattagacttgactaattgctctctatttaatgaatctaaaattgattaaataccggca

SEQ ID NO: 20328 - DNA, 943 bp, Setaria italica
  Peptide Sequence Number=SeqID_86302
taaaagaaaacaatttaaggaagataaagggacctccgtgttctgtttatattcatgaactccacaaattctttgccacacagcttttcaaagcttatccaccttcggcacctaaaacttgagacaccttatgataactggggattgtgctgtcctagaatagtatctaggttttatcacttgaaatttttggaccttcaaaactggcatggaatttgttgtgatgattttcctgaagacataagccgccttgtgaatttatgccattttggtgctaggaaagaattccataccaatattcctgaggttggaaaaatgaggcttctacaagagttgaaagaatttcatgttaagaaagagagtactggatttgaactacgagagttgggccagctggtgcagctaggaggagaactcagtatacgtgggcttgaaaatgtgagatccagcaaagaagctgctgaagcaagattgatggcaaaaagagatctaattaagctgggattattttggagtagagggcaccagtcgaaggtcgatgatattcttactaaccttcaaccacactctaatcttagagctctttgcattgttaatcatggtggtcccgcaggtcctagttggttgtgtagcaacatccacatgaagtacttggagaccctccatctagaaggtgtatcctggtccactcttccaccttttgggcagatatatcatctaagaaaactcaagctgaaaaatattgttgggatatcccagtttggacctgacttcattggtggcattacagagaaaagtttcacgcacctgaaggaggttcagcttcatgatatgccagaacttgtggagtggattgggggaggtaacacacatttgttctcaaggcttgaaagaaatacgaagtagactactaaattagtaccaaaagactacaactagacca

SEQ ID NO: 20329 - DNA, 561 bp, Setaria italica
  Peptide Sequence Number=SeqID_86303
atgaatataaacagaacacggaggccctttatctccttaaatgtttctttcaaaatattcaccaagcttgccctttcatattctccaaaaatcatcaaactccgtaaatttccaatgtctacccttctcttcaatttatccatttcttcaccaaaagtttcattatagtcattggacatcaagatggataggtggcgaatagatggttggacatcatcagctctaaaactagaacaactgatataggcacattcttttgatgaaacaacctgtgcaagctcatgcatcaaatcatgcattacataataattttgatctcctttcatcagaaaaccattatctagctgccaaaaatattgttgggatatcccagtttggacctgacttcattggtggcattacagagaaaagtttcacgcacctgaaggaggttcagcttcatgatatgccagaacttgtggagtggattgggggagggtaacacacatttgttctcaaggcttgaaagaatcgagtgctctaattgtccaaagctcactgccctaccgttctcaaggtgct

SEQ ID NO: 20330 - DNA, 265 bp, Setaria italica
  Peptide Sequence Number=SeqID_86304
gatagccttcttaatgtcctcataggaggcacccttctggagtctaacggtgaggtcaacaactgacacatccacggtgggaacacggaaggacataccagtgagcttgccgttcaattcaggaagaaccttaccaacagcctgcagtaaattaatatacaagttagatgcagaatcacaattaaacttataagaatatagaatggttgccaactttacactaagcagaaccaaagttaataatgaagccttttaacacatgatt

SEQ ID NO: 20331 - DNA, 583 bp, Setaria italica
  Peptide Sequence Number=SeqID_86305
tgcagctcatgccctgtgctgcacagcagttgtttttaagctgctctaaaaagcagtaagtggaaagtcctatagtttgctcaggaaataaaataaagttaagttcaaccatacaactctgaactcttggtcctcattggggtcgcttgtgaaaattgatcaacattttgcaattcattttaaacggaacacagttagccaaacacttataaatatctaaaggcggctgaacagaaagagatcaacataatccaaccccaatgccatccagagtttagaacttattctaattactagaaacataattcatacatccaagaaaatcatgcaacaaaacaaaaggagagcggaagtatcattcatccgcatcctatgcagggattagaagattccataaaaaaaactggaacaacgcttgaatgatttcagaactacaggctactgctagaaataatgaaatcactattatgacatctttgggttcccaccaaattttggaaatgttttgagacccttagcaaatgattgatctaatatttttctagctagtttgggccaatggcttctgagttgcttgtctatt

SEQ ID NO: 20332 - DNA, 395 bp, Setaria italica
  misc_feature (42)..(42): n is a, c, g, or t
  misc_feature (48)..(48): n is a, c, g, or t
  misc_feature (367)..(395): n is a, c, g, or t
  Peptide Sequence Number=SeqID_86306
aagaaggatggtgacattgggaaggctgaaggcagcattggnggaaanaaggggaagatcaataccctgagcaaggatattgagctgctgcaactcgcagtggctgaggctcagaaaaggaggaagggtggcatctggacatggctgtatgctgctaccacaaccatggtggctgccatttccttcatatatgccaccaggtccaattgaagggctgctagtttcattttttactttttctgcatttcttttgcacccttactgatatgtaactcaaaatgctcatgttgctatcctgctgtattgctactttgatgaatcagctggttatgaaatagaagttaaaacctttagtacttagtaactnnnnnnnnnnnnnnnnnnnnnnnnnnnnn

SEQ ID NO: 20333 - DNA, 547 bp, Setaria italica
  Peptide Sequence Number=SeqID_86307
ccagaaacaagaccattattcagaaggcggaaacaacagcagaatcttcttcctgtgccagcgcagaaaacatcctctataatatggagctgcagtacatgccaggccaatggtaccagcgaagcggacctgaaggagcatctcagtggaaaaacacatcaacagaacatcgaaggacaatgccaggaaggtgacggcatgactaagaacgctgagccacaagaagcgatgtgtcaagagagcaaacttccacaactttcagagaagccaccttgtaccatttgtcaagataattgtactaccaaatcagaattggggagcctacttttagcaaagattcagaccctattggatgcaatcgataacatggcaatgaattccgagtcacacaaagctaaatcgcctccaaacaacatgccgcaacatgcagagcagacttcacaatcgaattgcagcatttgtcaaactggttcgacttcacaatcgaattgcaacatttgtcaaactggttctggttaccagtcatgttagctctgaacctcaatct

SEQ ID NO: 20334 - DNA, 382 bp, Setaria italica
  Peptide Sequence Number=SeqID_86308
ctaaccctagccgacgaggatgccgaaagctggcggcggcggcggcggcggcatacgcattccgcgccgaggtggaggagcgcctcatcaacgaggattgcgagatctgaaggacaacactcggcttcctctacggcctcgccgtcgcccaggcgctcgagctcgagtggcccctcccctcatcgtgcggtggctccccgactgcgacgagccgcgggggaagggccactccttgcagaagattggcgcgcgcacctccggcgacccatcgacctgatgctcgcgcaggtacagcggcccatcgacgacgcctagggtgacgtgctccactacgacgactaccacgctgacatccgccgcgcccgtctaagctgcagaggga

SEQ ID NO: 20335 - DNA, 811 bp, Setaria italica
  misc_feature (40)..(40): n is a, c, g, or t
  Peptide Sequence Number=SeqID_86309
cttagagtccgcatcaatatcattgacacaagtccagtgngaaagataaccatcatgaaagaattgaaaattgagaaccagtgaatctggtgttcaaagaaaggatagtccaggtacacatcaaagcgatgagcaaatgttatgtttgttggttcccacttgacagaatatgtcatatccattgccttatttgcgtcaataagctttggactttcttgagtaagattaacatggataatctgattgccattgtatctgatgacaatattcttgtgggtgaaaagaaaatatttgttatcgttgttcctgtctgcctctccaacaaagccccacagaggcaaatcatcgatgaagaattcgaaccaatataagttttcaatcgcatctgataattgcttggccttgtcaagatcaagatcaagagaacaaatggtggccttatcaacattctttctgaacttgatgtcaatctggctatcgatgagttcattgccaccaaggacctcgccaagccctccccacttgtgcacatggttttctgttgcgtgacagaacgggaggctgtagtagttgtaagtctcctgcgggttgttgtacggaccaaccttgttcacccagagcgtcacaggctcatccgcttggtacttgtggtcggaatcggaggccgcggcgacggggaggaggacgaggagcgcgagggcggcgagcgcggcgccgccggcggaggccattggcgaagggaatggccggccggcgcgggggcggtgctcgtgcctcagttcttctcgccccttgtgtttggagaggtatg

SEQ ID NO: 20336 - DNA, 258 bp, Setaria italica
  Peptide Sequence Number=SeqID_86310
gtttccctcctaaccacaccgccggccggccgcacatcccatcttcgtgccaggcagccgagagagctcccggtctctagactcaccgcaatggcgagtgcacaccgagctgtcatcggcttcctcctcgtcttcctcgcctcacttagtggtgcggcttccaagtcgttcaccatcaccaacaactgcgagtacacggtgtggccggggatcctctccagcgcggggtccgcggggatggacgccacgggcttcgcg

SEQ ID NO: 20337 - DNA, 507 bp, Setaria italica
  Peptide Sequence Number=SeqID_86311
tccggcgttccgtctagcgccgaagaagcacgcgcttcttcccccaaatcttcctctccgccatgctcctccctaaataatcccctcgaccctgcaccggcgactaaccctaccagcggcgatagcaaccatgcggcaagctgggagcagcagggcagcggtggcggcgcgagatctgctcaaggcggagattatcttgagcatgtagacctggaggatctagaggaagaaatcccaaggctaatggggcaaaaaaaaagctagagcatgcaaatacaatgaagtatttgaagaaaaaaatattttctgattacaactgaggtgttcgagtcacattgaagatgatctcagttgctttgacagtttatgatgtatcttgcaggtgttgagtcacattgaagatgatctcagttgctttgacagtttatgatgtatcttgcaggtgttgagtcacattaaagatgttctaataaaaaggctgtggatgttactgttctgatgttaaga

SEQ ID NO: 20338 - DNA, 924 bp, Setaria italica
  Peptide Sequence Number=SeqID_86312
accgaagaagaataacacaaggccgcggggtcagcagcatgttcgaggggatggagagggcggggtacggcggcgcggcggcgatgggcggggtggtgctgtcgcgggaccccaagccgcggctgcggtggacgcccgacctgcacgagcgcttcgtcgaggccgtcaccaagctcggcgggcccgacaaagcgacgcccaagtcggtgctgaggctgatgggaatgaaagggctcaccttgtaccacctcaagagtcatctccagaaatacaggcttggcaaacagagcaagaaagatacaggcttggaagccagcagaggggcattcgccgcacagggcatcaatttctccgctccagtgcctcctagcattccatctactgccggtaacaatacgggagaaacgccacttgcggatgcgctgaagtaccaaattgaagtccaaaggaaactccacgagcagcttgaggtgcagaagaagctgcaaatgcgaatagaggcgcaaggcaagtacttgcaaacaatactagagaaagcccagaacaacctgtcctacgatgcatcaggagctgcgaacctggaggcaaccaggtcgcagctgacagacttcaacctcgcgctctcgggtttcatggacaacgtgtcacaagtgtgcgagcagaacaatggcgacctggcgaaagccatatccgaggacaacctcagagcgagcaatctaggcttccagctgtaccatggcgttcacgacggcgatgatgtcaagtgcactccggatgaagggttgctgctgctggatctgaacatcagaggaggctacgatcaccgatccgcggcggatttgaagatgaatcagcacatgaggtgaaagattcagtagatggacggcaacaaccgtagtttaatctaatagttccccttgttgt

SEQ ID NO: 20339 - DNA, 278 bp, Setaria italica
  Peptide Sequence Number=SeqID_86313
cgggtcgttcatctggtcagggaaggactgttcttgacggagcattgcccgccgggtctcctccgccacggcgggctccggcgacgacggacggcagttgagatccaaatccactaaagcagtcatccttcccggcaggaagctccagccaggactgagccaattcaattcagatcgaaccaaccaatttaatcatccacaacgagtaaaaataaatttaacttataatcgtacacgactgcgaccgagaccatacaagaaagggagacttacagacg

SEQ ID NO: 20340 - DNA, 976 bp, Setaria italica
  misc_feature (25)..(25): n is a, c, g, or t
  misc_feature (37)..(37): n is a, c, g, or t
  Peptide Sequence Number=SeqID_86314
tcgtgtcgtcgttcgtcgtatcttntttgtttttttntttttatttttttttttttttgttctcaaaccactccaaagccaaatagcataaatcacaacacacaagtcacacatgagtgtacacggcgcaccatgacaccaacgaaaaacaaagctatagatcatcgtggcaatttcatatccggtaccggaccagtggatccttgaactgaagccgctggtgatacaccctccacgcatagtcctccagtaggaaagagtggaacctccatccatccccgtctgctccggcgccatctgcctcttcgtcgcggtcctcatcgccttcaccggcggcatcggaggagagcgggaccaagggcgagatgatgttgtccagggacagggtgacgaggaccgtcagcgacaagcggtcagtctcgccgtgctgcgtgcccaagggtgcggaggtggggcgagccatccctctcactttcctcaacttgccgttgctccacacctgcgcaatgtcgccgatggtgacaagaagcgcgccgtcgcgggcgcccactgccgtccactcgccgccctcgttcatcacccagctcgccggtgccgcttcctgcccggaagcctcccactggcattgaaggcccacgacgtacgggtacgccttcgccttccctgcggccggaggagcagtatcgccggcggagaccttggaagcccacacgaggcacctcgccttcctcctcccctccgcgaacggctcctcccggatgccagcgtcagggcacccggagagcagcgccaccacccgcatgcccacgtccctcatccgccgcgcgtactccgccgcagccgggagcgcgtccatgtccccctcgcaggcgtcgaacaccacggcggggtcatcggcgccgccgtccgcatcctgatcgtccccctcctcctcatcctcctcctcggagaatccgagcgtgcgaagattcgaatc

SEQ ID NO: 20341 - DNA, 464 bp, Setaria italica
  Peptide Sequence Number=SeqID_86315
atacaggcatggatcctgacgagcctagagatcatcgatcgtccaatgtcttctgcgagcgtgcgccgcgtgtaattcatttgctatagatattgatttttttttgaaaaagttcagtttactcctccacttaatatccttaaactatggctgaatttgagtaaccctagactttaagactgtttttcaagccttctattttatttctaattgaaacgggtgcactttacaccttttgctcgctaaaccaaaagtgtcgtgttaatgatttcgatgctgatgtgatggtttactctcacatggcgtgttgtgttcttataacgtgctgagttcacagcacgccatcaccaccaccacccgttagagccatctctccttcttccaccgcggtgactaccccaccttagtgatgccttggtgagcttcgcccaattctccaagatctccatgtgcctgtgctgcta

SEQ ID NO: 20342 - DNA, 444 bp, Setaria italica
  misc_feature (433)..(433): n is a, c, g, or t
  Peptide Sequence Number=SeqID_86316
atcgcacaaggcaaaatatgggtagtagtttggggggagtcgtagacatagatcgcgcaaggcaagaagagatagtaccgatgcttgcactaaacattttccaagtggaggtacattcaactcttccgaaatgttcgtcgaggaaaaggcaaagcacaatgatgttgaaaaggaaggggaaagtaaaaaggatcacttaatttatcagctagaaagtgctgatggttcaagtcactcggctcctgaccttgctgcagaaatacgaaagacgatggttgatgttgaacctactatgaacattatggagtgtatggacctctcaaaagaaaaggatagctgttctttgtcactgaattatgttgaagggtccattcctttaaactgtgatgttgagagatcccatccatttgttagggatgattcttgtcctacngtaccaattgt

SEQ ID NO: 20343 - DNA, 247 bp, Setaria italica
  Peptide Sequence Number=SeqID_86317
tgccaatgctagtgctgtggttcagcaaacttgctacggtgtgttgttgcatggaggagcttccgttgccatggcccaagtacgggaagctgagagcctgcaacatagagaatgaagaagaggtcgaatggaggagaatgaagaaagagatcgagaggaagaagagagagcatgcttcttgtcgcatagcgcctgaatgaaactgcacacgacagaagacgacagcaggcgatgtactgtgctgcta

SEQ ID NO: 20344 - DNA, 1213 bp, Setaria italica
  Peptide Sequence Number=SeqID_86318
ttacggtatacatgcagtgcaatggacggcggcgcgcggcggagaatcgccggagatatccatgcatgcgtcggctgatgatcgatcgatgcggtcctatcgccagatgatgctgccgagcggcggcggcggcggcggcggcggtggcgccgcggccaccgcccagaagtcggaggcgccgctgtcgtcgccggccaggtgcgacgtgcacgacaccggtaccaggcacagccctctgctcctcaaatccttcttgccctcctcgtcaccaacgtctccctcgtcctgctcggtggggccttgagcttctaccgtgccaatgctagtgctgtggttcagcaaacttgctacggtgtgttgttgcatggaggagcttccgttgccatggcccaagtacgggaagctgagagcctcaatttgactcaggaggaacctaatgtagccaatagtctcctgtagtacggaggcagtgtcagtctttccaaatggggatactatctggtgaagtgctgttattctatccccaagcctctcctttcttacctttagagtagattgtgctgaagaagaggtttgaaccctagccttctttggagctgaaccacttgcagtgctgttaccctcagaagagttatcggagtgatgattcttcacctcgggtgcctgcactgtgctgtttgagaagtctagcatgttgctgccgaggcttgcggtgatgcatgacctaggagaggacgccacctgagatttgttggtccccgatgtctggatctcctcaccaccaacaccaccatggccatagaaattgtaagctgctgcagcaccctgattaggcataggtccctcctctaatccttttgacagtagagctgtggcggcgctgtatctctcatgatctccaactaatcccccaagaagcagctggctccatgactctggcatgttgctctcccgcccatcatgcagatcactgcttgcaagagaagtcgcagcgctgttcacctcaggagccagaccagaagagatttgaaggaggtgctgggggaggagcatggaaggagaagataagggtggcatcttgttgttggaggcctcttgctcctcggcacaaggcatcaaactactcatcatattcttgctgtctgtaccaccactccacatcatctgctgcagcaaagagctcttgaattctcctccacccatcatgcttggc

SEQ ID NO: 20345 - DNA, 446 bp, Setaria italica
  Peptide Sequence Number=SeqID_86319
taagttaaggtaaaaggtaaacgtggaaggacacattcccacaccatcaaaagccatcacaatgttggtggacttccaaaagatatgaagttaaaactcattgaaccactcaagctcctattcaaggatgaggtgcggaagttggggagtattttgaatgtgtgggaatgtgtccttccactcccaggaggtgggcatgattcaattacatcagggtacaatgtcccttgaactaaaaatccgggccttttccctatcttctgttccagcttgtgaccaaaatcatcaaaaaacagctatgaattccctgccaataatctttcttttctgctctgggtcttcgacaccctttaacttgctgagaaattgctctgaggcatcaacacatgtaactggcaggtacaaggagagagaacgagtaatgtcaacctttgaaagtgacttgc

SEQ ID NO: 20346 - DNA, 672 bp, Setaria italica
  Peptide Sequence Number=SeqID_86320
ctcagtgacccagaagcaaagtctattcatgaatttagcagagtatgcagtacacaagctttgctgtgtttatcatcgacaaagggtattttgactaaagcgtagtcaatacactaacaactggggccatatatcatttggtcccagcacccaaaggtaaattgctcctcctcaagttccaagcccaatcccaccacaacagcatcagagtaccagttcctattcccactcaaccgtcgcaggtggcttcgatgtgatgtcctggcaaacacggttgatgccacgcacattgttgcagatcttgttgaccacatctactaggaattcatggccaaaatagtaccaatctgcagtcatgccatcctcactggtgattgctcttaagacaacagcattggagtgggttcgctggtcaccctgaaccccaactgtctgtactggcaagaacacagcaaaagcttgccaaattttatcatagaggccagcatctttaatagcttgaacaaatatctcatccacctggcgaagagtgtccaaagcattgccttgtgtaacatcacctaggacacgtacagcaagaaccaaggacccaaggaaaatagggtagtacgactttaaaaaatagaaatactagggaacaattacaaaataactaccccaaacttaccgaca

SEQ ID NO: 20347 - DNA, 2236 bp, Setaria italica
  misc_feature (2231)..(2231): n is a, c, g, or t
  Peptide Sequence Number=SeqID_86321
gggggagggaggaaggaaggggatcgccatggcggcgtcgccgcagcagcaaggccaaggcagccagggcggctccggcggcggcgggtggtctcccgagcaattctggtcgctgctggacaaggcggaccgccgcttcgcccgggtgcgcgatctccccctcctcggccgccaggagcccgacgcgttcgccaaggccttccgcgcctacactcagctctggcggatgcagcaggagcaccgccaccgcctcctcgaggcgggactccgccgctggcaggttggcgagatcgccgcccgcatcgcccatctctactacgcccagtaccagcgaaccgccgacaccgcgctcctctccgaggcgttcgtcttctaccacgccgtcctggaccgggcctacttcctcgacgccgaccaccacctcaccccggccaagcacctccgcttcctcgccaggttcctccttgtcgccctcctcctcgccaggcgcgcccacaccgtccctcgccttgccgcagacatccgcgcgctcctcgacgactccaaaaagtcattccaagaagccgaatacaaggagtggaagcatgtcgtgcaagagatcttgaggtttcttcgacgctgactcgccatttatgaacatgaggccgctcaggtacagctatgcatttgatctgcctccggacaagcttccgaccgtaccgcctactgtcaagaagcgaggtcttgtcttaagtgacgccatactatgcagctactaccccaacgaggtcaaatttacagacctctccatagatgtattcagaatgcttcagtgcctcgaatgggaaccatgtggttcatttgcgctaaacaatggttacagtgcccacgatgaaagtggacaaaatcaacccaatctcctgaaggatctaagagatgccgcactgcctccaaatccacttaagacaaatctcaatcgcccttcggtgacacatttcctaacagtcctggccacaaaatgcgaggagcttccgtcgaatggtatcatgttaatatatctttcagctgcaggtgagatgggaacttctggatgctgtcctgatactggtgaaaagattgtgagcaactttagtaagtttgatatatccagtactagtcataccagttcaaaggaagacaaagaaccttgcctatggttaggctgccgagaaactgagggttcaaattgcatataccccggtgatttaatcccatttacaagaagacccctatttttggtgattgacagtagcatcagctatgcattcaagtctattcatggcattgagaggggggagacagctgccatgttactctcaccaagttcccgatctgctgctgcgggattcagtggtgattcaactcgacacactggtagtcagtttactatgttcctgacagctccattgcaagctttttgcctcctgatcggcaacaatggggcagatatcaacagggatgcttataacaaggctgaggagttattatcatcatccctaaatgaatgggccactactttagttgcatcatcttcacttcatcctgtttgggttgaagtcttaagcgatccactcctgagacggctgcttctaaggtttatcttctgccgagcaaccctttccctgttcaaaccaacaagcggtaaggcagaattcctcccgacctgcgtgcctcctctgcctgagtcagtcgatgcagagagcatgctctcccaaagctgtgtgatgcgattcgcgtcacacttcggctctgccagccagttcgcgctttctgagattaccacttggcctgatgccgacgccgaggaggctggtgccatcggctcagctggcagtgccaacagaggtgtgcctgagacggtcggagattcagacatctcatactcgtctacctcatctttttgatggacggctaggcggctctgcggcagcagcagcggcgctacatgatctgttgctaattgttgctgtgccgggcgtgctcttctaaagcttttgctatgtcatctgccgatgcggacccattttgtaactaccggtgccccttcgtgcttgatattacacctcaagcagaagtaggaatggcttatcttgtttctttttactgaatttgttagtcgctggaacattctgttatttgttactgagtttggaaacgtggaggggctgtgcgagaagattggaagtttgcatggttgagaaatctttttttanatgtt

SEQ ID NO: 20348 - DNA, 1004 bp, Setaria italica
  misc_feature (959)..(959): n is a, c, g, or t
  misc_feature (979)..(979): n is a, c, g, or t
  Peptide Sequence Number=SeqID_86322
cgtgggcgcccctgccgccgcagccgacaccgtccccgcgaaaagcccgcgtccggccgcctccaaggtccccgccgccgttctcgtctgcctcttcgaggatcccagctgcgggccccgcgtcctcctcaccaagcgcgcttcctccctctcctcccactccggggaggtgtcattacccggagggaaggttgacgagggggacgccgatgccaaggccacggctttgcgggaggcgaaggaggagattggattggacccggcgattgtctctgttgtgacagttcttgagccattcctgtccaagaacggggtcaatgttgttcctgtaattggcatggtttcggataaagcattgttcaagcctgtcctgaacaaagctgaagtggaggacatctttgacgcaccactggagatgtttctaaaggacgaccaccggagaacaaaacagatgaattggatgggcatagatattccagtccagtttttcgactatgaggaagacggcaaaaagtttgtgatttggggcctaaccgcgcacatcttgacccgtgccgcggcagtcgttttgcagaggcaaccatcgtttgccgaacttcccagacccaaatatgcaagcgcacccaccgctgacactgatgagaccaaaccctgatgttttatggttatatactggcagggggtgttcggttcagaaccttttggttgtagaattatctttccctccacatcttggctgcgaaaggtaccaaaaatttgttttgtacatttcactatcgatgtgtagattgtattgttatgtatagcagccaccaaataatattggcacatgtatgcgccctcttgttttgggcaatgaccacttggtggaagaggaagaccgatgtactttgtgacaaaagaatttactataaactccagaaaaaatggcaatttctttttgcaggaaaaaaaaaaanaaaaaaaaaaaaactaaagngacacgcaacagggagtaggcaagg

SEQ ID NO: 20349 - DNA, 330 bp, Setaria italica
  misc_feature (1)..(27): n is a, c, g, or t
  Peptide Sequence Number=SeqID_86323
nnnnnnnnnnnnnnnnnnnnnnnnnnngtgcccatcactcagctccccattacttccattgctcaaaatcacggcggcaagtacatgtacagatcgatcatagcaacgaacaagccaagaaaggaatttcaggactcaatggcccgatcgaaccccaccgctggagagtgaaaaaattgctcttttttgtcggtaaaattgtgtgcgccgcaatgtggggcgatggtggatgtactgcaggctaaccgatgcgggcgccgggcctgctacgacgaggaagcggcgcgggaggaggaagacaggccggcctgccttccgccgtccggtagt

SEQ ID NO: 20350 - DNA, 424 bp, Setaria italica
  misc_feature (355)..(424): n is a, c, g, or t
  Peptide Sequence Number=SeqID_86324
cagaaggtcacggccacaaagacttactccttcacctgctgggtgctaaaaggaggcaaatgaataccactactagacacagatgtttcctgcctaaattgtttttctcaaatgatgttccacatcatttcttctcgatgattttcctgaatttttttaatggcttgttgtgtaatatcacctctaagatatgttgatgaatttcttgtaatttattggtttggcatgtaatatcactaccaaatattatgtatattgatgtatttgttttttatataataccactgtctaaggtattttggatgttgtaaccctttcctgtttctgagcttgaatgctacttacttaaaacctnnnnnnnnnnnnnnnnnnnnnnnnnnnnnnnnnnnnnnnnnnnnnnnnnnnnnnnnnnnnnnnnnnnnnn

SEQ ID NO: 20351 - DNA, 627 bp, Setaria italica
  Peptide Sequence Number=SeqID_86325
gtgaaatctagtattatactacagaatcatgcatgttaatattttaaagaacaccgcatatagcatcttgctaaataatgcaagcacaaaaatgatagttttgctcaacataaactgcatgctttctgatcatcagaattatgcaaagcaaagcaagtggcaacttcatgcatgctcctcaaataacagttgaactatgtatcttaccagatggtagctccccaactccaacgtacgggacaggaggcgggtacaagccaacgccgacgccggattacagcacaacgccaacaccatcttacggctctacaccaagcaccccaagttacaccttcctacgggatcccagaaatccccaagcacggattcactggatcctgcgagtaagagcccatatgagcatgcatcataagtattaaacattaacgtgcaaaagaatttaacatgatcgttttggcatgaaaattacagctactggaagagccacccagacatgatcgttgcagttgttggatcccttggcaacattggcaagactttggtactgcctgcagtttaattgtcggcaagaagcttgagaatctgcatgatgcactctcaaacaccagaactgatggtgtcggcgcc

SEQ ID NO: 20352 - DNA, 993 bp, Setaria italica
  misc_feature (939)..(993): n is a, c, g, or t
  Peptide Sequence Number=SeqID_86326
tagtctattcttcatatctctaggttctcaaccagttcttaggccacatattcagtcttgtctgtagacgttgagagcaagatggccagcaaggttcttcttgtcagtgctgtcctggtggggctcgtcaccctgagttcttgcaggagcttgggagaattgtctgagcagaagacctactcttctgctcccagctatggtagctccccaactccaacgtacgggacaggaggcgggtacaagccaacgccgacgccggattacagcacaacgccaacaccatcttacggctctacaccaagcaccccaagtacaccttcctacgggatcccagaaatccccaagcacggattcactggatcctgcgactactggaagagccacccagacatgatcgttgcagttgttggatcccttggcaacattggcaagacttttggtactgcctgcagtttaattgtcggcaagaagcttgagaatctgcatgatgcactctcaaacaccagaactgatggtgtcggcgccctgatacgtgagggagcagctgcatacctcaactccatcgtgaacaagaaatttccttttaccacccagcaggtgaaggattgcatcattgtggccgtgacctctgatggtgctgcttctgcccaggctgggatcttcaagaaggcaaatgaataccactactagacacagatgtttcctgcctaaattgtttttctcaaatgatgttccacatcatttcttctcgatgattttcctgatttttttaatggcttgttgtgtaatatcacctctaagatatgttgatgaatttcttgtaatttattggtttggcatgtaatatcactaccaaatattatgtatattgatgtatttgttttttatataataccactgtctaatgttaaggggatgttgggtattgtttgtttaaannnnnnnnnnnnnnnnnnnnnnnnnnnnnnnnnnnnnnnnnnnnnnnnnnnnnnn

SEQ ID NO: 20353 - DNA, 1266 bp, Setaria italica
  Peptide Sequence Number=SeqID_86327
gttttacatgtaattcttcttttgctcttcctttccagtgtttatcatgtacaacgaacatgacataagaacgtggctcatttgatcctctagactgatgctaacctaatacgaaaagcatcatacagacatgtatgctcaccatctttaggtacagaagaatgccaactcattaaagaccaaacgaatcgccttcaccataccacatcataaggagttaactaccgaaatatttcttgcagcactctgggttgtccggaacaatggtccttgtaatcacgaaatgccggaaatgactgctgctgtgatgcaacagaagccttcgcatcaaatgctttgttctttaacaaaatcatttgatgacgcatacaaacattctaaattgatccagctacaccagcacgagcccgcagtgtctctgtgcgtttacttttttccatttgttccactagccagtctatgccagatttgatccccctcccatcataggcggatacagcctgaaacatatatggcctatcatccagctctttaaaattcagaaatttagccaattcttcatcattgatgaccccaggtaaatcctgtttgtttgcaactatcaagagcggtgcccctctcagatgctcatggcgaataaccttctccagagcagatttggcatcttcaaatgacgatgcagtagcagcatcgataacaaacattatggcatgagcctcttcataatatttctcccagattgtgcgtaggccaacctgaccacccagatcccagaaaacaagttttgcattcgcatcttcaatgcggccaatgttaagtccaacagtgggaacgacacgatctggtggaagtccttcccccttcagatatatggatttcaacttctccagcaaagtcgtcttgccagccttatcgacaccaagaataagaacacggaactcgtccttggtaaacacatacttccataggccatagaacaaggagaacattgctctagcccggtggtcctctcacaatgaactgccggcttatccggcgatatccgaccagcaaggcacgtccggagagccggaagacggcctggctacgcgaccgggctggttccggcgaagtcaccccgccgtctcgactgagcgcgtgaggcgctccgcctggttttgagccgcccggcggtgggagcgcgcccaccggagttaggagtcgcggcactccctccccaccccaccgctgggccggctggggcctgttgactggagcacgctcgct

SEQ ID NO: 20354 - DNA, 1783 bp, Setaria italica
  Peptide Sequence Number=SeqID_86328
ccaccggcgagatcgtcaactacattgcggtggacgcgtaccggctcggcgacgccatcagctggctgcacatggggtggagctttccacttcagctggtctttgcagtggccacgctcttctgggcgctgaagcttggggctcttccgggtctggtccccctagtcatctttggctttctcaacgtgccgtttgcgaagatcttgcaagggtaccaggccaagttcatggtcgcacaggacgagaggctcagatcgacgtccgaaatactgaacagcatgaagatcatcaagctgcagtcatgggaggagaggttccggaacatgatcgagtcattcagggacggtgagttcaaatggctgagggaaacccagatgaagaaggcctatggtgcggtcatgtactggatgtccccgacagtcgtctctgcggtgatgtacaccgcaacagcaattatggggagcgcacccctaaacgccagcaccctcttcacggtcttggccaccctgagggtaatgtctgagccagtgaggtttcttcctgagatcctcacaatgatgatccagtacaaggtgtcgttagaccgtatcgagaggtttcttctcgaagaagatatcagagaggaggatgtgaggagggtaccttcagttaactctgctatcagagttctagtccaagacgggaatttcagctggacggcaaacagagccgatctgtcactgaggaatattaaccttagcgttagcagaggagagaaggtggctgtctgcggcccagttggctcaggaaaatcttcactgctgtatgcattacttggggagatacctagaatatcaggactagttgaggtattcggctcagtggcatatgtttcacagaactcctggatacagagcgggactgttcgcgataatatactctttgggaagcctttcaacaaggaactgtatgagaaggcaatcaaatcttgtgccctggacaaggatatcgaaaatttcgaccacggagacctcacagagattggtcagagaggactgaacatgagtggaggtcagaagcaaaggattcagctggcaagagccgtctacaatgatgcagatgtttatctgctggatgaccctttcagtgcagttgatgcgcacaccgctgcagttcttttctatgactgtgtgatgacagcacttgctgagaagactgttgttcttgtgacccaccaagttgaatttcttactgaaactagtagaattctggtaatggaaggcggtcaagttagtcaacaagggaaatattcagaactactggaatccgggacggcatttgagaagctggtttctgctcaccagtcttcaatcacacaattggatactagtgccagccaacagaaccaagttcaagggcaactggtgcctgatgaaaacatagtgccaagtgcactgcagactacaaggcaggctagtgacatcgaagttgctgcaaaaggtacttcagcagcaatccagcttacagaagaggaggagaaggggatcggggatctgggatggaagccatacaaagactacataaatatatccaagggcgctttccaattctctggcatgtttacttctcaggtgctcttcacatgctttcagatcgcatccacatattggttggcagtggctgttcagatggataacatcagtgctgcactcctagttggggcctattctggcctttctatcttcagctgcttctttgcatactttagaagtcttttcgcagctattctggggctcaaggccta

SEQ ID NO: 20355 - DNA, 533 bp, Setaria italica
  Peptide Sequence Number=SeqID_86329
ccggcgccgccgggacgatgccgaagccaaggaagcggccgttctggaggctgccgctctggcccgtccggccgccccgcacggcggcgcagcgagactgatgcagccgtcgccggctgcagcttccgtcgtcagataatgttaccgctcgctctggaagttccgcagcgtggccagaggcctggtcttccatgagcgagagagtaggacaaccatgatcatcatggcacgtcgtcctccacctccctcgcttgaggcctaccaagattgcgaggtgcgcaggtctggaagggtgtcgtcgttgtgtataaaaggctttgcctgttgtacagtttggggacaaaagcgttcgtgcaagctgtgacttgtgcgccgtctgatgaacatgatgaggttgaggttgccagtgccagggcatggtccgttgcttatcagcctgaatcggtggtcatctgtttgtgccccagttcttgccgtggaatgttgaaataagaagagtgcatctccaagctctttcttgtaacaaaaaaaaa

SEQ ID NO: 20356 - DNA, 292 bp, Setaria italica
  Peptide Sequence Number=SeqID_86330
ccgctaaaatagccattagaaccttgagtgtcctagcacatgccccacgttcatcctctcacggccattgagggcggatccacatatcacccgctcactagtcagaacaggtgaggtgatccaatgttcatccatttgcattggagaaggtgaattcagatcatcaatgtcagaagatggttgtagtagcttggccttcttttttgactttgatctctcacaaggctaacttttttgatgaatgagtaggacacagcaataactaaagttttcttcactcccatctgctacg

SEQ ID NO: 20357 - DNA, 2522 bp, Setaria italica
  Peptide Sequence Number=SeqID_86331
ttttttttgtttagcgaaacagaactatctgcttaaaacaatgtctccacttccaaaatttgggggtatcaaccaccacgaagcagccgctacatgattcaaaccgtcccggatacaacagggaccacgactgaccacatcacaaacgaactagacaattcggatgccggaaatactacaatagtgcaatatttgaatagtgacacaagcctagtttacacccggggaggacgcctccacccaccttgcaaagtgtccttggccacattgccacaccatcacccttctgggttgtgggtccccttttccgtttcaaaatttctctatacaaagatagaataggcctaattcccacagttgcacagccatcaatggtagtatcacttgtagctgagcagaaccgagttaattacatgcatgagcatacggatgctggtgccatctgatgagctcatagtggggagtgaccgctggtgggccaattggctgtagacttgatcaaagatgggtcgcacatgcacggcaatcatcgggtccgctgggttgattgccatggcaacatctgtcatccattgaacctttcgtgatgtctcattgtttatgtcaactgctagctgctgcaatagggccaagaggaccccctggttaagagggactgggaccattgccaataatgcacgcaaatcaacctgagagcacagccacgatactatggaaacatcactcctttgaagggccattgtaaatgcctcgtcaaacttgcgttcagataccagtctgcccagctctttcatcggatctaacggagcctcaaccttcacctcctgagggccgcccataggaccattaatgggttgcaaagcattgggagtatgtgccttggcattcccagaagcaacaagtgccaatagcttccgttggccatcaagtaactctgatgaaaaactctgggtgattgatgatgcagaattgatggtttcctttaaagttaacgctaatggagtatgtgctgcctcaagttgctgttgaatagcaactgtgtgctcagacattcctttctgaaatgtaccatctacttgctcaaacattgtcttgcatgattgttcaaatgctggaacaagcaatgattcaaagctagtgcgtaaagcatcctgaagagcctgttttacagatgtgtggaactgcatttggatttgcctggcaagtgtagcttcaagttttccactaatagacttgtccagctgattgcacaccttgtcacccacccctttctgaactgaatcagaaacagcagaggctatgcacttctcaatgataggtgtaattgctcgagcaacaacaggcccaagtgaagagatttctttcttaagtgacttctccagattagaaggaacatccttatttattgagctcgtaatgagagtaaccaactgctgcattcgctctctgtcagccttttcacgcttagtgttttcttcctggagacgaacccaaaaggcatcaaagtgagccttgatagatttctccatggtgcgccctaatgatgtctcaagttttttgctttcctttgccacagatacaggaatcatagtatccaacttcttttccatgtccttctgcatacctatgagctgttgcagcatcccttgtgtggcagcaacttcagggaaggagctgattggagggtatgccgagctcaaaggctcatgtgactcagttgagttgaaagcactcacagaaggagatggttgaccagatgtttgagggtgtaaaactttctcctccttcgtatacgacgacgattgctccctggaagcagagtaatcacttttctcaggcatttccagagagtttttccggacattttcatcagcaacgccagtatggtccaacgtcggtttatcagatggtgcttgtgattcttccacgctgtacttgtcagttgtcactgagcgctcactgatcatttcaacagtttgctccaaggaacgagttttctccatatgctcacaaacaatctgagcttccttgactgcttcaagtcctgaattttgatctggtttactctcatcaatatgttttggttccaattctgcaatccgagagcttctactagaaacatcttgaatttttcctccatcagatttagagacatcattgttttcagcagaagagagagtgcccgatataatttcagatggagtaaccaagtgtgtagcattccctccaacctgaaacatcaaacggggatttggaagcattgcaacatcactgtgaccatctcttagctcatcctttcctaagatatccttcctgatgggcatgggcgtatcttgccttttcaaagcatcacgctccatgtttctgtttgctgtatagtcaaaagctgattgatctatatcacgagtcccaggtgctggtcctgatccaggaagctccatctttgatgcaggaggtgcagatggaagatgcacagagccatcaccttctgagtatgcaagtggtggagctgatggtttcgg

SEQ ID NO: 20358 - DNA, 1575 bp, Setaria italica
  misc_feature (1545)..(1575): n is a, c, g, or t
  Peptide Sequence Number=SeqID_86332
ctcgttggctccgtctagggttttagcccctgccgccgcaacctccccatcccctgccgccgcaccctcctctcctcctcgcgaatcccgtgctcccccgcaacacgctgggcgacgagcgtctgcgccggcggccgagatggaccggtaccagagggtggagcggccgcggaacgagtcgaccatcgaggagaacgagatccgcatcaccgcgcagggcctcatccgcaactatgtctcctacgccacctccctcctccaggagcggagaattaaagagattgttttgaaggccatggggcaggcaatcagtaagtctgttgctgttgcagagattatcaagaaaagaatccctggtttacatcaggataccaatatcagttctgtcagcattactgatacctgggaacctatagaagaaggccttgtcgcgctggagatgactcggcatgtttcaatgatttcaattaccttgtctcctggagagctggataagaacactcctgggtaccaagctccagcttatgttgaacagcccaggcaacagcagcgtgtccagcaggcaccaccaccgcagcgccaacctcgccgaccacagggccaattccagcagcttgagtatgaagactcctatgcacgaggtcgaggcagaggaaggggccgtggacgtggaaggggttggggtagaggaggttatggcggttatggtggatatggaaacaaccaaggtgggtacaatcagggtggtgggtattatgataatcaaggtgggtatggcagctatgataatcaaggcgggtatggtggtggatatggctacaaccaaggcagatatggaaactaccaagaaaatggtgggtatagccgagggcgaggtggtggtatgcgtggaagaggcaactggggttaccgtggaggctatgatggaggcaggggcggtggctatgatggaggcaggggcggaggctatgaaggaggcaggggaggctatgaaggaggcaggggtggtgggtatgaaggaggcaggggtggtggtggctatgagcaaggcaggggtggtggtggaaggggctatggtggtcgtggaaggggaagaatgggcggccgaggtcgagggaactgagcacaggcgcaaaatccatgggcttcttgtgtttcttcaatgcatgctttactaatatcagggaaaaaagataagttatctgagcatttgtgttggaagccgtcagttatgtgtgaggtttctattattttccctgagcgcgaggtttggttgtgagcataatgcatttgcaagttttatcatgttgtcatctttcaatatttctgctgccgaggttgcttgttttcccaatggtcgttgaatgctgagcatgctgccctatgttcatgcccgcagtattaacagatggaaactcttcccgtgttaaattgttcattctatttgtgcagttttgtttcaatttatgtatccatggtggttaataccatcagattttaaactcagttttctttttgttgtctaagttattttgtccggtcgtnnnnnnnnnnnnnnnnnnnnnnnnnnnnnnn

SEQ ID NO: 20359 - DNA, 596 bp, Setaria italica
  misc_feature (24)..(24): n is a, c, g, or t
  Peptide Sequence Number=SeqID_86333
cccgcggcacccacgacgaggagngaaacccaaggaggaggtagagttgcaggcggagctgggccgcatgaacgaggagaaccaccgcctgcgggggatgctcgcgcaggtcaccaccagctaccaggcgctgcagatgcatctcctcaccctcatgcagcaggcacagcaccagcaggcgccggcacccctggccgccgtggcgcccatcgctccgccgccgcgacagttgcagctcgaccagcagccggcgtccaactcgtccacggaggtgggcagcccgcggcggtcgtcgtccaccgccaacaacaaggaggacagcccggaagccaccggggggccggcggaaggacggccgcagcagctggatcaggcgagcatgaggaaggctcgcgtctcggtgcgcgcgcgctccgaagctccgatcatcgccgacggttgccagtggcgcaagtacggccagaagatggccaagggcaacccctgcccgcgagcctactaccgatgcaccatggccaacgcatgccccgtgcgcaagcaggtgcagcgctgcgccgacgaccgctccatcctcatcaccacctacgagggcacgc

SEQ ID NO: 20360 - DNA, 382 bp, Setaria italica
  Peptide Sequence Number=SeqID_86334
tcgccctccgccacaggggtcaccgaacccggcgcagcagggagggggttggaggcggactcgacgtgggatcccgcaactggcaccacgacccgggcggcgtcgtcgtcgctcgcttcctgggcggcgacgggtgatccgcccataaaattttttatgggctgatgaattgactctggagagtttgtaatcggttaccaccacacggaattcctcccgtgcgccgtcgggatcccaacgaaatatctcatgggtccaaccggaacggataaaatgtcgcgcgggcgggcgggttggtcttggtttttggtttggttcgttttatagcggatcagccgagctgaatattcggtgaatatattgatatgaggaagcgggttgg

SEQ ID NO: 20361 - DNA, 258 bp, Setaria italica
  Peptide Sequence Number=SeqID_86335
catctgctcgaggcggacggcgctgatgggcttgatgccgggggcggccgcgagcggcgcgggcgcggatccggcggaggcggatcccgtggactcgtctacgaggcactcggagccgatgcgctggcggatggactcgacgagctcctcggcgtggtcgcaggcgacgcggaagagctcccagcgctgcttgaaggcctcgagcgcggcgtcggtggccgccgtcttctccccgcccgactgcgcgcgggcctccag

SEQ ID NO: 20362 - DNA, 283 bp, Setaria italica
  Peptide Sequence Number=SeqID_86336
gatgcagcggtcgggcggcggcacgacggaccagatcggccggctgcggcggatggcgttcgggccgggcgcgggagggagcaccaccggcaccggcaccatctcggagtacgcgagcagcgagttcagcaaccccaccagcgagtacgggctgaacccgtccagcgagtacacggccagcagcgggggcgacacgggcgaggtgcccccggccgcggccgcgcagggagggcagcagtggtcggggaggcgcgcggccggcgacaccgaaaggatgagccgg

SEQ ID NO: 20363 - DNA, 1488 bp, Setaria italica
  Peptide Sequence Number=SeqID_86337
ctaactactgcatgtgcacgatgtacattccgggaagctgtcatgctttcagagcgggctgctcgttaccacggagtttttgtctcctgggccagcaaggatgatattgcaatccatagcgaatctccgggcgagcatgagtgctgagttgcgttctctggttgtttcgaagcccagcacaaagctgagctcctttctgggttgccaaaagatagcttgcggggcagcatctccgccgcctctaacaccacacagctgcaatgacgaggaatagaattcctttgcaacaaccgatgctcctttagcgagtctcatccgcagtctcccaatgcaaagaacgtgaagagaatctgcaggctgagcaactccattcacttgaagaacaacgacattatactcggtttcaggattccttataagagcctccacataatcagccaatcctgcagcagggtctactggaccagcagtctttgcgattgagatttgaccaccaaatgtgatttcagcttgaatgtaccgcccaacatcatgtggttctggagcatacactggctttgtagcacctgaaatgatttctttcttgcttccttcaggttgtatgcgaaaccactggattgaaccatttgaaaaatctacagatgcattgtcccgagcgactatgtgcaacattgaacctaaggtttcaagaccttgtaactcatacgagggcatatcattttctccaaatagttggtgtagctccaactctttcaaaaggtgaacataatctgaggatttttcagcaagttgatcacgtagaacttgaatctcgttttcgatgtccattgccttgcttgggcaatgcagcattttcactcttcttgcttcttgaacttcctccttcagttcattcacatcctgcttcctagttcgttgagatacattttcttcctcttcaattgctagttgaactctctgagcagaacctttagcactttccatctccacccgagcattagctctttcttcatcaacaattctcttggcatcttcagaagccagtttcaacgaggctgctatttttgtaacctctgtttttgccgaagcaactcatcttctcttttggacagctgaactgctaaaatatccaccatagatagagactcctcaatttcatccctatttttgcctgctactctacttctcagcgactccaatacattttttagattcttcagaaggatgtctcgctccaataaagctgcatgtctccatttcacctcattagacaacaaggtggctgtgttaaaacccttctcaaatttcatggtgagctcacggactgaaaggcgctgatgcttatcaagcagatctgttgtctccttggcaacagcatccttaagagatggcatttctgggctatctgccaatttgataataatcccatttgaaccattcttgaaggtagggaatttatttctgatgatgtttgctggacgcagccgg

SEQ ID NO: 20364 - DNA, 661 bp, Setaria italica
  misc_feature (637)..(661): n is a, c, g, or t
  Peptide Sequence Number=SeqID_86338
acgccgtggacccgcggctgggcggcgagttcgaggagggcgagatgcggcgggcactgctggtggggctggcgtgctcgagcccggagccggcgctgcggcccgggatgcgcgccgtcgtgcagatgctgagcggcgaagcggacccgccgttcgtgccggcggcgcggccgtccatgagcttcagcgccaaccaccagctgctgctcagcctgcaggacagcgtgtccgactacaacgccctggggctcaccctgtcggactcgtcgtcggactcactcagctcgtcgtcgctgacaagcacgctgcgcaggggcggccacgacatcgggttcagcagcaccgccggcgatgccaggtgagctgacctggccgaggcggcggcgcgccccggtggcgagcggaaatccgaccggctcccataactagctatagagttcctcttccttgtcgatggccattgcgaaaacagagcacaatgctcttccttgtcgatggccattgcgaaaaccagagcacaatgtatgtattgaagtacatagattagcagcattggactccaaagtaccaaaccaaaagacctccatttgttaaaatttagtctcaataatagaattacaagaaattacaagaattnnnnnnnnnnnnnnnnnnnnnnnnn

SEQ ID NO: 20365 - DNA, 241 bp, Setaria italica
  Peptide Sequence Number=SeqID_86339
cgtttctctttcctcgttccggcgccctaccgggagagtgagcttctgttctgcctgctcaactcgagcgccgcttgtcgcgcgcaccgcggcctcgatccggcaagctacttatcattgtcaatattcattgggagatagcatgtctggagagcaggatcatgttagtaaaagctctagctcaagcatcagtagcagtactcaggagagcgaggaggaagtaagtgtaaccattggtacg

SEQ ID NO: 20366 - DNA, 476 bp, Setaria italica
  Peptide Sequence Number=SeqID_86340
acgacagcggaggcgaatccggcaccttcgggggaggaggaggcggtccaagatccgatcttggagcggggtttggggggggttttgctgctgctgttgacgcaattggtgctgatgagaggagatggcgcggaggacgccggaggcgagagactcggagagggaagatgcagcagaggagacgggttcggaggcggcgagcttggagagctggaggaggctccgcgggacttggtcggagtcggagcggaggaattcggcgaggtcggaaccgacctgggagacggcgtcggcaagggagagggcggcgacgatacggcggcggtggtggcggtagaggcggtagaggccgtacccggctgtggccgcggcggcggccaggagaagtcggcgagcgcggcggcggcgggagcagaggcaggcggcagctagcgagtccatcgaggtagggaccgaaagggggaggcgacggcgcg

SEQ ID NO: 20367 - DNA, 433 bp, Setaria italica
  misc_feature (1)..(1): n is a, c, g, or t
  misc_feature (362)..(433): n is a, c, g, or t
  Peptide Sequence Number=SeqID_86341
ncatcgtgttgtctgcattcaccagactttggagctaactctggaggacctagttgtggtgctttcctgaggcctctctccgctccgcttgtttacccaacttgtagtcagtgatgctcgttcgtctgtaccgaatttctagtgttgcatgtcccaaaaggtcaggaggtgtggtttagttatgtagtgctctgtgcttggtggttcgagtacagagctccccttctcgtacttccaaaataaagccatcggatgatagtcccatgatgttggcgcaattgatgtgtgctaaagtgttaatgtgtactctcttattccttttgattaagcaatagtaaactgctaatatcaatgcagcaggnnnnnnnnnnnnnnnnnnnnnnnnnnnnnnnnnnnnnnnnnnnnnnnnnnnnnnnnnnnnnnnnnnnnnnnn

SEQ ID NO: 20368 - DNA, 530 bp, Setaria italica
  Peptide Sequence Number=SeqID_86342
aatacgcatttaatttgttcatatgagatgagcaacaatgtcacattgtaggacatatctgggacttgatcagatggagggagatcgacggaggcgacgttgccctgttccaacagactcgaggcagcaaaggtaagtagtggaaggaattatggacaactacctatcgagacgatgcatgattttctgaggatgatctattctatagttgcagtcgcaaggccgcaacaggagcgaagaagaaagaaatcggctagctacttcagtacttcagtccaagcttgcgcgcctgtgatgcccatggcgccgacacgaggcctctgaggtcatggcggcacaccgggcagctgtggcctttgaagagccacacggtgatgcagtgggtgtggaagggatgggagcagggcaggttcacgggggccgtcggcccggcgccggatgttgtcgaagccgtccatgcatatggtgcactggtggtcggcggaggccggctcggcgacctgcatgacggtctcggcgcagcgcgcacc

SEQ ID NO: 20369 - DNA, 904 bp, Setaria italica
  misc_feature (894)..(894): n is a, c, g, or t
  Peptide Sequence Number=SeqID_86343
ccattacaacgcactttcaatatttttcacataaagcagcagatcgctagctgtgaagtcaatatattgcagctacaaacaagtcatgaggtaggcaagaagaaatatgcaacagctaaggcactaagctaatagtctcacctaaaattctttgctgatatataaagctagttatgtacagtaaattatttaactggatcaagggtcgaggactggaagcctgcagtagaagctaatggacttgtctgccaatctagttcccgggatgaagtactggaataccactgttaagcaagcaccaccaggagcaatgccatagaaggtatagtctggcttggcgaagtgacagtgtagactcttaacaaggtgcttcatattcacttgcactgaaagtgcttcccctctctcaaccgccatatccatacgagtcgaagctgtcagattttgatcaccaacaggtgcatttgcacgatcgccaataacccgaagcttcctgaattcagagccaaccgtaacaagagaagtggaaacttgaagatggagatcgccatattgcgtaacagctactgttagtagatcaccaacattttttagacgatccactaagctttgcaattgtggcagatcaggaacctggactagagtctgagggagatccttggcggcgtcaagggcggcctgcaaccgctcgacgtcggagcgtgagagaggccgcgagatgggcacatcctgcacgacggctgcgcgggagcccttggtctcgaaggtgaggaacggcgtggcggatcgtgaccctgcgggcagcttgttgacgagcctcacctgtatcgcggcggcgccggcagcgtccccggcggccggcggctgcgcgtggactgcgagcacgctgcggancgcgcggtag

SEQ ID NO: 20370 - DNA, 496 bp, Setaria italica
  Peptide Sequence Number=SeqID_86344
ggctgtggcaagctaaaagcagtgctgttgtcacccataattgccagggaatctcttatttgattgacctcatcgatatatttgtccccattatcattaggcacccgttggaggcttcattaaccatttgttgtacagattttccttggaggaaatctctctggataagccaaagaagctttgctggctcaaaagcgacatcttgccccttcactcttccatagaattcttcagcaatttcaacagcaaatgaaagcctggatatatcagcttcacgcaccgtctcaggaaggttgtagataagcactgaacttaagacagttgccaaagcaaatatcctatcatcatacacatttgatttcccaacactttcaaatccttcggtgtctagataaaggacagaaactttggaaccatcaacatccatctcaacaggagtacccaaatccatatacctttggtcttagtatctcgcatatgaccaacccaaaacttt

SEQ ID NO: 20371 - DNA, 596 bp, Setaria italica
  misc_feature (3)..(3): n is a, c, g, or t
  Peptide Sequence Number=SeqID_86345
ganaattttataagcagcatttgccatctcatgaacttgctgcagtttgtctacaggtactggtaggcctaagccatccattttctccctatacaccttcagacagcgatcaaggatggctttattaaaaatttcaacaagggatcctgttgatggaatttcacctttattcaaagcctcaagaatctgctgcaggaaagacacaaagtccttcccattcagatttttcccctgcacgatttttggttttatgatggatgcaacaagctgctttaattgttcccgcctttttacatataatggttcgagctctttgtcctccatgtcacataattttgttctttgtagatgaggctgtggcaagctaaaagcagtgctgttgtcacccataattgccagggaatctcttatttgattgacctcatcgatatatttgtccccattatcattaggcacccgttggagggcttcattaaccatttgttgtacagattttccttctgtttacaatgtcaaagaatccacccttagatacaattcacgtatttagcacaagtaaatatggattgtatggtttagtcataataaaagaatga

SEQ ID NO: 20372 - DNA, 394 bp, Setaria italica
  Peptide Sequence Number=SeqID_86346
tgtgtgtctcaccaattttcagaaagaagcttcaggcagataatttcactgctggttgcatctagagatcgtggagttcctattctgctcgattcaaaacccgaaattctttcgactaatctccttttctattttgtactcacttttctgtcttcctcagtaatgttcatgtgtacagtttttctgcatgattaataaaattaggtaagggcctcccatcccgagttcctacaaaataatttctacacagagaagaaaatttgcctctcatggtcatgggatgagatccacagataaatgtccggcagattaggggagggggttgtcaataactggtcacctgattacaaaagggaggttgcctattttctcctcaaatcacacgcacgctgct

SEQ ID NO: 20373 - DNA, 482 bp, Setaria italica
  Peptide Sequence Number=SeqID_86347
gtggtgtcgtagtcgttggctcgtagcgactgcacaggaaccaatccgttgctcgcagactcgccattggagaggtcctcgagttaccaatcgagtagccttttgctcctcggcgaaagagcgtcgtcctccccggctcctgactcggtgcctcgtcgcgggaggtcgggggaggggcaacggcgaacggcaaaacggcggtaggcggctgcccaagtttgattctgtgggcggcgccgccgtcagatcgccatctgtcctcgttcagatctgcagtttggtggtgaccgatctgggacagagtagattcacttgcgcccacggatggacccctccggctccaagaagagggccagcgccgccaccgccgcggctgacctcaccgacgacctcatcgtcgatatcctgtcgcggctgccggtcaaatcgatctgccggttcaagtgcgtctcccgccactggcatcccaccccgagcaccgc

SEQ ID NO: 20374 - DNA, 418 bp, Setaria italica
  Peptide Sequence Number=SeqID_86348
tgtcttaagttttcgtttttatttgctaagttcgtttatgcatgtgaatggaatccacatgctctggaggctcttcgacgcaatgtttgtgacaaccacgtacaggaacgatgtattatactcgaaggagataaccgtgtgactgcacccaaagtatgtactgggcaaatttcacctttttgctaatacatgaactaggatggttcctgacctttcttttttcatgctggacttgaattagggtgttgctgatcgagtttgtctcggattgttaccctcaagtgaatgtagctgggccactgctgttagagctttaagggttgaaggaggcatattgcatatacatgggaatgtcaatgactcggatgagacacggtggctggacaatgtgttgaatcatcagtaacattgccaaagc

SEQ ID NO: 20375 - DNA, 1277 bp, Setaria italica
  Peptide Sequence Number=SeqID_86349
acattctgaaaaagtttggatggttggatcttgctagaaaagttcgagtgagccatgataacagccatgttctttttcctgtcaatgaagtcttccatgtcctaaatactgatgaccacatgatgatggaacataagtcatgtaaccttgatgaaacgttagcatttactgaaaagaagcttgcgggagataacgtatctcttcaaaatgcattaaaatttttgtcatcttgcaatggttcctttttgaaagatgaactagccatcagccgaaagccttccaagtctcctcaaaacatcatgaaggaacttgtatcttctcttctagaaactaaaggaatgccctctcagttgttggagcagctcccagcaaggtgggagatacttggtgacatcatcatactcccaaagacatgttttaaggatccattgtgggaatcggttagcgaggaactctggccactagttgccaagtcactcggcgcacaacgtcttgcacgtcaaggtaaaatcataccaaatggtacaagagatagtacactggaacttcttctgggtgataacggatgggttacccatcatgaaaatggcatctgttattcacttgatgcaacaaaatgtatgttttcttctggtaaccgttcggagaagcttcgcatgggacagcttgactgtagagatgaggtggttgtggatttgtttgctggaatcggatactttgttctcccatttctcgtgaaggctaatgctaagttcgtttatgcatgtgaatggaatccacatgctctggaggctcttcgacgcaatgtttgtgacaaccacgtacaggaacgatgtattatactcgaaggagataaccgtgtgactgcacccaaaggtgttgctgatcgagtttgtctcggattgttaccctcaagtgaatgtagctgggccactgctgttagagctttaagggttgaaggaggcatattgcatatacatgggaatgtcaatgactcggatgagacacggtggctggacaatgttgttgaatccatcagtaacattgccaaagctcacggactatcttggagtgtctcttcggagcatgtcgaacgtgtcaaatggtatgggccacatattcgacaccttgtggttgacgtaagatgccggccaatctaacaaagcaaacgcgttgagaaatgcattctgtacttaccgggccctgggatgctcgggcgcattgttgcatactgtattgtactacagttatgttcgagcgtggtatagcgcaggaga

SEQ ID NO: 20376 - DNA, 618 bp, Setaria italica
  Peptide Sequence Number=SeqID_86350
catcccaccgcctccccccgccccccgccagacgcaagaaaccggcggccatggatcccccgtccgtctcaggtgatgtcggcgacaaacgacttccaggacaagaccgtggacgagtgttgctcgtgctgctacgactgctgctccagcatcctcgacttcctgtgctgctcgtcttgatccgaccggtgcggctccgacctgtcccggcggaaaattctcaaggaaagcggaggcctcgccatcactcatcactgatcttgattttagtcctggagttcgtagattccttaggtcagccttcggtgatggtatctctgtaagttcgactctattcatcggtaaggaacttgtatcaggtgctgaaataccgtgttaaccttcaaccctgcggtgatttcctctcttttaccgtgcgtgtaggcagatcgaatagctgtttggagttcttaccggtgactgcgctcgtatttgacatacaccgcattacatttttttccgcataaattcatttggttcttctagagcccagaagtacagcttgcaaattttgcgccgagttcttagcattcttttctgcgtttttgcgcgcaatgaagcagagcaccccaaggacca

SEQ ID NO: 20377 - DNA, 598 bp, Setaria italica
  Peptide Sequence Number=SeqID_86351
tttgaggggcgagaactccgttgaatctcagagccatcagggaaagaaggccatgaatgagggagaggtttaaaagctttatatgcagctgagccaaccaaaggaacccgaactagaccctcctctattataaggctgtggtaataatcatcacgggctagcagtatcagtgaacttctagcttcctttctaataatcttatagtcatcttctttggtttgacaaaagatggaccagttttggaataacacctgcttcaaccagagctccatgattagaggaacttaaagccaaattttgatatgataccaccagctagcttctttgactttttatatcttcttcatctaggtagctaacaacctttgttaggacatcactcctcataatcttgtatctccagttttcatcaatagaaaagttccaaatggtacacaaacactgctccatcatctcaggggttatcgtcgatttacacagaagactaattgtttcttcaattgctccactttcaatggccatcttcctgtatattgaaactgacgttatgttacgcagaagacctgcagctgcttcacaggcacgagtggactctgac

SEQ ID NO: 20378 - DNA, 518 bp, Setaria italica
  Peptide Sequence Number=SeqID_86352
cactctcagcaaatatgtctgcccttataggaccctttatgataacaccatgaatctcttttccataatatatagctggtaaactcgcgcatgctgatagggcagaagatatagttacactattgtactttattccttccatactcatttgacggaaaaggtcaagagcttcttctggttctccattctgtgcacagcttgaaatcattgagttccatgtcacctcatccttcacagacatctcggaaaagatataatggctaaggtccagtctgccacattttgaatacatgtccattagtgcactctcaacataacattttccttcataagcatttcttagaacataaccatggatctcctgaccaagagccatagcagccatgctagcacatgctggtaagacactagttacagtaacagcatttggtttgatgcactgttctaacaagtaccggaacatttgcagtgcctcttcaatcatcccattaagaacataacctgatatcattgtactg

SEQ ID NO: 20379 - DNA, 657 bp, Setaria italica
  Peptide Sequence Number=SeqID_86353
tccttcacagacatctcggaaaagatataatggctaaggtccagtctgccacattttgtaatacatgtctgataagaatgaagtgtcatggaacagtataattgctgcctatggagctcatggtcttcttaaagagtcagtgagtttattgtatcgtatgcaagaggaagggttcaagccggatcatgtaacattcctcactttgatatctgcctgtgctcacgctgggcaggttgaagaaggagttcgactttttcaatgcatgactaaggaatatcaaattgcaccacgaatggagcattttgcttgcatggttgacctatacagtcgttctgggaagttagatcaagctatagaatttattgctgatatgccttttaagccagatgctggcatttggggtgcccttctccatgcttgccgcgtgcatcgcaatgttgagcttgccgacatagcttcccaagaactattcaagttggatcctggtaattctggttactatgtcctcatgtccaatatcaatgcagttgctggacgatgggatggtgtatcaaaagttagaagactgatgaaggataataaagtccagaagatacctggatacagctgggtagatgttaataacagcagccatttattgttgcagcagataaagcc

SEQ ID NO: 20380 - DNA, 186 bp, Setaria italica
  misc_feature (184)..(184): n is a, c, g, or t
  Peptide Sequence Number=SeqID_86354
cgggcgtggacgcggccgcggccgcgggagcgggggcatccccgacgagtggggtgagcgctctccgccgggcgcccccgagccccccgcgcagcccgacctgcccgtcgacgaggacgagtggggcggcgacaccgccgagggcaactcgcgccccatcgtcgtcgacgagtggggcagcccngg

SEQ ID NO: 20381 - DNA, 244 bp, Setaria italica
  Peptide Sequence Number=SeqID_86355
gtgaagcctgaaggggcgtgcatcttcttcctcttccgccctcggccctccccctgccttccagttccatctccgacgatgcagcaatggggcggcggccgtcgccgatatgaacacctccctgatcaccggaggcgatctccctcgacacctcgccatccccgtgctctgctagacgggatccgagctttcctcggtttgttttgtgagggcatcatgtggagttttgcatcaaatgccatag

SEQ ID NO: 20382 - DNA, 797 bp, Setaria italica
  Peptide Sequence Number=SeqID_86356
cagatggttaattgtttttggtcatatacgatacaaaaggaagaaagttatgatcatgtaacagcacatgctgtatcacagataatagagtagtaccatatattctcttataggcttaggcggacaggtaagtattttttgtggctcgccaaacatacagaaagtcctgaacacaagcacctacgacaacaataggtacgtagttcctgccttcctggacgatgattaggtagcaagtgtcatcgcagacagagaggtgcatcaacaacagttccgctgcctaaatctttctcggctgctacaaataaatgtgtcccatgctactgcagctgcagtacctcggagcaccaaggaggcctttcaccgatcttgacatttgaagagtactcatctgattgatccatctctctaatgcagagggagggctgggatcagagagaaattatctgctatcacttcaattgactcattgccattattgtcctcctccaaccttgctgcacactgccccagctgaaccatcatgatggtcactctttttacagaagccgcctcttagagcacatccctcaatagggagcattgtcattctttggaaaaactgttctggcctgtaaatagtccagcattgctatttaagattaatcttgtagtatttctactaaccagaaaggcatgagagaaagacctatactgaggcagaaacatagaagaattaccaagtccattgtgattgaaaagaggttatgcacattcaagctaatattggtaaaagctaattgtgccaacggaaaaca

SEQ ID NO: 20383 - DNA, 436 bp, Setaria italica
  misc_feature (1)..(48): n is a, c, g, or t
  Peptide Sequence Number=SeqID_86357
nnnnnnnnnnnnnnnnnnnnnnnnnnnnnnnnnnnnnnnnnnnnnnnnaaaaggtttaagaaagtttatgatcatgtaacagcacatgctgtatcacagataatagagtagtaccatatattctcttataggcttaggcggacaggtaagtattttttgtggctcgccaaacatacagaaagtcctgaacacaagcacctacgacaacaataggtacgtagttcctgccttcctggacgatgattaggtagcaagtgtcatcgcagacagagaggtgcatcaacaacagttccgctgcctaaatctgcaaaagagatttagtatagtctgttagtgaagtttatgacacggggtaatggtatgtgaaaaactacaggtgtttgtttcaaagttttttagtaactgttatcgatagtatttccatgctttttccttt

SEQ ID NO: 20384 - DNA, 1339 bp, Setaria italica
  misc_feature (7)..(7): n is a, c, g, or t
  Peptide Sequence Number=SeqID_86358
cgagtcnctttagtttttttttggggagaggtagtttccacgctgttttcagatggttaattgtttttggcatctacaatacaaaaaggcagaaagtttatgatcatgtaacagcgcatgctgtatcacagataatagagtaccatatattttcttataggcttaggcggacaggtaagtatttttgtggctcaccaaacatacagaaagtgctgaacacaagcacatacgacaacaataggtacttagttcctgccttcctggacgatgattacgtagttcctggctcgctgttgcaggcgcaagtgtgggatgcatcaacagttccgctgcctaaatctttctcggctgctacaaataaatgtgttccatgctactgcagctgcagtacctcggagcaccaaggaggcctttcaccgatcttgacatttgaagagtactcatctgattgatccatctctctaatgcagagggagggttgggatcagctgttcaacaggtaggtagaagtttattattatatccaattaggattgcaggcaaaggctcactgtatcggttagtaaagaaccaagagaaatttcagagaaattatctgctatcacttcaattgactcattgccactattgtcctcctccaaccttgctgcacactgccccagctgaaccatcatgatggtcactctttttacagaagcctcctcttagagcacatccctcgatagggagcattgtaattcttcggaaaaactgttctggccttttgctgcagaatcattgttgcatcaaccacatacatctctagaaccatccactaacagataaagcatagccagactgcaattttgaaattattgttactcttctccatgttcacactgaaatatggtactatgccggggagggaggaagatataatactggccccaagttaaactgggagcgctgcaatccctcttctcagcagaactttatcattaagaagcaaaagatgtaaaagagataaaagattagtcacacaaaactcgttggagcagacgtcaatcagtatgacaggaagaaagagaaaatcgggaagaaacaaatacaggtgaaataggatagggaaaatagagagcagcaactccaatccctgtcgatgaatctgcgcttcccaaaagcaggggcaccaaccagatccgcatataggaaggggcagagggaagccggcaggagggagaaccttgcatacaggagcagtgtggaagcgtggaagaaaaggagaaaattggggaagaagaccacagaagacatcctttcctgcaaggaggcagacgccgggggctgatagtgcggggca

SEQ ID NO: 20385 - DNA, 377 bp, Setaria italica
  Peptide Sequence Number=SeqID_86359
accgaccttactacccttactaccccttaaccgacttaccctacgttaaacacctcctcggccgccgccgccgccgccgccgccgggaaccctcccgcagctacgccatgtgggccctccgccgtgccggcaaccctctcagggtccgtgcacaacaagttgtgagcgcacgtggttgcgcaagtcttgaggtgctgctaaatgcagatgcaaaggatgtagaggagcatcatgagggtaattgtcagaaagcttgctgctgttgtaagccaaagttgccagcctttcggttgtcattttcatcaagccggattgctttgggtaggagtttctcctctcaggcaggtgcaagttctggtaacaaagatgattttgtt

SEQ ID NO: 20386 - DNA, 416 bp, Setaria italica
  Peptide Sequence Number=SeqID_86360
ttgtaacaagcgtttacccttttgaattgattgcagctggaacaataaatgaaatcggggctacaatccgaagggtgatgggcggaacaagtggaatcttgtatgatgtttgttctatcctaattgaatgtatgattcctacgaagtaaacttacagttcctaatgttctccaggtatgatatactattcaaggctgcatatgcaagcttaaagcagagcacaactgttacggcaaatgaatgggctgatgctttagaggcttccgttgctgctgttagcaaatatggtggcgccagcacaggataccgtacaatgttggatgcctaattcctgctgctactgttttgaaacagagactgaaggctggggaggagtcctgtgactgccttcatcgcttcttctgaagcagcatcag

SEQ ID NO: 20387 - DNA, 532 bp, Setaria italica
  Peptide Sequence Number=SeqID_86361
tatggcattgctgttgacagggtctacattggcacgcttatgacatcacttgatatggctggtcagtgtttgtgtgatctcactgaaatgatgatgtggatgagctttatcatctctaatttcagttaacatgatttaaccaaacctcataaaacattcattggtacttccaccctcatacggccatacccatgaaagaaaatgctttatatattgtacattatcatctgctatacatgtagtgagtgaaattatttatctaatcacaattcattcctcagcatgtgttgtcgactcactcttgaagtaactggcaatatttttttcaccctgtttacatttccaggattatctattaccatcatgaagtctgatgagaacattttgaagagacttgatgctcccactaaagctccagcttggcctgttggttctgaaggtaattgtcatggtcatggcggcagaatcgactaatgtattggatttcacaaattacttgatagcaatagaatcccatagtaataattagaca

SEQ ID NO: 20388 - DNA, 2166 bp, Setaria italica
  misc_feature (2137)..(2166): n is a, c, g, or t
  Peptide Sequence Number=SeqID_86362
agggggagtgggccgacttcatgctgctcgcctcgccgtctttccccccaatctctggaccttccccggcgccggcgatcgacgggccccacgcagccgcagggagcccccacgccatggccttccaggggaagaagctcatcaacaaccccgatgatgtagtgacggagttcatcgaggggctggtggaaacttaccctggcctgcagtacctggacgggttccctcagattaaggtcgttcttcgtgctgatgtcgagcgtggcgcctatgataaggttgctgtcatctcaggtggtggaagcggtcatgagcctgcccatgctggatttgttgggccaggcatgttgaccgctgctgtttctggagatgttttcgcttctccgcctgtggattctattttagctgctattcgagctgtaactggtcccatgggttgccttctaatagtaaagaactacactggtgatagacttaattttggattagctgctgagcaggcaaaatctgaaggctataagatggagatggttattgttggagatgattgtgcccttcccccacctagagggatagctggtaggagaggtttagctggaacaattcttgtgcataaggttgctggggctgcggcagatgctggtttatctcttgcagatgttgccgcagaggcaaaatatgcatctgaggtcgttggtacaatgggagttgcactttctgtttgcacattgcctgggcaagcaacctctgatcgtttgggtcccaagcaaatggagctcggccttggaatccatggagagcctggtgttgctgttgttgatctccagccagttgatgtagtggttgaacatgttctgaagcagatattgtcacaggaaactcagtatcttcctatcacaagggggagcaatgctgttctcctaattaatggattaggagccactcctatcatggaacttatgattgcagcaagaaaagcagttcctgagttacaattggcgtatggcattgctgttgacagggtctacattggcacgcttatgacatcacttgatatggctggattatctattaccatcatgaagtctgatgagaacattttgaagagacttgatgctcccactaaagctccagcttggcctgttggttctgaaggaaaccgcccacctgcaaagtttcctgttcctgtaccaccatcaccttcaatggaggatgatgaggttcttgcccaacctcaggagctaagcaagcaagggtgtatcctggaggctgctattgaagcaagtgctacagaaattatcaatctgaaggacatcctaaatgaatgggacagtaaagtgggcgatggtgactgtggaaccacaatgtatagaggagcaacatctattcttgaagatatgaacaagcgttaccctttgaatgatgcagctggaacaataaatgaaatcggggctacaatccgaagggtgatgggcggaacaagtggaatcttgtatgatatactattcaaggctgcatatgcaagcttaaagcagagcacaactgttacggcaaatgaatgggctgatgctttagaggcttccgttgctgctgttagcaaatatggtggcgccagcacaggataccgtacaatgttggatgccctaattcctgctgctactgttttgaaacagagactgaaggctggggaggatcctgtgactgccttcatcgcttcttctgaagcagcatcagttggcgctgaatccactaaacagatgcaagcaaaggctggacggtcatcatacatcgctccagacctcctggcttcaatccctgatccaggagcaatggctgctgctgcatggtaccgagccgctgcccttgcagtgaagaacaagctgcacggttcgaagagctagtagcatgtgatgtgcttcaatactatactgacaggaaaatcgccggggcattttctctccccccttagatttggtttccgcttgtgctttgcatgagccgagaaagagacttccatattgtttcacccttctcacatcttacaaagatatggtcaaagagtctgtagacggtacaagttaagtgaagctatgcttttgcactgccgtgatatctttgctttgctttcaaaaaaaannnnnnnnnnnnnnnnnnnnnnnnnnnnnn

SEQ ID NO: 20389 - DNA, 321 bp, Setaria italica
  Peptide Sequence Number=SeqID_86363
gagtatctaacatcacacttatccatctcatgccattttaatttcaagcccaacgtgtaaagaagcgcgacagcttacatagttacctcatccgtgtcttctggtcccgtcatcgtcgtttacttcttgatgcatgcctgtacacgtacgctaagcaagatccattcactaagatccattcacttccgtgtgagcgattatcaggaagacaggagcagattgacgctggatatggaaaccacggcacatagatagacaccgacacattctccgtcgttgagtagtttgcgcatggtcatgcagatcttcctacacgcatgg

SEQ ID NO: 20390 - DNA, 1145 bp, Setaria italica
  Peptide Sequence Number=SeqID_86364
agagggacacatatgtttcactgattagttcctatagtcgatgtggtttgtttgatcaagcaatggagatatacaagaggatgatagaagctggtatatatccagacgtttcgacctacaatgctgttctatctgcattggctcggggtggtcgctgggaacaggcagaaaagatgtttgctgagatggaggatcgggactgtaagccagatgaactcagttattcatcattgcttcatgcatatgctaatgcaaagaagttggacaaaatgaaagctctgtcagaagatatatactcagagaggattgaaccacacaactggcttgtaaaaacattggtcttagtcaacaacaaagttaataatttatccgagacagaaaaggcattccaggaactgaggaggaggcgttgctccctggacattaatgttcttaacgctatgatatccgtatatgggaaaaataggatggtcaagaaagtggaagagattctttcactcatgaaagagaattgtatcaaccacagtgctgcaacctataatagcctgatgcatatgtattcccgtttaggtgactctgaaaagtgtgaaacgatcctcactgagatcaagtcaagtggtatgcgccctgatcgatactcttataacactgtgatatatgcatatggaagaaaaggacaggtgaaagaagcctctaggttgttctctgagatgaaatgttcaggcgtgaaaccggatattgtgacgtacaatattttcatcaagagctatgttgccaacacaatgtttgaagaagctattgatttagtacgctatatggttgcccagggttgcaagcccaatgagagaacttacaattcaatattgcagggctattgtagacatggaaggatggtagaggccaaatcattccttattaaccttcctaagctttatcctggaatatctaaacaagaaaagcagagactgctagaactatgggcgtaacacacttcgtaatatagttgttgagaatgaaaccattttgggaattcctgaggatgataagtagatagtactattttcttttttgtccttagtggcatgtacatcagagtggatttgtacagatttactattgttatttgttgtaagtaagtaatttgt

SEQ ID NO: 20391 - DNA, 323 bp, Setaria italica
  Peptide Sequence Number=SeqID_86365
caggctcccgatcgccaccgcgcccactaagagcacgtactgcaggaccagcaacctcccgccggctaacggtggcggcccggcgctggcgctacccgacgagaagacgaggcgcgcggcgcagaccaccgagcagattgccggcggcgcgaggcagagcagctccgcggtcgaaagaagcgcgtccagcccgaagacgccgccgcggcggacgggcgcgccggaggcgagggcgcggagcggcggaggccatcggggaagcggactccgtgagaggagcggcgcaggggaaggacacgacgggaagggaaggcggaggtgcg

SEQ ID NO: 20392 - DNA, 652 bp, Setaria italica
  misc_feature (648)..(648): n is a, c, g, or t
  Peptide Sequence Number=SeqID_86366
gagggtgttcgtcgtccacaagttcacctggcgcctgaatctggaaattcgggacggagaacaacatggcagagtacctggtggcatccccaccgacagtaatccggtgaaatggtgcgtatagacggtcgtttgtccaagcccggagtgcctggccgaccatgacgacgagcgacgtcggcgacggcttgacgaggacccgctccccgtccctcgtctgcacctccagcccttccacctcgtgctggcacacgatgctgagcaaattggtgtcctgatgcgacccgaacctcaccgtcttctccgcggcgtgaggcgcctggtactccgacatccggaacaggtgccacgtggacgctctcagcgcgtcgtggtacttggccaccccgagcccttccatcaccatcctccgcaccgcctcctcgagctcgaagatccgcgacgccgcgccatggacggcattgcagaagccgtcgttgctgccgccgtcgggccacatgaggccggcgaagtcgcggacgagctcgagcttggtgccgtccacgatggcgaggctctcgtagcccgggatgtcgccgaggtagccgtggaagggcttgtcggcgccgtagtagttgcggcgcttggcgtcgaccggcagcgcgaagngcgg

SEQ ID NO: 20393 - DNA, 435 bp, Setaria italica
  Peptide Sequence Number=SeqID_86367
gccacgtgggcttgtccccgacgtaggcgcgcaggagcaccgcgtccctgccctgcagggcctccagccgctcgtagatcaccggctccgccacgttgcagtctgcgcggcgcccggcgaacggcggtgagtaacgtaggcaacgaggctactgctaggggagaggaattttacaggcgagggggttcctcttaccggggcaccaggtgagggaggagccgggctcgcggtccgccaggaagagcagcagcttcagcttgccgtcggaggccgcggcgggggaggcgatgaggcggtcgaagtgggcgctgaagtcggccagcgtcgcgtctaccttctgcaccgtcatctcgccgcgccgaccttttacggacttagtacgaagacaagaatttaggaaagaacaaagaacaaaagtaaagtaacgtaaagtaa

SEQ ID NO: 20394 - DNA, 747 bp, Setaria italica
  Peptide Sequence Number=SeqID_86368
ccagtataaatgattctgcagacttacgagaaatcatcctgagaatcgtagaacaatcctgctcctctatcaaacgtagaacaagatacagcataacagcaccgtcgaattattatatcttaattattatttcccagcttctctctggctctctggttcctcatacatgaactcaactacagattagtatagcccctctgctcgattcggcagatcgatcccgacggcaaaccggacgcgtcagttgccgccgacgccgaggagcgcgtcgaccttgtccttgaggtgcgcctcctcgtccccgagccgggcggcggcgccgccgttctcccaccggatcagcgtcgggacgcccttgatcccaaacttggggtcctccctccaggggtgcgccgggtcgcgccacgtgggcttgtccccgacgtaggcgcgcaggagcaccgcgtccctgccctgcagggcctccagccgctcgtagatcaccggctccgccacgttgcagtcggggcaccaggtgagggaggagccgggctcgcggtccgccaggaagagcagcagcttcagcttgccgtcggaggccgcggcgggggaggcgatgaggcggtcgaagtgggcgctgaagtcggccagcgtcgcgtctaccttctgcaccgtcatctcgccgcgccgccttttcggcttgtcgagcagatttggagcagcaagagcgagttggggaggcacggcaggcagattaggagaaggaag

SEQ ID NO: 20395 - DNA, 388 bp, Setaria italica
  Peptide Sequence Number=SeqID_86369
tcgactcagtgacgtatgtctcaaataaaaggagaagagccaatggtcaaatccacttgatatttgaactgaacaacccttcctttccttcacctggactccttgagcaccattgaaacgacgaacatgcccttctccctccactcgtagcttctctcagtctccgactctggggcgcattcgcacactgctccagttgcagtcccgagccgcgccgcagcccgaatccgtcccgaattcctggtgccgcacatccgcccgccgccacccctgatgcccctcccggctgccgccgcacatcctcccgctccttgggcgaggccagttggtccgcacagagagcacggacatcaggccgcaaaatcgaagcgccggggaggagagcggc

SEQ ID NO: 20396 - DNA, 555 bp, Setaria italica
  Peptide Sequence Number=SeqID_86370
cacgccgccgcagatgctctccagcgtggagttccaccccgagtgcgtcaggaacacccccaccgcctcgtgctccagcaccgccgcctgcgggcaccacgtcgacagcatgctccggccctccgtcgccgccgcgaaccccgccggcagcccggcgccgccggagtcgccgccgcccttgacgaggtccgggcgcacgttccagaggaaggcatagccggtgttggcgaggccccacgcgaactccgccagctgctcggcggacatcaccgtgatgctcccgaagttgacgtacacgacggagcgcggcgggcggccgtcgagccaccggagcggcgcgtcctgctccttccacaggttggagcccatggcggcgacggggctgtcccgtggcacggtgttccgcgctgcaagcgggagcgggcccacggtgtagacgggcgggaggagttttgacatggcgtcaagcagcggcgcgtcgagctcgtcgaaggtgttgatgaccaccgccgacgcctgcgacatgccggcggtctcgtggatgaagaagttgag

SEQ ID NO: 20397 - DNA, 530 bp, Setaria italica
  Peptide Sequence Number=SeqID_86371
atttcctcagcaggcacctccccatttgctctgttcagttcatcatcctctccactagcatccatgtcatcatgcgagctagcagcatccattcccctattcgacggaacttctttagaagtctgattagacctggaatccttgagaaaatctgtaccccatggaccaccacctctccgggcatgctggccgaatgtgttgtcagaagagtacagacttggctggccagcttcacactgctctggttcgctgtggtaggcatcctctgctttctcatttaagttccactgcctggagttcgagtcaacatccccatccctgactgactcataggcgccctcatcatcagccttctcatttaagttgtaccctcccgaatcagccctgcttccagagttgctgaagaatgccatcacaaattatggcattacatggaatgcctctggcagcctctgtatcactccctcgacgttcatgcgtagaacacaatttagaaccccactcgagtagctagtgatcaacgtgtaatg

SEQ ID NO: 20398 - DNA, 1508 bp, Setaria italica
  Peptide Sequence Number=SeqID_86372
cggagccggaattcctgccgctgccgccggtgatggcgaagctggggtccggggcaggggcttgggtgcgaggcggcggaggggtcgctcgtgcccagccggaagcgggagtacaagccctgcggcaagcacactgaggggaagcgcccgctctacgccatcgggttcaacttcatggacgcgcgctactacgacgtcttcgccaccgtcggcggcaaccgcgtgacaacttaccgctgccttgagaatggtagctttgctgttctacaagcttacgttgatgaggataaggatgagtcgttctacactctaagctgggctcgtgatcatgttgatggctcaccgctgctggtggcagcaggaagcaatgggatcattcgggtcatcaactgtgctacggagaagttagctaagagctttgttggccatggtgactcaataaatgagataaggactcaagcgttgaagccctcgctcatcatttctgcaagcaaggatgaatctgttaggctatggaatgtccatacagggatctgcatcttggtatttgctggagctggaggtcatcgcaatgaagtgttgagtgttgacttccaccctagtgatattgagcgttttgcaagttgtggcatggacaacactgtgaaaatctggtcaatgaaagaattttggctatatgttgacaaatcatattcctggactgaccttccatcaaagtttccaacaaaatatgtccaatttccggtgttgattgctgcagtacactctaactatgttgattgtacaagatggcttggtgacttcatcctgtcaaagagtgttgacaatgaaattgtgctttgggaaccaaaaacaaaagaacaaagtcctggggagggaagcatcgatattcttcagaaataccctgtgccagagtgtgacatctggtttataaaattttcgtgcgattttcacttcaatcagttggcaataggaaatcgtgaaggcaaaatctatgtgtgggaagtacagtccagccctcctgtcctaattgcccggctatataatcagcaatgcagatcaccaataaggcagactgcagtgtcctttgatggaagcactatccttggagctggtgaggatggcaccatctggcgatgggacgaagtggatcatggcagctccaaaaactgaagcaagtgcagctgctctgctaccagtgaaaatgcgggactgataatttggttctgaactggttagtgttatggttgttcaagactgcaacctggttgcgctgtagtcagaatggttggtgttaagtgaatgttgaatgtttagatattggctctgttatgcttcgaatgttgtaacctgggatgctcgtgctgttatattgcgtcatggacaagataaatttaatcgttgttgcaacttaggaaaaccgttaaaatgtttgttctgaatcctctagcatcggtgatgcgtgcctgatttatgtcctaacctgctaaaaaaaaaaaacaaaaaaa

SEQ ID NO: 20399 - DNA, 498 bp, Setaria italica
  Peptide Sequence Number=SeqID_86373
acttggccgctatagattccttctcgagttggctgaatatcttcttgaggcgtgaagatgcactagatgctacgtcctgcgtaatcttcttccgattcttgcaactttttaaccatactatgccaattgatacttggacagtacaactcttctgcttggatgcattgttctccagttgatatctaatatggagctgcaagggataagccacaaagggcagcacaatcaggtgacaactgacaagtaaaaactaacacttccaatgtataaagtgatgaacgaatagatgactgttgcctaagacaacagaaactgcccctcattattccctattaagtgcaactacatgtaaacactctgatgcttttgcatagtttgcaatggcaatgcacatggaattcagaatcaagatgaccctttaacatagcaaccattgtaatttcattgagaagataacaaatagaaaatggccagtatccacaacatacctatgtgcgc

SEQ ID NO: 20400 - DNA, 473 bp, Setaria italica
  Peptide Sequence Number=SeqID_86374
ccgttgaaagttcctcatgatatcactgatatttgctcagcatggcagcaaggcgtcgtaggaaccaccattttgccagaacatgcttcctggtgatctgtatgcatgtgcatcagcaaaagtagggcgtggacaaaaaggggttcctacttggccgctatagattccttctcgagttggctgaatatcttcttgaggcgtgaagatgcactagatgctacgtcctgcgtaatcttcttccgattcttgcaactttttaaccatactatgccaattgatacttggacagtacaactcttctgcttggatgcattgttctccagttgatatctaatatggagattgaagcattcaccaattggaataccttcaagtgtcataacttcttcaacaagccagccattcttattaggcaaaggggacttctgttgggtgctcattgcttctccctcatgccgctctgaatttcttga

SEQ ID NO: 20401 - DNA, 2139 bp, Setaria italica
  Peptide Sequence Number=SeqID_86375
ttcgttggttgtccgtttcggtcgatcttctagtttttttttggttttttttgggcgcattttttttctaaagcacaactgattaacttaaaacatatacccaaacttgtactacacctcatcaacctgttctaggctggtagtgactgccattacaacatcaggctataggtattctactcccagtatcggcatagcttcctatagtgttcagccaaacatacacatctaaacgactatgactatgaggtacagagtcacaggaaacattcttcgtcaggtcaacattctcacgagtcacaacactagtgccatgccgacgagactatcaggggcctgttcttccagccgaggtagagcacgccgtccctctcggcgagcttgtagtccggcgagtagctctgcagcagcgtcttgatggtggcgttcaccagcgcgctgagcggggacggcctgaacccggccatcatcagccgcgccttccacttgccgaacacctcgtgcctctccacccgctcctccccctcgcaggccaccaggttcacgatctccctcgccaggcagtgctgctccatgttgatccgctcccggtcctccctcggcagcgccaggtcgatggactcgaagatggccgtgtagtagtccagcgtctccgcgaaccgctgcgcgaagggggcagtgttggtgttggactcctgctccaccagcgtcagcaccttgggcgacaggctcttcaccagcctcaggatccggtcccggtggttcgccgtgctcacggtctcgtcgggtatgtggtgcagctctagggtgaagttgacagcaacggcttcgccagggacgatgccgagatgtccctcttccatttcattgccagagatagcgacagcattgaactgaaagggcaccttgtagaggccagcaatgtgtgacagcctcctgccaaccaactccagaccgccgcctcgggcgtaggctgagactgaatcatcaatgccggtgatcctcacgaacggtggtccaccgggtcttgctgcaagggcctgaaggagggagatccactgcgccccttgggcgatatggaaatcaatgatatggatcctgtcttctcccttgacagcctctgcgattgcgccgttggccgacatgtagccaaacttgaagtaggggcaggcctcatacaggaagtgcatgtaggacaggagatcagaactcttgggctccttgcacttcagagctttgtagattgagttgcccgaggaggcgagcctggccaccagaccttccaccatgtaggctcccagcctctcaagtggctcaccggacacagaaaccattttcctcagctctggaatcatcaaatcaattgcgaaactgttattctgttccactgctctagcacaagcaatcagcagctccttcaggttgcctttgggcatgctcatcatgtgcacccacttctccggttccaaggaaagttggtttgcaacggagatctcaaggctatcgactatctcagagtctgtcccaagcatcacagcctcaagatccttcagcttctgcttcagatcagtagggtcctcagtgacgcaggaagcactcacaggtgacccattgccattggtggagccagagtggctatcttcgtgtgatagagggctgccactcccagtatggatactctgactcgagggagaatcgtgcctcgaacaaccagaagctgcagaggagtccagtgtgtactgcttgcgagtctcatgctcttcagagacagcatccggtgaatgagacttcatggtgtaatgatgctccggtacgacgtgggtgtccgaagctgactgatatggatgacagaggtgctgagtgttgccagaatacagaaattgctttggagtctgccttgggacattaccaaaggggtgcaccatgcgggaagttggagtatcagccatcctggttcagtagaagagtcaggtgcactaaaactccgagttgtcaagtgtttctggtatgacaagcatgtccaattctgaagtcaattcagaggattttttgcaatttgattgttgatgtctccttgtcctctagtaacaaagtctgtcccgtcgaccggggcgcgccgaggccccagatccttgagct

SEQ ID NO: 20402 - DNA, 1450 bp, Setaria italica
  misc_feature (1380)..(1450): n is a, c, g, or t
  Peptide Sequence Number=SeqID_86376
tcaaggccagtgatactagttatcacatccaccacatgaccatggctaccgcctcagcttcgctagctgtcgccctactattcgccagcctcctggcaggcacggtgttcagtgatgatatcatacccatcatccgcatacccttgttggagcggttccatgcctggcaggctgaatacaatcgcacctatgcgaccccagaggaattccagtaccgcttcaaggtctattgcgagaatgtcaagttcatcgaaaccatgaaccgggccgggagctcatatgagctcggcgagaaccagttcaccgacctcacccaagaggagtttgaggacatgtacctcatgaagctcaacgaggtggcctcagccccagaggccatgggacagctcggcaccatgaacgcggggggcacgtctggcggtggcaacaccgacgaggcccccaactatgtggactggaggaccaagggagcagtgacgccggtcaaggaccagcagcaatgcggctcttgctgggcgtttgctgcggtggcgtccatcgaaggtgttcacaagataaagacaggccgtctcgtgtctctgtcggagcaggagatcgtggactgcgatcgtggggggaacgaccatggctgccatggtggttaccctagctccgccatggcgtgggtcgcacgcaacggcggcctgaccactgagtcggactacccgtacgtgggaaggcagggacagtgcaggcgtgacaagcttggtcaccacgcggccacgatccgtggcgtctgggcggtgcagcgcaacaatgaggccatgctggagcgtgccgtggcggggcagccggtcgccgtgtccatcaacgcgagccgggccttccagttctacaagcgcggggtgttctcgggcccctgcaacacctcactgaaccacgccgtcacggttgtcgggtatggagccgaccccgatggccgcaagtactggatcgtcaagaactcatgggggcagacgtggggtgagaatggctacgtgcgactggagaggcgtgtcagctctagggagggcatgtgcggcatcgccatggagccgtactacccggtgatgtgagtttcatctatcccgtgctttcgcacggtcctacaacgacggagtgtttaactagttaccagctgcctgctgatcctgaacaagtatgggtgttagcttggagaagagtgcatggaattaaataaactgcagctcgccgaggatggtacggtgtgagttgcgctatgccgatgttatcgtttgtttgctaatgtaacgaaatctcaaaagctaatgacttttgggatgcagtatgtgttgttattaaagagaattaattatcattattttcctaacaaaaaaaacnnnnnnnnnnnnnnnnnnnnnnnnnnnnnnnnnnnnnnnnnnnnnnnnnnnnnnnnnnnnnnnnnnnnnnn

SEQ ID NO: 20403 - DNA, 292 bp, Setaria italica
  Peptide Sequence Number=SeqID_86377
aggccgggcatcttggatggggacggtgcagccatagagggttcggccggcagcaagaagggagagggaaaaggcacgacttgtgcacgcagctcacctctcacacaaaacatcgagcaggttgtaggccaggtagaaggcaggggcacgacgggctgttcacagcccgtcgtgcccctgccttctacctctcacaccgctgtaatggcgtggctcggctacggcggcgatgtcctccgacgcgcggtcgtcatcgacgttgggcggcaagctcggctcggtgtcgcatcaa

SEQ ID NO: 20404 - DNA, 750 bp, Setaria italica
  misc_feature (725)..(725): n is a, c, g, or t
  misc_feature (739)..(739): n is a, c, g, or t
  misc_feature (746)..(746): n is a, c, g, or t
  Peptide Sequence Number=SeqID_86378
tcgcttccacgcgaggtgctcgacgcgcggtgggacgtcgtcgtcgtcgacgggcccagcggtgcgggccccgaggagcccggccggatgggcaccatctacaccgccgcggcgctggcgcgcgcgtccgcggcggcggcggcggctggggagggggcaccccaggtggacgtggcggtgcacgacgtggaccggaccgtggataggtggtacgcgtgggagtacctctgcgaggacaacctcgtcgccgccaagggccgcctctggcacttccgcgtcggcgccggcggcccgccggacgccttctgcaacaccggccccgttcagatcttgtagagcagccggacgaaccggaccattggaccaagaatcccaggccaacggaggcatgccattgtcttcgtacccaacattgtcaatgtcaccaccgcgtcgccgaggcgacgagcagatcctgtccaggtccaatgtccggcgattgtggcggcaattgttgatagaattatagatacaactgcccaaatgtgaagaaggaagaattgagtgattagctaggcaattagggagatgcggattttttttttctaccacaattcttcgaggcaagaagagttctttttttctttctgttgctgaactagtatactgaattgtgttgttctttatctgcagcaatcaaataataccggactagcttagtgctctatcaaaaaaaaaaaaaaaanaaaaaaaaaaaaanaaaaacngaag

SEQ ID NO: 20405 - DNA, 635 bp, Setaria italica
  Peptide Sequence Number=SeqID_86379
agagttgtatccaggttcagctagtgtctaggtccattcatattagtgctagctagattctagcttgtagttaaagagaataatatgcagatcatatgggcattgactgcattaattaggaggatatcatgggccggtgtgcagccatgtattggctatatatatgtgagaaaacgatgagggctagtgtggcctgtgttaataaaatacttgtgtgttgctgtgtccttacagtgtgccaccggagaagaaattctaatttctttgtaataaacacctagagagagggagtagatttctaacaaagatgtccaaaattataaatcctatttccatcttgcacttagaccaagaaagcactcaaggcaaaaaaaaagactagattaccactaattattatctctgagcaaatcttaaatgtatgcataaaaacaatgcaaagtaagggcagtaattattgaggtatacaagaaccaacacatatttttcatgggaaagtagaagccttatgcttatgaacaaaatctttcaagatgcacaccttataatttgaatggtggaagtagaacaatcaaaccaagcaagcatggttcaacagacaaagaacagaaaacaatttgaaacaggaaaataat

SEQ ID NO: 20406 - DNA, 602 bp, Setaria italica
  Peptide Sequence Number=SeqID_86380
caatatattatgtagccaataagaatagaccaaccttttctgtctccagtttcattttggtaaagtagaaggacgacacatgcttctttttcctcatggagagatatatgtgctaatatacacacattaccaatgtaactgtttgtatgaaaatccatctatgtcgttcatattagtgacacgttgttggaaataatcctgtgtgtccaggttcagctagtgtctaggttcatcgctattagtgctagctagatttcagcttctagttaaaagagaataatatgcagatcatgtgggcattaactgcattaattaggaggatatcatgggcaggttgcagccctgtaccagctatatatatgtgagaaaatgatgaccaaaaaaactacttgtgcttgtgtgtgagtccaccatagagtaaaactagagtgtctgtgatagacacctagaaagtgagggagtgattcccaacacacgcactatccactgtccatttgctgctttttttagaagaaactatgtttcacttactgcctcaaatgtctttaacttcctatggtctttattacatttgaccattactgttcactaagtatgctact

SEQ ID NO: 20407 - DNA, 276 bp, Setaria italica
  Peptide Sequence Number=SeqID_86381
cctcctcctcatctgaatcttcaattctctcaaacgcactgacactagggacaggggactttggtgtagtcggtctaacaatagctccaactcttttagttgaacctggagaaattactggcctaccctctcggccggtgtggagcggcgggagccccggcgggatgggcatggtgcggcgatcgtggtccctgtgcgccggagtgtggtcttggtcctcttcggcgtcctccagatcgtagtcgtgggattcgccgtcgggagaggcgggtgcgg

SEQ ID NO: 20408 - DNA, 428 bp, Setaria italica
  Peptide Sequence Number=SeqID_86382
ggcggcaacgcgccggagagcgccgcgaccaacatgaacaacgtgtccgacgggaacgtcgccgagttcgacgccctggtggcgcggctcgtggccgcggtcgccaacaaggccagcaacgcgagcaggaggtacgccacggggcaggccgggttcccgccgcagaagatgaacgtctacgccctcgcgcagtgcacgccggacctgacgacggcgcagtgccgggggtgcctcgccggcatcatccgcgagatgccctcgtggttcacggggagaataggcgggaggattcttggggtgcgctgcgacatcaggtacgaggacactgtcttcatggccacaggcgccgacatggtgaagctcacgcccctcgtgaattcttccaaagggaacaacactacgctgtgggtcgtcgcgaccgtcgtccc

SEQ ID NO: 20409 - DNA, 142 bp, Setaria italica
  Peptide Sequence Number=SeqID_86383
attgcaacttgaacaactcgtatgattagaagacttaatagcgcattatcgctgatctttgcttgtgcgactggtcaggttacctgaacaacccggaggccacgaagaacaccatcgacgccgatggttggctgcacaccgg

SEQ ID NO: 20410 - DNA, 1556 bp, Setaria italica
  Peptide Sequence Number=SeqID_86384
cggcggcgctccggcgcgagccgctggggctccgccgcggcgccgtggtcatgaacctgatgctcaactcggcagagttcgtgctttccttcttcgccgcgtcgcgcgtcggcgccgcggtcaccaccgccaacccgatgtccacgccgcacgagatcgccaaccagatcgcggcgtccggtgccaccgtcgtgttcaccgagtccatggccgtggacaagctccccgccagcgccaaggacggcggcgcgctcacggtggtcctcatcgacgcgcgccgcgacggttgcctccacttctgggacgacgtcatggcgagcgtccccgacgaggaggtcgcggccggcgacgaagactcagcttccggcgacggggagttcgaccccgacgacgtggtggcgctgccgtactcgtccggcacgacggggctccccaagggcgtgatgctgacgcaccggagcctgagcaccagcgtggcgcagcaggtcgacggcgacaaccccaacatcggcttccactccggcgacgtcatcctgtgctcgctgcccatgttccacatctactcgctcaacaccatcatgatgtgcgggctccgcgtcggcgctgccattgttgtcatgcgccgcttcgccctcaccgcgatgatgaagctcgtggagcggcaccggatcaccatcgcgccgctcgtgccgcccatcgtcgtcgacgtcgccaagagcggcgaggccgcggcgcacgacctgtcgtcggtcaggatggtgctctcgggcgcggcgcccatgggaaaggacatcgaggatgcgttcatggccaagctccccggcgctgtgctcggacagggctatggcatgacagaggccggaccggtgctgtcgatgtgcctggcattcgccaaggagcccttcaaggtgaagtccggcgcgtgcggcacggtggtgcgcaacgcagagctgaagatcatcgaccccaacaccggtaagtccctcggccggaaccagcccggggagatctgcatcagggggcaacagatcatgaaaggttacctgaacaacccggaggccacgaagaacaccatcgacgccgatggttggctgcacaccggcgatgttgggtttgtggatgacgacgacgagatcttcatcgtcgacaggctcaaggagatcatcaagtacaggggattccaggtggcccccgcggagttggaggccctgctgatcactcacccgagcattgctgacgccgccgttgtcgggaaacaagtcgagccagaaattggagaaatcccggttgcctttgtggccaaggcccaagggagtgagctcagcgatgatgacgtgaagcaattcgtggcaaaggaggtgatctactacaagaaggttcgcgaggttatcttcattgacaagatacccaaagcgccatcaggcaagatcctccgcaaggagctaaggaaacagcttcaggagcagcaacaggccgtgtgatcaagacagcctatacatcgctcagtatttaagatttgttcagatgttgacatgtggaggaagaacttaatccaa

SEQ ID NO: 20411 - DNA, 411 bp, Setaria italica
  Peptide Sequence Number=SeqID_86385
ctgggggcttgtccagtgtgtcccaattgataagcaaattggccagggaaggtgagcaagctatgagccacacagaatatggcactctcacctaaacataacaatctctgactgctgtctatacatgtattcttccacagggagtacagatgaggcaaaattcatttatgaccagctgattgaaatggggatcaagcctaatgattctgcagttgctacttgattgtccaatatggccgagggggagcagttagagcaagcacaagaactgttcaagtcggcatcagcatcgtttccagaaggagcacatatctacaatgccatggttgatgcattctgtaaatgcggcaaaactgaggatgcataccatctttcatggaatggctgatcaaggcaatatagagatgcagt

SEQ ID NO: 20412 - DNA, 909 bp, Setaria italica
  Peptide Sequence Number=SeqID_86386
tgttttgctgcaatgacctgctcaggttgtatatcagactgggccatctagaaaaggccaggacactagtactgaagatgagggaagataatttccagcttgatgatgatcttcatatgacagtgatggaactttattgcaaaatcggtatggttgacgatgcagagaaattattcaaagagattcagagaaatggaaaacccatgaaaattccaacaatggtttcacttatagagatgtatgctagaaacagaaccagggctattcagaaagatcagagcctgtcaaaggcgctagacaaaactagtagttcatcagctggcatggcattgaaattcttgttggacatgcctgggggcttgtccagtgtgtcccaattgataagcaaattggccagggaagggagtacagatgaggcaaaattcatttatgaccagctgattgaaatggggatcaagcctaatgattctgcagttgctactttgattgtccaatatggccagggggagcagttagagcaagcacaagaactgttcaagtcggcatcagcatcgtttccagaaggagcacatatctacaatgccatggttgatgcattctgtaaatgcggcaaaactgaggatgcataccatcttttcatggaaatggctgatcaaggcaataatagagatgcagtgacagttagcattcttgtcaatcacctgactaaaaatgggaaatttcaagaggttgaaaacatcatacatggctgtttccgcgatgaagttcagcttgacactgtcttgtacaatactttcatcaagtcgatgcttgagtcaggtaaactgcattcagccgttggcatatatgatcgcatgatatcctctggcatttcacggtccatgcagacattcaatataatgataagtg

SEQ ID NO: 20413 - DNA, 2483 bp, Setaria italica
  misc_feature (211)..(211): n is a, c, g, or t
  Peptide Sequence Number=SeqID_86387
aagggagttgcgatgcgctttgatggactcctccacttggggtcatgatttaccactttattcagtttgagtctttgggacctggagcattagcttctgttccttcctgtctttgcttcttttggctgtttggcatcaaccttcatctacgtcaaactcttctcttatttctgcatgattatttaagtctgctagcatggaggaaaaaagngaaccatgtaaaacctatacatgtctgcactactaacttctattggttatattaacatttcatcaaactgcgcgagtacacaaaaggtgtcgagaataacatacgccaagtcgagcttgattccatacaggattacattaaggaaagtgaaaacctagtttcgctgcatgatcaaattcgcgattgtgacaatattttgtcccaaatggaaatggttctgactggattccagacagaaattggttccataagttcagagataaaggtccttcaggagaaatctatggacatgggattaaagctgaaaaatcgtaaggctgcagagtctaaattgtcaaaatttgttgaggatataatagtacctccaagaatgattgacataattgttgatggagaggtcaacgatgaatatatgaaaacacttgagactctgagcaaaaagatcaagttcattgatgctgatcctatggttaaatcatccaaggctctaaaagatgttcagcctgaagttgagagactacggcagaaagctgtctcaaagatttttgagtttgtcatccagaagttctatgccttgagaaaaccgaaaactaatattcagattctacagcagagtgtccttcttaaatacaaatacacaataattttccttaaggaacatgctaaggagatatatgcagaaattcgtgcggcatatattgataccatgaataaggtgctaagtgcacattttcgtgcatacatacaagcattagagaaactacagatggacatagctacttccaccgacttacttggcgttgaaaccagaagtacaggcttccttttctccattggaaaagaatctctaaaaacccgttcttcagtgtttgctttgggtgaacgaataaacatattaaaggaaatcgatcagccagcattgatacctcatatagctgaagcaaagtcacaaaaatatccatatgaagttcttttcagaagcttgcagaaacttcttattgacacagccacttccgagtacctgttcactgatgatttcttcggtgaagaatccatattccatgatatatttgcaggaccaattcaagtggttgatgaatatttcaatgctgtactcctgaactgttatgatgcaatcggaataatgcttatgatcagaataattcatcagcaccagctcatcatgttcaagcggcgaatcccatgtttggactcttacctagacaaggttaatatgtcactctggcctcgcttcaagatggtgtttgacttgcatttgaacagcttgcgaaatgcaaatattaagactctttgggaggacgatgtccatccacactatgtcacaaggagatatgctgaatttacggcttctctagttcacctcaatgttgaacatggggacggtcagcttgatcttaatttggagcgattgcggatggctattgaggacttgctcgttaagttggccaagatgttcagtaaaccgaagctgcaaactattttcttaataaacaactatgatttaacaattgccattctgaaggaagctggaacagagggtgggaaggcacaactccacttcgaggaggttcttaagagcaacattgcaatatatgtggaagagttgctccaggagcatttcagtgatttgatcagatttgtcaaaactcgtccagcggatgaaacggctagtagttcagagaaaatcagcgttgccgaagttgaaccactggtaaaggattttgcgagccggtacaaggctgcgattgagcagatgcacaaagatgtgatcacatctttcagcaacttcctgtgtgggatggagatcttgagagcggcgctcgcgcagctcctactctactacaccaggctcaccgagtgtgtcaagaggatcaatggcggttctgctctcaacaaggacctggtgtccatatcctccatcctgttcgaaatcaagaagtattctaggaccttttagttgctttacccccttccatgtacactaagacgactagttaaggggtagtggtgtatccttacattgtaacgacaaagttggcatgtgctactgcagaggaaacaagagtattttgttgtgatttgtagcttcgtcggtcggagttatttggcccccctaccctttcccagcgtagaaccgtgtcctttatgctgctgttatattgtagtgtataagctcgagatgtttgccatgctgatgtatgtatcaaatgttatcacttaatgtaatttacaagaatggtgattttgtgac

SEQ ID NO: 20414 - DNA, 349 bp, Setaria italica
  Peptide Sequence Number=SeqID_86388
ctaaactgtgatttgaagaacttcctctcgggctttggcttgtcttggcctggcagacgcccccgcccgcgattcgcatcgaatcggatcggaccaacccaggcaggcggcggcggcggcggcggcgccggcgcccacatccacctccacccccggcacccgccccccaccccaagatgggggaagttgtgaaggacttgacagccgggactgtaggaggggctgccaacctgattgttgggcaccccttcgacaccatcaaggtgaagctccagagccagcccacccctgctcctggccagctccccaagtatgcaggcgccatcgatgctgttaagcagacgattgc

SEQ ID NO: 20415 - DNA, 1518 bp, Setaria italica
  Peptide Sequence Number=SeqID_86389
ggcttgtcttggcctggcagacgcccccgcccgcgattcgcatcgaatcggatcggaccaaccccaggcaggcggcggcggcggcggcggcgccggcgcccacatccacctccacccccggcacccgccccccacccccatatatttcggccccgcataattcgtggcaaattgaattacattgactgatttgcccgcattagcagatgggggaagttgtgaaggacttgacagccgggactgtaggaggggctgccaacctgattgttgggcaccccttcgacaccatcaaggtgaagctccagagccagcccacccctgctcctggccagctccccaagtatgcaggcgccatcgatgctgttaagcagacgattgcagctgaagggcccaggggcttgtacaagggaatgggggcacctctagccaccgttgctgccttcaatgctctcttgttcagtgtgagggggcagatggaggctctcctcagggaagaacccggtgtggccctgacggtgaagcagcaggttatcgcaggagctggtgctggacttgcagtctccttcttggcgtgtccaacagaactgatcaagtgcaggttgcaagcccagagttccttagccgaggcagcagccgcttccggcgtggctctacccaaaggcccgatcgatgtggcgaagcacgtggtgcgggatgccggtgcgaagggtctcttcaaaggccttgtcccgacgatgggtcgcgaggtccccggcaacgctttgatgtttggcgtgtacgaagccaccaagcagtacctcgcgggtggccgggatacttctaacctcggcaggggctcccagatcctggctggtggcctcgctggcgccgccttctggttgtccgtgtacccaactgacgtggtgaagagcgtggtccaggtggacgactacaagaaccctaggtactccgggtccctcgacgcgctgaggaagatcgtggcggctgatggcgtgaagggcctgtacaaggggttcggaccggccatggcacgcagcgtccccgccaatgctgctacgttcgtggcgtacgagataacgagatctgctctcggttgatgggctgctactccagtgccactgccatttcttctgctggcacggctggaactgctacatcttccatagcaacacaggatggagcaaaggcacgccttgcatgtgcaacccagaaattgtacaattgcaagcatttttttagggtggaaaaggggggaacttttggctgcaatggtgactgttgggattgtttaataagcaagcttcataagatgttgatgggtgtagtgagtgagtgtgatggtggttgcgcgatggtggtggactggtggcctttgctttgttgggttgtggcgtctggtggcgagtggccccctcgtcagcaggttgtcgtctccctttcttggccttggcttattggcctggatattattccctcttttccgccatattttgctctctctctctctcttctttttgc

SEQ ID NO: 20416 - DNA, 553 bp, Setaria italica
  misc_feature (15)..(15): n is a, c, g, or t
  Peptide Sequence Number=SeqID_86390
ctccggctcaagggnaagttctggcacacccgcgccaccgtggtcgcgaggatcggcaactacctcaagaaccgcatcccggaaatcttggaggtggagatagaggatgagaagcaattggatgacagccccgctgctttctgaggtatcaaatggtcacaattcacaatttatcactatgtgccaattgaggtcctagagaaaggaacacactttcagtcttcagaattagtcctgaaaaaatgtgagtgctatacctagtatggcacttacactgttcaggaaaagcgtatcttaaccattttcattcttctgtgacgctatcaaaactacgaaacgtgaatacatgaactctgccttgattatcatcactgtggcacacgtgacgaaaacactcaccatcttcagtgcgaaaacctgaattttgaaagtgaatttgaaggaccaaatgtactagacctgactgtttatattctttcgttaatagtcactgtttcagcttcagggatttgcagttacctatacggtttggtttataccagctacacattgg

SEQ ID NO: 20417 - DNA, 588 bp, Setaria italica
  Peptide Sequence Number=SeqID_86391
gccatggcgttcgccggcgtcctccgcgccggcgtcctcgcggtgccccctccgctacccgcctcctcgccgccgccattcttcgccacttcggcctatgcccgtgtacctcgccccacggcggcagcacgggccgtacgataccggcgacggggccggccgagccgcgctgccgcggcgatcaccgcgtcgctcgacctcaccgaggacaacgtccggctagccctagaagaagccaaatccgagctggggcagctgttcgacacgtcggtgggcatcacagggcaagttgatctcgcggagttggacgggccgttcgtgaagctccggctcaagggcaagttctggcacacccgcgccaccgtggtcgcgaggatcggcaactacctcaagaaccgcatcccggaaatcttggaggtggagatagaggatgagaagcaattggatgacagccccgctgctttctgagatattcattatttggatgtgcttattatagcattacgaagaatatgcatggtattgttgaggggacctacttttggagaagtgtagtggttttcctttctaggatcatcatcttgtgtt

SEQ ID NO: 20418 - DNA, 433 bp, Setaria italica
  Peptide Sequence Number=SeqID_86392
ccgcctccccccccccgctttctccggggtcgccgcgcaggacctcttcatatggttccccgtccacgacatcaccgtcgacatcccctcgtccggcgtcatctacttcaacgtcggcgtcgtcaagaagcacttcccgctcgccctcttcgacgcgccgccggcctgcacgcccgaccgcctcctccgcactaccccgcagcggctggaggacgttgacttggacggattgctcatcagcggttcggcgtcgcaatgatggaacgaacgggcggttcgacagcgccggcgagccagagaccagaagcgcagttttgagatgagacgatcgccggtcgggcgacgacggtcgccgcggcggccggcccggccggcttctgtgcagatagatagcgtggccattcttcctgttcctactccctaggtagcaacc

SEQ ID NO: 20419 - DNA, 551 bp, Setaria italica
  Peptide Sequence Number=SeqID_86393
gctcggcatctatgcaagcaccatcgactccccagaggcatccacaccatatcgccagtcgtcacttactccatgcaatgcaaggcataagcaatgcgccaacgctgccgcgctgctcgctgtcgccgctggtcgtactcagcgcgttcctcgtcctcctcggcgccggcgggtcgctcctcatccgggcctacttcgtccacggcggccggaggctgtggctttccaccatgatccagttgtccggctggccgctcctcctcccgcccatatgcgcctccctgctcctccgcagccggagcagggacggcgctggcggcggcgtcgccgaccacctcccccctccgcgcctcgtccgcgccgtggccgtcctcggcgcggtcttcgccgtggcgtgcttcgcgtactcgctggggtcgcaggccctgcccctgtccacgtcctcactgctgcaggcgacgcagctcaccttcaacgccgtctccgcgttcctcttcgccgggctccgcttcacgcccttctcggtcaacgcggtcgtcctgctcaccatc

SEQ ID NO: 20420 - DNA, 1903 bp, Setaria italica
  Peptide Sequence Number=SeqID_86394
tcgtttgtacgtcttctttcgtaccttgtctagtttttctagtaggtcccaaatctgttgaatttctaaccgctagatggaaaggcaacagccctgattcaattgcccatgtacatccgtcgatcaccttcccacctccgttgaacttgaaatttacaggataatagagagcggtatcgctaacagcagttgttaacttccggaatctgaacttcccaaagccaaaaaagggtgcagtatcactaagcagcagtgaacattctgaaatggcttctgaactttccaaccgggtgcccaacccagcacgaacagagaagaagaagcacgagctctagctaagatgagctatatcgacctcgtcagggatcttgaaggtggcagctgcaccgaacttcttcctcccgtcctcccactcgtcctcgtcctccaggctgttactgtcgtcgtcgtcgtggctgtggcacgacggggaggaggggtcgttgacgctcttcgacctgcagttttcagaggccagcatggccacctggcggaggtgagagatctccacgacgacggtgtcatcctccttggggagaggctgcttccatggctcaccgtcgatcctcatgaacgtgtgctcggccgctcctttgtggaactcgaaacggattcggtgggcctgtgctagacgggttccatggccattaggtgccagcaagacgagcccgtgccaggcatcacggaaaccaacaacctcaataaggccatcgtcaacataaggtgccgtcaggtctctgtcttgtactttcctcgttccaggtgtaccccaaggattcaatcctcctgagaaacttggcaagttgaggcagataattgaccgaatgctgcgaggaattataagctcttcccattggcgaccaggtcttttcatgatcttcaccttcgcaagttgtgcaatgttccttgaagaaggatgggttagggaagcagcaaaccatccttgcttaagtccaagcttagcatatgtaccctgatttgttagctggtttttgaacttctctggatttctcttcctttcagagtggaattcatatgatacttgtgcatccattcccatgctaaaataattccagaatcctccacggaatgtatggtagccctccacattgagagagtcagaggctgatactcggtggaatgcatgcaacgaatgcggaagatctaagggagcaataggatcgcacgggccttcctgtggaactcgcatcctcatgatgatatgccaactatcaatattcatttcccttgcttttttacttggcccaggaatgatttcactgccgcttggtcagtagctggattcttttttccccatccaaatgaaaaaggaaggttgtttccagttcctagaggcacagtagcaataggtggtggatgtgaaagcttaaggtcactaactactccaagcagccaacttgctgtgccatcaccaccagcgacgatcagtcttaagttcttctgaatttgaatagcaaggaggtcaccgttagacttgagcttttcaaagttgctgtataatctgtgcagaaccttgtcaggagcctcctctgagagatcgaaaacctgtgcttcattgagaagttcacggtatgttttgatcagactgctccccagttggccaccacttctagagttgatgaagactaccacagggcaggatggtgcattatcaacaatgacttgttcagagtctggcttcagtatgtaatctgggatgtagtagtttgtcagtggcccgcaagagctgtggtcagaaccattagtgccatttctatgtagatccatcctcgaatctcaagaatcagggagccccgcgtgcttcgtgtgttgattcggctacccgagggcgagtagggtcgta

SEQ ID NO: 20421 - DNA, 394 bp, Setaria italica
  Peptide Sequence Number=SeqID_86395
ccaccgataacgttcataccgcctcactcggtgtctgatctctggtggcagtagaacggtgatgcatccactgctcagcatcacgtttcttaactctcatctcttcaaggcgtatagcaactgattgtaggtaactctgtagaatttcaactcataatcaagcaaataaaagagaaaaggctcaacagaataaaacggggaaaaaatcactctacctgcatgttaccaatgaggagagcaaaaaagaattaatccaagaacacatattgcaatagagaatagcacttctccagggtatgtgcttgtcacaagcccttgaccaagtgtactgttaaatggaaaaatggaaattaggatagcaggcaataatggactaactagaattcacatttca

SEQ ID NO: 20422 - DNA, 1111 bp, Setaria italica
  Peptide Sequence Number=SeqID_86396
tggttggtaaaaatctgtaataatctaacaatatttatttctaaggtaactaaattgaaccagcaaacaaatgaaaacaccctactatacatccattgaacaattaatagcacattgtttgacacaaagaatgaagggttgtacctgtggaagtggtagcaacgcaaataagtccattatgaagtaacttttaatgtaccgcatagcaattggcactggatcaatcacaagctcaccagttccaaatactcgagaagatggagcaacataagcagtgcgaaattgaagaattatgcgtataaaatagatagaatcaataactgtccgtattattgttgatgccactgccaatgttttatctataccaatgcaggttggtttgccatctttggtgatgttgatgatgggtaggaagaagaaaagtggatccaccgcaacagcaataatacaggacgagaaaaaaacccaaattcatccgaaaaagaagtttgtcctggggatcaaatatagtcttcttaaatgatttaagatcttccgcaaatgcggtcttaggagcaccagatgtaagcgattgtctaagtgacttgagtcttccagagccctttctgacacctgacaagaaagatcttagtgcattaaatgaaccatagccaaacccaggcatgctgaacctcaaggcacttccacctcccacttcagaaggtacagatgacctcgggcttgactcctccagcctaatgaacctttccctgtgtccatccatgtattgagctttctgagcaccgtcaaacattcttaccaaagttcgaagtacaacggaatatgcagtggcattcacctctatctcaaagtaggtgccaagctaatgcgaagggcaccagtcagcatctacagctttaaggagccccaaactgtcgatcaaaccattatgcaaggaacctatatgatttccactcttatctgatgttccaagaagccaccctgcacgccagaaatgccctgggcggcggcggcggcggcggcggcagcgtcggcgtgcggattcgagcttatagagggaggtgttggcgcccagctcgcgggcggtgcgccgctggaagtccggggttgg

SEQ ID NO: 20423 - DNA, 538 bp, Setaria italica
  Peptide Sequence Number=SeqID_86397
cagtggcgctgagcattgtcctagcctttgcatggcagaaagctgtgcgcacgtggccgcgtgcgatggtgcgcgtcatcctctggtccagctttggcgtcacccttggtgtgggcgcgctgctcatgatcttctctacgctggccacggtcgggctcggcgtcgccatggtggtgttctccatcggcactgggctttacgcctgctgggtgacgcgccgcgtgggcttcaccgctcgggtgttcgagcgtgccgtgcagcctgtggacaagttccgcgggctgaatggccccgcgtacctgatggtggcggctgggttcctgtggatctccgtgtggtgcgtggcggtgattggcgcggtcaacttccggttccccgggctgacgatcctggcgctggtgctaagcctggcgtggaccgcggaggtgatgcggaacgtggcgaacctgacggcgagccgggtgatcgcactctactacctgcgcgggatgcagtcgagcgtgcagttcagcttccagcgcgcgctgtcctacaacct

SEQ ID NO: 20424 - DNA, 258 bp, Setaria italica
  Peptide Sequence Number=SeqID_86398
gggccgaggtacggcgtcacctccgtctgcggcctccggcgcgagatggaggacgccgtgtccatcaggccggacttccttcacggcggcggcggcggcggcgcctcctcttcctcctccggcaagcatcatttctttggcgtctttgacggccacggctgctgccatgtggccaggatgtgccaggacaggatgcacgagctggtcgccgacgagtacagcaaggcggcctccggcaaggagggtggtgccacccgg

SEQ ID NO: 20425 - DNA, 236 bp, Setaria italica
  Peptide Sequence Number=SeqID_86399
cactcatctctccgcgtgcatccacagcagcttggcagagcttgagagctacagagacaacgagaagctcgagagatagagagagaaatctagagaaatcacttcttgcagccaagaacagaaaaaaaagcaaagcaaatggaccgcgtgatgaagctggcgtcggagcgtgctgtggttgtgttcacgctgagctcctgctgcatgtgccacacggtgacgaagctaatgcagga

SEQ ID NO: 20426 - DNA, 313 bp, Setaria italica
  misc_feature (39)..(39): n is a, c, g, or t
  Peptide Sequence Number=SeqID_86400
agcatgattaacaatggtgttccaatcatggtctgaganatttttacaagcctatatatggtgataagaaacaagttgtgtcagagaaatattaatgttgtaaaacgtaatgggagaacatatgcaaatgagctgataatggaacttttgttctcttactgcacgcagactgtttgcatccttattgtagaaccgcaaaaaatcgtgcacctgatttatatgcatcttctctagtagcctgtgcctgtcgccattttcctgaattttgtgcagcttatatattgggtcacttagagacggatgaggatccttc

SEQ ID NO: 20427 - DNA, 603 bp, Setaria italica
  Peptide Sequence Number=SeqID_86401
tcccttaatctccaaatatcacctgatgttcatgaactgaattttttccttcatactgaacaagtttcaaattgtcatatgctttcttcttggacacttccactaaacccttctgagtatcattaagttcctcataagaagtgtatttaccattgaattctgcaccgacaattttataaagagaattgaagaacattgtagcatccttcgcaggaatgtgatatgaataatgtctatgtcctggtttgcaactcagagcatgattaacaatggtgttccaatcatggtctgagatatttttacaagcctgatttatatgcatcttctctagtagcctgtgcctgtcgccattttcctgaattttgtgcagcttatatattgggtcacttagagacggatgaggatccttcctatatgctgtaaaaagcagggcatcaattatcgtagaaaagaacaatagtagtataaaagagacagaagcctgatagttttagagtgttaagtctaagaactataataacaaaatggtgccgtgaattcctctttgagtaactagaatttattaccatcctttttgaagcacaggtgactgtgtagaataat

SEQ ID NO: 20428 - DNA, 551 bp, Setaria italica
  Peptide Sequence Number=SeqID_86402
atcaaagttgaaaaaaaggctgtccatgggagcaatttgaatcacagtgacgaggggtgcgaaagccgttttcaattgaattttcaccatctctagcatgatcaccctgagaaaaacaatgatcaggtgaagatactccttccttcaagcctgagccaagtccagcctcagttaaattatcatttttccttccaagtaatacaccaattttcccttctcttccttcgaaacacccttgctgccaattggggagaactctcgagtagattcttttgcaaattctttagcaggggaacactcaagatcagccccatctttaaccatattcttgtttccattttgtaaaatggtcacaccagttgcacatgttgcgttatcttcttccagaatcttactgttgcttttagttcttctcagcgtgggctcagttacagcggaatctgacacgtcaacaaatacatctttgtcatcatctgggacggatgaaattttcatatcaatggtatctgtggtatcaaacccatctgaattgtcatcttgcagcaccactg

SEQ ID NO: 20429 - DNA, 412 bp, Setaria italica
  Peptide Sequence Number=SeqID_86403
cccagccaaaccagccaagaaaacccccgaaccctggccagactgatctccacataactgaccatgattcatgagctcttgtatcaccagcggattgatacttcaaacacagcatacaaagcccttgtttggagcctcatccgtttcatgctcctgagctcctcaagtccgtatcgctgtgcatcctcctctttctgctgtgcactgtgtttgccacagtatgctttgtgctgtgatgtagtaccaaacccttttgtgttcatgtagaaaccagagtttctagcacaagtaggatgaaaagtaatgtggcagtccccactactacaccttaggcacaagccaactttgcgaaggcagagacaacaagtatcttttccctctacaaggctttccattccttctacaggattaa

SEQ ID NO: 20430 - DNA, 1718 bp, Setaria italica
  Peptide Sequence Number=SeqID_86404
ttgctgactcagtgtgataagtgtggggtgggggggggggcagccttcttgttgtggtgccacaccgtacagtcacaaaataattcagtccgcaccattgtgcaacttgggtccaaaaggatcactgcttgcctgtaacccatgtggcaatagcactggccagccctgcttgctgctggtggttttctgttgcaaagatatcaatgtcctcaggttgcaaaactttttatggccttccttgagagaaatgaacccgcttgatcacaactaatcctatccaccgggctcttgtggagtatggggctgtgtatttctattccatggcctctctttagatagagaatctcgaggaacataaacataacccttaggaaggcgctgattctgtgtagaagcttgatcagatgtcataacaagctccttttgaaacatttctatcttcttatcatttgtcttcttttctccatcatctagtttctgtgaggtaatagctggtctctgtggaagttgcttaccagcatgcagtcccctctcactcaacttgcgtttgaatgatatcaatgtcctcgagctatcagctgtatttctctcagcatctctgctattcagagaaaaccttatggttttcttcctagaaagagtactatctactgtgacatcatcagatctttgagctgttccactgtatgatctgttattaactgaagtagtggcagattctgaactcgctccgcatgcaaggtaggagaaaataacagtgtcctttgttttggcaagtatgtcatggtcacacaaaaccgtctctctcttcaccttctctctcttaattaccctctcacataagaggcgcaatttttccaattcaaccctcatccgtttcatgctcctgagctcctcaagtccgtatcgctgtgcatcctcctctttctgctgtgcactgtgtttgccacagtatgctttgtgctgtgatgtagtaccaaacccttttgtgttcatgtagaaaccagagtttctagcacaagtaggatgaaaagtaatgtggcagtccccactactacaccttaggcacaagccaactttgcgaaggcagagacaacaagtatcttttccctctacaaggctttccattccttctacaggattttcttgtccccttacatacttggtgtccaacaaccactcagcacagaaagcatgaacccactgcccatcagcagtctttctaaaagcacctgatgtgccatgacacataccacaccgtgcaaagggtgattttttgccattacaatctaatttatcactagtggttggggtttctaaagaaatatcttgatcttcacaaagttcacatttccaggggccaatagaattctccagatttctgtagcaatctatgtgcacagcagccttgcatctggaacagataaatattcggttcaacagagtctcagttcgcatgcaaacatcacagtggagtgcattttcatttgaggagattggcatatgaaaactgccaaatttgttatctggtggtagtttgctgttggatgactttgatgaatcctttgtccgttgcccaactcttgaagatccagcaacaagttttggagaactctcttgattagcaggtgccgcatcttcctttgcatcttttctcatggttgaattccgtgaagaggatgcagcagcagcagctgctgcagctagtacagcttggg

SEQ ID NO: 20431 - DNA, 2713 bp, Setaria italica
  Peptide Sequence Number=SeqID_86405
tagttcctttgtctattcttggtaactagtattaaattatttcggtttctaactagtagttcttctagtttcgtctattgtctaaactattctactagttggagttgctatttttcattagatatttggggcatatgaaaactgccaaatttgttatctggtggtagtttgctgttggatgactttgatgaatcctttgtccgttgcccaactcttgaagatccagcaacaagttttggagaactctcttgattagcaggtgccgcatcttcctttgcatcttttctcatggttgaattccgtgaagaggatgcagcagcagcagctgctgcagctagtacagcttgggcttccttatgtctcttttcttttctcccacgtttcttagcttctctaacatcacgaagaaactggttcacaaaaataaggtcccattttcttctactgaaagcatccagctcgcgagaaatattctgtacaacctttgctatcagcttttcgtatctgtgcttcagaacaacagcattgtcaagcagcctagcttgtaggtatactatctctccttctacttcatcatcaggtgcatgctcaagaatttccaaggaacttgctttcaaaacttgatctgatgcagctgtatctgttgcatcctcatgttcttccgaggaatcaacaggtattttctcatgagaaggacacgaaggttcttcatgatgattcagagcttccttattctgattgaaagtaatgtcccagtgatgagatatctttttcttaatgaaaggatgaatataagaatgtgaatcatcaaagttgaaaaaaggctgtccatgggagcaatttgaatcacagtgacgaggggtgcgaaagccgttttcaattgaattttcaccatctctagcatgatcaccctgagaaaaacaatgatcaggtgaagatactccttccttcaagcctgagccaagtccagcctcagttaaattatcatttttccttccaagtaatacacctcgattttcatttggtatctccatggaagtaccaaattcgttatttccagatgtgttgttcagtatcaattttcccttctcttccttcgaaacacccttgctgccaattggggagaactctcgagtagattcttttgcaaattctttagcaggggaacactcaagatcagccccatctttaaccatattcttgtttccattttgtaaaatggtcacaccagttgcacatgttgcgttatcttcttccagaatcttactgttgcttttagttcttctcagcgtgggctcagttacagcggaatctgacacgtcaacaaatacatctttgtcatcatctgggacggatgaaattttcatatcaatggtatctgtggtatcaaacccatctgaattgtcatcttgcagcaccactgagttccctttgcaagcatttccttgaacagcatgcatatgtacagaattttgaagccaattgataatttttagcatcaaaccatgggaaaaggtggtagtttcacccacgagagcagcttccaaggattccgaagaaatacccacttccgatgctatatcaccaacactaacctttccactgtcaattagctttctaagcactacagcaatatcaccaggacttctcatacgatccccaccaacagagggatgcccagtacctgtttcccggcttcgaattggttgagcatttgcatttctaactgtattagccaaagcatcttgctctgtggtctcgactctgatcaggttaccagagctagaggcactggtttcacaattcatgaatttgtccttgtttttgcgtgtgaatcttagttttggaatttttccagtgatgagattcgtattatttgggccagattctgtaggactctgttcagaagcatggttactgttctctactgagctggtgtatccaactgaagaatgctttgagcaaaatgctctcaattcaacattagagtgcctagatttcccccatatctccatttgatgctttgactctcttgcgcatataggatgaaaagccgcccggcatgttccatgactacatcggacacatgcaccatgcttgatcttgcaaatactgcatgtcaacttcatccgattctcttggacattatcgagattagttacaggttccattgattccatgtcctccacaaaaacctctggcgcccagagactacaaaacaagtgcgcaaattttaggtggctaacatctgcagtttgagtaggctccactttgacaggtttaagagcccctttctcctttggacataaaacacaaggcgtaggctgggtgctgccagaatctttattcgactccaaatatgtacaccaagcacacaaccattgcccatcaggcacaacacgcaaaccatagcacttctggtgcaccgataccttgcagttgctgcagttaactatcctattggagtccatggaactctctccaagacaacaaacatcacaggttgaagacttctcagctcccaagcgtggaagcagaacaagctgttctaacccagcagccacacccaaaagctttctcttcttgtggtcgctccgaagtgaggacaaatcggcctgttgctcctaacaaccaattaagtgaactccttcctcttcagcacattgtgctgacacaatgccattgctcacagcttgatccacttcaaatggcc

SEQ ID NO: 20432 - DNA, 281 bp, Setaria italica
  Peptide Sequence Number=SeqID_86406
tcgtctaggggcctcctcaccgtccaccagtccacctcgccgccgccgccgccgccgctgtgctttcctccgcctcctctcccgcgccgccgccgctcgcacgctcctttctatccctggagggcgacggctcggatccctcctccaggcaccagcgtggccgccccatctcgactgcctccgcctgaatacccccctgccccataaggcctggccttgaaggccactcgcctcttgattccggcggcggcggtggagagggaggggcgatgccgaagcgg

SEQ ID NO: 20433 - DNA, 858 bp, Setaria italica
  Peptide Sequence Number=SeqID_86407
caaccttcgccaccaaagggctctcaaactcgatgaatccatagtgcttagactttcctgtcttgcggttccgggcaatcctaagcctcttaatatccccaaactgcttaaagaacccttgcatctgatcctcgtagaagccgtgggggatgtgcccaatgtacactacggtcgcggtgttctccggctcctcgggctgctgcaccttccgcagcctcttcccgggccctccttccagcggcaggaagtccttgcactatggattcatcgagtttgagagccctttggtggcgaaggttgtagctgatgagatgaataactatctcttgtttgagcacaccttgcgagtttcacttgttccgccagagaaactcgcaaggtgtgctcaaacaagagatagttattcatctcatcagctacaaccttgcgagtttcacttgttccgccagagaaagttcatccaaaattatggagaggggtgcgacggggattcataccaattgatcgagtagcaattgaacggaagagacacaacaaggataaaactacagaagaacacaaaaagatggttgaaggaattgtaaagcgggacgaaaagcgtcgcaaaaggatcaaggctgctggtattgattagtgagtgtccagcccttttggggagcatccagccttcagcgaaaaagataaagttcgacgaggatcagtagcttactgcagctttgagggggccattaactgtgcactcgggttttgatgtttttaatgaatggcacaccgacagtgttacgagtatgaaaatgcaatgagaatatttgtttagaacaaaaaaaaaaaaaaaaaaaactaaacgtagaacgacgt

SEQ ID NO: 20434 - DNA, 973 bp, Setaria italica
  Peptide Sequence Number=SeqID_86408
caaaacttccccacgggcaaaaccctaacccccccttctcttcctccgcccctccccccgcgacggctgcccgcctccggcgcctcctgcctccgccgcgcctgacgagcgctgtatccaagcaggaccgtgcaggagaaccggtagacaggagggcccggcgagatggggatgcgggataagaagcggaaccagaagcgggtgctcgcgcagcgcaccgcggctccccgccccggcgagggcaaggacttcctgccgctggaaggagggcccgggaagaggctgcggaaggtgcagcagcccgaggagccggagaacaccgcgaccgtagtgtacattgggcacatcccccacggcttctacgaggatcagatgcaagggttctttaagcagtttggggatattaagaggcttaggattgcccggaaccgcaagacaggaaagtctaagcactatggattcatcgagtttgagagccctttggtggcgaaggttgtagctgatgagatgaataactatctcttgtttgagcacaccttgcgagtttcacttgttccgccagagaaagttcatccaaaattatggagaggggtgcgacggggattcataccaattgatcgagtagcaattgaacggaagagacacaacaaggataaaactacagaagaacacaaaaagatggttgaaggaattgtaaagcgggacgaaaagcgtcgcaaaaggatcaaggctgctggtattgattatgagtgtccagcccttttggggagcatccagccttcagcgaaaaagataaagttcgacgaggatcagtagcttactgcagctttgagggggccattaactgtgcactcgggttttgatgtttttaatgaatggcacaccgacagtgttacgagtatgaaaatgcaatgagaatatttgtttgcaatgtatgcttaatttacttaaacattaaaggaaaaaaaaaaac

SEQ ID NO: 20435 - DNA, 1336 bp, Setaria italica
  Peptide Sequence Number=SeqID_86409
tcgtcttctaattctaaagtctagtaatttactattaatttgtcctttctaccttgtcgtctttggaaatttaaactaaagccaagctgcaagtgtagtatactaaggccttatggactgcctatgattccataggctggaagatactgtgcaaatggcaatcacaaaacctgctagcttattggatcagtgcggagggagcttcccttctaggaacgatgagaatagtgccaatgctctgcgaggctggtagtatgggaccatgtgcccggctcctctgactgttgcgaagaccaggcctttatacccaatgacgtagccagcaacctcattatcgatgctccatggacgccaagatgtttctattggaagtccaagaatgtccagcacatactgtgtcgaaatgaatgaacacacggcatccatatcaccactgtacagccatattctaatgccacttgaaatgagtttcttgattgatggcagcattgtctctggtgaatctttccaattatcaaatacatgctgactacaatccatccatgggtagtgtaaccctgttgtgtttgcatggagtgccttttggacctcaggacgatttaggtaagaggaaacatagtggtttgtgcatggatcgcccactagcgagtcacttgatttagaaggatttgaggcatcatggcatgttggtgcatagatgtcatagtcatcaacatttcctttttcctgggtagctaagttcatggcattttggcaatctttagtgtatgtcccattaaagtcacatttatccttgatggctctgtaagcttttctagaaatcatagcatgcatccaatagtagtcaaacgatgctcttagagtcaaattgtcatccaagtctgcatttccaatcgcaacacctttaagtttgacattagttgcattgctggctctattcttagaaacaatcagattagcaagctctggtatatagtgacccgcatagctctcaccagttatgaagaaatcacggtcccgatactcaggaaatttctctagccaattgacaataaaggtataagcatcgtctgtggttctttggtcaccggtattataataatctgaggtagtgttcgaatatgagtacccaacaccagctgggatctcaacgaacagcatattggccactctgttccatgcatgccttttcctgtacagtgtcttgttgtcattacggacagagaaaggaccaagttcaagcatggccccagatccaaaggatgaacagccgggccctccatttagccataggactagcggtttgtccaagggatcttgaggagccctgagactg

SEQ ID NO: 20436 - DNA, 717 bp, Setaria italica
  Peptide Sequence Number=SeqID_86410
tagtttaaaccgttactagttgtttaagtcataaacccgatggtgattggaaggggaatatgacacaccttaaaacctgtaatccacacacaaggattctagtaatgagctctgataggcctcaagaaatagaggcaaacaaagagatcattttcacctatgatgttaactttgaggaagagattggataaagaggcaccaacattatatctacaaggcatgcatgttgggtcaatggtttgtagggagaaaggattggagttatttcattcacaaccacttatcatttctggtgaagtataacaaggatgaacacacaggtctcgctaggattgtgggcttcgaagttaaaccgtacaggaaagtgatatcaagtgggcatcacgctgggacacttaccttagcacgcctgacgatcattggttttacattgtgaatactcttatgacagtcctcttcctctctgtgatggttgccatgatcatgctccggactctgtaccgtgacatttccatgtacaaccagctagagaaccaggaggaagcacaggaggagtctgggtggaagcttctccacggcgatgtgttcaggcctcctgtgaatgctgacacgctgtgcgtgtacgtgggtacaggtgtacagttctttggaatgctgcttgtcaccttgctgctcgccatcctggggctcctgtcgccttcaaaccgtggagggttc

SEQ ID NO: 20437 - DNA, 244 bp, Setaria italica
  Peptide Sequence Number=SeqID_86411
actccgtggttcatggtacagttgcgccatgaaggtatatacataccgtcatgaggaacaggaataatgcatggaccagggagcataccttttaactcagagtggcgtgaaggcaaacgagagtaaggacgagcaaagcgactccgaggagctgttaccaatcaacataacaggatgtgcaagcagggtgtccatgggaaatatatatagcatttgtatctatgaggaaatgaacatctattcg

SEQ ID NO: 20438 - DNA, 455 bp, Setaria italica
  misc_feature (440)..(440): n is a, c, g, or t
  misc_feature (453)..(453): n is a, c, g, or t
  Peptide Sequence Number=SeqID_86412
cacgcgagcggtggcagggtgaataccttggctatggcgtgcgcgcttacggtaacaaacaaaaaccccgtgactccgtggttcatggtacagttgcgccatgaaggtatatacataccgtcatgaggaacaggaataatgcatgtacgtatgacgtatatggatggctcaaccacaagcagaggtctgagtagtttttttttcaaaacatgacgtgcgtgtctttgaactcagggaccagggagcataccttttaactcagagtggcgtgaaggcaaacgagagtaaggacgagcaaagcgactccgaggagctgttaccaatcaacataacaggatgtgcaagcagggtgtccatgggaaatatatatagcatttgtatctatgaggaaatgaacatctattcgtgagtggatatgtggaagttaaatgtaacccttnatcaagtttaaanag

SEQ ID NO: 20439 - DNA, 420 bp, Setaria italica
  Peptide Sequence Number=SeqID_86413
cggcctccccagcagctcgtagaaaacccagagcaaactgttaccatgtcgtcgagggacaaaaaatatgaccctaacacagacttcgccggggcctccatcgtgtcccactgttacccttaccatgggcagcggcagacgatattcagggacgctgccagaaacgcctacttccggaaccagctgccagaaacgcctagtaactacaagggtggtggtgcgaggggtggcggcgggtactatagtgatgaggatgatgacagcgagagtgaggacgacgacgatgacgagagcgacgagaaggaaatttcccgcggccagggcggcgtgcgccgctacgaccacgaggcgaacaagccggagaagaagggcgctggcagctaccacgacgtcgcgcaccaatacgaggcaggacgtaac

SEQ ID NO: 20440 - DNA, 689 bp, Setaria italica
  misc_feature (676)..(676): n is a, c, g, or t
  Peptide Sequence Number=SeqID_86414
aactaagaaccaaagaaaaaacgaacctaaacttaaccggaaaccaagactagaccaagaaaacgacctaagtaaactaacaagggtggtggtgcgaggggtggcggcgggtactatagtgatgaggatgatgacagcgagagtgaggacgacgacgatgacgagagcgacgagaaggaaatttcccgcggccagggcggcgtgcgccgctacgaccacgaggcgaacaagccggagaagaagggcgctggcagctaccacgacgtcgcgcaccaatacgaggcgtacaggaggggtgcacgcgagcggtggcagggtgaataccttggctatggcgtgcgcgcttacggtaacaaacaaaaaccccgtgactccgtggttcatggtacagttgcgccatgaaggtatatacataccgtcatgaggaacaggaataatgcatgtacgtatgacgtatatggatggctcaacgaccagggagcataccttttaactcagagtggcgtgaaggcaaacgagagtaaggacgagcaaagcgactccgaggagctgttaccaatcaacataacaggatgtgcaagcagggtgtccatgggaaatatatatagcatttgtatctatgaggaaatgaacatctattcgtgagtggatatgtggaagttaaatgtaacccttnatcaagtttaaaa

SEQ ID NO: 20441 - DNA, 351 bp, Setaria italica
  Peptide Sequence Number=SeqID_86415
gttctgttgaaacgagaaatagatcttagcacaatatccagccagagcagaaaggatggcgattacaacccagaaatcggctttaggcatttcgagtgaactgataagtgtaacgagtccaatgacaacagaaacaataaattgaacccagtccattggtgtgaggcttgggtttttcttctcaggcagaaccaactccatatctgccattggaatatttttgaagtgttttacatgaattgctctatcatcctggccctttggacttttcctcctgtacaagacaataacctcttcaaatgtaggctcttgaattgcgaccttgccaattaaattttgaggtgatggatg

SEQ ID NO: 20442 - DNA, 411 bp, Setaria italica
  Peptide Sequence Number=SeqID_86416
cggagtggggccgctcgggacgcttccagaacaagtcctccctttccaacccgccgccgcctccgtcgccactcgccatcgcccgcctgtccggctatccgcctcgcctcaccattgtcgggcccctcggccgcctcgttaaaccctccgcgcgaacccgagcggcaccaatccaaacccctagtcacctgccccccgcatcccgtacctctctcgcaagccgcgccatgtcccgcgtcgcgagctcgcgcctcctccccaggatctccgctctctccttctgcaccgcctccccggcagccaccgccgcctcctcctcctcctccccatccacggctgcggcggcggcggcggcgactgcggccgcctccgaggcctcgtccacttccggggacccatcctcccagcccc

SEQ ID NO: 20443 - DNA, 413 bp, Setaria italica
  Peptide Sequence Number=SeqID_86417
cattttactttggtcaatttgtatgtctccgaattcttccaatcgttggtcttcttggagctttctttgacgatggaattttgaccctgcagcatctcttatcgagctcgttgacaaactaaacaacgaaaaatctgcaaaaacaacttgcttgcatcaacacctaacacaaaaactgcaattattaacagcacatcacaatgtaacgattagtgacactgagactgcaatactgtatctcgtgcagccactgaactttgtggaacttgcagatgggttgatcttctgtacagctccgcggcaaggttttctgcgcccaccttgcgctctcgtcagcgtcatcagatcagagctcaatggggctgtgttgccagacgctgtcagaaagcatagcaaggaggggaaggaaacta

SEQ ID NO: 20444 - DNA, 398 bp, Setaria italica
  Peptide Sequence Number=SeqID_86418
gagacgaggcgcgcgcgctgccgcggtgcgggcaccggttccacgccgcgtgcgtcgacgcctggctgcggcggcggcacaccacctgcccgctctgccgggccagcgtcgtcgtcgccgccgcggaggatgtggacgcgccggtctagctggtcgccaccgatcattggtgtgtgagtgaagcgaagaaattgggacgtcacgttgcggtcttccgtcaacgaagaggtcgttgtcgcagcggcattatcttgtttggatgactccaaaccaggaagccggccaggaccacctactagacgtgcttctgatccatccttcaaaaggagagccaaatcaagaatgaagtaggcatgtcgcatgttgaagacaacggcaatgtagatttttgccgagca

SEQ ID NO: 20445 - DNA, 627 bp, Setaria italica
  Peptide Sequence Number=SeqID_86419
tcagtagcgtccgatgtttcttgcgtggattatgcaaagttggcactgttctgtcagcaaatttagacacttctcagttctctaccagaaacggcgagttctgcagatcgtgacaaattgccacaaagctgaacggatgaaatgggcaccgctcggattgcaacttgcgttttgcgcaccttttaccttttgggacaaaaaaatattcaattacttggaatccccgtcagttccatatgcgcctgtaactgcaaattctctctttgcatgttattttcaggaccacctactagacgtgcttctgatccatccttcaaaaaggagagccaaatcaagaatgaagtaggcatgtcgcatgttgaagacaacggcaatgtagaattttgccgagcatggatgttgcttcttctgtcctaaattgtaggtcgttttgacttttctaggtgcatagtttttgctatgcatgtatgtctaaattcatacaaatacctataaacttagaaaaaaatcaaaacgacctacaatttggaacggagggaatatactttaatagacttagcgcttagttggccatttgaaattgcttatgtttctactttttgttgctttttgagagcttgttttaat

SEQ ID NO: 20446 - DNA, 827 bp, Setaria italica
  Peptide Sequence Number=SeqID_86420
ctaaccaccctatagtaaaatcaaaaggtgactcgaactgttcactagagcagtaaattttaagaataatttaaatgtaagtacttgagtaactaacaagtgaaacaacacaggatgcctgatgctggcatggcaactggaatctagctgttccaagcagagtacactcgacgcgacgatcccgacaggtaacacacggcacgacacggcggtcgatatactgccaaacggatctgcacaggatggactgtcagactccgccgccggctatcagagagacggcagcagccagaacatggagacggcggatgttgcgatgaaggaccatgttatgaaggcgaggatcaccgagagctcgtaccgcccgcacgacagctgcgggtacatcctgcagaagtggacgtccctctcgaacaggatggtcacgccggctgaggcggaggcggctgcaaatgacaagatcgccgtcacccagtccccgacaacaaacaggcttacaagcacagggttgtgaagatctctcttagtcttcaaagagtagatatcaagacaagcaaggccgaaactccaaagaagctgtaggcccattgaagcaatcaagtagcagaaggcggtgtagttggagaagccgtacgcggtggccatggcagccatggacccgccggcagacacgcattgcgacaggcgcagcgccatgccgctccaggtccccgggctcaccaacacatccttcatccccgatagccggtgggcgagcgcgagaggagagaaggcaccagcgccggagaaagggcggccgccgccggtgggaggtctggcgaggctgg

SEQ ID NO: 20447 - DNA, 291 bp, Setaria italica
  Peptide Sequence Number=SeqID_86421
aggtccctgacctatccgtcccctccctctaccacacgccggcgtccacccccagttcgaagtctcctcgccggcatcagccgccactgatccctcctccgcaggcgactcccgtggtgggggtgctctcgccgccgctggagccgcaggcggctgtgaagtcaaccaagcgagcggggattattggagttgcatttgaggcttactactccaagatttcacagatgccggctgcttccaaggtggatgcctgcaatgctgctgcggtgtgggcggggcagtactgacaaa

SEQ ID NO: 20448 - DNA, 449 bp, Setaria italica
  Peptide Sequence Number=SeqID_86422
ccaaaaggtataaacctatatgcaactgggtattgcagcaggtttattgcagcagcaaacacatcaatacataacccgcccaccattccagtctgattgtcatctgatacaaattgacggtaacttaccctattggggactccaattctcagctcgtctccattgttagcgaatacccatcctcggggcctttttatagtctcacctggccagattgcagtgtgtagtttctgattttcaatagtgtcattgggtggtttcttgtaaagagtttcaggggacacaatggacagcccagagtagttggtccaataaccaattgtccgcagaccagaccctattatgtttataatgtcatacgcaggattgataagattaccatctgaatccagttttacagtgccagttgcgcccatgaaatttactttgcgaattctttccagtaatag

SEQ ID NO: 20449 - DNA, 275 bp, Setaria italica
  Peptide Sequence Number=SeqID_86423
tcccccattcggcattctccctccttccgtttcccaaaatccaaagcactgaaaaccctaggtcatagatcgacaggtggccggagtggcggggatggagggaggaggcaagacaggagagccgcgagcgccgacaggggaccgcggcctgtgccctcccgccggccgccgctcgggcgcttctgcgccgcttggcggcttggcgctgtccggctggcgcgcaaggctgcaaggggcaagggatccacaagtcacaaccagtagagccaggcgag

SEQ ID NO: 20450 - DNA, 842 bp, Setaria italica
  Peptide Sequence Number=SeqID_86424
cacaggacgaagagaactgtgcagagataagcaaacacccaaggctgctctctaagatcacatcaccactgagcagccctgactttctcaacaatgtgcgggaggacacaatggttgttcgaatgctaagcaagtcactcacagcgttaagcaggatacttgcctgccctggggatggcgccacaaggctgcgccaggaacttgcgagtaccacagaagctgtcaggaatctgatggctattttggagaatggcagtggagctgcccaagaactgcatagacaagccctggagatcctgacggagttagcctttgatgattctttcaaaaagctggagtttaacaagcttctcaaggccctgctatgcatcttccttgaggaagcgcccagcaataatactgtagttcaagtggaacaagcagacagggaaaatgccaccagactgatgaggggaaaagcaggggaaggactggccagattgcttcccgttagcactgcaagagaaagagatgttataatttccaagcaacaggcgatcaacctattgaccaaggtgcttgatcaaatattatctagtaaaatgggaacaagtgcagatgcagcagaaagaaaggtgaagctgagcaatccgaggaaagaaagtttatggcagccatgttatccctcgctgtggtgatatgcaacgaaaatgttatcagtagagaagattttgctcgatccacccctgaagatgcagcacttgcgaagaagctcaaagagatactggaagtaaacaagcaacgcacggctcagtctgagtgttttagagtagtgaaactgacctgccagatggtgatagcta

SEQ ID NO: 20451 - DNA, 527 bp, Setaria italica
  Peptide Sequence Number=SeqID_86425
cggcgtccaactccggagtgccgcagccgccgccgcagcagcagccgtcgccgttcgccggcgcgctcgctatcactcccgtccccgagcaggcgcagccgtcgtcggccgcgggcgccgacaagaaggcgctcgtgccggtggcggcccccgcggcggggcccgtggtggcgaagcggccgtccaaggaccgccacaccaaggtggacggtcggggccggcggattcggatgcccgcgctgtgcgcggcgcgggtgttccagctcacccgcgagctcggccacaagtccgacggcgagaccatcgagtggctgcttcagcaggcggagcccgccatcctcgccgccaccggcaccggcaccatcccggccaactactcctcgctcaacatctccatccgctcgggagccgccgccgccgccaaccccagccgcgcatcgcctttcccggcgctcgcgctccacccgcaccaccaccaggcggccgccgcgccgcacgacatgtccgccatgatgggctaccaccac

SEQ ID NO: 20452 - DNA, 295 bp, Setaria italica
  Peptide Sequence Number=SeqID_86426
gggggtcggcggcgtcccccggggccgatctccggggaggaggcgtccgagtcgacggcgggcagggagagcgcgaggaagtcgcggtcgacgtcgcccgcgccgtcgtcgtaggtgcggagcagccccgggagcgagagtcccctgccgtcggggaggatgaactcggcgtaagtgcggaacacctcgtcgaggatggcggagatctggtcgtcgctgaacttgacccgcgggttgacggcgacgacgagcgcggccatctcgtcccggtcgagcccgccgtccccgttggccg

SEQ ID NO: 20453 - DNA, 354 bp, Setaria italica
  Peptide Sequence Number=SeqID_86427
acggaatacaatcttgtatgtgagggcatcaggaggctcacccacttcagtcatctctctgaaaagattaagggcatctcttaaattattccgtttaaacaaagactgtatgacagggttgtaagcttttggagtaggcctcatccctttaattcgcatgcctcttaaaagcttcaaagcaacctgagtcctaccagccttgcatagaccattaatgagtgttccatatgtgacaacatcaacttcaaatccatttgctgtcatagtttctaaaatatcagctgctttctttatgtttccttgcttgcaataatgtgttagaatagaattataagtgatattatcaggctgcaa

SEQ ID NO: 20454 - DNA, 1438 bp, Setaria italica
  Peptide Sequence Number=SeqID_86428
ggatcacggagcttacctggaccatgcattcaatcgagaaattctagaaacttgcacggcaacatgtgtgcttgtcccgtcaatttcatctatgcccacaaaaattattctgtacctacgagcacagctagcatttagaaacgagttacctagccaccagtttaggacatgtccaagcccaacagggtctgatggtagcatcaatgtcagccacatgcagattgctccatctagtgctaacactaatactactgcacagaaataaaccaaaatgctttcttgcataagaccaactgccagttctcatccttagaccttagggacaactcctgatgtctcccctccttttctttgtcttctagtgttgttctactgaacggcttcgtgggaatcctgccctctctaccatggcaatgcggagtcacaataatagcccgtgtcgcttctgattcacggaaaggagcctctataattcggaataatccttcctcggaacatcattaaggtagttcttaagcaacctttgatccatgatcatgtttggaatcttttcaccaaagaagatctttgagttattggcgattgattccatgaacctcagctcaagatactctggtgtaagtttgagcttgttagcctctgcttccttcaagatcctgtagtagtttgcatctgccagtgctttctctcgtgcaaggtacatttcattgtcaatctgctcctgcctcttggaactgtctttctccatcagtttctgctccatcaggatcttgctcacctgtgcgttcttctctgcttcagatagcgcaattttcttctgtgtttctgcctccttctctgctaccttttgcttctcgatggcgatcagtgcctttgtacgctcctcctccataagttcaaaatttctcctaatgctaccaggaatatttggttttgtaacacgaacactgatgatttcaattccaggagcatagcgtgtgcagtctctttgaatagcttctttcattgtttcatcaatctgatcaaacatgtcaatgtaaacttgctgcaaactgtgagcactgcagaactggtttatctcatgatgaattttatcatatatccatgtcttgtcatagtgcacaccataattgagtagggtttcatgcacaaactccttacggaggcggttcacaacctctatcttgtcaaagctgatcataacaccaccttttgttccacagggaatatctctgacctggtctgtttgaagtgtaacttgtattggctcatactgggtgatccaagggagtttcagatgaaaccctggaggagtgattgtcttcagaagagcacctcctctccagtataccccaacatgtccttcaggaacttgatgcagaacgcttgatggaactgagagtgaaatcagcacgaagcagatgccgatgaaggcgac

SEQ ID NO: 20455 - DNA, 252 bp, Setaria italica
  Peptide Sequence Number=SeqID_86429
tcggtgcccctggcccagtcggccatccgcgtgcctccgacggcgcagggcacgagggcgacgacgggtgcccccgcgcggccggagcggagcagcgcgttggcgaacggcatcccgggccccaccccgacggcgtggttgttggaggcgtcgatgccctggtggagcggctcgtctttccaggccaccctctgcatttggatgcgccgacgccacccaatgcaagcctgacccaccactctcacactgcag

SEQ ID NO: 20456 - DNA, 409 bp, Setaria italica
  Peptide Sequence Number=SeqID_86430
tctcccgccgacgccgtcgccgtcgccgtcgcctccgccggggaagcccgccaaaaccctcgccgagtcaaccccaccaagcaaagcccctgcccggcccaagcccacggcagagaaacctaaggcagcgcctgtgccggcgacaaccaatggcgctggcgccgccaccggcgagaactggtggctggttgggagcgccgagatggcagggctgtccacctgcaagggcaggaggattgcccccggggatgcggtcaccttctccttccccaacgccgcggcggccgcctccgccgcggggaagagccgttccggccgcccctccctcgcttcctgctcctccgagatcatgcgcttctccaccccgtaacctacggggtaggttggtcgcatccccaatgcgtcttaa

SEQ ID NO: 20457 - DNA, 675 bp, Setaria italica
  misc_feature (645)..(645): n is a, c, g, or t
  Peptide Sequence Number=SeqID_86431
acctccatcggccatctccaaaccaatccccagcgtcttgcaagctgcaactctccccaggagcgcctctagctgtaaccttgactccccggtgccaaaatgttcagtcccattagctgttcctcccctaagtcaggctcctgcaactcaacctgcaacactgaccacggcaaccgcagcagctataatgcctagaggtactgctggctgtttggtctttgtatagcatgatcctgttataattgtagtattcagtaattttgttgccctgttacaccgtattgaaattgttattgtctgttgcagctgtccctcaagctcggaaggcctccctggctcgattcttggagaaaagaaaggaaaggtataattcattttcttactcttatgtgtcctaaaaactgttatcagtgattctactgcatttgtttgagaaaatcacaggaacttagttctacgtaacaggtttgcatttgctctcagaaactggtcctcatctgtgcatgcttctcctgcagggtgacaactactgcgccatacccatcagccaagagcccattggagagcagcgacacacttgggagtgggagcgccaacggacaagtcatcttgcacagacattgccctgtcaagcaaccgcgaagngttgctaagttaggccagccaggacatcag

SEQ ID NO: 20458 - DNA, 2000 bp, Setaria italica
  misc_feature (1926)..(2000): n is a, c, g, or t
  Peptide Sequence Number=SeqID_86432
ggaaacccgtaaaaaacctaaaagaaaaagaaactaaacctaaaattttaaacgaaactaaaccaaagaacaaaaaagtaacaaacaagtaacctagaaggacttactacctagagaggggaggagggagaacggtcaaggctgccgcgcatcgtcatcagcggagggacgagctgagagaagagagaagagagagaagcttcaccgagcttgcttggagaggggtgccgagctgtccgtctctccactccacccacctgctaccctaggagggcaaaatctgcggcctcctttcccgagcccggttggatggagagggacttcctggccgcgatcggcaaggagcagcagcacccgcagcgggagaagcccggcagggaggaatcagcttacttcggagcaacagcggcaggagctccggcgatggattggtccttcgcgagcaagcccggcgccgcgccgtcgttgatgtcgttccggtcggcggcgagggaggagcccacgttcccccagttctccgccttcgacggcgccaagaacccggctccccgtatcctcacgcaccagaggtcgttcggcgccgacagccagcagtacgccgccgtgcaccgcgcgcagccgccgcagcacgcgctgaacggggctagagtgattccggtctcgtcgccgttcaaccagaacaacccgatgttcagggtccagagctcgcctagcattcccaacggcaccgccggtccgttcaagcagccgcctttcgccatgaacaacgcggtgaacaattctaccgtcggcgtgtacgggacaagggatgcggtgaagccaaagacggcacagttgacaatcttttatgctggttctgtcaatgtattcgataacgtctcagcggagaaggctcaggagctcatgttcttagccagcagaggatctcttccaagctcagcccctgtggcccgtaaacctgaagctcctattttcgctccagcaaaagtcacagtacctgaggcttctcctgcaaagcagatgctatttcaaaaaccaccacatgtttcgtcacctccatcggccatctccaaaccaatccccagcgtcttgcaagctgcaactctccccaggagcgcctctagctgtaaccttgactccccggtgccaaaatgttcagtcccattagctgttcctcccctaagtcaggctcctgcaactcaacctgcaacactgaccacggcaaccgcagcagctataatgcctagagctgtccctcaagctcggaaggcctccctggctcgattcttggagaaaagaaaggaaagggtgacaactactgcgccatacccatcagccaagagcccattggagagcagcgacacacttgggagtgggagcgccaacgacaagtcatcttgcacagacattgccctgtcaagcaaccgcgaagagttgctaagtttaggccagcccaggaacatcagcttcagccaagagtcccccagtacgaaactacagatctgatctggtcatgcctcaatgtccatagatttgtccaggctgactgatgcaaaaccataaaatacttttgcactcaggcaagggctcgagaggaagagattatatatgttaccgatgatattcttgtttatgatggtattttgccgtattagttgctgcaatgctggtttagctggtggtaccccacctaactaacaagagagctgtcacttgcagactcttgattattttttgccctagctccatttgtcttgcaaaaaggaaattaaatgtcaatttagcagtatcatattataggcttacatattatgcgccttgtatggcgaaaaactgtactattcctgttcttgtattgtgaactttcaagctgcagaatgcaagagcagaaattgattattaaaaaaaaaaaaaaaaaaaaaaaannnnnnnnnnnnnnnnnnnnnnnnnnnnnnnnnnnnnnnnnnnnnnnnnnnnnnnnnnnnnnnnnnnnnnnnnnn

SEQ ID NO: 20459 - DNA, 335 bp, Setaria italica
  Peptide Sequence Number=SeqID_86433
cttctcggatttcatagcaaaaaacttatcaagaagcattgcagtaagctgagctaaagagtgcagaacaactccatcaatactacagatgatatcaccagcctcaatgcctccaaaattttctggtgactctccagatatctggtctaccacaattccaattccacaagatagctcaggaaagttgaggcacaaaatttccagactgcgtagttccagactgtgaacagcatgtccccttatgcaaagacaaggcagcttgagtatcctgaatttcttgaagtgtttcagacatcttgacacaatctcaattggcataacaggggtggtgtcct

SEQ ID NO: 20460 - DNA, 720 bp, Setaria italica
  Peptide Sequence Number=SeqID_86434
tttttttttttttgttaaggccaacgaggatttctattcagtcaaatgttacaactaccaagttttctaacgtaccgactgctgtaaacaatcagaatatccaaaactcaaggacagattggctaaggagtgttttcctccactatgtcaaagtggcactcatattgagtcagacacaagttgtaaatccaaataagttaacatactaggaatgatagatggaagctatatagatgttctgcttccacaatctacatcattcaagtgcaataacttcagctttgaacggacgaaccttgttcctttcacagcaacggccatctgttgctgaaggaattgctgcattcgacagaactattctcccatatattcagcatcgcaacaaatttagagttatctctgggtcttcgcatcactgcctggaggaccattgtcttctcggatttcatagcaaaaaacttatcaagaagcattgcagtaagctgagctaaagagtgcagaacaactccatcaatactacagatgatatcaccagcctcaatgcctccaaaattttctggtgactctccagatatctacaaattatatgttaaatcaatgaaaatggaggagttagaagaaatcaagtaacacaagcacaatgaataacaaattaagactaaatagttactaaaagaaacaaaaaataacaacaacaagacgaacaaatttaccgacaaa

SEQ ID NO: 20461 - DNA, 1016 bp, Setaria italica
  Peptide Sequence Number=SeqID_86435
gagctgacaatgcatccaggcgaaagcaaagccaactccatcgctccagcattgtagaaccttggtcgggagtaggcatccattaggtggctatttgctgatacaaactgattttccttgccaaaacttctgatggtagtagatcctgtaatcgattccgcaaaatgttgtatgataggagctttgcaaacacctactagcctttgcagctccctggctgtatcaatgtagtatctctgataccagacacatgcagcaaatacaggaatgaaaagaacaaagacctgccatgcgacctgagacatcaccactacaattccaacaagctgaatgatggaaaatgccacagagcccatctggtcagcaatgttggtgtccacttcgctttgatcagttgaagctctattcaagatgcgcccactcggagtggaatcaaagaaagacataggagctctgaatatggacatgtgcatcttgttgaataacagagttgccgtcttgtatgaagctgttacaagaaacagcgctcttaagaagacacaccacgagcttccaagagacaatgcgacatagacatagagcagtgttgacatgctcactggaggctccacatccttcgacacgggagctgcccaagccatccagtaattgcttgcaatttgaagtacttgaaaaagtatctgcgctagcaacacaaatggtacaagagctcccctataagctacggtgaggtaattccagtagacccagaaccccacgctgcctttcttcgtttcttcttcctgcaccagctgccgactctgagcattgccttcgtcttcgttggctttttctttcttctcagatgatgacagtgatcttgatagcttcagctttgctgtgccactgcaagaggaggacacattgcctccaccattcatggcatcaatcgcgtccaatgtcgttagagcatccttgtgagcaacaactagctccatgaactcttcccctgaacccagtatatcgtcgtactttcc

SEQ ID NO: 20462 - DNA, 203 bp, Setaria italica
  Peptide Sequence Number=SeqID_86436
gcagagcaaaaatgtagattcagttttttttggggtaataaatcatgacatccatcttcctttttctctttgtcttttagtaccatcctgatgtcaacaaggagcctggagcaactgaaaaatttaaagagataagcgcagcatatgagatattgtcagatgaacagaagagggcattatatgaccaatatggtgaagctggg

SEQ ID NO: 20463 - DNA, 460 bp, Setaria italica
  Peptide Sequence Number=SeqID_86437
gtgcgctcaggcgtccacaccaccgagcagccgcagccgcagccaaacctctgcgagctcgctaatggcgttcgcgctgtccacgctgccgttcgtgccctctaatccctcgccatcctcccgcgcccccgctgacgccgcgttccctcctcgtcgggtccacttctctgccgccgtccggagcggcggcggcgacctcccgcttgcctgtgctgcgccgcggcatcgcgggcgggctccaaggcggcgccgcggagggagattgttggtctgggcgtcggccgactactacgcgacactgggcgtgccgcgctctgcgaccaacaaggacatcaaggccgcctaccggaagcttgcgcgccagtaccatcctgatgtcaacaaggagcctggagcaactgaaaaatttaaagagataagcgcagcatatgagatattgtcagatgaacagaagagggca

SEQ ID NO: 20464 - DNA, 832 bp, Setaria italica
  Peptide Sequence Number=SeqID_86438
gcagagcaaaaatgtagattcagttttttttggggtaataaatcatcaaggccgcctacctgtttcttgcgcgccagtaccatcctgatgtcaacaaggagcctggagcaactgaaaaatttaaagagataagcgcagcatatgagatattgtcagatgaacagaagagggcattatatgaccaatatggtgaagctggggttaagagtgcggttggaggctcgggtggagcttacacaactaatccatttgatctctttgagacattctttggagcaagcatgggtggcttttctggcatggaccagagcacatttaggacacgcaggcgaagcactgctgttcagggtgaagacatcagatatgatgtcattctgggcttcacagaggcgatatttggaacagagaaagacattatattatctcatttggaaacatgtgatacatgtggtggctctggatcgagggctggctccaagatgagaatatgttccacatgtggtgggcgagggcaagtaatgcgaaccgagcaaaccccatttggtctgttctcccaggtttctatttgccccgcttgtgctggagagggtgaagtcatttccgagtattgcaggaaatgttctggagaggggcgtattcgtgtcaggaaggagatcaaagtaaaaatccctccaggagtgagtaagggtagcactcttcgtgtacgtggggaaggtgatgcaggaccaaaaggtgggcctccaggagatctttatgtttgcctcgatatagaggagccatcagatatcaaaagggatggtataaacttgtattcaactgtctcagtaagcta

SEQ ID NO: 20465 - DNA, 774 bp, Setaria italica
  Peptide Sequence Number=SeqID_86439
ttaaagtaaacaaaagacttttaaattagtaacaaaatcatggtctttttgttcaggaaatgggaacagcaacttcatgacaggaatgtactaataacctaatatctttctatgaaaattacatttgcagtcaatcccattgtacctgtcagaaatggcgccacctcaataccgtggggcaatcaacaatggctttgaactttgcctcagccttggaattctctgtgcaaacatcctcaactatttcgttgtgaaaattaaagcagggtggggctggaggatatctctgtccatggctgcactccctggtgcattcctgaccatgggtgcaatcttcctccctgagacaccaagcttcataatacagcatgatggtgatgccgacaaggcaagggttcttctgcaaaagctgcgtggaacggaatcggtccagaaggagcttgatgacttagtctctgctagcaatctctcaaggacaacccggtatccattcagaaatatattcaagaggaagtacaggccaacaattggtgatagcactgctgatccctttcttcaatcaggtcactgggatcaatgtgataaacttttatgctccagttatgttcaggacaataggtctcaaggagaacgcatccctcctctcttcggtggtcacacgcctctgtgcaacatttgcgaacattgtagccattatcctggttgacaggagtgggcgcaggaagcttctcctcgtaggcaatatccagatgatcttgtcgctgttcactgtgg

SEQ ID NO: 20466 - DNA, 301 bp, Setaria italica
  Peptide Sequence Number=SeqID_86440
tcatctccgactccatctccccatcttcaataggcattgaccgattggcagtgccatccgcctcctctgcaaccaccactgaactaggtaccctctgctgccttggcatttcatcaacatctccgccgccggcagcagcaggaacaatgccagagtctggcaccttggtgtgatcgaaatcacgaccgcctgctcgccaatctgaatcatccctcctaccgccagcgtggtggctcctggtcctgcttcgactcctgctcctgctccggctcctgctcctcctccttcgatccagtctgct

SEQ ID NO: 20467 - DNA, 731 bp, Setaria italica
  Peptide Sequence Number=SeqID_86441
aggatttctactgcgatttgactacaaggcgggcagcggcgcgttcaccccgaccgtgtcgccgtgtactgcaattacgagatgccatacaacccggatgaccttatggtgcagtgtgagggatgcaaggactggtttcatccatcctgtatgggaatgaccattgagcaggccaaaaagattgatcattacatgtgctcagactgtgctaaagaaaatggtgcgaagagaccctcgaattcatacccagttgcaccaaactctgattctaagattgaatcaaagaggcgcaagagataaatgctgtaacagaaaacatccctggcaaggagatgcgctgttcatggcacgcaccagctcttcattgctggtgcagatttaagctgtggagatgtacactgcgagagaagagccagggcatttgtaggacaaaagcgtgtttgacttattggtctgctgtgtatcatggggacgtttcctgcggtttagaacattagtttgatgagtaggttaatttccccacagccgcgcgatgcgtgatcagctgcttgaggtggggaaagaagttgagagaaaaaaatgtagaatgctgctgactctgtcgatgtagccgtatcagtgcgtgttaacatattcccctgctggaaacgttcccttgtgtgaatgatgtcgatgatagctttgactgttgtttcataatttaattagatgttcgtggtagtagttttact

SEQ ID NO: 20468 - DNA, 731 bp, Setaria italica
  Peptide Sequence Number=SeqID_86442
ttcccctcccgcactccctccaccgtcgcggctagggtttgctcccaatccaccgcctccgccatggccaagacgaagcaggggaagcgggacgtcgacgcctacaccatcaagggcaccaacaaggtggtccgagtgggggactgcgtgctgatgcgtccggcggacacggataagccgccgtacgtggcgcgggtggagcggatggagtcggacggccgcggcggcgtgcgggtgcggtgccgctggtactaccgccccgaggaggccaagggcggccgccgcccgttccacggcgccaaggagctcttcctctccgaccacttcgacacgcagagcgcgcacaccatcgagggcaagtgcgtcgtccactccttcaagaactacaccaagctcgacaacgtcggccctgaggatttctactgccgatttgactacaaggcgggcagcggcgcgttcacccccgaccgtgtcgccgtgtactgcaagtgcgagatgccatacaacccggatgaccttatggtgcagtgtgagggatgcaaggactggtcatccatcctgtatgggaatgaccataaatctctgagaaaacaccaccttttccgcaagaatgcatgtcctgtgtttatgtggtcgctatatgagctgcctctgtccggatgttacatttttctgccttgtagccctatgtctactttatcatgcagaatgaattagttgtcttctcttca

SEQ ID NO: 20469 - DNA, 723 bp, Setaria italica
  Peptide Sequence Number=SeqID_86443
taaaggttaggttaccgtaagttagggggtacttgtcgttgtcttgtattgtcgttccggtcggtactacggtatataagccgccgtacgtggcgcgggtggagcggatggagtcggacggccgcggcggcgtgcgggtgcggtgccgctggtactaccgccccgaggaggccaagggcggccgccgcccgttccacggcgccaaggagctcttcctctccgaccacttcgacacgcagagcgcgcacaccatcgagggcaagtgcgtcgtccactccttcaagaactacaccaagctcgacaacgtcggccctgaggatttctactgccgatttgactacaaggcgggcagcggcgcgttcacccccgaccgtgtcgccgtgtactgcaagtgcgagatgccatacaacccggatgaccttatggtgcagtgtgagggatgcaaggactggtttcatccatcctgtatgggaatgaccattgagcaggccaaaaagattgatcattacatgtgctcagactgtgctaaagaaaatggtgcgaagagaccctcgaattcatacccagttgcaccaaactctgattctaagattgaatcaaagaggcgcaagagataaatgctgtaacagaaaacaccacctttccgcaagaatgcatgtcctgtgtttatgtggtcgctatatgagctgcctctgtccggatgttacattttctgtccttgta

SEQ ID NO: 20470 - DNA, 1149 bp, Setaria italica
  misc_feature (40)..(40): n is a, c, g, or t
  Peptide Sequence Number=SeqID_86444
aaaatcaaagctaataatagcaaatctccttaacataccngtagcagggactgatgcaactaaaatcagttcacccagcaacactggaaaaatatcaagtgcttcaactctgaataaagaagcatcaagcagaagagaaaatagaaacaatcagccctccctggatcaaaaaaatcattcttctggtgatatcaaggaggacaagagaaaatgggcacttgagatcctggcaagaaagaatggcagctctgttacaagcaaagatcaaactggagacgatgatgctctcaagcgaaaattccctctactagcacaacttccggtggatatgaggccaaagcttgcggccggccgcaataacaaagttcccgtatcagttagacaggtacaacttcaccgcatcgcggagcattatttgcagaaagcaaatttggatgtcatccgcagatgtgcagatactgaattggccattgctgatgctgtcaatgttgaaaaggacatttacgaaaggtcaagcagcaaatccatatatgtgaacctttgctctcaggctagtcgccagcctgccaaggagaaatctgataaggacacttcaactcttaccaaaaagactgaattaggcagtgatctgatatcacagaaagttgcatctgagaacaatgttagtggcagtgatatggaagatgctctacacagagcagtcgtctctgatctaaagagtgaaataggcgatgctattacatcagagcaaactgtgcagaagcacattgttagcttcagcaacgcagaagaagcactaagaaaagcgggcctctttgattcccctcctaacagtcctgagagagagatcacatcagttgaaggagaatgcagactagaggaacagagcaaaaacttagagtcaaatcacgattatagggtgaaggatgtatcctcagtgaaagatgacaaatcaccactacctaatgatcatgatgctgcaaactgtcaaaacctcaatactgtgttgtgtcagcaacaaaaacctattctgaagagcaaacagaagttgacagcccggggagaaacgtgaggacgtgatagcaaacgaaacaaatagcaacaaacttaggctgaagatgataggtagacagcgagcaatgtgaaaaa

SEQ ID NO: 20471 - DNA, 726 bp, Setaria italica
  Peptide Sequence Number=SeqID_86445
cagcccacctatactgatcaacggtgatcacaccactcttgcagagtggcctgatgtgttctttcacgaacatttcaaccttcttatatgtagagcttgaggcatctggtgtgcttttaccggcttgatcaggtgcttgcttcttcggatcatctccaccttcagctatatggcttggtttgtctccttttgggtgtttgctgtttagtgatggtttgtcactggaagatttctctttagttggctccaaattcttggtttgctgatcacttcaccatctcttgccaagccatccttgtgagattgactaggcaaaatgctagcagctttttccatatctctcgaggtctccacattcccagtaactttatcaggcatattgctatcaatagaaatttctttacctggtccacttgatttttcacattgctcgctgcacctatcatcttcagccaagtttgttgcatttgtttcgtttgctatcacgtcctcagtttctccccgggctgtcaacttctgttgctcttcagaattaggtttttgttgctgacacaacacagtattgaggttttgacagtttgcagcatcatgatcattaggtagtggtgatttgtcatctttcactgaggatacatccttcaccctataatcgtgatttgactctaagtttttgctctgttcctctagtctgcattctccttcaactgatgtgatctctctctcagg

SEQ ID NO: 20472 - DNA, 892 bp, Setaria italica
  Peptide Sequence Number=SeqID_86446
cctgcttgtccttcagggcccagttgatcttagtttagtttcccgtcccgagatcgatcatgatgtgcttgttacggaagaagaacatcaccgtcgacgggtcgtacagctcgtacatggtgttgaagtccgggacctcggtgatgtctacgaggtagatgacagcaaagttctttatggtctcggctactgcagccagcacttcatccatccctaaaccccatctaacttgcctgcatcttctcaacagcatatgttacagctccaagccgaaaggacaggcttccgcaagcaggaaagcaaccagaggaagaaacaaatgcaaagaactctccagagattcataacttactagaaaggaactgccctataggcaattactttaatttcacatggtaactcataaaacgcttcaaaatcatggaaggttaaatagactgcaaaaagtcccaataacagctttgttttgtctggagtaaaaaagagaaacttactggaaactattcctgccccaactttgaactgacaatctatctgcatgcaggtctcgtcccagtcgtggccgaagcggatgatgacgaggcgctcctcctcggcgaggatggcctggtccaccgcccacccagagtgcagatgcggcagcaggtacgacatcttcttccgccgccggccgctcctccttctctcgacttctctcctgcgggcgccgaactgcttacccgcgagaagattcggatcgtgaggagagagcgcctgaactcacctgcggatctggaggtatacggcggaggcggaggacgcgtctgtggacggcggctggaggcaggtcaggtgctccgctccccggagacgagacgcgtttgctgccgcgtcgtgtggaggtggatcaagg

SEQ ID NO: 20473 - DNA, 715 bp, Setaria italica
  Peptide Sequence Number=SeqID_86447
aacctgtaaagctgtaatatgagctgatcgttggagtgtcaaaatagttaagcaacacgctcacaagcaagcatcccttgtctgcctgtctggataaaacatccctcattacatgagtgggaacatatcaagctaacacagcagcagtagcagcagccgacaccattgcctgccttcttagtaacttcttagtaacggtacttggtggagtagtccttgggagcgatcaccagaccacggcccttccgggcacccctgtagacggtctccacgatgtcgacgaactcctgcttgtccttcagggcccagttgatcttgttgttgtttcccgtcccgagatcgatcatgatgtgcttgttacggaagaagaacatcaccgtcgacgggtcgtacagctcgtacatggtgttgaagtccgggacctcggtgatgtctacgaggtagatgacagcaaagttctttatggtctcggctactgcagccagcacttcatccatctagaacatgaacaagagtaagtaagaatgaagtcaaaccatataagcttgctatacaagtgtagaactaaatcaaaaagcagtgctaaattagtatggaaccaaatcataagaccatgtcagagttaacaagcaacatggagtttttcacaaagcattaaagaagggctcatagctacttcaatttaatttcattgagcgactcatctcaaaagcaa

SEQ ID NO: 20474 - DNA, 636 bp, Setaria italica
  Peptide Sequence Number=SeqID_86448
tagcaaagaactactccagagattcataacttactagaaaggaactgccctataggcaattacttaatttcacatggtaactacataaaaacgacttcaaaatcatggaaggttaaatagactgcaaaaagtcccaataacagctgtgttttgtctaggagtaaaaaagagaaacttactggaaactattccctgccccaactttgaactgacaatctatctgtgaaaaacaggcacaccgaagacagtatgaccttagagtttatagagacaaaggaagcagagagcaagtgatggtaagtctatatggcataacagtggtcctctaacatgttttaatcggctggggagactctgcgatatctagaccacttattacccatcagtatcacaacctaaacaatccccactagtgctcactaatcaagatgaggatgcacggattacagaaactacagcggcaagattgtgacagttcaagtatgcatcagtgatcttcccttggctcgattctcctaaactcaagcaacctactgcagcgcccacaacagaaatccttaccccccaatttcctaaattcagcaaagcccctggcctccaggaaattttaattaccgattcataacatactagtag

SEQ ID NO: 20475 - DNA, 719 bp, Setaria italica
  misc_feature (1)..(42): n is a, c, g, or t
  Peptide Sequence Number=SeqID_86449
nnnnnnnnnnnnnnnnnnnnnnnnnnnnnnnnnnnnnnnnnncttttttagtttttattttcctatcaatcagctcagctacaattttattagatgtcaaggaagttaaccaacactcagaaccctggagtcggtcaccaagtcgagttgcaacttggccaacatggtaggccagaaattacttacacaacaatagccaacacaaatggctttagtaacggtacttggtggagtagtcctttggagcaatcaccagaccacggcccttccgggcacccctgtacacagtctccacaatgtcaatgaactcctgcttgtccttcaaggcccagttgattttgttgttgtttcctgtcccaagatcaatcatgatgtgcttgttccggaagaagaacatcacggtcgagggatcatacagctcgtacatcgtgttgaagtcaggaacctcggtgatgtcaacaaggtagataaccgcaaagttctttatagtctctgcaactgcagccagcacttcatccatctgcatgcatgtctcgtcccagtcgtggccgaagcggatgatgacgaggcgctcctcctcggcgaggatggcctggtccaccgcccacccagagtgcaggtgcggcagcaggtacgacatctccgcgctgccccggttcgcgagacggcggcgagagaggaactggaatttgggggaagacaaacggtggagccgttag

SEQ ID NO: 20476 - DNA, 1028 bp, Setaria italica
  misc_feature (1)..(22): n is a, c, g, or t
  Peptide Sequence Number=SeqID_86450
nnnnnnnnnnnnnnnnnnnnnntttttttttgtactgcgaaaacttgctcatcagaatataaaagagtgttatggactcggcagtattcgtcaaaccagcaatggtctcttatagtaacatgagccctgttttgtgaaaaacacaatttttgacactccaacgatcagctcatattacagctttacaggtttatggcatgccaagatagttaagcaacacgctcacaagcaagcatcccttgtctgcctgtctggataaaacatccctcattacatgagtgggaacatatcaagctaacacagcagcagtagcagcagccgacaccattgcctgccttcttagtaacttcttagtaacggtacttggtggagtagtccttgggagcgatcaccagaccacggcccttccgggcacccctgtagacggtctccacgatgtcgacgaactcctgcttgtccttcagggcccagttgatcttgttgttgtttcccgtcccgagatcgatcatgatgtgcttgttacggaagaagaacatcaccgtcgacgggtcgtacagctcgtacatggtgttgaagtccgggacctcggtgatgtctacgaggtagatgacagcaaagttctttatggtctcggctactgcagccagcacttcatccatctgcatgcaggtctcgtcccagtcgtggccgaagcggatgatgacgaggcgctcctcctcggcgaggatggcctggtccaccgcccacccagagtgcagatgcggcagcaggtacgacatcttcttccgccgccggccgctcctccttctctcgacttctctcctgcggatctggaggtatacggcggaggcggaggacgcgtctgtggacggcggctggaggcaggtcaggtgctccgctccccggagacgagacgcgtttgctgccgcgtcgtgtggaggtggatcaaggcggaagaaagaaacaatacaaccgtacgaacgggtcgtaacaagactacgtaacaataggtagttagaaagtaccga

SEQ ID NO: 20477 - DNA, 440 bp, Setaria italica
  Peptide Sequence Number=SeqID_86451
gtgcttgctgttctgcacaacactgaatctcactcgacacggattatgatgaattaactataaccttttgtcatctgagacttgtgagttgctccttcatgattaggttttattcaagttctgtactaggaaattagtggcagatgtatgtgttataaagatattaaatctttgtttggttggtagtatgaaaagtcgtggtgaatgctgaaagcatagctttgggacttgctgcagctcatttaagtaagacataagttacctggtattgtataaattttcctaatctcagagaagcacaataatgcacactggtttttttttggtacataatgatgaaaggtaccaatggctaataataggaaggcaacagcgctgaagacctattctttccttttccattgctgtgttttttactattgcattcttgctttgccggg

SEQ ID NO: 20478 - DNA, 451 bp, Setaria italica
  Peptide Sequence Number=SeqID_86452
aggcgagggacgggagcgaggtgacgacgtagagcgcgcgccaggagcgcgggaagagcgcggcgacgcccgcgagcgccgcgatgccgccggagaagaagtagaaggtggacatccccgcggcgccgcggcgggaaggcccgatgggctcggtggcgaggacgaaggcgagcacgccgacgctgccggtgctgaagcccgtgaggaggcgcagcgcggcgtaggcccagtagttgggggccagcgcggtgaggaggccgaaggtggcgttgaggacgcagaccacctgcagggagcccttgcggcccaggaacgagtccgacaggtgcccgaacacgccggcgccgatcatgcagccggcgaagaagatggcctgggcgagcccgaccttgtagcgctcgccgcagacgagcccccactcggcgacggtggacgaggcggcgccgtcggc

SEQ ID NO: 20479 - DNA, 304 bp, Setaria italica
  Peptide Sequence Number=SeqID_86453
ctgggtattggccgccggagatagagtgagagcttcgagaagaggggaagccaagaaggttcggctccgaagggagtgacgagaggagatcgttcaattcagcggacgggaagaaatcaggagatcgaggaagatgtgtatggaccaagccgccgtgccggtgaagagggtctggctcggcctcgccacgcgcctcggcctccggcgaaagactggcctgaggaagctgaggaaggaggtgcggacgtgcgagtaccacgacgtgcacgtcatgtgggagatgctgaggacgacgtggtactcg

SEQ ID NO: 20480 - DNA, 432 bp, Setaria italica
  Peptide Sequence Number=SeqID_86454
ctttctgctacctctactctatcgacctcgtttctcatcggcggatcggttggtgaatgcaggcctgaggaagctgaggaaggaggtgcggacgtgcgagtaccacgacgtgcacgtcatgtgggagatgctgaggacgacggacgggccggtgccgctggccgagaaggaggccgccgcggccgcggccgtcgcggcggccgccagcgccaggaagaggaagaacgcgtgtaggcggttcatctactactgctgcgccttctgagcgactcgttgatcagcctgcctgaggaatgaacggcgtcaagaacctttctgctgatcctagctcctgaaagatcgggactcaaatctcgagctcgatcgggttcagctctcggccggtgtcgtcagcgtgctaccaaggagctcagctcgtccgagactgctccc

SEQ ID NO: 20481 - DNA, 375 bp, Setaria italica
  Peptide Sequence Number=SeqID_86455
gctcgattggcaggcggcagctaacgggagtagtaggggtttcttctcttccgctttggggcatcccgatccgatcgatctgttgcggcggaggcagcgagtggctgggtattggccgccggagatagagtgagagcttcgagaagaggggaagccaagaaggttcggctccgaagggagtgacgagaggagatcgttcaattcagcggacgggaagaaatcaggagatcgaggaagatgtgtatggaccaagccgccgtgccggtgaagagggtctggctcggcctcgccacgcgcctcggcctccggcgaaagactggtaagcttctagcgctccccgctacatctgatctagttctcggtcagttgtcgccg

SEQ ID NO: 20482 - DNA, 473 bp, Setaria italica
  Peptide Sequence Number=SeqID_86456
tttttttttttcttagaaagtggaaaagatagtccacataattttagtttcgactcgagcatttaaccaaacagtaaccaaggcaaaacatgcctgaatctacagaacaaaaatacagtttgtagccaatatgatcagggcgaattcaacataactacaacaattgaacctgatgacttgaaccactcgcagttaaactgctcaacagataaaaacaccaacatattaaacggaaacacaattttctggtaacaagataagcatcagttgaaaaagaaccacaacagatcacaatgacttgcacccttcagtctgaaaccccctcgactgaaaacaaaacaacctgatagcagtaactccgaagaagccaacatcagcagacacaagattgcaatgcatcattgctgataagaagccttcgctagcgacaacaatctgccacgatctggatgtagaagctcatgtagggtagg

SEQ ID NO: 20483 - DNA, 623 bp, Setaria italica
  Peptide Sequence Number=SeqID_86457
agaatgccacgcatcttctcatttatatcagtttggcttgacatgtaatttgtagggacacagcttgaaccctcagttcttctgtaaaatctgtaaatttcatctacatattcaaccacagccagggagtttcctgcatcacagctgtcaatatcaggtgctgactcctcaatatcttccatctcaatctctttcagttcggagctcatcacttcatccatctcagacagcataggcaaggggatgtcatcagccatcttggtgctttccatatctgcaggtgtgtgtgaaatgctgtatctgcatttcttttctgtctttcacttccaatcggggccagatgggcagttgtaggttggtttgccagagttgcagcgaatttcctcgtgaccggacgatgaccgacaaagccagcttgatccttcgtatgtacagcagcagttggctagtgcgagagagacccctcttgctaacagccaaatgctggtgagggcctccaatgatgttcttgatgtcgctcagggccctccggttggtgttggccatctctgacgcgaacttgacgccctccatggcaacaccttggtggtagttttcagatctcagattctccattcggggag

SEQ ID NO: 20484 - DNA, 3268 bp, Setaria italica
  Peptide Sequence Number=SeqID_86458
ttttttttttttttaagtacaaacaagacaaaggacaatacaattgcatgaatgaatgaatgaatgaatgaatgctattattttatttctggcaggctacaaattagacggaaaacaactactcatggattggttgcttctaactaaaagaatcaacctacattgtcgggctaaaccgctaaagacctacgtcggacaaacacaattggcacttcataacaatccgacaaaactactgcgtcttcgagctgttcgatgtggaacccttttgccctccctccacgacccatcagtttcaccatggcaacgcagaatctttatcaagtcgaccctaatctgggatttccctcgtttctcacacttgttagcatccgccgctctgcctggtgcatcgcaagatgcagggggagtgtgcggaggagctccacctccggtgctcgatctgtcctcatcatggtctgagcgtggaagcgatatagactcttcaccattatttggacggcaagcaggacagaagaaggtttccggaggagggccaatcaaattgatgcaatcaaaatggtaccactcatcacactcatcgcatgctatcatggccctgttatcatagggcttacgacaaatgcaatagagaacactgcgatctctcagtaactttagttccttctcaaaatgtacagagaggttttccccttcaactataagtccatacacaagatctagtgcaagctcaccagaatcacatgcaaccttttctgctttggccagccactgcagactggtttcctttattttgctaatctccaacttgaagaaatcctgaccaaatatttctaaatgtgaaccctctttatcaaggtgcagtacttcttcgatcaatgcctttttgccactacacaagagtttgtgaatttgtttcttccacaaatatctgctcaacacagactcaattttgcaactgacatggtgatcatacaagccagaagctgatgtcgccttcagagcaactagaagagatttgcatatgacagtaagatcttctccatgataagagcctgaatcatccaaaatttgcatcaaataggcattcaagttacgagccttctggacaatttcttctagcaaattaatttcctctatccccgtgcagaaacccgttgcggaagagaggagttcattaagtgcagtaagtgcaggacagttccctttagacatctttacatgtatttggttctctaatagatcctcactttgcaaaagtgagcaaaatggacaaatgcattcgcttgtcatttgtgtagacacagacaggttttccacgcaggagtcatggtaccattcttgacaagtcacacatctagaggccagactatctcccatgtcacataaacatatggcacataatcctttcttcacacaatcctcggcaagtaacgagcaaacaccatctaatgattgtcttatcttcacaagtgcagagagcaaagaactattattgccatctagaaatagagtgcggtggcactgattgagccactcttcaacctttttaacctcaacaataactttatccatctcagggcaatcaaatgcaacagactgaccattgtctctcagatttagcagccctgcccaagactggccatcaggtagcatgaagtaggtattacattgctctgtccatgaagtgtgcttgttaacagcatcctcaagcttggaagttattataagataaggaacatcaatctccttgaattctgctaaaatattttcaacatctttcaatttggatttgacagatgtttcacgatcaggaagcaagataagtgcttttcttagacaagacaatcccctcatcaacaacgtaaccaaagaacaatctgataaggaggcaggaaggtggactactgcttcaattaatctgcaacaagggaatcatgcagcatagagacagtgaatccaatatccatcttagtaccaataaagaatctttcagttcatcaagaaccctgaactcaaaaccaagagatgacccactttcaatttctgtgttcagtttatcttgcagctcctctaaatttctttttaagtgggtcaactgtagagccaatatgattcaaatgaagtaaggttctcaaattgcttagtagacttagtgagttgccttcccatttttcaacaatattgagaacagaattaagtgctgatgtatcaagaatgactttcaaatttccagcccgattgattaaatccttgatatcctcaacttgaagaaagcctccaagtgcaagtttattgcacttaggtctcagataggcctgacatttatctatccacaacttagcaatgtcaatctctgctttcatgcgcggttcagacggaagtataattcttatgtcatctgaacgccgcatatgatcttcatactcagagagagaggctgattgctcaagaattagtctagccttctcttcccaagcggtggcctctttgagcatccgagacagatcaacaaatggttgctcctcttcaatagttagtatggaagcttctttcaaaacatcttcaaccacatccatagacattactgttgcaagtgcctcagatgcttgcttcctacataaggacctctttagttctttctcaacaatcggcaattcatcaacttttactcctagaaattctgcgtccttcagaatgccagtcaattcctcggcaacattgtgatagtcactccttgtatgaagttttccaagtatgttcttagcatgattcacccaagagcaaccatccaagtaatgttgcttaagacggttgagctctggaatgctaaaactggcaccatctgcagaaaggaggaaaccctccagctcctctagaccagggaagtcttggaggtataactgacaacgcatttgccatgattcagcatctttccacagctttgaaataatatcaatctctgggagtagaactcgaagctgtattatctctaattttagtttattgaggacatctatgtcaatagtgcccagcttattctgttcaaggcaatcatttgctttcttcaaccaggactttgcagaagatatctcccgaaacaaagtcaatgattgtgttagcttaactgggaattctgaaaccctagagtataatgtttccaatttgtcaaccgttaagcgagatgatagcgcactgtttacttcatcaatcagcatttttcccttctattgtttcacttacgtctaaataagaacaaataaacgaa

SEQ ID NO: 20485 - DNA, 580 bp, Setaria italica
  Peptide Sequence Number=SeqID_86459
gagcgaggggcgagaggtttctgcagccgcttgtccgctccaacccaagaaccggggcgggcggatcggccatggcgccgccgctgcgggaggaggagggcggcgattcggcggccgtggaggcgtcggcgctgcgggcgccggcgcacgtgatggcgcgggtgttctcgcagctggactgcgtcgatctcctcagctgctccctcgtctgcaagcaatggtaccgcgattctgcagagcttagggaggagtggaggaaggagtacttggatgcttggaaccagttcggattgtccgtgacgcgtgagccgcaaccactatgccctacttgttcactcagaagcctgcgtagtctgtgcccttgacctggacttgctctcctgtcatttttaaccaggcagaaagcagcaatagatttactgttcatgccattgttacaagatcatgtatatggcaatcaaaactgttgtgttgttacatggtgtataattaccaatgtgcaaatgtaaattttaggaaagtgaggtgttgtaggagtaccccacattatgcaagaaccttccatcgggtttggatttgc

SEQ ID NO: 20486 - DNA, 346 bp, Setaria italica
  Peptide Sequence Number=SeqID_86460
tcacaagagtttcaatgacgagaagccctattttagatacgagccccagattgaacacaggttcaccctagatggaagtgctggaaaggagaaagaagatcaaaagctagatgatccgttgcatacatctgcaacaccatatcaggataagatctttacaacatttgtttgcggaaaaaccaaagttcctgattctggacctgaacaggctgcaacttctttgtttgatttcggcccagtgaggatggattttgataccccaggcatggaaattcagcctgacgaggaaaatgtgtataaatccttgaagaaacaatttgtatcatggcaaaacaattttaagcca

SEQ ID NO: 20487 - DNA, 1255 bp, Setaria italica
  Peptide Sequence Number=SeqID_86461
ttttttttttgaaaccagcatcgactgcacaatttattcatcatgaacaacaaaaactggaactgggtagtggtacatcgatctaaggatccaattcaggcgccggttttcagccggatcattcgtcgtcggcgatgcggacgagctgcttgccgacgttgcggccgtggaagaggccgatgagcgccttgggcgcgctctcgaggccctcggcgacgtcctcgacgtaggcgatggtgccgtccctgatgtatggcagcacccacgcctcgtactgcgggtacaggtgcttgtggtcgggctcgatgaacccctgcatccggagccgcttgccgatgacggcggagaggttgcgcacggcgtccttctccccttccctcaggttgtactgcgagatgaacccgcagacggcgatgcggccgtggacgcgcatgttgagcagcacggcgtcgagcatggcgccgcccacgttctcaaagtagatgtcgatgccctccgggaagcaccgcttgagcgcggcggcgaggtcggcctcctccttgtagttgaaggcgtcgtggaacccgaatttcgtcttgaggagctccaccttctccttagaccccgcgctgccgacgacgtggcacccggcgagccgcgcgaactggcccaccagctggcccacggcgccggaggccgcggagacgaagacggtctcgcccttcttcggcgcgcagatctcgtggaaccccacgtaggcggtgaggcccggcatgccgaggatgccggtgtagtaggacagcgggacgcccccgccctcgccgccgtgggagatcttggcgaggaaggcggtggcggggggcttgacgacgctgtagtcctcccagccggtgatgccccatacgaggtccccgggcgcgaggcgcgggtcggaggagtcgagcacgcgggcgacgccgtagcccgtgatgacggagcccggggtgaaggcggccgtgtaggactcccgcagcgggcgcgacatcttgggccgcatgtaggggtcgcaggagaggtagaggttgcggacgaggacggacccgggcgggtcgtcgccggcgaggcggaggggcacctcggcgccagggagcacctccatgtgctcctcccgggggtacccctccacgtagtccttgaggatcacgcgccggttcgccgccgtcgccgccatggctcgtgctcgatctgtctgtccgcgcggctctgctttgctctgctccgattgatcccgcgtcgt

SEQ ID NO: 20488 - DNA, 506 bp, Setaria italica
  Peptide Sequence Number=SeqID_86462
aggtgcgctccgtcatcgtgatgcgggacagggagacgggccacggccgcgggttcggcttcgtcgagttcgaggacgaggccgacgcggccgccgcgctcggcgacggggacaagcccaggcacttcatctgcggccggatggtggatgttaagagggccaggacaagggctccacggaaccagggcgagcagaactctcagcctcagcagcctgaacacggccagggtcaggggcaccaggacaatcagccacctgctgggaacggtaatgcggagagcggcaacaacgtgacctacgattcaaagaaggtcttcatcggcggtttgagggataacatcactgaggaggagttccgggcttactttgagacttttggcactgtgacggatgttgtggtgatttatgacagcttgacgagccggtcgagggggtttgggttttgtcacctttgattcggaggaagcagtgggaaaggtgatgagggaaagctttcataccttgaa

SEQ ID NO: 20489 - DNA, 255 bp, Setaria italica
  Peptide Sequence Number=SeqID_86463
gcttctcagtctttcagccaagccaagcaaagcccaggcgttgctcttcctcctcctcctcccatccatccaagggaagggatgggtgagcctgagcccgacgacgccgtgctcttcgtcggggtgtcgctcgtgctgggcatcgcctcccgccacctcctccgcggcacccgcgtcccctacaccgtcgcccttctcgtcctcggcgtcgcgctcggctccctcgagtacggaacacaccatggtctaggcaaa

SEQ ID NO: 20490 - DNA, 637 bp, Setaria italica
  Peptide Sequence Number=SeqID_86464
ttggggaaagctattgaagacccggtattactacccgtcgcacagctaacaagttcgggtccaatcttggtaactgcagttgctccctgaatttttagaaatttcaagttggggagataaccaattggtggaagatgcacacatgatttgcaaagcatgagctgcaagtacttcattgaagacaaatgggtagtagcacctaaccatgtcagataattgcaaccaaagaatctcaaaatagttagatattccaggttgtgtggtgggattagctgctcaaatgtcttctccatgttaatttcatcatctttagaataagaaccgtctaaacgttcggtgcaacataatttttagctattacagctagtcataatttatttatctattgttcaaatgatcgacccatcagtactctaagatctccacacagtgaggccaaggagattaaaaattaaatgcttggagagacggatgcctagtatggataacaaaggactatatatcattggccaagagaaaggaaaaccaacagattacattgtgataccagcatataaatggagacaataaaggaacaaagatgaaatgcttaatagtgaaatgagagactgagtgaatttaattgggtccattaact

SEQ ID NO: 20491 - DNA, 929 bp, Setaria italica
  Peptide Sequence Number=SeqID_86465
ccttgcatttgagtaaacacaatcaatcaaaggccaacattgcctttgttttttattacaccttgtacaaatcagttcctaagcatgcatcaacaactgagttgatctgcctactggaattgatttacaacagacctgccaaaattctatttcatgatgatgtttcccgtgtaagatccaagtaccatgatttccatgcttccacataatgaccaaaaagatcattcaacgcttggttttggtattgcggacggaaggacacagcaaggttttcccagtcctgaatggtccttctctccttctgcttaatggtgtgatcatcagtttcctgtttctttgcaacagcagggtggaagggcccataaacaaagtcactcctgtttccttgccccagctgcctctcaaaagtcttcactatgttgccagcaccctgcatgagcttggctttgttctccattgcggagtccaacctgccccgcttattgtcaatgtttgtaagatcagtaccaaatgctcttttattgggcctgacaggggctagagcaaccgtgacattgttctcttgcattcgctttgcttggcccagccaccggaacgcaggctttcttgtctcagcttgctgtgtcttctcaatgaggttcaaagaagatagtacattggcaatgtcatacaatcgccgaactttagttctcatattgctctcagcatgtccctctccaaggagaagcctagcagcttcatccagtgagaccgtctcaacctccatggtgaggaagagcttgacaaaattctgagtgagcaacccgagggacttctccttccgatgatcagatctaaggcggcagccaggtgcgtcaggcttatcagatgtattgtcaatggactggctgagcttctcgtcttcttctaagtactaattaccttactaa

SEQ ID NO: 20492 - DNA, 339 bp, Setaria italica
  Peptide Sequence Number=SeqID_86466
agttagttcctgcatcttttgtagcttgcataggcactaactatcacggtctatcctggtcaacgcagcatcggcggattggatgcctgggtcgcccctcaacatctccgtgaattggatacacgacgcagctgttggttttcaacacttccagcttgggtgaatccatcgcttcttctggacctcaccgatctatccatcgccatgagggagctacgtcaggttgatctcgatatcctcgggaggttgccagctctctgctttctagatctggtggtggacaataagaaccttggtatccttgcgggattcaattagttagaatagactaggtagaca

SEQ ID NO: 20493 - DNA, 1137 bp, Setaria italica
  Peptide Sequence Number=SeqID_86467
gcggaataagcaaggcgcctccggccgccgctcccccgccgcccgaaccgccgcggctcgatcttcaagccgggcctcgattcctcgaggccgtttcaaccccgcgctgccgctcagataagcacaacttggactggtaatttggttcacgttcttggaatgctcggtcttctagtgaacgtgtagttttatgatgttgaggactaagagcataggaggtcatcaaagtgttatcagcttccatgagggtcaatcttgggctcctcttgcccttaatggacaaatatgcagcgccgacatgggccatactgatatcaggattctttatgctgctttctgtttctctctcaatgtacttgatatttgagcacctctcagcatacaacaatccagaggaacagaaatttgttcttggtgttatcttaatggtcccttgctatgctattgaatcgtatgtttcgttggtaaatccggacaccagtgtctactgtggcatcttgcgtgatggctatgaggcatttgctatgtattgctttggaagatatattactgcttgtttaggtggtgaagaaaggactattgcatttttgaagagggaaggtggcgaagattccggggaacctcttctgcatcatgcctctgaaaagggagtcattcatcatcattttcctattaattacatattgaaaccatggagacttggtgtgcggttttaccagattatcaaatttggtatatttcaatatgtgattataaagacactcacagctagcttgtctcttattcttcaacctttcggtgtatattgtgatggagaattcaaatggggatgtgggtacccttactttgctgtagtcctgaacttcagtcaatattgggccctatattgtttagtggaatggtacacggctactaaggatgaattggcacatattaagccattggcaaaattcctttccttcaagtcaatagtgtttctgacttggtggcagggtgtgataattgctatcatgtattctttgggcttggttagaagtccattagcacagagcttggagttgaaatcaagtattcaggatttcatcatctgtatagagatgggcatagcatcagttgttcacctgtatgtgttccctg

SEQ ID NO: 20494 - DNA, 505 bp, Setaria italica
  Peptide Sequence Number=SeqID_86468
aacagttaagatttgcaagaaactttggttaaatacttcgtacacgtgcaggtgattataaagacactcacagctagcttgtctcttattcttcaacctttcggtgtatattgtgatggagaattcaaatggggatgtgggtacccttactttgctgtagtcctgaacttcagtcaatattgggccctatattgtttagtggaatggtacacggctactaaggatgaattggcacatattaagccattggcaaaaattcctttccttcaagtcaatagtgtttctgacttggtggcagggtgtgataattgctatcatgtattctttgggcttggttagaagtccattagcacagagcttggagttgaaatcaagtattcaggatttcatcatctgtatagagatgggcatagcatcagttgttcacctgtatgtgttccctgcaaaaccttatgagctattaggtaaacaatattcacctacaaacatttcagtacttggggac

SEQ ID NO: 20495 - DNA, 297 bp, Setaria italica
  misc_feature (2)..(2): n is a, c, g, or t
  Peptide Sequence Number=SeqID_86469
angctcttagtatctctgtagggtttcgattcactttcttgccacggtaagatgctcttcttcgtttgtaatctcgttcttcagctaaaagctcctcctttgtcttggttctagcagattcctggttctctactcgccgtgacagaattccatcatactccataacagttctgtagtttggtctgttcgatcgctccaagttccctcgttccaatgcttgtgaatactcaattaatagctgattattttgacgggcgttgagctcgcagtgctttggtcttctcctccaaggagtaa

SEQ ID NO: 20496 - DNA, 571 bp, Setaria italica
  Peptide Sequence Number=SeqID_86470
ttttttttggtttatctatgcaagtttatcctcacctggttaagactactgatgcatatttgcttgaacatactttgttcattctaattcatgtgtgttttggatgagagttggtatgccattgatccatttacttctgtgcctgatcattttacatgagtctgcctcaagggtgtgtggaaatggggatttttcaaggtgcaactaataagttttttttgatggatactattaaatccttgcgcgtaggctcattatattctatgatgtagggaggcattgcactcaagattataagttataacactgatggtaaaattgtgaataatggaaaacctgaattcccttaagaagtgtttttatttgaattatttaaagtacctacctttcaatcaaagctgaaatattttagtgaaaaaaataaaattggtttattattattaaaacctggtggtcatgctcttttgaaacactcctagttccagcatgccatatgattgttcgcctatgctttgttaacaatagttgcctttttttgcataaaagaactggcaattaagttcgatccaag

SEQ ID NO: 20497 - DNA, 491 bp, Setaria italica
  Peptide Sequence Number=SeqID_86471
aaaatggtttacttgatcctgatgctatagtcaggactgatgaggccacgcttgcaaaccttatcaaacctgttggattctatcagagaaaggctcagttcataaaagaagcttctaaaatttgccttgagcgttttggaggggatattccagattctctgaatgacctgcttgctttgagaggagttggccctaaaatggctcatttggtaataatctacttatcataccatttgtggttgaaatataaataaaatatcttcattgatacctttcttcaacttgacaggtgatgagcattgcttggaagaatactcaaggaatttgtgttgacactcatgtgcatcgcatttctaaccgtctggggtgggttttccgagaaggaacaaaacagaaaactacaacaccggaacagacaagaatctctctagagaagtggctacccaaggatgagtgggaacccataaacccattactggtatttttctacg

SEQ ID NO: 20498 - DNA, 1152 bp, Setaria italica
  Peptide Sequence Number=SeqID_86472
atcaatcaaatcaaggtggagaaaaaggtcagagtttcttcagttataaaagttggagctccagaaaattgggaggcagttcttgggggtattaaaaacatgaggttatctggccaagcccccgtagatacgaagggctgtgaaaaagctggttctctccttccacccaaggaaagaagatttgcagttctgatatcaactatgatgtcaagccaaacaaaagatgaagttacgcatgctgctgtggaacgtctctctgaaaatggtttacttgatcctgatgctatagtcaggactgatgaggccacgcttgcaaaccttatcaaacctgttggattctatcagagaaaggctcagttcataaaagaagcttctaaaatttgccttgagcgttttggaggggatattccagattctctgaatgacctgcttgctttgagaggagttggccctaaaatggctcatttggtgatgagcattgcttggaagaatactcaaggaatttgtgttgacactcatgtgcatcgcatttctaaccgtctggggtgggttttccgagaaggaacaaaacagaaaactacaacaccggaacagacaagaatctctctagagaagtggctacccaaggatgagtgggaacccataaacccattactggttggatttggacagactatctgcactccactgaggcccaaatgtgacatgtgtggcatcaataacctttgcccttcagcttttaaggaatcatctagtccaaatccaaagcaaaagaaaacaaggtctccatagaactttgttgatgactgatctggcaccgaaggtagataatgcttttgggttgtcctttggtggtagatattattgggcattcttttggttgatctattgacgtgtgatcaccttggtgcgagtaccattggcaaaccatgtatcattttgtatagctgtaatatgttcaagatgatggttagacttatcgttcctatcagttactctaacggcctgtttgaaaggcaggttgtcggtccaaacagacctgatgaagacttgcacatgcctgaactgaaaattctgcccgtatgggtggtaaacccaattacatgttaatgttaagcctgtaattaattacaagacctttactaaaaaaaa

SEQ ID NO: 20499 - DNA, 263 bp, Setaria italica
  Peptide Sequence Number=SeqID_86473
acagctcccgaggaattttgggtcaaatgatgggtagaataatgtgcaaagatatggtcacaatgagccatccacatcaagggccctcaagaatcccacaaaggaggcaccatgttatataccacaattggagccatatttaagtcagggtggggctatacaaagattattaccataaaaacagaagctagttgcaaaataagatacaaaacatgtgattttgtgaacacctgaaacgataacaagacatggaaaaaattaaa

SEQ ID NO: 20500 - DNA, 1392 bp, Setaria italica
  misc_feature (1375)..(1392): n is a, c, g, or t
  Peptide Sequence Number=SeqID_86474
cggactttttacctactctggagccgggggtttcagcagtctacttgtgtcggcgagtacactccacaacatgtagtgtttcattggatggcagattacagggggagttagatggtgcaaagggagaagtgcgaaaacatgaaacagttggtgcatttcaaaaaataccaatggtgatgcctgcaaccgatatacttatgtcagcacaaaggaaatcaagaaatgtgccaccgacaaagggcatagcaaatatcgctaagcgcgaaaggaacaaaggtgcgaaacaacttgatgccttaatgaaagaactttcagtaccactgagaacatacacagaaaacttccctaagaggagagatttgcatccttatgagaggtctctcattgagttgacttttggggaggttattatgagcaggttctaggacgagtcgatgctctcaggaaaaggattacttctgttggaaagcaacatgcttcagtgtgtgctaagtcaacaacaaaacgtgaagcagaggagcgcctcgctgagggcaaaaagagacttgaagaagctttccagcatggacagcatgccattgatgatttagtaaatgtagcaaaggctttgcgttctatgcctgttgttgatctacatataccgacactatgtctagttggatcgcccaatgtgggaaagtcatcattagtccgcatattatcatctggaaagcctgaggtctgcagctatccattcacgacaagagggattctaatgggtcacattgtatccaatcatgagcgttttcaggttacggacactccaggactacttacgaggcatgatgatgacagaaataacatagagagattgacacttgctgtcctgtcttatctaccgatcgctgtcctgtatgttcacgatctatccgaagactgtggaacctcagtagccgatcagtacacaacgtacaagcatatgaaggaaaggtttggtgatcgcctatggatcgatgttatatccaaatgcgatcttttgggcaagaaagcgcctataagctttgacgacgctgatgaagatgtgacacaatacagaaaattcggtccagaaggtgccctccgggtatctgtgcagagcgaaatcggcgttaaagagctaaaagaaagagtgcaccagctcctgacctcccaaatggctcggatcaaagctgacaaggcggagcatgaaacacaggaagctggcgttagtgttccttggcgaagttagagaatgaatacttgcgcacgttcgatgtttatgtaaattttccactcatgaggaccgcaactaatttgtgagtgtcttgcaattttggccatttcgatgttttagtatgtctccttgctaaaaaaaaannnnnnnnnnnnnnnnnn

SEQ ID NO: 20501 - DNA, 517 bp, Setaria italica
  Peptide Sequence Number=SeqID_86475
acgccaactgtttgatgaaatggcgttgccgcctgatgttgtcacgtatgggattcttgtccatggttactgtgctcttggtgaactggagagcgccgtgaaactgttggatgaaatggtggcaagagggatggagccaaatgcaatcgtgtatacaagtattgttgcattattgtgtgacaacgggcaggtttcagatggccagagggtggtggaggatatggtccagcgtaaggtgatattggatgaggcagtgtatacaactgtcttgagtggtttctgtaataaaggggatttggcagctgcaagaaggtggtttgatgagatgcagaaatcaggtttggcaactgatggggtgacatataccacgctgatcaatgggctttgccgggctggtgagctgaaagaggcagagatgttgcttcagcaaatgttggccaggcagttggatgccgatgaggtcacatacacagtgctcatagatgggtactgcaagagagggaagattaagttattt

SEQ ID NO: 20502 - DNA, 938 bp, Setaria italica
  Peptide Sequence Number=SeqID_86476
gtggcaggcaccacgcacctggaagcttccgatccaatcgacggctcccctcctctgtcggctcgtcttctcgcgtccgtctccggcgtcgaacactcgaaccccctccggccaccgtgcagagtctactcctttgcaagtgagaagcgccgcctggaagggattcttccaggattggaggagccgccgctgtcctcacccctgctgggccggcgtcgagcggagatccagtcggaaactaaactgacctcgtcttttgccgcattcccatcaggagaagcaatgtcaggagtgatcacaaagttcgcggttgcatccatggtgatgtggatggccccggttgcgatcgtgtatgggttctactaccaggtgtttccaggtgtgagtcagatgtcatcctcggcgcagacactcgccagcgggttccttgccgtcatatcagtcaatctggtgatcggcttttacatatgcatggcaatgaaggagactccgcaccaggagccgcagccagatcccaccttcttggcgaatgctaaagcgagtatcaaccagccaacatcttctcaagtgagtgatgattccaagggaagggaaggttgagtaagctgtagcatgttggcttgggtcttctgtatgttaagagcatgttattcaggaggaatagttgtgctatgccaccacacaataccatggcctttaaaatttcacgatttcgctgtaaatcttgacggttatggttatggaaccatttgaagatgaacctcttgtatctgtttacaatggaaactgtgtccaatgtgttattttggttaggattctcatcaaaactaccggtggttatgtattagttcctttttggtgatttggttagatcctatttagtgtatgccttgaacatacatatgctgcaatgtggttccattctggcttgtgtttag

SEQ ID NO: 20503 - DNA, 236 bp, Setaria italica
  misc_feature (55)..(55): n is a, c, g, or t
  Peptide Sequence Number=SeqID_86477
tatctaggctgttatgcagattcagaagtgctgttttgagttgtgttttataaanattatttgatacctaatctattgtataaaaatagatacataaaagataagaattgctgctcttcatcaatgatggtgacaaggaatgtgtttgtctagtcctattcatattggggtcttggacatatgagcactctatatttctatatgagaatgccatttgggtttgttgtgctgatata

SEQ ID NO: 20504 - DNA, 350 bp, Setaria italica
  misc_feature (107)..(107): n is a, c, g, or t
  misc_feature (341)..(341): n is a, c, g, or t
  misc_feature (346)..(346): n is a, c, g, or t
  Peptide Sequence Number=SeqID_86478
ttagtgtttcccttgcacttctctcgactaacgagtctgcttctggaagcagaggcttcaagctagggagcaggggaactgctgaagatattgatggaccacagctnaccaggtatgcctgtgaaccatgtaggggaataagtggtgaggtgggaagtggcaggtgaagtaaaggatcatgtagtatcgatggaagattaagggaagggagatcagttgtatccagctttgcggacgctgctgaagaaggtggctgctcatttgctagcagtgaactcaaaggtgttaggggcaatggatactaacaaagaaaataaagtaaaaagaaaactaaaagaaanaaaanaaaa

SEQ ID NO: 20505 - DNA, 442 bp, Setaria italica
  Peptide Sequence Number=SeqID_86479
atgagaatgccatttgggtttgttgtgctgatatacataggtggtttagcaggtggtgttgctacgaggcttgtacgtctacatggtcggtaaaggcaagttaacgtagctgttgcattgctgcaactttaacatgttatttttactacctccacttatatccacttataaaatgaagtgcacatatttatatgtgataatctgaaatgtacatttatgtggtaatctgaaatattgtacgtgctgtttataagtttgagaagagtatgaatatgtcattctaatatagctatatagttggtaaatagtcttttcactttaacatgggtgaatagatgaatggattgttcaatggatgagaaatttgaaaatatttacacatagcatatatacttggtgatttattctatgatattgttttttcgtattgtactgaagtcta

SEQ ID NO: 20506 - DNA, 468 bp, Setaria italica
  misc_feature (32)..(32): n is a, c, g, or t
  Peptide Sequence Number=SeqID_86480
agagttgatactgttgttgtcacgtcatttgngtcaagaggagcaattgatgggctcgaccattctgcacgacgcttcagtttctctctcccaacaacccttgaacatgaggcccttggcacaccatctttaaaagtgccagatctgggacttaggctggcttgatagacagagcttggcttagttgcattagttgcagaggcacgaaacctggaagtcttggaaacagctgactggagctgcaaatattgatcatgcggtctcgaaaggcccagaaagtcattaagtgatcctaacgatttaacatcaccaatacttgatgcaagaagataagcatgtaaatgagtggcaaaagcgtctagtcgtgaattggagatgccagtcagatcagagagtgttggcctcccatccaaaaggcttttcatcttagattctgaaattctgactaggaaagaacgcccagaatta

SEQ ID NO: 20507 - DNA, 266 bp, Setaria italica
  Peptide Sequence Number=SeqID_86481
aaacatttggtaatttgtttaagaaagctagagcccttcgcgctatttttttgttctggagcatcatatattgtggaggatatgtggcaaaacttttcaaagcttgtccatcttcgctacctaaggattaaggggagttaccatttctggaaacagatctaccaggaacaatttcaagactatatcacttgaagatcctagacattaaagattccagggactgccctattccatcaagatatttaagcaaccttgtaagcatgcaa

SEQ ID NO: 20508 - DNA, 287 bp, Setaria italica
  Peptide Sequence Number=SeqID_86482
gatggacggttcacctctataaagttacattttcgcatatccgttatacccatgctcaacaactacatcccaggtatatcccgtacaagacagtaacttgacccctactcaagatgtcgctttcaaacttcgtcggtactaagaacgcctccgcatgctctccaccttcattggttgaaatcagctaacctcgggttttgttcatgggacctccccgaggtaagtcgtcgggagttccgtggggacttcaacttcggaaatcttcacctgcaaaatcacagaacggg

SEQ ID NO: 20509 - DNA, 488 bp, Setaria italica
  misc_feature (412)..(488): n is a, c, g, or t
  Peptide Sequence Number=SeqID_86483
cagcagggcgcaagagcagcacgagcagcagcaacatcagaaggggtactattgctgcctcaccaattacaacgtttgaggatctgggactgccaaaaatttggtcctcttcccaggtttactcgactacgacgaagacgaaggacgaaccggagctggaggcctccaaggtctgagctccctcacttcaatacagatacagaaatgtcccaggttcctctcctcctattcgtcctcctcctcctcctcttcttgtttcctttcccaacctccctggatacctcgatctggcaggcgtggagggcatggaaacgctgctccctctctcgaacctcacctgtctcacagagttacgcatatcggaatgcggggatcttaaaggtgagggactgcagtctctcctcgaaacccnnnnnnnnnnnnnnnnnnnnnnnnnnnnnnnnnnnnnnnnnnnnnnnnnnnnnnnnnnnnnnnnnnnnnnnnnnnnn

SEQ ID NO: 20510 - DNA, 510 bp, Setaria italica
  Peptide Sequence Number=SeqID_86484
agaagagaaggagcaagatggattgaagaggaagagaggatcgaggagatatgctagatcggtattttccccaacctccccttgtcgatttccatagggaagccttgggtaagagtggaatccatatccttctctataattaagtggttttggaggttttggctgtggggggattaaaggattagaggttggattgggggtttaacgtcattttctagttgtagtttcttagcagattcaacagtttctctagggtacgagttttggatacgttaggtgaggaattgattcttgagatagattaggaagttgtcgaggatttagtaagatttccaatttgtatttgattgcaatttttggtggagtagaactccagttatggccggttcaatgtgactgttcgtgtttgcctggcagatcgagtcaggtctcttcattggtatttttcaccttgtaaattgccgaattagtcttcttcctaacttacgtaagtactttttgttagtaggt

SEQ ID NO: 20511 - DNA, 432 bp, Setaria italica
  Peptide Sequence Number=SeqID_86485
caacaagacaaacaacaagatgtaccaaaacctttgtccttggtgtctgcattgacatactggttcacctatcaaacagagaagtaagccacaaggcatgaaggtaaaatcaagttgaaaactacatccagatgtcttacattattggcacgagatatactttctggcacgaccacaggaagaatgttgactaactgaggattgcttgcaggtggtgtcgaagctatgagcctcatttagtgtttcccttgcacttctctcgactaacgagtctgcttctggaagcagaggcttcaagctagggagcaggggaactgctgaagatattgatggaccacagctcaccaggtatgcctgccccgcggaacaaacatcaataactggacatgcacaatgggatcagacatcaatggcgtgaacgttggaacctgt

SEQ ID NO: 20512 - DNA, 460 bp, Setaria italica
  Peptide Sequence Number=SeqID_86486
ttaaagtgttaacctttccatgtcacaggagagcaatttatttttctgataagtgacgaaatgtatgctactcaactgcgcaagtgtaaatctgcccaactgttgctactgacaacagtaagagcctactcaatctttgaattcagttacaaatatcatagtcagctaatgtgaaaactctcgtattgttcctctagttttctagatcaagcttggcatgcaagctgtgttggcacaaagatttggttgattcaaggagattttctggcacttcagcaatcaacatacaactactactctagctggagcaacttcagatgttcctagtggttctatgattggcaggtctggccagtgccatcttaagcagctgtgaaccaagtgttccttcacattgcactcatctagatcaacagagtagctaggggtggcgctcagtctgaccgaactgaaccgatcg

SEQ ID NO: 20513 - DNA, 266 bp, Setaria italica
  Peptide Sequence Number=SeqID_86487
gaggtattgttgcagaaaacctgttttatgcttagtttcactttttgataattcaatcaaaatttctttcacaaccttttcttttctttcttcaattcagtgaaccttgatggaaaaatatttacgaaggttttataagatatccattctcaaacacctaaggagagcaattctcaaacacctaaggagagcaatttatttttctgataagtgacgaaatgtatgctactcaacagttgggcagatttacacttgcgcagttgagt

SEQ ID NO: 20514 - DNA, 631 bp, Setaria italica
  Peptide Sequence Number=SeqID_86488
gatcagagcacaagaatagaagttgttggcaagagttatttgattgacttggtcaactatggatttttcaaaaagaacgaaaaagacaatggctgtcattattatgttatccatgacctattacatgagctggccgtgaaagtttcacaatacgattgtcttagcatacaaatatctaaagtgaggtctgtacatatcccggcatcagtacgctacttgtctatcattgtggataacaaagatgttgaggatataattacttataaagactgtgagaaggatcttggtgcacttgataaaaggctacaaattgaaaatgtacgcacattgatgttgtttggtgaaaatgtggagagtttttccaaaacatttggtaatttgtctaagaaagctagagcccttcgcgctatttttttgtctggagcattatatattgtggaggatatgtggcagaacttttcaaagcttgtccaccttcgctacctaaggattaaggggagttaccattttctggaaacagatctaccaggaacaatttcaagactatatcacttgaagatcctagacattgaaaattccaggtactgccgtattccatcaagatatttaagcaacatcgtaagcatgcaac

SEQ ID NO: 20515 - DNA, 590 bp, Setaria italica
  Peptide Sequence Number=SeqID_86489
caagtgaacgtagctgttacattgctacaactttaacatgttattattactacctccacttataaaatgaagtgcacatatttatacgtgataatctgaaatgtacatttatgtgataatctgaaatattatacgtgatgtttataagtttgagaagagtatgaatatgtcattctaatatagctatatagttggtaaacagctttttactttaacatgggtgagtatatgaatggattgttcaatggatcaggaattttgaaaatatggggctgaaagtatattttacatatagcatatatacttggtgatttattctatgatatatttttttctactgtactaaagtctatggaatctatggaatccttagtggtttcgtagctgacggatctgttttagaggaatgtgatgatcttggtgaggtatttatgctaccttatgtctcctagtgataacatgtgcggatcaaatgaagtttgggttatgagtaaggtcagaagtagtttccagaagtctttgggtatatatgttcaacttaagaattaagtttcgagttgacttagcttcttatttttagtaagttcctt

SEQ ID NO: 20516 - DNA, 784 bp, Setaria italica
  Peptide Sequence Number=SeqID_86490
agattagacatccgcagttgtaacgccatctcctcgctgcccaaggatggcctgccaggttccctactagagttgatgatatgcgattgtcaaggcatccggtcggatacgacaaggagtgcctcccaaattcactgcaaaaactagtgatcagatgctgcccaggcatccggtcccttccaaaggtggaataccttccaagttcgctgcgagaattggatgtcgatttttggaacagcgaggaactaagaaggcattgccgcaagttgataggaaccattccaatagtcagagcctgatttacccaaggtaacaaagagggctactgtttgaattgggatttcactgtatccatacatgattctcagttgtcaagcgtgaacatcgcaggatatatctaacaccctgtacataaattgctctccttaggtgtttgagaatgaatatcttataaaacctaaggagagcaatttatttttcggataagcgatgaaatgtatgctactcaactgcgcaagtgtaaacctgcctaactgttgctactgacaacattttctagatcaagcttggcatgcaagctgtgttggcacaaagatttggttgattcaaggaaatttctggcacttcagtgatcaacataaaactactactctagctggagcaacttcagatgttcctagtggttctatgattggcaggtccggccagtgccatcttaagcagctgtgaacaaagtgttccttcacattgcactcgtctagatcaacagagtatctaagggtgg

SEQ ID NO: 20517 - DNA, 418 bp, Setaria italica
  Peptide Sequence Number=SeqID_86491
tttcttataattattgaggaatttaaacttttcgtattagagttgataaaaaactattgatagacaattttgtcactcaccgaaccctgatgtgtgagtttatcagtttaagaacgtcttgttgctccaacaactttcaagttgtcttggtgtactgctacagaaataggctgcatccacaacatattaactctgaatttatttgttggttttgccagctcaccagaatagtacttctcagattgtaggaccaacatattaactctgaatttatttattggttttgccagtttaccggtatagtacttctcagattgtatgtccttttttgactacttgcctttgttttctgatgtattgctgcacaaaatattgcatccttagcttttctgatatcctaatttctttgcttaatgct

SEQ ID NO: 20518 - DNA, 596 bp, Setaria italica
  Peptide Sequence Number=SeqID_86492
acgagctggccgcccgtctgccacacgagcagaggacgccggagaggcacccatgtccttctgcatcatctccttgcttgttacgagcaccgcgagtagcatcaggcgagcctgaggagagcttgaatttattggcaacgtatcttccagtgtggcgagcattgaggaggagatcacgggcgcatcccccggcgtgctcgttagcggcatggtaggtgccgtcgagctcgtcctggatgcggaagtagtcgagctcgtcgagcacgtcggcggcggcgtaggccagcaggcgcagcttgagcagcaggtcgttgagggccgggttgtttatgtccctgccacgggtattgttgagcatggcctgcgcgtactgcagctccgtcatgaggccatcgacctcggagccgagattcttgctggccgcccacgcctccagaaagccgtctgcgacgggggcgagcgccttgcccaccacccaccgcgccgcgctgaacgcgaactccatcttcacgagtcacgcagtggttcaggttccttctggatcacaaaacggatgcgcaccatggctggcactcagccagagcgtgtgctcaaat

SEQ ID NO: 20519 - DNA, 413 bp, Setaria italica
  Peptide Sequence Number=SeqID_86493
gttgttgagcatggcctgcgcgtactgcagcaccgtcatgaggccatcgacctcggagccgagattcttgctggccgcccacgcctccaggaagccgtctgcgacgggggcgagcgccttgcccaccacccaccgcgccgcgctgaacgcgaactccatcttcacgagtcacgtagtggttcacaggttccttctggatctaccacaaaacggatgcacaccagggctggcactcagccagagcgtgtgctcaaatccgtagagacttcctcaaaagagtaagatccggcagaggtgttggagaagacacgcccagatccgaaaacaggatgtacagcagaggatcgggccgggcggggcggagaagacgtcgtcggtcaaggagtcgtcgatgccaaatccctcctggttag

SEQ ID NO: 20520 - DNA, 572 bp, Setaria italica
  Peptide Sequence Number=SeqID_86494
aggggatcttgcagagagcacaatgtttgacaagatcgatatcactttgctcatgaagctggtacgttggacaagttgttgcaataattggaagatcaagtttaagcatccagagacaacatgctcccagtaacatgcaaatatatagggatgacagtgtgacactagttcaggccttcagggcgtcctcaaaactcgctcaagcatgctctggaagcaaggactaccgttcatcctgcagcgtgttgttggcctcggccgaagtataatttctgaaacatcatatagagtcagaacggcacaacgctggctgctgttgaatacttgagagaatacaggctggagtggtagttaagtgatcatattacatatagggtcagttgtcggcttgtggcagaacacaaccaattcagagaatacagggccagttttatttttactcctaaagtttaaacctgcgtacgtagagaacgaagcaggaggatacatgtactgcttggaatactgtactgtacgcaggcagcgggcgcctcgtaggctgctgcttcgtcatcaggattgggcaacgaggg

SEQ ID NO: 20521 - DNA, 458 bp, Setaria italica
  Peptide Sequence Number=SeqID_86495
gaaccactaggaacatctgaagttgctccagctagagtagtagttttatgttgatcactgaagtgccagaaatttccttgaatcaaccaaatctttgtgccaacacagcttgcatgccaagcttgatctagaaaactagaggaacatgttgtcagtagcaacagttaggcaggtttacacttgcgcagttgagtagcatacatttcatcgcaagtgtaaacctgcctaactgttgctactgacaacattttctagatcaagcttggcatgcaagctgtgttggcacaaagatttggttgattcaaggaaatttctggcacttcagtgatcaacataaaactactactctagctggagcaacttcagatgttcctagtggttctatgattggcaggtccggccagtgccatcttaagcagctgtgaacaaagtgttccttcacattgcactcgtctaga

SEQ ID NO: 20522 - DNA, 528 bp, Setaria italica
  misc_feature (403)..(403): n is a, c, g, or t
  misc_feature (430)..(430): n is a, c, g, or t
  misc_feature (436)..(436): n is a, c, g, or t
  Peptide Sequence Number=SeqID_86496
ccaaaagtaaggcacatgctagatgacggcagaagaccgaggttcagcttccctcttctctttcctcatatatcagagattatgacacacgcccaaattacctacaaatgaaaagataaatttatttggcagatgaacagtgccatcactaataactaataagatgaattatgtaaccctagaatcaacctgcacatcattctaaataaggcgcgatagttggaagaaacatttctcctaaaaagtaactaggtgacttggaaataaagaaaggcaacacatactactaattcaaaaacacagagggtcaaagaaacaaacaaagttgtagcaaatacagattactgcagcacaggacaagaactgcatgatccacatttccacaggtcaaactgtaaaaggntagtgatatgaaaagggcagaaaaagngaaggntatgagaacaaataataagcagagaagaacgaaattattgttgagtgttgtagatgatagtcctccaacaattaattgaatcgtatcatcgc

SEQ ID NO: 20523 - DNA, 760 bp, Setaria italica
  Peptide Sequence Number=SeqID_86497
tatttacacatagcatatatacttggtgatttattctatgatatgttttttcgtattgtactgaagtctatggaatctttagtggtttcgtagctgatgggtctgttttagaggaatgtgatcttggtgaggtatttgtgctactttatatcttctagtgctaacatgtgtggatcaaatgaagtttgggttatgagtaaggtcaaaaatagtttccagaagtctttgggtatatgtgttcaacttaagaattaagttttgggttgactagtgaagttcctttttaatatgatatacatggtttgggcttagattacggatttggtgctttactccatatttaaatgataatacttacattctatcccatacatgttaaaatgaaggtgacccatagataacatgatatggagaatgattttgtttgtacttggcatacatgaaattctatcattcaattatgattgatacttgttgggcctaaaccaaacagtaggtaatacgaagtggcgacacgaaggcagagaaatctcaatcgaatgttactgtggctgtcctatcaatgaatagtatccatcttaggggagacggttcacctccctttatagtgttataaagttacatttccgtatacccgttatacccatacccaacaactacatcccaggcatatcccgtacaagacagtaacttgacccccacccaagatcgtcactttcaaagtgagattacatttctaaccctttccaagatatctatt

SEQ ID NO: 20524 - DNA, 422 bp, Setaria italica
  Peptide Sequence Number=SeqID_86498
ggatttcaatgcagatagattggcgcaagaagctgtgaaaaagattcctgaagttaaagatgaaaagaaaagtggtagtgatcaagagctaattgagcaaagattaaaaggtaaacggtttttgcttgtcctggatgatatatggaaatgtcatgaggatgagtgggaaaaactattagcaccatttagaaaaggtggaggaaaaggtaatatggttatagtcacaactcgaatgtcagatgtggccaaaatggttaagacaggtgattctcaaatacaattggatcgtttaggagctaaagattttagggatttctttgacgcatgtgtatctaccaaacatgagtcatggtcagatcatcctgagttaattgaaattggggaagaaataatggtcaaactgaaatgttctcctcttgcag

SEQ ID NO: 20525 - DNA, 1048 bp, Setaria italica
  Peptide Sequence Number=SeqID_86499
gttttggaggttttggctgtgggggattaaaggattagaggttggattggggtttaacgtcattttctagttgtagtttcttagcagattcaacagtttctctagggtacgagttttggatacgttaggtgaggaattgattcttgagatagattaggaagttgtcgaggatttagtaagatttccaatttgtatttgattgcaatttttggtggagtagaactccagttatggccggttcaatgtgactgttcgtgtttgcctggcagatcgagtcaggtctcttcattggtatttttcaccttgtaaattgccgaattagctcttccaactacgaagacttttgtagaggaataaaagttcttcctatcagcaaaatttcataatttttggttgcatagtttaggagatatgaatttttatatgttgttgtctgggctgttatgcaaattcagaagtgctgttttgagttgtgttttaggtgaccttagaagcctgataaaatatagttttgctaccaaagttttagttcattctctgaagtttccagatacatatttatttgatacctaatctgttgtataaaaatagatacataaaagataagcattgctgctcttcatcaatgatggtgacaaggaatgtgtttgtctagtcctattcatattggggtcttggacatatgagcactctatatttctatatgagaatgccatttgggtttgttgtgctgatatacataggtggtttagcaggtggtgttgctacgaggcttgtacgtctacatggtcggtaaaggcaagttaacgtagctgttgcattgctgcaactttaacatgttatttttactacctccacttatatccacttataaaatgaagtgcacatatttatatgtgataatctgaaatgtacatttatgtggtaatctgaaatattgtacgtgctgtttataagtttgagaagagtatgaatatgtcattctaatatagctatatagttggtaaatagcttttcactttaacatgggtgaatagatgaatggatt

SEQ ID NO: 20526 - DNA, 886 bp, Setaria italica
  Peptide Sequence Number=SeqID_86500
gcaagttgataggaaccattccaatagtcagagcctgatttacccaagggctactgtttgaattgggatttcactgtatccatacatgattctcagttgtcaagcgtgaacatcgcaggatatatctaacaccctgtacataaactagagagcaatttatttttctgataagtgacgaaatgtatgctactcaactgcgcaagtgtaaatctgcccaactgttgctactgacaacattttctagatcaagcttggcatgcaagctgtgttggcacaaagatttggttgattcaaggagatttctggcacttcagcaatcaacatacaactactactctagctggagcaacttcagatgttcctagtggttctatgattggcaggttttagcagatttcggttacctaaaactaggaaccgattggttccaaaagtttccaagactgagtagcttcatgcattctatgctgctcacacttcttgcttatatgcgaggaattatgtctcattggaaggtgacattgagggctggcactgtacctccctgcatgccctgctgcccacctactgcatcctgaccacggtccgtgtgcgggatggctcgaccactgtattgcttccggaggggccgctctgcgacgttctccggcactctacagccatgtggtcacttcaggcgccacagtgcgcgatgttctaaagggggcgtcgaccgcttcatagaacgtcttttttacagtactaccttggatttatacgtaaggatccgacggttcagattaaggatatgtatgagtagtataggtagtataaggatatatttggaaataagtataataactttgttaaaatatatcactattctttttctttcgtttaaaaaaaa

SEQ ID NO: 20527 - DNA, 1535 bp, Setaria italica
  misc_feature (1487)..(1487): n is a, c, g, or t
  Peptide Sequence Number=SeqID_86501
caacctgtcttaaccattttggccacatctgacattcgagttgtgactataaccatattacctgttcctccaccttttctaaatggtgctagtagtttttcccactcatactcatgacatttccatatatcatccaggacaagcaaaaaccgtttaccttttaatctttgctcaattagctcttgatcactaccacttttgttttcatctttaacttcaggaatctttttcacagcttcttgcgccaatctatctgcattgaaatccagagagacgcatatccaaattgtaacttggaaatggctcctcgcttcttggtatacatgttgtgtgaaagttgtcttcccaatacctcccgggccaacaattggaagcacagtaagttcattggcaaaacattcaccatgggtaatggaatctacaacacactgtagctctgtctccctcccatacaatctaggctctgtaatttcctcactggttgtgggccgttccatggtggcagtagtgatacctttggagcctatcagctctagattaagaacggttgagaccatagcacagatgggcttgagcttctttacgatctctgtcatccttgtagatacatccaccctatcaaacttcaattttggtatctgtgcagtttgtcttctctgcggtaccttggacggccaggcaccacatagaaatcgtcgtccacgaccatcgacaaatatggaagagcagcatgggaggcgtttaccgacagcattggcagtgttgcgtgcagcagaggtgaccttcggcatgcaaccggcatcagtaccgaccttgttgtcgccatggttggtgtgtgttgttgttgttgttggtggtggtggtgatgacgagctgtccgcccgtatgccacacgagcagaggacgccggagaggcacccatgtccttctgcatcatctccttgcttgttaggagcaccacgagtagcatcaggcgagcctgaggagagcttgaacttattggcaacgtatcttccagtgtgacgagcattgaggaggaggtcacgggcgcatcccccggcgtgctcgttagcggcatggtaggtgccgtcgagctcgtcctggatgcggaagtagtcgagctcgtcgagcacgtcgtcggcgtcgtaggccagcagacgcagcttgagcagcaggtcgttgagggccgggttgtcgatgtccctgccacgggtgttgttgagcatggcctgcgcgtactgcagctccgtcatgaggccatcgacctcggagccgagattcttgctggccgcccacgcctccaggaagccgtctgcgacgggggcgagcgccttgcccaccacccaccgcgccgcgctgaacgcgaactccatcttcacgagtcacgcagtggttcaggttccttctaagtcacaaaacggatgcacaccagggcctggcactcagccagagcgtgtgctcaaatctgtagagacttcctcaaaagngtaagatccggcagaggtgttggagaagacacgcccagatccgaaaac

SEQ ID NO: 20528 - DNA, 1395 bp, Setaria italica
  Peptide Sequence Number=SeqID_86502
aaatttggtccatatttttttgttaatcctctgcctatgtttttgctaattatttggatgtctttttcttataattattgaggagtttaaacttttcgtagtagagttgataaaaaactattgatagccaattttctcactcaccgaacctgatgtgtgagtttatcagtttaagaacagcttgctgctccaacaactttaaagctgtcttggtgtactgctacagaaataggctgcatacacaaaatgttaactctgaatttatctattgattttggcagtttccagaatagtaccttttggattgtttaggaccttttttgactatttttttctttgttttctgaggtattgttgcagaaaaccttgttttatgcttagtttcactttttgataattcaatcaaaatttctttcacaaccttttcttttctttcttcaattcagtgaaccttgatggaaaaatatttacgaaggttttataagatatccattctcaaacacctaaggtagctttacagatagttagatattcatagtttttcttaattaccatgaattatgttttaagtgttaacctttccatgtcacaggagagcaatttatttttctgataagtgacgaaatgtatgctactcaactgcgcaagtgtaaatctgcccaactgttgctactgacaacattttctagatcaagcttggcatgcaagctgtgttggcacaaagatttggttgattcaaggagatttctggcacttcagcaatcaacatacaactactactctagctggagcaacttcagatgttcctagtggttctatgattggcaggtctggccagtgccatcttaagcagctgtgaaccaagtgttccttcacattgcactcatctagatcaacagagtagctaggggtgggcgctcagtctgaccgaactgaaccgatcgtttcttcaggttttagcagatttcggttacctaaaactaggaaccgattggttccaaaagtttccaagactgagtagcttcatgcattctatgctgctcacacttcttgcttatatgcgaggaattatgtctcattggaaggtgacattgagggctggcactgtacctccctgcatgccctgctgcccacctactgcatcctgaccacggtccgtgtgcgggatggctcgaccactgtattgcttccggaggggccgctctgcgacgttctccggcactctacagccatgtggtcacttcaggcgccacagtgcgcgatgttctaaagggggcgtcgaccgcttcatagaacgtcttttttacagtactaccttggatttatacgtaaggatccgacggttcagattaaggatatgtatgagtagtataggtagtataaggatatatttgg

SEQ ID NO: 20529 - DNA, 1006 bp, Setaria italica
  Peptide Sequence Number=SeqID_86503
actaggaaagaacgcccagaattatcagctgatatctcttcaatcacaacatctaaaaattcaaagccgttgctcaagagagctagttgctctgaataaccatcatcaccaacaaaagtaaggcacatgctagatgacggcagaagaccgaggttcagcttccctctaatgggtgttgggcagaggagggcgccgtccctctgaaccttgccgacgcgcagggagacgagggggacgcagaggcatcgcgcgagcatgccgacctccgacacctcgaagtgctgcgcgaggtgcgcgatgaaacggtcgtcggcggcggtgcaggagacgttgagggcgaggagcggcctgaggcgctcgtcggcgcggcaggcccccatgagctgctggcgtagaggcggcggcggcgaagcaccggacgattccggtcggaaggtctccgggtcgtcgcgctccgatggggaggtctccggctcgtcggcgtcggggcagggacgggatccgggctccagctccggctcctccctggagggcggcggatccatcagggaagggctagggttgctgggggcgaagcgaattggggatttggtttgatttggggggggattggttggctgaaggtgatggtcatgccggatatcaatttccagttaaatatgtcacgattaggcgatatggtgctagtgggcagcgactgacacgactgttctcttacttcccaaacctcctcatcttcagaatgttcaagtgtgagaagttaacagggttaggcgttgtgggcctgcataagaggatggaagcactgccaagaccgccgtcaatttcagttaaccaagtggaggaggcacaagttggacagcacgagcagcagggcgcaagagcagaggaggaaatagcagcagcagcaacatcagaagggatactattgctgcctcaccaattacaagatttgtcgatctcggactgccaaaatttggtcctctgcccaggtttactcgattgt

SEQ ID NO: 20530 - DNA, 1128 bp, Setaria italica
  Peptide Sequence Number=SeqID_86504
tactgcattcttggaagattcatggcttccggtggggccgctctgcgacgttctcccggcgctctacagccatgcggtcacttcgggcgccacggtgcgcgatgttctacaagggggcgtcgaccgcttcctacgaaacagggccaatagagtggctgcggcggagaaggtgaaactgcagttggttgttgggcctaaaccaaacagaagggatggacggttcacctctataaagttacattttcgcatatccgttatacccatgctcaacaactacatcccaggactgtcctgattccttccttccctactcattagcttcgtcggtactaagaacgcctccgcatgctctccaccttcattggttgaaatcagctaacctcgggttttgttcatgggacctccccgaggtaagtcgtcgggagttccgtggggacttcaacttcggaaatcttcacctgcaaaatcacagaacgggtatctttggaccagttaacttcggttaagtgttagctttgtggaagagtatagtgacgaagtcagcgctggtgtcggggagaggtccgcgccagcttcgttcagggtgcgatgtggagcgatccccaacattggtgctgcccgctgcaaggaacccacggcgagccactctgatggcggccacggacatctctccctgccacttcgcctcctacgtctggaagaatcgtgctccgccacgagtgaagtgcttcatctggctcttggtccaggaacgaataccattaccatgcaggggcaatttggccgagaagcacatggtgccgaacgccaggtgcgacctctgtggccacctggaagaaacgacggaccacatcatcttccagtgtccgacagctctcgctctctgggcacgcctggggtaatgcgctggttgctgcatgcgctcctgccgtgatgatacaaagctctgggcggtgcggattcctggtgctcgctcttttctcccatgcagaacgccgatgtaatatctttcatccctcctgtatccccaaactgctgtaaactgaactgatatagccctgtttcggacctgagatcctaatggaagtttcaggtgggggagtctcccccgtgtcgacctttcaaaaa

SEQ ID NO: 20531 - DNA, 1621 bp, Setaria italica
  Peptide Sequence Number=SeqID_86505
attttgctaattattttttatgtctttctcttataattattgagtagtttaaactttttgtattatagttgataaaaaactattgatggggagttttctcactcacagaacactgatgtgtgagtttagcagttttagaccagcttgctgctccaacaactttaaagttgtcttggtgtgctgcaacagaaataggctgcatacacaacatattaactctgaatttatctattgattttggcagttttccagaatagtacttttcggattgtttaggaccttttttgactaatgttttctttgttttctgaggtattgctgcagaaatcctgctttatgcttagtttcactttttgataattcaatcggaattcctttcacaagtttttcttttctttcttcaatgcagtgaaccttgatggaaaaatatttacgaaggttttataagatattcattctcaaacacctaaggagagcaatttatttttcggataagcgatgaaatgtatgctactcaactgcgcaagtgtaaacctgcctaactgttgctactgacaacagtaagagcctactcaatctttgaattcagttacaaatatcatagtcagctaatgtgaaaactctcatagtgttcctctagttttctagatcaagcttggcatgcaagctgtgttggcacaaagatttggttgattcaaggaaatttctggcacttcagtgatcaacataaaactactactctagctggagcaacttcagatgttcctagtggttctatgattggcaggtccggccagtgccatcttaagcagctgtgaacaaagtgttccttcacattgcactcgtctagatcaacagagtatctaagggtgggcgctcagtctgaccgaactgaaccgatcggttcttcaggttttagcagatttcggttacctaaaactaggaaccgattggttccaaaagtttccaagactgattagcttcgtgcattctatgctgctcacacttgcttgcttgtatacgaggaattatgtctcattggaaggtgacattgagggcgggcactgtacatcccagcatgccctgctgcccacctactgcatcctgacgacggtccgtgtgcgggatggctcgagcactgcattcttggaagattcatggcttccggtggggccgctctgcgacgttctcccggcgctctacagccatgcggtcacttcgggcgccacggtgcgcgatgttctacaagggggcgtcgaccgcttcctacgaaacagggccaatagagtggctgcggcggagaaggtgaaactgcagttggttgttgggcctaaaccaaacagaaggtatgaagtagtagtatgcagagacaaagatatctcaagcaaaggtgaccgtggctgttctattaatgaatagtatctgttttagggatggacggttcacctctataaagttacattttcgcatatccgttatacccatgctcaacaactacatcccaggtatatcccgtacaagacagtaacttgacccctactcaagatgtcgctttcaaagtgagattacatttctaatcctttccaagattcttttattacaaaagtgaacccctaaaaaa

SEQ ID NO: 20532 - DNA, 2718 bp, Setaria italica
  Peptide Sequence Number=SeqID_86506
ctgctaggataagtggtacttcaggtttggataatttgtattgcggcaatgattacaagtctaaatatagcttaagcattacgggaactattgctttggatagcacattctggaacatgttggcctttggtaacctaactgaactagaagatctgagtatcgacaattgtcctcctctcccactgcatcacttccatatgctatcatcactaaagaccctcgggctatggcgttcaagcattattgtattccccttaattgaaggagagagccgtgccgaataccaatttccagttgaaagcatgagcatacacaagtggggtgctagtgccaaggaattgacgcagctactcacttatttccccaagctctcagaactgtgggtggggtggtgtgagaagatatcagtgctaggtgtagtggagaagcaggccacggcaacacccgcggacgtcgcacacatcgagcagcaccagcagcaggatggcacgagaggagaggaggaaatctcagcagaagggctgctcctcttgccttcccaatcccacctccagtacttgcggatctgtttctgcccagagctgagtctccgctccattccagccgactacaacagagaagcaggacgaactcggggaggacaagggctccaaggtctgacctccctccgattgttgcagataataaattgtcccaggttgctctcctccgattcgtcctcctccacttctccttgttctcccttcccaacctccctggaatacctctctcttaacgacgtggagacgctgctgcctctctcaaatctcatctctctcacagatttatccatagatgattgtggggatttaagaggcgagggactgcgccctttcctcgctcatggtcgtcttacctcattgcgcgtcagcggaacccccaatttcttcgctggttccgagtcctcgctgccgcatgaacaagatattccatcctcttcctccaaactgcaggagcttctgacggatgacgtcgcgggagccctttctgcgcccatctgtacgttgctcccgtcctcgctcaccaaattgatcttttggggggactcagaggtggagcgcttcacaaaggagcaagaggaggcccttcagctcctcacctccctcgaggggatcagatttcagcagtgcgacaacctgcagtgcctccctgcagggctgcatagacttccgaacctcaagagattagacatcaacacttgtaaagccatctgctcgctgcccaaggatggcctgccaggttccctgctagagttggtgatacatgattgtcaaggcattcggtcgatacacaaggagtgcctcccaaattcactgcaaaaactagtgatcagacactgcccaggcatccggtctcttccaaagctggacgaccttccaagttcactgcaagaattggatgtctgtaatagcaaaagcaaggagctaaaaaggcagtgccgcaagttgataggaaccattccaatagtcagagtctgacaaacccaagggatattgttggaattggtacattcttctgacctctgaattctcaccgtatttatatgaatacacgattcgagttgccaagtacgaacatctcagctgtgcctaacgaagtgcacataaaactgatcatctccatgggagcctattaactaggataacaaaatggtgctgagatcatattggattaggtcaaggacacaagggaacatcaagtcattgggttgtacatccttgtactcttgttaaatctttctgaaaacaaagagtcgctcaaaagggcgtttaggtgtggcttcctgctgtttgaaattccttccccaaagaatttggattgctgaatacccacctttaatactttggcaatggtgcaacagaaaaaaagccctatgcatgcaagtttgtggcactgcagtagtcaacacgaaattactactatgttcgctggagcaacttcacaagttcagatgttccaacttccaagtgtttcctgcatctcttcaacgacttgcctgcatcgtctgtactctgtagtctgcagttctgcacacttaagccctactcgttccacgattaaccttgtgattggccggcctagccatttttcaagttgtgccatcttgagcagctatcgaccaaatgcttcttcacattgcactcgaagttaatctgagttgcaggtgtatctgctgctgctcaagcttgtagaaactgaccgtgatttgcatatgagggatcttgcagagagcacaatgtttgacaagatcgatatcactttgctcatgaagctggtacgttggacaagttgttgcaataattggaagatcaagtttaagcatccagagacaacatgctcccagtaacatgcaaatatatagggatgacagtgtgacactagttcaggccttcagggcgtcctcaaaactcgctcaagcatgctctggaagcaaggcaagtgttcaggttcagtggtctaatgcaattttgagataaaattgaatgttttgaggtttcctcacgtcccaattcctgagtagacatcagaaaactacgacttgcactgtactcggagagtagtgtgttttcccatgacaatatagctttgggaaactctcgattattcatgcagtttcctgcaactaaatgctgtcctttccttggctacaaattaattatattctgggaatggtttttg

SEQ ID NO: 20533 - DNA, 5350 bp, Setaria italica
  Peptide Sequence Number=SeqID_86507
tcgcctgatgctactcgtggaagacaaactgcacagataccaaaattgaagtttgatagggtggatatatctacaaggatgacagagatcgtaaagaagctcaatcccatctgtgctaaggtctcaaccgttcttaatctagagctcataggctccaaaggtatcactactgccaccatggaacggcccacaaccagtgaggaaattacagagcctaaattgtatgggagggagacagagctacagagtgttgtagattccattacccatggtgaatgttttgccaatgaacttagtgtgcttccaattgttggcccgggcggtattgggaagacaactttcacacaacatgtgtaccaagaagtgaggagccatttccaagttacaatttggatatgcgtctctctggatttcaatgcagatagattggcacaagaagctgtgaaaaagattcccgaagatgaaaagaaaagtggtagtgaccaagaactaattgagcaaagattaaaaaggtaaacggtttttgcttgtcctggatgatatatggaagtgtcatgaggatgagtgggaaaaattattagcaccatttagaaaaggtggaggaaaaggtaatatggttatagtcacaactcggatgtcagatgtggccaaaatggttaagacaggtgattctcaaatacagttggatcgtttaggagctcaagattttaaggatttctttgacgcatgtgtatctaccagacatgagttctggtcagagcatcctgagttaagtgaaattgggaaagaaataagggtcaaactgaaatgttcacctcttgcagcaaaaactgtagggagattactaagaaaacagctcactttggagcattggagaagggttctagagagcaaagaatgggaactccaaaccagtgacactgacattatgccagcgttgaagattagctatgattatcttccacttaacctaaagcaatgcttttcctattgtgctttgtttcctgaagattacgaatttgaaagcgaagagttagttcacttttggataggactagatgttttacatctgggtgatcagagcataagaatagaagatattggcaagagttatttgattgacttggtcaactatggatttttcaaaaggaacgaaaaagataatggccgtcattattatgttatccatgacctattacatgagctggccgtgaaagtttcacggcacgattgtcttagcatacaaatatctaaagtgaggtatgtacatatcccggcatcagtacgccacttgtctatcattgtggataacaaagatgttgaggatataattacttataaagactgtgagaaggatcttggtgcacttgataaaaggctacaaattgaaaacatacgtacattgatgttgtttggtgaaaatgtggagagtttttccaaaacatttggtaatttgtttaagaaatctagagcccttcgcgctatttttttgtctggagcatcatatattgtggaggatatgtggcagaacttttcaaagcttgtccatcttcgctacctaaggattaagggggattaccattttctggaaacaggcctaccaggaacaatttcaagactatatcacttgaagatcctagacattaaagattcctggggctgccctatgccatcaagatatttaagcaacctcgtaagcatgcaacattttcttgtcccgggtaattggcttcactcagacattctcaatgtgggaaacctgaaacttctacgagaactaagaagatttgaagctaagaaagaaataaaggttttgagttaaagcaactagcagaactactagagcttgaagtactgggcatttacaatcttgaaaaggttaaagtaaaggaagaagcagttgcagtaaaactaatacaaaaacaccatttacaagagctcgtactagattgggatattaatcgctatgatcaggatcctataggagaagagaatatccttgaaagtcttatgccacatagcaatctctacaagctatctattagtgggcatggaggtgacacttgcccttcgtggcttggtatgaacctctcggtaaaaactttggaatctcttcggctgagtagtgtatcttggaaaacatttccacctctaggagagatgtggtttgtcggtgaacattgtaaaagctgtataccagaacaaagcttcaaaaaattgaagaggctagaactggaaaaggtgccaaaattgataaaatgggttggaaatggcccttctgatttgttctctcacttggaagtactcgtcatcaaagactgcccagaactcatggaattgccattttcacattgtgctggatatgaacaagacgttgaggataacatgatttggtttcctaaactagaagagctcaaaattacagattgtccaaagctatcatcattgccttgtgttccatggtctagctctacttgcagtgctgagattgtacaagctggttcgggtattgagcagctgtctttcagtggagataccttgaaaattaagggaaaggacacattggatagtgctttttggagggtgttagcctttcataacctatccaaacttgaagtgttgcgggtgtcgacatgccctcctttgtcactggttcacctcgaaaagctatcatccctagagaaactctggatacatgatatcggtgatgccttttgttcggctgaaggtgatggtcatgccggatatcgatttccagttaaagacgtcacgattgggcgatatggtggtagtgggcagcgactgacacgactgctctcttacttcccaaacctcctcagcttccacatgctcgagtgtgagaagttaacagggttaggcgttgtgggcctgcataagaggacggaagcactgccaagaccgccgtcaatttcagttaaccaagtggaggaggcacaagttggacagcacgagcagcagggcgcaagagcagaggaggaaataacatcagaaggggtactattgctgcctcaccaattacaaattttgaagatctcgaactgccaaaatttggtcctctgcccaggtttactcgaccacgacgaagacgaaggacgaaccggaggtggaggcctccaaggtctgagctctctcacttcattagagatagagaaatgccccaggttcctctcctcctattcgtcgtcgtcctcctcttcttgtttccctttcccaacctccctggaataccttgctctggtaggcgtggagggcatggaaacgctgctccctctctcgaacctcacctctctcacagagttagacatacgggaatgtggggatcttaaaggcgagggactgcagtctctcctcgttcaaggccgtctcaccagattatttgtctacgaaacccccaaattcttcgctggttccgagccctcactgccgcgtgaaccagagcttccatcctcttcctccaaactgcaggagcttgacacggatgacgtcgcgggtgtccttgctgcgcccatctgtgccttcctctcttcctcgctcaccgaattgaacttttcgggggtcaaagaggtggagcgcttcacaaaggagcaagaggagacccttcagctcctcacctccctcgagagcatcggattttggcagtgcgacaagctgcagtgcctccctgcagggctgcatagacttccgaacctcaagagattagacatcaacacttgtaaagccatctgctcgctgcccaaggatggcctcccaaattcactgacaaaaactagtgatcagatgctgcccaggcatccggtcccttccaaaggtggaataccttccaagttcgctgcgagaattggttgtcgatttttggaacagcgaggaactaagaaggcattgccgcaagttgataggaaccattccaatagtcagagcctgatttacccaagggctactgtttgaattgggatttcactgtatccatacatgattctcagttgtcaagcgtgaacatcgcaggatatatctaacaccctgtacataaactagttagtatcctgtatgcaaaatcatccgagagtcccacaaaatatctacaaatttggtccatatttttttgttaatcctctgcctattgtttttgctaattatttggatgtctttttcttataattattgaggagtttaaacttttcgtagtagagttgataaaaaactattgatagccaattttctcactcaccgaaccctgatgtgtgagtttatcagtttaagaacggcttgttgctccaacaactttcaagttgtcttggtgtactgctacagaaataggctgcatccacaacatattaactctgaatttatttgttggttttgccagttcaccagaataatacttctcagattgtaggaccaacatattaactctgaatttatttattggttttgccagtttaccagaatagtacttctcagattgttggaccttttttgactacttgcctttgtttctgatgtattgctgcacaaaatattgcatccttacgcttttctgatatcctaatttctttgcttaatgctggactaatttgctgtaccaacatggtatcaccgatgtctcattttctgtattccaagttagcatacttattggagttttctcactcacagaacactgatgtgtgagtttagcagttttagaacagcttgctgctccaacaactttaaagctgtcttggtgtactgctacagaaataggctgcatacacaaaatgttaactctgaatttatctattgattttggcagtttccagaatagtaccttttggattgtttaggaccttttttgactattttttctttgttttctgaggtattgttgcagaaaacctgttttatgcttagtttcactttttgataattcaatcaaaatttctttcacaacctttctttctttcttcaattcagtgaaccttgatggaaaaatatttacgaaggttttataagatatccattctcaaacacctaaggagagcaatttatttttctgataagtgacgaaatgtatgctactcaactgcgcaagtgtaaatctgcccaactgttgctactgacaacattttctagatcaagcttggcatgcaagctgtgttggcacaaagatttggttgattcaaggagattttctggcacttcagcaatcaacatacaactactactctagctggagcaacttcagatgttcctagtggttctatgattggcaggttttagcagatttcggttacctaaaactaggaaccgattggttccaaaagtttccaagactgagtagcttcatgcattc

SEQ ID NO: 20534 - DNA, 5301 bp, Setaria italica
  Peptide Sequence Number=SeqID_86508
gccacatctgacatccgagttgtgactataaccatattacctttcctccacctttctaatggtgctaataattttcccactcatcctcatgacacttccatatatcatccaggacaagcaaaaaccgtttacctcttaatctagagctcataggctccaaaggtatcactactgccaccatggaacggcccacaaccagtgaggaaattacagagcctaaattgtatgggagggagacagagctacagagtgttgtagattccattacccatggtgaatgttttgccaatgaacttagtgtgcttccaattgttggcccgggcggtattgggaagacaactttcacacaacatgtataccaagaagcgaggagccatttccaagttacaatttggatatgcgtactactactaggaatttcaaatgcagatagattggcgcaagaagctgtgaaaaagattcctgaagttaaagatgaaaacaaaagtggtagtgatcaagagctaattgagcaaagattaaaaggtaaacggtttttgcttgtcctggatgatatatggaaatgtcatgagtatgagtgggaaaaactactagcaccatttagaaaaggtggaggaacaggtaatatggttatagtcacaactcgaatgtcagatgtggccaaaatggttaagacaggtgattctcaaatacaattggatcatttaggagctgaagattttagggctttctttgacgcatgtgcatctaccaaacatgactcatggtcagatcatcctgagttaattgaaactggggaagaaataatggccaaactgaaacgtaatcctcttgcagcaaaaactgtagggagattactaagaaaacagctcactttggagcattggagaagggttctagagagcaaagaatgggaactccaaaccagtgacaatgacattatgccagcgttgaagattagctatgattatcttccacttaacctaaagcaatgcttttcctattgtgctttgtttcctgaagattacgaatttgacagcaaagagttagttcacttttggataggactagatgttttacatctgggtgatcagagcacaagaatagaagatgttggcaagagttatttgattgacttggtcaactatggatttttcaaaaggaacgaaaaagacaatggctgtcattattatgttatccatgacctattacatgagctggcagtgaaagtttcacggtacgattgtcttagcatacaaatatctaaagtgaggtatgtacatatcccggcatcagtacgccacttgtctatcattgtggataagaaagatgttgaggatataattacttataaagactgtgagaaggatcttggtgcacttgataaaaggctgcaaattgaaagcatacgtacattgatgttgtttggtgaaaatgtggagagtttttccaaaacatttggtaatttgtttaagaaagctggagcccttcgcgctatttttttctctggagcatcatatattgtggaggatatgtgccagaacttttcaaagcttgtccatcttcgctacctaaggattaagggggattaccattttctggaaacagacctaccaggaacaatttcaagactatatcacttgaagatcctagacattaaagattcctggggctgccctatgccatcaagatatttaagcaacctcgtaagcatgcaacattttcttgtctctggttatatgaggcttcactcggacattctcaatgtgggaaacctgaaacttctacgagaactaagaagatttgaagctaagaaagaaaataaaggttttgagttagagcaactagcacaactactagagcttgaagtactgggcatttacaatcttgaaaaggttaaagtaaaggaagaagcagttgcaatgaaactaatacaaaaacaccgtttacaagagcttgtgctagattgggatattaatcgctccgataaggatcctattggagaagagaatatccttgaaagtcttatgccacatagcaatctctacaagctatctattactgggcatggaggtgacacttgcccttcatggcttggtacgaacctctcggtaaaaactttggaatctcttcggctgagtaacgtatgttggaaaacatttccacctctaggagagatgtggtttgtcggtgaacattgtaaaagctgtataccagagcaaagcttcaaaaaattgaagaggctagaactggaaaaggtaccaaaattgataaaatgggttggaaatggtccttccgatttgttctctcacttggaagtactcgtcatcaaagactgcccagaactcatggaattgccattttcacattgtgctggatatgaacaagacgttgagaataacatgacctggtttccaaaattaaaaaagctcgaaattacagattgcccaaagctatcatcattgccttgtgttccatggtctagctctacttgcagagctgagattgtacaagctggttcgggtattgagcagctgtttctcggaggacgtaccttggaaattaagggaaaggacacattggatagtgctttttggagggtgttagcctttcataacctatcgaaacttgaagtattggaggtgacgagatgccctcctttgtcactggttcacctcgaaaagctatcatccctagagcgcctcgtgatatttgatatgggtgatgccttttgttcggctgaaggtgatggtcatgccggatatcaatttccagttaaatacgtcacgattaggcgatatggtggtagtgggcagcgactgacacgactgttctcttacttcccaaacctcctctggttcagaatgttcgagtgtgagaagttaacagggttaggcgttgtgggcctgcataagaggacggaagcactgccaagaccgccgtcaatttcagttaaccaagtggaggaggcacaagttggacagcacgagcagcagggcgcaagagcagaggaggaaatagcaacatcagaaggggtactattgctgcctcaccaattacaagatttgcagatctcggactgccaaaatttggtcctctgcccaggtttactcgaccacgacgaagacgaaggacgaaccggaggcctccaaggtctgagctccctcacttcattaactataaggagatgccccaggttcctctcctcctattcgtcgtcctcctcttcttcttgtttccctttcccaacctccctggaacgcctcgatctggaaggcgtggagggcatggaaacgctgctccctctctcgaacctcacctctctcactgagttagacatacaggaatgtggggatcttaaaggcgagggactgcagtctctcctcgcccaaggccgtctcaccgaattaattgtccacgaaacccccaatttcttcgctggttccgagccctcactgccgcgtgaaccagagcttccatcctcttcatccaaactgcaggagcttgacacggatgacgtcgcgggtgtccttgctgcgcccatctgtgccttcctctcttcctcgctcaccgaattgtacttttggggggactcagaggtggagcgcttcacaaaggagcaagaggaggcccttcagctcctcacctccctcgagatgatcaaattttggcagtgcgacaagctgcagtgcctccctgcagggctgcacagacttcccaacctcaagagattagacatcgacacttgtaaagccatctgctcgctgcccaaggatggcctgccaggttccctgctagagttggtgatagacgattgtcaaggcatccggtcgatgcacaaggagtgcctcccaaattcactgcaaaaactagtgatcagaggctgcccaggcatccggtctcttccaaaggtggaataccttccaagttcgctgcgagaattggatgtccgttataggaacagcgaggaactaagaaggcattgccgcaagttgataggaaccattccaatagtcagagcctgatttacccaagggctattgtttgaattgggatttcactgtatccatacatgattctcagttgtcaagcatgaacatcgcaggatatatctaacaccctgtacataaactgtgaaccttgatggaaaaatatttacgaaggttttataagatattcattctcaaacacctaaggtagcattacagatagttagatcttcatagtttttcttaattaccatgaattatgttttaagtattaacctttccatgtcacaggagagcaatttatttttcggataagcgatgaaatgtatgctactcaactgcgcaagtgtaaacctgcctaactgttgctactgacaacagtccggccagtgccatcttaagcagctgtgaacaaagtgttccttcacattgcactcgtctagatcaacagagtatctaagggtgggcgctcagtctgaccgaactgaaccgatcggttcttcaggttttagcagatttcggttacctaaaactaggaaccgattggttccaaaagtttccaagactgagtagcttcgtgcattctatgctgctcacacttgcttgcttgtatacgaggaattatgtctcattggaaggtgacattgagggcgggcactgtacatcccagcatgccctgctgcccacctactgcatcctgacgacggtccgtgtgcgggatggctcgagcactgcattcttggaagattcatggcttccggtggggccgctctgcgacgttctcccggcgctctacagccatgcggtcacttcgggcgccacggtgccgcgatgttctacaagggggcgtcgaccgcttcctacgaaacagggccaatagagtggctgcggcggagaaggtgaaactgcagttggttgttgggcctaaaccaaacagaagggatggacggttcacctctataaagttacattttcgcatatccgttatacccatgctcaacaactacatcccaggtatatcccgtacaagacagtaacttgacccctactcaagatgtcgctttcaaagtgagattacatttctaatcctttccaagatcttttattacaaaagtgacccctaataatgtggttccaggactgtcctgattccttccttccctactcattagcttcgtcggtactaagaacgcctccgcatgctctccaccttcattggttgaaatcagctaacctcgggttttgttcatgggacctccccgaggtaagtcgtcgggagttccgtggggacttcaacttcggaaatcttcaa

SEQ ID NO: 20535 - DNA, 359 bp, Setaria italica
  Peptide Sequence Number=SeqID_86509
ctgctttcttggcagcactgactctggcttacatgtaaagagagaataggcggtggtgagcggcagatggtggcacgggcacggaggtgccgtgggctgctggatctggaaggtgggtgtgggtgcgggcgcggggcaagagaccactgacgagcagaaggactcgcagcagaatgattgaggcgagaggacatgagcatgcttgtgtcgtcctcacgaatcatggcaacaaagaggcaattctggggcaatcattccaaatcatggcaatctctccccatcgacagcaagatctataaacagatccagatacgcacgttcttctcttgggttatccgagatctatccgcttcctctta

SEQ ID NO: 20536 - DNA, 1057 bp, Setaria italica
  misc_feature (995)..(1057): n is a, c, g, or t
  Peptide Sequence Number=SeqID_86510
tccttccttgggttgggagggtagaaaggatcttgtccactgctggtgtattttgttgagacagaaggttgatgaaagctattgctgtgtgcagtatattgaaaatcatgttgaccttttggatttccttgttgtttgctacaagaacttggaaattgcgttgaactgtgggaacatgttacgagaatgcataaaatatcctacacttgcaaaatatatactggagtcaagtagcttcgagttgtttttccagtacgttgaattgccaaactttgatattgcttctgatgctctgaacacattcaaggatttgctaaccaaacatgaagatgcagtctctgaatttctgagctcccattatgaacagttttttggactctacacaaggcttttatcttcaactaattatgtgacaagaagacaatcagtgaagtttctttcggaatttctgttggaggccccaaatgctcaaataatgaagcggtacattttggatgttcattacttaaacatcatgattggtctgctgaaggattcaagcaaaaatatcaggatttgtgccttccacatttttaaggtatttgttgccaatccaaacaagcctcgtgagattgttcgagttttggttgacaatcacagagaattgttgaagctactccacaatctccccacaagcaaaggcgaagatgaacaacttgatgaggagagagatttaattattaaacaaatcgagaagcttgtgcgcttatcagtataaaccctcaagaatatccttgggatcaggacaaggcaacccctttctcccgttaatattttgaagacatcccgtgtaatatgctgccctgtatagaggttgtttttatagggaagaaatttggccacgaatttcattctacgcaagaatacttggcattcctatctgaatttgtggacatgatacattggtaaatggaaaatcgcaacagattccatgtctggaataatttgcaataacnnnnnnnnnnnnnnnnnnnnnnnnnnnnnnnnnnnnnnnnnnnnnnnnnnnnnnnnnnnnnnn

SEQ ID NO: 20537 - DNA, 545 bp, Setaria italica
  Peptide Sequence Number=SeqID_86511
accctccatctggtgctccgtctgaggggtgggatgcagatattcgtgaagacattgaccggcaagaccatcactttggaggttgagagctccgacaccattgacaatgtgaaggccaagatccaggacaaggagggcattcccccggaccagcagcgtctaatctttgctggcaagcagctggaggatggccgcacccttgcggattataacatccagaaggagtccaccctccacctggtactccgcctccgcggtggtcagtaaagccatctgtcattgaagctgctgctgtacttgtccggtctctgccatgaagggtgtcatctttgaagttatcgtgtggcttgtgttgaaactgtgtttggttttcatgaactggttgtccccctgtgtgttcacctgaaacagttgttgcggcgcaacagtatggtttaagcatgaataaatgtgacttgaatctgtgctcaaattaatgtgcatctattctgcttttcaattatgccagcgagcatatattgactgagataacaaaaaaaaaaaaa

SEQ ID NO: 20538 - DNA, 794 bp, Setaria italica
  misc_feature (781)..(794): n is a, c, g, or t
  Peptide Sequence Number=SeqID_86512
ttgaggtggagtcttctgacaccatcgacaacgtcaaggccaagatccaggacaaggagggcatcccccggaccagcagcgtcttatctttgccggcaagcagctggaggatggccgcacccttgcggattacaatatccagaaggagagcaccctccatctggtgctccgtctgaggggtgggatgcagatattcgtgaagactttgaccggcaagaccatcactttggaggttgagagctccgacaccattgacaatgtgaaggccaagatccaggacaaggagggtatccccccggaccagcagcgtctgatcttcgccggcaagcaactggaggatggccgcaccctggcggactacaatatccagaaggagtccaccctccacctggtgctccgcctccgtggtggtcagtaagcccatcggtcatggatgcttctactgtacctgggtcgtctggtctctgcctgtgtcacctttgaagtacctgtgtcgggattgtgtttggtcatgaactgcagtttgtctttgatgttcttttgtctggtcttatgaactggttgtatctgtatgtttactgtaaactgttgttgcggtgcagcagtatggcatccgaatgaataaatgatgtttggacttaaatctaaactctaaaaaatttcggttatgccagttctatattgcctgagatcagaatgtttagcttttgagttctgtttggcttgtggccgactcctgtttcttacttgaggcgtaactctgttctggacaaaaaaaaannnnnnnnnnnnnn

SEQ ID NO: 20539 - DNA, 278 bp, Setaria italica
  Peptide Sequence Number=SeqID_86513
cccaagactgcttccttgttgcatgccggcggccatgcaggacaccactgcaccaccagcacatgaacagaatcctgcatccgaccaacgaccgcgcccacatctctcgatcgacatcccggcatcaaacctgacaccaacgccgacagaaggcgacatcaccccaacccctaccaggttcttgcagcaccagaagggggggaatccccatcacgcctgtttcttcttcctccagcacaaaaggcgcgcagaagccgctgcgctcgccgtccttcatg

SEQ ID NO: 20540 - DNA, 517 bp, Setaria italica
  Peptide Sequence Number=SeqID_86514
tttgcagtagaagcatcctcatcaatcttgactaatggattattgaaaggatcatcgtatgttcggagctttgcagtccctcgttggcccgattttaactgtccacgccttactagatcagcaacagaacctctattgtcacgctctcgacttcttatgatgacttgtcttgcaacagcagccaaaactgcaatgccaagacagaaaccagcaacaaaattcggaccaatgtttctctggatcgaagcaacagcaggaggcacggaggcgacgagcgccttcagatctcccaccctcctctccagagccaccttccgctccccgcccgcaacgccgctcgtgtcgcccgaagccgtagccctaatcgctcggggccacgtcgccctcccgcggaacggccggggcgggaggaggaggcggaaagggagggagatggctatggaggcgggcgccattgtcgccctcgcatggatggagaggctaaccaaggtcaggactcacaggaagggttacgaca

SEQ ID NO: 20541 - DNA, 1084 bp, Setaria italica
  Peptide Sequence Number=SeqID_86515
gttttttttttttttttttttgtttaaaaagtagagaaccttccaactctacatttctaagcttgtgaggatgacaaacaggttgcatagcttacatctcaaattcttccgccacaaaaaaaatctcaatttacaagacatcaagtggctttccatgttaactgcttactatgtaagccggtgagcccactgctccaaaacatctatatctacagctaaaagctaaaagctgaaaacactatccaacaaagccaaagagctggagtacacagattttattgcccttccagcctgtttgactgtaaactttcatcacagctatgtttaccaggctcgatatcttggttctctagctctgagccaaactctgagctctgaagattcccaaatggtttgccagataacctcagtggtctctcattatgctgcatactcgaatttgaagggagtttggtaacatcatttgaagcctctagccttgcctgcaaagcttcatgctcagccttaacacgggatgggacgccatctttttgataaacattctgtttggctgtctcctcatctacttcacttgaagcagcagcgaaagggtggtttgcaggaatccatctaactgtatccgggtcaacatgtggtggcagggaatcaccttccctaagaaacacagttggccttttccactgatatgcacgtgatctccttttctgatgcaattcttgctgttctttcgtaagcctaacaggagccaaccggtactccttgccaaacatttgtgcagtagaagcatcctcatcaatcttgactaatggattattgaaaggatcatcgtatgttcggagctttgcactgcagcaaaggagttacttcagtcaggattattgcacgattcaaaagaagttcttagacaactgcacagaaggttaaagagtaagcataccaaagcttttctttattgtttatattgtaattgaaccctgtagttattttctgaaaatggattcccatatccatgccagtaaacagagaacaggtaaagagtatggtgaggtttttgcaagccatgacatggaacaagttactaggg

SEQ ID NO: 20542 - DNA, 236 bp, Setaria italica
  Peptide Sequence Number=SeqID_86516
accattttccccacaagcttctcaacctcctcatctgaaaggtacattagtagccagtttgagaatatcagatcaaaagagttgtcttcaatcttcaagttgggagatgttacatcagcacacatgaaggttatgttcttgtgatgtccatttatgctttcattctcagggcgctcctccttgtcgaggtcggcggcgcgggagtcgagcatcatggactcgacggtgagggactt

SEQ ID NO: 20543 - DNA, 339 bp, Setaria italica
  Peptide Sequence Number=SeqID_86517
gaatcaccggtctagaagcagaagccacagcaacacccattcttattcggaagagccctccggtgccaggctgaatcacttggtggcaatgaacagccccacctctgctcaccggcagagctccgcttcagcttcgcgttccagccgttcacaatgtcgtcatagtcctcctgggtgaagtctgccacgaaagcgtctttgttcttctcgacttcagctagctccctccgtagaacactcaggaactgaaacatagcatatgaaaaatgagtaaaactattgatgtcatagtgttctctcaatttttattttaaaaatcaaagatactcaacccctact

SEQ ID NO: 20544 - DNA, 770 bp, Setaria italica
  Peptide Sequence Number=SeqID_86518
cacccaggaggactatgacgacattgtgaacggctggaacgaaagcgtctttgttcttctcgacttcagctagctccctccgtagaacactcaggaactgttcagtgcgatcttctgcaatgacatcatgaaaaccagcaccctcgagcatctttccataagccttcacatcgtgaaggtcataacctctctgcttaatgtatgcagcaaattcttcagatggcttcccaggattcttacagtaatcactgattaggactttgccaccgggtttcagccatttgaagaagcttctgaacaaagcaggtttgtcttgtatgtgaaggatggtgtcacggctgtagataacgtcaaaactattttctgggtaatcctttgtggtgcaatcagcaacttcaaactcaacagagcactcctccaattccacatccaacatcaagtacttctggccaggtttaagatccagcatatccacaaattccttagtagtttcaactccaccagtgctcacataaccttcaccaaagatacgctcataacgtaggattccattagttttgtattgcacgttgtccaggaacctttgaaaatctttgtcttctgttgattttaccttttcccataaccaacatatctggttttgatttttcttgttttttacataagccccgatacacttataagtcactagagaaagttcaaaagaatctccattcttatcatacgaatggccctctttaaataaaccttaaaagttaaaaattaaaaaa

SEQ ID NO: 20545 - DNA, 1537 bp, Setaria italica
  Peptide Sequence Number=SeqID_86519
cccagccccgcccccctcccaagccccacgagagggacgaatcttccgaatctctcggcggcgatggcgctctccgaccgctcccgcgagtcgctcctcccgagcttcctctacgcctcctcggcgcgctccttcgccgcctcctcccccgcgcgctccttcgccgcctccgccccggcgccggccgcggctgctggagctggcggcggcggcgcgccgttctcgatccaggcgcccaacgagaagatcgagctctactcgccggcgttctacgccgcctgcaccgccggagggatcgccagttgcgggctcacccacatggccgtcacgccgctcgacctcgtcaagtgcaacatgcagatcgatccagcgaaatacaagagcatctcatctggatttggtatcctgttaaaggagcaaggggctaggggctttttcaggggatgggtgcctaccttgcttggttacagtgctcagggggcttgcaagtttggcttctatgagttcttcaagaagtactactcagatattgcagggcctgagtatgcccacaagtacaagactctaatctacctcgcaggttctgcttctgctgaggtaattgctgatgtggctctctgccccttcgaagctgtgaaggtacgtgtgcagacgcagcctggatttgctcgtgggttgagtgatgggctccccaaatttgtccggtctgagggtgctctcgggctctacaagggaattgttcctctctggggtcgtcagattccttataccatgatgaagtttgcttcctttgagaccattgttgagcttatctacaagcatgctgtgcctgttcccaagtctgagtgcagcaagacgacccagttgggtatcagctttgctggtggctacattgctggtgtcttctgtgctattgtttctcacccggctgacaaccttgtgtctttcctaaacaatgccaagggtgctacagtgggtgatgctgttaagaagattggtctcttgggtcttttcaccagaggacttcctcttcgtattgtcatgatcggtacccttactggtgctcagtggggaatttatgatgctttcaaagtcatggttggactcccaacaactggtggtgttactcctgccccagcagaggctgaatcgaaagccagcgcttgatttttcagtactccctgagatcgtatttggtggatggaattgtatcagtcactcaagagctagtcccaaatcttttgtttttttcttaacggatgatttgtccgtcatccttttgatgagaggaactcattaaacaggtgaaataggtcttttttgccccgggaaaagtttatgctcgatgcataataatttgtaggacagcaaggctgttagagcgaagattttgtttacctcctgtaccgaggaatgctcacaagtcgcatcatggagttttctggaagcatgcacctaatttgatgctcattctgccatatcatggtagagtaatcggttacccttgtttcaactacaactcttcgtttgctcctaa

SEQ ID NO: 20546 - DNA, 519 bp, Setaria italica
  Peptide Sequence Number=SeqID_86520
ggaaggctttgtgcagttgtctagccttagatggtatggatcttcgttatctttttcctatattttcgttctttgaactttgcatcgcagaaggatagatatgaaccaaaagcatgggttaacttgtcagcataaaatcgaggttctctgtttgcagtgttgtgttggatgaagtggacattttatttggtgaagaaggttttgagcaagtgcttcatcaattgattactgttgcaccagtgacaacacaatatcttttcgtgactgcgacacttcctcttgacatctataacaaggttgttgaaacatttcctgactgtgaggttatcatgggacctggtgtgcaccgaacaagctctcgccttgaagaggtggggcatttctcactttcctcattctttttacctttcattcattctgtgacatatgctttctgaagagcctctagggaattcatcttggatgtcagattagttattggccacttcatatatacattttgcagattgtttgatacga

SEQ ID NO: 20547 - DNA, 892 bp, Setaria italica
  Peptide Sequence Number=SeqID_86521
tacttatagcaacacctggccgtccttgtatctgcttcaggaaggctttgtgcagttgtctagccttagatgtgttgtgttggatgaagtggacattttatttggtgaagaaggttttgagcaagtgcttcatcaattgattactgttgcaccagtgacaacacaatatcttttcgtgactgcgacacttcctcttgacatctataacaaggttgttgaaacatttcctgactgtgaggttatcatgggacctggtgtgcaccgaacaagctctcgccttgaagagatccttgtggactgcagtggagatgacaatgaagaaaagaatccagaaacagccttttcgaacaagaaatcggcgcttgtaaagatactcgaggaatctcctgttcgcaaaacaattattttctgcaacaagatcgagacatgcagaaaggttgagaatgtgttgaggcggcttgacaggaaagcctcgcaaatcaaagttctccccttccatgccgcgttggatcaggcccagcgcatcgcgaacatcaaagagttcctgaacaaacaaacggcggactccatgttccttgtgtgcacggatagggcgtcgcgaggcatcgactttgcgaacgtgaaccacgtggtgctcttcgactacccccgcgatccaagtgagtacgtgcgccgtgttgggcggacggcccgcggcgcgtccggcaacggcaaggcgttcgtgttcgcggtgggcaagcaggtgtccctggccaggagggtgatggagaggaacatgaaggggcacccgctgcacgacgtgccaacagaaattactttctgaaatagtgcaatccttacgcctgaacatgctgtgcccatagaaaccacaatggtttgtgatgtagcatat

SEQ ID NO: 20548 - DNA, 275 bp, Setaria italica
  Peptide Sequence Number=SeqID_86522
tagactagtaataataatgaaaacctacatcacaacactttgaactacactttttgtccacaaattcacagaccaacaatctccatattgagtattggcaattgatgagattcaaacacaaagaaacaggacaggttacactcttgttccacggctttagttccgctgctgtttgattgccggaggacaaagctgaccacatgactgcaaagacgggcatcatcactatcttaatgctattcacaggtatcccattgttgccgcaataggagagt

SEQ ID NO: 20549 - DNA, 399 bp, Setaria italica
  misc_feature (52)..(52): n is a, c, g, or t
  Peptide Sequence Number=SeqID_86523
atgtaatacattcccaattaagtcagcataagaaattcaagatacagcatcnggttacagtcagattcctctatacgccgcaactgcaacagcatgccctgtggaggagccgggcgtgacatgttccagcaacaaaacagcagaatttccatcaatccacctgcatctattaccgttgaagctgaagcaccactagcacgcctgcctcccttggttcttgcgggcaacactcccctggtctgagaattgaacggattgccggccttgtcagcttacagaagagagctttctgcttctatatgcacaattaggatgcgtgcccttcttacttacctgtctcaaatgcaaaaatgaaacaacactacaacaaaccggccatagaagcatcagatctgagaa

SEQ ID NO: 20550 - DNA, 1072 bp, Setaria italica
  Peptide Sequence Number=SeqID_86524
ttttttttttttttttttggttcgtgccatggaaagaggacccaaagctcacttcattgacctctcaacgatcacttacaaaaattgcctggtactctagtactgtaatcttactgctacagccacaaggtattgctaagctgctaagctgcagattgaaagaggttgcttggctgattgattattctggtaataatcttactgctacacatgctgctgtgctgtgttgaccgcagctggcatctctgctctgaacgagtcctacctacgtacagcaactacagcaacctttccttctccgatcggacggtcacccgccggtgccagccgggcacggccaacgccagcgacgagatcagacgaccttgacctggatgagcttggccgccggcgcgtcgtcctcccgcgcggcggcgacgtcctcgagcatctgcacgacggaccgcatggacggccgcatcgccggcgtccggctggtgcacagcaccgccacgcgcagtacccgcaccgcctcctcccgggcccaaccctccgtcacccgcgcgtccaccagagacatgggcttctcccggctctccagccgccgcgacacccactccaccaggtcgccgccgccctcctccaccggcaccatcgccggccgccccgtcaccagctccagcagcaccacgccgaagctgtacacgtcgctcttctccgtcaccttccacgtgtacgcgtactccggcgccatgtacccgagcgtgccagcgacgacgccggccgacgagtccactctagcggacgcggcggtgaggatcttggcgaggccgaagtctgcgaggcggggcttgaaggcctcgtcgaggaggatgttgctggacttgacgtcgcgatggaggatggggcggtcgcaaccgtggtggaggtactcgagccccctcgccgcgcccaccgccacgtcgtgccgctccgcccacccgagcccgccgcccagcttcctcccctccggcccgtgcagccgctcgtgcaggctgcccctggggagtgctcgtacaccagcaggctcgcgccgccgtcctcgctcgtgatg

SEQ ID NO: 20551 - DNA, 556 bp, Setaria italica
  Peptide Sequence Number=SeqID_86525
tttgggatatccttccgctacagcaacattcattagccactcataacattgctaaaatcaggagttattatattgcttatacagggtcggcattcactagtagaacatcgaaagttcaagatacatgaagtttaccgagtctgcagcagcctgcaatgtaacgtggtcaccccactctccactctttgacattctttttgagatattccctgtaatccatagggacatatcccgcgtaaaactcaggatgcaattcaagctgccaagagagtacagggggctcagagggaatacatggaaatcccaacattgaagaatgacagttaacaagtgaatgtgtaaacatttgcccatgaaatgcatgtcaggggtggctgaaatgcaactaaattgcccatgacagttaacaagtcattttcacaataccaacctgcttcagcacttgctggcgaacaaatctgtgatgttcaggagtgcggtaaaattgatctgacaatgctcgaaactgacaattcccatctccgttaaccttcagctcaaccagccatacagcacc

SEQ ID NO: 20552 - DNA, 795 bp, Setaria italica
  misc_feature (3)..(3): n is a, c, g, or t
  Peptide Sequence Number=SeqID_86526
ttntccctaacatgacagtcagtgctggagatccaaccaagtaactacagtctgatctagtatccacaaagaacagaagaatgaatgaatgaatgtctgttgtgctaatcaaccctatgtctgtacagatactggtggtagtagtatgtatgtatgtatgtatctacatgccctatcgggaaaccaccccatcgatccatcgtcgtcagtcaagaccacaaaatccgacgagggaaaaccaacgtatgatggttagctgctccatataatcttcttcctggcaactcttctatatatgctgctagaagggccaccaactcctcctcttcttctccgtaatgggcaactcttctccttccgggtatatcgaattgtagtgcacctcagcccaaaaactcaagcatatcactcttcttgacttctcgacaacaggaaggatttcaatgtagcatgtatctttaaatgatgtcaggatgaaaaccttcacaccatacgagtctgcagcagcctgcaatgtaacgtggtcaccccactctccactctttgacatctttttgagatattccctgtaatccatagggacatatcccgcgtaaaactcaggatgcaattcaagctgcttcagcacttgctggcgaacaaatctgtgatgttcaggagtgcggtaaaattgatctgacaatgctcgaaactgacaattcccatctccgttaaccttcagctcaaccaagccatacagcaccaatctgtcaaggagtctttgatgatctgagtcaaacagcaaactatcatagt

SEQ ID NO: 20553 - DNA, 1541 bp, Setaria italica
  Peptide Sequence Number=SeqID_86527
tagttcttaaagaaaggttagattacatagttatacagagtgggaccggggttattacaaaagtctttcggcttacaatacaacaataatttatgaacgaattgagtatataccctacatagtcatctacccccactactaacaaaatatctagcaccttgcgcaatccctccatcccttcttccattatacaagcattatgaaccaacagaactattaatacaaaagaatgagtacagttcgaccatctggtatatgccgcctatttacaacaagctcttcgccacgatgaaacaaaaagatgtctttatgttcttgtcagaactcaggttcggatcattcttcctaaaccttttcttcaccggatggtgcatcatcaaggtgaatctccacagggaacagatttatggccccaggattgaaagagaatccccgtgacaggacaaggcgccatgcatatgggataaagaattcctcagggtggctttcttgctcatatgtaaaccttaactgggtaaacatcttcatcccttctccacgccatgaacgacagtttttgttgatgacttcaagcaccttatccacagaccattccccatctaattgttgcatgtccattcggctattgaagaaatccaatactgtgtatatgttctcaagcagttcgttgaaacgtggatggttcttaaatggctcaaaaacctcctgacgatgcaatacagcatacacaacctcaggattccgaggcaatgcatatgtaaggattgcattaatgatttccagaacaattcttaagaaatctgtatatatgtgaagctccgtagacatatcatctgcgatgttgtctgcttccatctgatcggatataactttgtgagacttgtcattttttaactcagctagtttggcatacttgcgagaaagcatgtcaaagaggctaaccagcctttgtgatgcataggcactcaacctatgcacatgaggagccatatttgctaatattgcaagacagtttgtgtgaaggtagacatctcttagcttggagaggttgtacttgatggtccggattagtattacaaccatcaaagatcccaaagacgtttggtgcataaggcgctcatggtaccaaggaacagcaggaagcaccaatttgtgcacactagcattgaaggttgaatcttgactgaggatcaggagaataatcaacagcatgtaaatctgatttgaagtcttccttgatgcattgtagaacaataatacaatactagaacgaaataagttaagtaactaagaactaatgtttttaatacatcaaacagttagacaaaccagtgtgaattgaagttggaaatgtgaagctttgacatgcatgaatgaactaagataccactctatagtctaaacaggaaatgtctcagctaaagattaaaaagccatgacatgcatgttgctaaagatctatctgaaaaattttgctaaaaaaaaagatcgatctgaaaattgtgaatcatttgttgttcactagtgcgacttgtagttct

SEQ ID NO: 20554 - DNA, 1414 bp, Setaria italica
  Peptide Sequence Number=SeqID_86528
tggggctaaaacagagttgtacccagatgacagttgtactatcgtggctccaggaagacccttgccttgcggctggtttttataagggatcttgcttttgggcccatctcgaagcatgtccaaatcttcaaggctcgactttaaccagttcaaagaagctaacgatcgcgccagttccaaatgatctggtttcggtatgtgacttggcagtctcttgaaacagcttttactttttttggtaactctaagccacataaccccaatgtaaacacacggaaataatttggtattctaattgactaagaacagaagttaaagctttcttcgttggtaaattcatcctatacaccacggcaacttatgtatcgagttcgaagctgtccacaatggaattactcaactacagtaacagcacgaaggatttgttatagccttgagtcttcagatgaatcctacaggatgcagctaaagaggcctcaatcttcaggacaccaaaatatcctccaaatggaaatttacatgcgcacagcaacagcttagttacgcacataaaatccagaaagaactcgcttatttatactttctgaactttacaactgtgctccttcccattgccagctttgccggaatctatctcctgtccagtgctctcgtagtattcgttgagtgcccactggtacttggactggtccagcccgaaccatctcgaaatgtgctcatccaagcttgcgtgggcttcttgcacgcgtgcaacagcatcccagaacaatgcgagcaccgatccgtccgatgctggtgacgccttctcaaactgcgatggtggtacctgtactggtggcggggggtgggaggagagctccggggcctgcagcggcgttgagaccaccttgaccagcggtgttggcacctggaccggcggcggccgggagagcttctctgcgggaagcagcggagggactgtcttgaccggcagcagagtggggaccggatcaacaggccggagcgcaggggccctctgcgcgggttccagcggggtggacggcggcgattcatgcgagtactcggggcggggagtcctaggggcgggaggcagcgtggggaccgaatcagcaggcgggggcggaggggccctctcagccggcaccggcggggtggacggcggcgattcatgcgagttctccgcggcggcgactcgtaagggcgggaagtagcggagagaccgtcctaaccagcggcggcgtggggaccgaatcaacaggcagcggcggaggggccctctgagacggcgccggcggggtggacggcggcgattcaggagagtcctcggcgcggggactcgaagggcgtgaagcagcggggagaccgtcctgaccagcggcggcgtggggacccaatcaacaggcggggccgaagg

SEQ ID NO: 20555 - DNA, 383 bp, Setaria italica
  Peptide Sequence Number=SeqID_86529
gatctgggtcccgcggcggcggctgcgcgaggcgcggcttcttggcgacgccggggtcggggcccggccgcggatctgcgggaggcggcggaggcctccatgggggccgcggaggcggaggcgcgcatggggggggggagcttagggtttggggcgcataggcataggggagggagcagctagggtttgcgaggcggctgaggcaatcgaagccgagccccggaacccgggttgggagaccgccgagtagggtttgggaatcgggaggaatggatttgggcagcgagggagcgaggaggaggaagaggcggggaggtggctcggacagtgaacgcagcagcaggtttgatttgatttcgccggaggagcgtttcgggtcgagg

SEQ ID NO: 20556 - DNA, 251 bp, Setaria italica
  Peptide Sequence Number=SeqID_86530
gcgtcaaccgtctgaacggcttgcgctcactgcactagcagcatggcctgctgcggcggcgccatgtccgccaggccgcggggcgtccgggaggagacgctgctccgcgtcccgggcgcgtccgtgcacctcatggccggctccgacggccccgtcgagctcgcgcgcggggatctctccgtcgtccgcatcgccaaggacggcgtggccgtggccaccgcggtgcgcgtcggccacgcctgggctggccg

SEQ ID NO: 20557 - DNA, 433 bp, Setaria italica
  Peptide Sequence Number=SeqID_86531
ttttaactggaaaatgatcgcaatccgagttaccagtgacaagtattttttcagttaccatcatcttggtagcatgtgactgtgataggccatctccgctctaactttttcagttttgacatcaacagctgtgtttcagaatatacacaatgatatccagagcagtaaagtgatggtaacaggtttcatcttgatccttgacgcatactcaaaccaccttgattcctaacgttccttttgacgaaagcgaacgaccacacggtgattcctgccaagtcacgcagacatttccaatgacctgctttaaccctacgaagctcctaacagttgtggtgatgtgagactgagggatacacacatgcacactcctagcctcttcttttttcacttcttttttattcgtacccccaaagccccaacgccccccaaacca

SEQ ID NO: 20558 - DNA, 206 bp, Setaria italica
  Peptide Sequence Number=SeqID_86532
ttggggaatggcgaagcatggggataattagccattgccatcttctccttcaagcgataattgagaagggctcgagcgatcctgatctgctcctgctcatcattgttttccggctcattggatgaattagcttcctcacgtaccactgttgcagaaagatgaaatagtgtgagaaggtgccattgtataaatagagaacgacattt

SEQ ID NO: 20559 - DNA, 651 bp, Setaria italica
  Peptide Sequence Number=SeqID_86533
ggtgttcctaccacaatgcagcttgcccagacagacctaatccgaacccaagacttacaagaactaaacagaacggaatgtgcacgggaggcagctaattacaaaatctgggagaagggctcgagcgatcctgatctgctcctgctcatcattgttttccggctcattggatgaattagcttcctcacgtaccactgttgcagaaagatgaaatagtgtgagaaggtgccattgtataaatagagaacgacatttcaaaatgtcgcagaccatattttactgctagtgatgggtgtccttgggaccaaacagaaacaggcataatgtacaggatatactcgctccatttcagctacctcatactgctaacctttttgcactaacatgacttccaagtatcaaaggaagacacaccaagtcatgctagctgtgaacaaagggctccaaatgaatgtcagaacatatgctccaaaagtctaaatgaatgagaaatagcacttctagagataacatatcacccagcttacatataaaatacaaaactacaaagattcgatcacttgccttaataaaatataattagttgaaaatttgctcaagatttctcatgataagttactaaaagctggagaaaatgatgcctcgagatta

SEQ ID NO: 20560 - DNA, 1857 bp, Setaria italica
  misc_feature (1)..(64): n is a, c, g, or t
  Peptide Sequence Number=SeqID_86534
nnnnnnnnnnnnnnnnnnnnnnnnnnnnnnnnnnnnnnnnnnnnnnnnnnnnnnnnnnnnnnnnaaaaaaagtttacggcagcagaccgacaacgataacagaatttagatgttactgccgcctcataatccttcttccctagaggcacctcacaatccacctcatcattggggtaaaacgcagaccaactgcatatccagggaagtataaccgtctccaaccaaacaccgggcaaaccacctacccaccactacatgtttttttcccgggttttttctcaacagaaaaactaggtgttcctaccacaatgcagcttgcccagacagacctaatccgaacccaagacttacaagaactaaacagaacggaatgtgcacgggaggcagctaattacaaaatctgggagaagatggcgatgcgcattttcgatgtcaattgatctccagctgcctgatggctgcctccgccactgcttgagcctcggcctcgtgcacagcttccgccttgctgtcgtcaccatccgcagcccttgattgccttgtcggggtaacctctgatgatgtagtgcattccacggcggtggtattgccagcagcagaacatgggacttcactggtaactgccgctgaagcttccttggcttgagcaggagcctcgatcttaaccgaaggcctgattgctggaattggagctgccagtgattcctttggtgcttgggtttgcacatccttcaccttaattgggatcacacctgacagcgatcccacaagcggccggcgttgtgcatcctttacctgaactggaaccacaggagacactgatcccttcattggttggtattgtacatcctttacctgcacagggatcacaggtttcaccggctccctcctggattgctgttgcacatcctttagctgaacagacatcacaggtttcggcccctgaactggagcagagggtccgaacattggggatgctggcctgatgcgaactggtgatgccatccgaatcggtggtggatggctcatgagaggaggaagctgctgttgcgtgcgagcagctggaggtgggagaggtggagcagagaacacaggaacagcagtcctgattgtgactgaaggagccatgctatggcaaggcatgcggtagtgcccaactggcacatagggggctgcctctgccgctggaaatcttgactttggattaaggctttcgagggtccgtaaagctgtttgagatactccatcagtagatgccggtgactctggtctgcatcttgaatttgatttagggcggaacagagggaggatctttgagtagctggactgagaagattggccaaaagaaggcttcctctctggctgcattggaaatttcttggggaatggcgaagcatggggataattagccattgccatcttctccttcaagcgataattgagaagggctcgagcgatcctgatctgctcctgctcatcattgttttccggctcattggatgaattagcttcctcacgtaccaattgtttcagtgcagaccatgctgctgaagcagcattttttcagcctgtttcttattcttagcaggatcacctgtaaacgtgataccagctagctctactgtgcatgtgaaaaccggcaggtggccaagaccagatcgctcggttgtatatgatggcaacggcgctccaactctctgagctacttcctgcagaaggttcttataaacccctgtttcatccaggatgcgggcggcgagcgagtaggacgggccgcgccgcgcgagcgcggcgagcgcgacctccgcggcggcgtgctccgcctggcggagcgtggtgaagaacccggggctctcg

SEQ ID NO: 20561 - DNA, 698 bp, Setaria italica
  Peptide Sequence Number=SeqID_86535
cgctatatcgccgcttctgccaggctaccgtctacggcggcaccgtccaacgacgcgagagtgtggaggagaaaatctcaagacatgctcgagacggaactacaacagcacgagagatcattgtccaatttaatgctgatgttgctgatggaatgccatggaagttcattcctacacagagagaggtcagggttaaacctggtgaaagtgctctggcgttttatactgctgaaaatcgcagttcagctccaattactggtgtatccacatacaatgttgctccaatgaaggctgccatttactttaataagatacaatgcttttgctttgaggagcaaacacttcttcccggggaacagatagacatgccagtattcttctacatcgatcctgagttcgagacagaccccaaaatggagggggtgaacaacatagttctttcctacacgttctttaaggtgaacgatagttagaaaaacggagcaacagcgttcgttctattagagacacttcatccaatccgtttggtttgaaatagcgcatctcatgtcacactaagagaagagcttgtttatctgtgtagttagctcgcatttgttgtggaaaaagtttgcaaataatctgtaacagtaacagtgtacccgatgcaaccgaaaagaaggttcattctgctatatatcaaggatcctgacaaaaaa

SEQ ID NO: 20562 - DNA, 548 bp, Setaria italica
  Peptide Sequence Number=SeqID_86536
ccgtttttagttcgcgcaccgaaagaaaaaacagagcaaagagaacaacgcggcggcgacaccaccgccagccgcctcaccgccgcgatggcgatgcgtcagctcgccaggctccagcagcacctctccccttctctcctctgccggcacaccccgcggcacgcgtggcctcccaccgccgacgcatccttcctctgccgcgggcttgcctcgtcgtcgtcctccgcggccgccgccgcggcgggtcgggagaagagctcgagacggacactggggtacctgctcggcgtggcggtcgctatggtcggcgcttcctatgccgccgttccgctatatcgccgcttctgccaggctaccggctacggcggcaccgtccaacgacgcgagagtgtggaggagaaaatctcaagacatgctcgagacggaactacaacagcacgagagatcattgtccaatttaatgctgatgttgctgatggattggtaattgtcttattggtaagtttctattccttactactagtagtagttaggttcttaggtttaaa

SEQ ID NO: 20563 - DNA, 309 bp, Setaria italica
  Peptide Sequence Number=SeqID_86537
ttttttttttatttttttttatatgaatccgatatggttcaatctttatataattctaatgcaaactgtctaggtcacatatgatattcataaaattgatatttaccgtacgtccttgttatcgagtgaaggaatttagagatattatagtgcacattgcatatatcactgatgcaacggcatcgccgtatgaatacaatacatcagatattcagatagagataagagttcgatatttatattatgtatataaacggagctatatatctgttaagggttgttagtactattgtttcgtattctattcta

SEQ ID NO: 20564 - DNA, 682 bp, Setaria italica
  Peptide Sequence Number=SeqID_86538
ttagaccggtagaaagttagaaagaagacctacgaagactagaaacaaggttagacaagttacccgaacgccgatcgtgtgcccgcctgagaggacgacgaggtcctggagtccgagccctttgctggagaagttggagaggaggacgtcgaaggtggaggtcggcgccgggatgtcgttcagcgcctcctggtcgctcgacaccgtgccgtcgcgacgccccgtctccacctcccacagattcctcttgtactggaacgagacggagtccctggcagcgagcgcgacgatgtcggcgcaggagacgaccccggggcacgcccgctctagctccgccttcacctcgtcgatcacgtcgaacccggccagcgacaggttgggcggcgcgttcttctccgccgtgttggtcggcgagtccaggagcaccgacgcgtcgcagcccctgacgaagcagtcgtggaagaacatgcggaggaacttggcggcgagctcgccgttgccggcgacgcgcccccacaccaccttccgcgcgatgtcctccgcctgcgggcagctcttcttgtagaaccccttcttcagccccgccgcctgcgccgacgccgtgccaacgccgacggcggagaacaccagaagcagcagggccagcatcaagcccgtgcccgtgagcaatcccttcgccatc

SEQ ID NO: 20565 - DNA, 761 bp, Setaria italica
  Peptide Sequence Number=SeqID_86539
aacaaagaaattaacctaacttaagtaaactaaggaaagaattacctacctagtactggaacgagacggagtccctggcagcgagcgcgacgatgtcggcgcaggagacgaccccggggcacgcccgctctagctccgccttcacctcgtcgatcacgtcgaacccggccagcgacaggttgggcggcgcgttcttctccgccgtgttggtcggcgagtccaggagcaccgacgcgtcgcagcccctgacgaagcagtcgtggaagaacatgcggaggaacttggcggcgagctcgccgttgccggcgacgcgccccacaccaccttccgcgcgatgtcctccgcctgcgggcagctcttcttgtagaaccccttcttcagccccgccgcctgcgccgacgccgtgccaacgccgacggcggagaacaccagaagcagcagggccagcatcaagcccgtgcccgtgagcaatcccttcgccatctccttcacctagcttcgatcgaatcgacccctatagctagctactgctgcttttgcaatttcacaagtagtacaagaagtcaaggactgattgctatgtatcaatgatgaaatagctctcttagtcttagctttatgattcttagtactggatactagctgggtatatatagatacagctcgcaccaacaaataaaataaaataaaatcaagagatggagatgtgaagctagctgccgtgtgagtgctggtgcggatcataaatgtgtttgttgcga

SEQ ID NO: 20566 - DNA, 1297 bp, Setaria italica
  Peptide Sequence Number=SeqID_86540
ttggttagggttttgttagggttaggggtttcgttatttgtttcgttctttggggtttgtttcttaaagaagatagagatattatagtgcacattgcatatatcactgatgcaacggcatcgccgtatgaatacaatacatcagatattcagatagagataagagttcgatatttatattatgtatataaaacggagctatatatctgtaagggtgtagacatgttcgatcatcagttgacgacgttgcacttgttcctgatctggccgttggcgccggtgagcacgccgatctgccccatgcgcttgatggagttcttgaaggtgtcgaagaagacgcctgggtcctgcagcttgtcgacgatgttggcggcgcggccgttggtgagcagcgtggcgtcggaggtgaacatgccctggtgcgccttgaggttgacgaagtagtggttgtcgaaggagaggctgctgccggggtccatgggcaccaccgtcgtgttgtcgttcgggtcctgcaggttgcgccggcactgcccctggaggaacttggcgtaggaggggttgagggaggggtcgatgtcgctggggttgttcttgccggtgaagttgaagagcctcgagctgaacaggttgcagttcccgacgccgatcgtgtgcccgcctgagaggacgacgaggtcctggagtccgagccctttgctggagaagttggagaggaggacgtcgaaggtggaggtcggcgccgggatgtcgttcagcgcctcctggtcgctcgacaccgtgccgtcgcgacgccccgtctccacctcccacagattcctcttgtactggaacgagacggagtccctggcagcgagcgcgacgatgtcggcgcaggagacgaccccggggcacgcccgctctagctccgccttcacctcgtcgatcacgtcgaacccggccagcgacaggttgggcggcgcgttcttctccgccgtgttggtcggcgagtccaggagcaccgacgcgtcgcagcccctgacgaagcagtcgtggaagaacatgcggaggaacttggcggcgagctcgccgttgccggcgacgcgcccccacaccaccttccgcgcgatgtcctccgcctgcgggcagctcttcttgtagaaccccttcttcagcccccgccgcctgcgccgacgccgtgccaacgccgacggcggagaaccgtagaccgtacgacgaagaccagaagcagcagggccagcatcaagcccgtgcccgtgagcaatcccttcgccatctccttcacctagcttcgatcgaat

SEQ ID NO: 20567 - DNA, 447 bp, Setaria italica
  Peptide Sequence Number=SeqID_86541
accgttgcaggaggatgaagagcctgcagaggttgtacaacgataacatggacagtggcacggctcagttcgcgatgtactacaaggagtggctcaagtcagggggcagcgagcctccggtcccctctgtgccgttgccttcgatgcccggaaacttcgacgcctgcgagaagcattcggcttcggtgcgcaggagctccatcaatagaaacctgtacaatgctgtttttggtacggcatttgagctggaagatgtcaaagatgcaaagctagacgatgagactgaattggttttggatttggatttggatgtgggattgaatgataattcagtgagcttgaagatggagaagcttgctcatacagagtaaaatggggctccaagaaaagcattaccgctctcagaaagaaggcgctattccagaaacagcacctacacaacggaaa

SEQ ID NO: 20568 - DNA, 565 bp, Setaria italica
  Peptide Sequence Number=SeqID_86542
atcccaaagccacatcagtttgctcctcctgagagcaagaacccttcacaaacgatgattgacttaactctgtcgaatcttccacctcccgacaaacattaaaaccactgtcttcactaatttggttggtcattgcagatgaagaatcaacatttaaaccaccagcagtgtattcaacaggtgttaggccctggaattgagccagtaaaccagatgctctgtatgaatcgactttcttcttcaccgagctgtgccaatgattttttattgcattgtctgtccttcctggtaaaaatttcgtcagttcagcccatttgtttccataagtttgatgagcatggataagcttgatttcctcttcttgtgtccacgcatccttgttgatcccaggattaagatgattatgccacctttcccggcattgctttccaatacgtccaggcagagcttgggcaatggttgaccatttctttggcccaagtttgtttaccatctgaataatgatttcatcttcttctttggaccatggccctttaacaagttcagggttcaaaaccttctgcca

SEQ ID NO: 20569 - DNA, 332 bp, Setaria italica
  Peptide Sequence Number=SeqID_86543
agaggagagggcagcgagagatagagggaggacagggcggcgggagagggagagcattcggaactgggaaggatggaggttggcgcatcacagtgaaagacttgaaagttggtgacactcaggttcttcaggtggattttctcatcctgtgcattggaaggcatagtggaaccccaaatatcccagaatttccagcaaatgggcctgagttgttcaagggcaaaatattgcactcactggactattcttacatggataatgttgctcattttgttaaggggaagcatgtcacgatagttggctctggaaaatcagcatttgacattgctgca

SEQ ID NO: 20570 - DNA, 762 bp, Setaria italica
  Peptide Sequence Number=SeqID_86544
cgctattcattctcaggtcttagcggcagcggagacggttcgttcttcacgtgctcgcctgcgacacacggcttggcgctctgcttataggtatgagatgtaggaggcggccgaggctcggcatggggtggctccggtccgtgctctccccgctcaggaggctctggtgccgcgtcaacgcggtgcagcgcaagaagagagggatctacatcctgtacgacgacgtcaagtcgtgccaatgcgaggacgtgcacgtgctctggtccatcctcgtggagtcccacggcctgccgccgccgaccccgatgccgacgccgccggccctgagcctgaagcggtgacgaggggcggcgggtacggtgctccggctccggaacggcaccccctgaataagcgaaggtcgatgatggatacttcgacatggccatgggaggtgaagtagtagtgcttcttaattctgatgtgcataggatcagtcgatggtagcagtgtgttgccgccggcgtggtgttctactgccggcatgaatcggcgcctctgttggaggccgcgtagacgaagggtggcctgcggtggaacgtagcagctgctgcgccggtggcttgatgagtgtggtgatgggcttcttggagcgcacccctcgttcgtttgacttctcgttttctgcgagacttgcatttggatgcagtctcctttcgttcatctctgatggaatgaatagcaggaagaaatttgaatcatcaactatcatctgaatttggt

SEQ ID NO: 20571 - DNA, 480 bp, Setaria italica
  misc_feature (31)..(31): n is a, c, g, or t
  Peptide Sequence Number=SeqID_86545
agtacttccaaacccctccacctgtcgcctngagatcaaggagaggagcctgcgttcttccgcgcttctggtcgccgtcgccgtcgtgctatacgaccatgtcgacgtcgtcggggtttcccctggcgtaccagggctcggcggcgtcgccggactggctgaacaagggcgacaacgcgtggcagctgacggcggcgactctggtgggtctgcagagcttccctggtctggtggtcctctacggcggcgtggtgaagaagaagtgggccgtcaactcggccttcatggcgctgtacgccttcgccgccgtctggatctgctgggtcacctgggcctacaacatgtccttcggcgacaagctgatccccatctggggcaaggcccggcccgcgctcaaccaggggttcctcatcggccaggccgccctgccggcgacggcgcactaccgcgccggcggcgccaccatcgagacccccgcgt

SEQ ID NO: 20572 - DNA, 924 bp, Setaria italica
  Peptide Sequence Number=SeqID_86546
ttttttttttgaggaggataagttaatgtatattcaccatatgctgtgcaacttgattttgctgtcttactctttacacgctaaccaagtaaccagggtccagggctcgcttccaaactcgttaccaaaaaaatttgacgaacttttggctaaggtttctaacaccagtttgtgaatttccttctcttaatctacactggggaggtagctcttcaagaacatgtctacgagtacaccaaaagcttgatgaaatgtctaaacatctgtaagaattatagatgatacaatcatgacataggccaggaagaagaacatgacaatctggatgaagaacttcgggttgtccctcaaacttgggcccaccactgatctactggcaatccgctgtgagagccgatggaagggcagactctgaatgaaaacaacacctggtcccgtgagagatgctgttagctggttttcacccccaaagactgctcttctaagttggttagggctcttcaattggaagttgatggtagttgtcatagccacaatacaagcagcatcaacagtaataacctcttggggagcaaggattttctgcatgactgatccaccgccgacaagaaaagccatcccctggcccctaagcttttgtttaaggatcatctctgcaccaatctcaatattccgtggtcgtggctcaactgtactggtgactgacacatcattgactgaacacagaaaagcatctgcatggcaaagaagttctccaccaaagtttgctagatctaccggcagtatcctcccaggaaatggtgcagcaatcccgacatatccatcatcggatccagtattgaagaaaacggtgctgcttacgcttttcccaaaaatccactgccacacgcctccatcattttcaggcaagtaattattgtccat

SEQ ID NO: 20573 - DNA, 652 bp, Setaria italica
  Peptide Sequence Number=SeqID_86547
agctcatccgtccgccggtccccatggcgcccaaggttctgatggtcgcggagaagcccagcatcgcgctctccatcgcctccgccctctccggcggccgcatgtccacaaggaagggaagcacagatatccatgagtttgacgggatgtttcagggttcttatgcaaattttaaagtgacatctgtcattggacatgttttaagtgtagatttcccccctgcatatcagaactgggatggaactgatccaatggacctatttgaggcgccagttctgagatctgaatgcaacccaaaggctcatatccgcaggcatctagctcaagaagttcgaggttgcacttatttgatactttggctggactgtgaccgagaaggagaaaacatatgctatgaagttatcgagtgcactgggattcctgaaaatgaggctggcagaagaattttccgtgctagattttcatctgttaccgagaaagacatattgagtgccatggataaccttgttctgccaataaagatgaagcactatcagtggatgctcgccaagaaattgacttgaaggttggagtagcatttactcgatttcagacccgatattttcaaggaaaatatggaaaccttgattcaagagtgatttcgtatggtccg

SEQ ID NO: 20574 - DNA, 358 bp, Setaria italica
  Peptide Sequence Number=SeqID_86548
acctccttcatcgacggtcggctccggggctcgccggcgaggcagttgagcgtcagctgcgccgccctggaaggcctgcttggagttgtactggccctcgaaccgggggtccatcagccgggccagcctccgccggtcggccaggtacggcttggcccagtcggcaaggctcagctgcccgtttggacggttgggatccagcgcccgctgcccggacagcatctccagcatcaccactccgaagccgtacacatcactcttcacatacaaatggccagtagctacatactctggagctgcataaccatatgttcccatcaccctggttgtgatgtgtgagttgcttccggttggtccc

SEQ ID NO: 20575 - DNA, 1694 bp, Setaria italica
  Peptide Sequence Number=SeqID_86549
ccgtgaaccaaatgtgcttgcacttcgaaattcagaagaatctggtcccctgctagatgtgtttctagcaatggagccagatgacggctgcgcctggctaaaactggctgacccaatgttctcatcagcatcacccaatttcacgtcatgcacaccatcttgagaacagataggaagagacccttcttggagaacctcatgatcatcatcgtcatcctctgaaatgtcatcatcatcgatcattaaagcatcatcaatctcaacgagagatgtgtcaagctcttcatcctcagagctactgtgaccatgcgctcgcttcatttctgaatccttctctgaagcagatttttggcgggcagcgttcctggtattaggtccctttgattcatctgagttcggttttactatagctttgccttttcctttggcagtactagtgctttcatcatgagcatcctttttagatgtaccactacttgcagcagatgattttgatcttgttgttggacgccgaccagaatgagctgttgcagctgttaatgatgcaccagctgtggtgccaggaacccctgattcagaattatttccagatggaactataggcttcgaagcaacctcactgcgctgaactctgggccaaaggaagtcttcaacagctgctagactggcaaatgggtcaataagcacaatatttgatgaataatcccgaagtgatttttcaccttgagctcgtgacagacgcaacttgaagggctgagccagagcactaagacctgaggtcagacgggagcctccaataccaatcctgctagactggctaagcacaacggggaaacgttccaacgaagacaatgcactttgtagtttttgaaccaacagtgccatgggagttccatccctttcatgatcaatagaaagggcaacagatatgaaggacttgtatcgcctaagggcctgctgacgaagctgtggtaggtttccttcagataccttttccttcccaaacgtcccacaggacaaatagtcaagcaatgatgtgacaactccacttctaatgaactcaaatgtggagacaccattaactttgctaagctcaccgagcatttcagatatcacttcgtctaattgttcttccacatcaaatgagatgtcaaaacaatcggcacttacagcttttgatttccctttggcttttgttttggcattctcaattgcagtattgaactttgtgcagagtgctctcagtttaagaaggtcatcagtaactccaatatcacttgaatcagtgtccgtcgggaagtatttatctttgaaagactttgcatgatcgctaactgcaaatcgcaggctggtgtttggaacttcggaagtgcttgttgttgagcaggtaaccccaagattggaactgtttgattcatctaatgaactgttttctgctggcacagcacccccacgcctgcgttgacgcctagaacgtgacggcatgggagaatcattatctttatcctgcggtggtacctgagaaggcagtgcattggaggattctgcacatataagtgactccacagcatgaacaacaccttccctcacaaacagcttagaaaatgtctctggaagcttttccatcattatttctgctatctgaagagcaggaatcaacacttggggatctttccatgcaagaatgcctgcga

SEQ ID NO: 20576 - DNA, 2814 bp, Setaria italica
  misc_feature (1)..(81): n is a, c, g, or t
  Peptide Sequence Number=SeqID_86550
nnnnnnnnnnnnnnnnnnnnnnnnnnnnnnnnnnnnnnnnnnnnnnnnnnnnnnnnnnnnnnnnnnnnnnnnnnnnnnnnnttttttttttttttttttttcgacagaagggcacgtccgcaccacatttattatcagtcagttatcacacatgtacaggttgctttttgtttacaaagattgaaattctggatcgacacaaccaggtacaaattctggaacaaaaattccttttttatttacatgtaccgaaaacgagagagatttctgttcttgttggtgcactcctcaagcggctacagcctagcctgccctctgcatcagattgaggacctggttctcacccttgaagcagtctgctgggcggctagtaacctcaacctatgttagagggaccaaccaagaaactaattctgctacataaattgacccctgtatgttagttcggacataatatcatttatgaaagatcaaatgatcctcggccttccaggattgcataaagcagcttcttgcgcatgatttcttttgtggagtacggaggcagcttcagataattagcgcacgtcatcacactaggcaaatcatcatccgcaggctctgtcaccccagttgaatttgaagtatttaccacacttgaaggatgcttcctaacaattgtaagcttgggactaagggccgccaaaccaccaggtggaaggcgaggagcaccagttacaaactggcagaacgcatgctgctgctcaggggtgaattccaccataatctcaagcagattcacgatcgcaggacttttagcagtatacccatgatcaaattttatgttatccaccagggattccggctcccaaatttcttgtcggccacatattagatagtcaagttcttgaggtgaaaatatttggagggacgagatgtcaaaaacctgattaaaccctgatctaaatgcctcaatctgtcgctttatccctgacttaactgtagcatccactagcaaactaatatactcttctaagttgtaaatgttaacaattgtgcttccttcaccctctttaagaacataatcaggataacccggaagagtaaaatctaaacacaaatcttcaatagcagcaccacggaaacgcaagtctgcaacttcaagctgattctcgccaggagtggactcaaggaacttctttcgttcaacaagaactcgcagttcttgcaatgtcttcccaaactcagaatcaaatgagactatgtcaaacaaatcaagctcctgtccaaggatcagcttataaaacgcagttgataaaggcaaatctaaaagtctgccatcttgcaagacttttgccatcacttgaccgattaagcggaaatactccaaaactttgaagaatctggtaccttctgaagaatccgctttaggtggccaaggccgaggaaacaatccgagaggagcttgtatcaaatgcctgccatcaccaggtaagtctgagttgagttcttttcctgataagccatcttcagggtctaaattaattgcatcgctcctatcaatttgcaatcctgaatcatatggagaagtagatctccataaccccagctgagaactttgtagttcatggcttaaaagagtataaaactccaaagtaggccccagcccggtcccaacttcaccaaagtattccacctcaagaacagccctctgactggagaacatctccataactttagcagcagaatccagaatacggttacgggaaacacgaactttctggcgttgtaacctgccaaaccggacctctctttcaccaccagagctgtgattgtcactctgctgttgctggagtcgattcaatgctcgtgacaacccaaaggctgtggagtagaagtactgcctccttgtctcaaaaggaaacagaaatgggcaggccttggtcatttgatagcaccaagaaggtaaactgccactacagagtgcaagaacatcctgcatttgccgagcaagctttggcgtcaacttactattgacaaactcctcggaaggtaccttggctccagttctatatagctcatcaagggtcctgatttttccctcagcaaaatcatcagatgctccttgtgctcttaaacgagaggataactgattaagcccatccagtacacgtaacagtgctaaaatgttgtatgttgagtttgttctctcaagatcacaagggagttctccttgtaagatgctatcaagaagagaaacaccctgcatttccgagatagacctgcaagaatctgattttgagtttaatgaggtggaacccccctgggatcccttctcagcttggttatcagccttctggtacgttattgtgaacacatcaccccagaagcggtttccatcattggataaatcagatccattgaacctttcttcatcatcctcatcaagcatcaattgacgttggatagcttgatacactgtcaaatgtttgctgagctgcttcccaccagcagtgaatacgagtttattgtgatcactcatgctacctccaagtgacagaccacgccgatctcggctacctctaacactgcgaccaccgacagaagccagcccagccatcgttgcagcaacaaatgacattgcacctcgtgaaccaaatgtgcttgcacttcgaaattcagaagaatctggtcccctgctagatgtgtttctagcaatggagccagatgacggctgcgcctggctaaaactggctgacccaatgttctcatcagcatcacccaatttcaccgttctattgtcttactacctattctttgttagttaacttagtt

SEQ ID NO: 20577 - DNA, 626 bp, Setaria italica
  misc_feature (1)..(81): n is a, c, g, or t
  Peptide Sequence Number=SeqID_86551
nnnnnnnnnnnnnnnnnnnnnnnnnnnnnnnnnnnnnnnnnnnnnnnnnnnnnnnnnnnnnnnnnnnnnnnnnnnnnnnnnaactggtttcccttacagtagcagaatcaattcaacgaaacatagccttcgaaaaaatatacaacagatgcaggtgacacgaaaagtaaacaacacatggtgcatcagcgacagaagctgtgatggagtgagcatctccaaacaccaaccgagcttccaggtcacatctagtccgagagctgtcaggtgtacactacaaatgaatgttctcccgagcatcacattaaagaggacctcatggattgtgtcgaacgaatcatctaaagcttgaggtccactcgcctttaggcctttgattgcagggatgtgcacaggcatttcaaccatacgaccaagcaaggaccaagcaagatcatgcaaggagtcagtcatcatgagttcatggtaaaaaaacttcacagcagtgaagaatgtaaataccacagctacatatgcattatgcccgctcctctgatcttgatcttatgaaccttcgccgactccttggtctctgaacctcttcatctaggtcatcctcttcctcatcctcctcctcatcgtcatcg

SEQ ID NO: 20578 - DNA, 1253 bp, Setaria italica
  Peptide Sequence Number=SeqID_86552
acaatattatcccgcacagtagcagaatcaattcaacgaaacatagccttcgaaaaaataatacaacagatgcaggtgacacgaaaagtaaacaacacatggtgcatcagcgacagaagctgtgatggagtgagcatctccaaacaccaaccgagcttccaggtcacatctagtccgagagctgtcaggtgtacactacaaatgaatgttctcccgagcatcacattaaagaggacctcatggattgtgtcgaacgaatcatctaaagcttgaggtccactcgcctttaggccacagctacatatgcattatgcccgctcctctgatcttgatcttatgaaccttcgccgactccttggtctctgaacctcttcatctaggtcatcctcttcctcatcctcctcctcatcgtcatcgtcatcgtattggagacctaacaaattctctccccacagatagcgtcgcctccgccttctcaggcccctcgatgcgcctcttggatcatcacttgatcttattggactactgctgagcatatgaaatagaaagaatgttgtcagcagagatccacttggttcacttgggccactggtttcccggtcatgtgaaaacatttcaccgccttcaatagcataatcaccaagcacaactgccccaggcatagcggacctaattgcactcactatgtcaccatactcccgctgatgctccaggcggtgccacgcacagcgtcttgatggatcctcatcagcaggtcttgttgtggggtgcacacttctggcatgtctacggatctccctgtagttacctgaaaatgtgcaggcttcccgtgaacaagctctcgatttctcatccagatattgtctggcttctttgatgatcttccagccactaacggtgcccctgcacagtgggcacaacaattggtttgagtttgacacatcacttgacaccaaaggaccgctgatctcaacctcctgtgattccaatgtcaaatctgggccttcattgtagttattttcttcctgtcttccagctatggcagcaggcctatggctggcatcttgatgatcggaagcttcagcaggttcagatatgtctatgagtagcctggggctctctctagtgacgccaaaacgagatctccggacaacattttggtttcttgtacccctaggtacggatgagcttggctgtgaaggactgtctccatcattcactttcattttctgaacctgtctaggcaatttgaa

SEQ ID NO: 20579 - DNA, 535 bp, Setaria italica
  Peptide Sequence Number=SeqID_86553
tttaaatttttgttatctgatctcgtttctgatctcaatatgaatctcatgagaggtttctatattgatgttatataaacaagttcaattttgtgacaggaagagccaaactttcaagagtttgaacaaagacaccatcacatgagtacaggacacaagaaacagagaaatcctacgacgacgctgtgctgtgcagtctgcagtctgcagtccaccaacctttactctttacaaagaagaaaggaaggcaacggttaaaaaaaggaaagaaatctaggaaatctattttgttggctgctgtttgcctcttgagttctgacaagcggggtcccaaaactgtcctctttcttaggtgtgaggtgaggtgtgagctcaggctggttgctcgagccgcaggccgatgaggctcgacgccgcgctcaggtcgaagcgcgcagatcgcgccttcgcctgcctcgcggcggccggctcgaacccgagcgtcagctccagcccaacctcctcttcttccggatccgctcccagcacctggctg

SEQ ID NO: 20580 - DNA, 770 bp, Setaria italica
  misc_feature (1)..(26): n is a, c, g, or t
  Peptide Sequence Number=SeqID_86554
nnnnnnnnnnnnnnnnnnnnnnnnnnttttttacaacatgccacaagtaagacaatatcaagatctcctggatgaatactggcaccatgatgtttttagtacaccatggtaaaagaataatatgatgacctacattatactgattccacagactcagctctataactattagatttgttgcctctaccggtacagtaaatctcgcagttcaagtacatgggcatgaaatacaaaccacccaccaccaaaaatatacagattgaaggtatgaagaataagacctgtgaccagagcgcatataaaactcaatattttggtcttcaccaataagcctccaacaactcaaagtcagaggaatttcaactttccatggcgcagaagagattttgcctggcactcaatcctctctgccccagccaatccagcgcaagcatctgatgcccccaaggttactgcaaagtacagatagatggtgcacaggaaggcaagcacaacaagcgttgtcaagaggaaccggtgccgctcaaccaatgcagaccaactgtcatctcgagatgactgaggcttctttgcggatgacacaaagaatgtgttttgggacctcctgtgaggagatgataacgaatccagaaccatggtggcaatgtaattgattagtttgaatcctggatctggatcgggcttggccggccggcgcggaggggagggcggtggggagaggcactgcgaggtggtggggcggagcggagaggagaggacgcggcggccct

SEQ ID NO: 20581 - DNA, 894 bp, Setaria italica
  Peptide Sequence Number=SeqID_86555
gtatgacaaccactggtaggaacccgttaggacatgcagttagctttcacgccaacaaatacttctatgctcttgctcttgatggtcaatatacgaaactgttgcaggacgtagcaagctattcttaagtttttggtggtagagtctgtcaagctgtatccttaacttcagctgatgttcagttgtattttgctagacatgatagtgacatattgctaacactgtctgatactttgtcgtattcaatggaatcaatcaccataaactgcgaagattgtaacatctgtttttctgaaaactggactgcagttcgtattttggctgtatcttctagtttcttttttatgagacgaccaaagtggtgtcagataacgtgactgtatgtttcttggttttcacatgtgagattttgtacgtttcttagttttcatacaagatgtttcttggtgtctgaacctatctgattacactccgtacttcgcaattgtcagtatactgtatatgaaaattttgcatcttagaacacatgcctagcataattttagaacacatgcctagcatcttaactgttaagtttagaaaattcagttttgacactttgattcactgcccagagacttcagttattttttgtttgtcctgtaccataggttctttgtaatttggtcctccatgacactttgttcttggctgaccattccaatatgctttcgtagtggactctccctgtaacagccctcaatcaaattttgtatgtttcttgtttctgttagcactcccctttttttacacttcagatatggattaagttgagttactcaacatcaaattgtgatgctctaccttgttcagaaacaaatgtttcttctgtatgtttcatgcgtctgttagcta

SEQ ID NO: 20582 - DNA, 277 bp, Setaria italica
  Peptide Sequence Number=SeqID_86556
tctttctagcaaggacgccttctccgggaactcgggcctctgcggccgccccgtgtcctcgcactgcagccgcagcctccgcagcctggggggcggccagcctcggcatcctctgcgccggcctcgtcatcgtcatcgccgccgcgtcgctgctcctcgcctacttcttctggcggtacaccgagaagggcaagggaggcccaccgccgccagaggcgcgggggcagcgagtcgggcggcgccgccgtggaggacgggagctggtgggcggagaggc

SEQ ID NO: 20583 - DNA, 507 bp, Setaria italica
  misc_feature (21)..(21): n is a, c, g, or t
  misc_feature (44)..(44): n is a, c, g, or t
  Peptide Sequence Number=SeqID_86557
agcctcagctctccacaagcnccttttttatgtcgcttgctgcngaatcttagtggtctcgcgaggtgggctgatcatgatcgagaggttaatttattgtggtgtgtctgtaacccttgatctaggtgtgtgtggggtgtgtaaggaggggctttctttgtcctctccttgtacattctgtacatctcatctctcataatgaaaggacacgcaggtctcctgtgttcgagaaaaaatgtgtatggggaagacttaaggtaatctagttatctgttgtggtgggtcaaccagcagcttcagtcaagggatcattttgtgtagtatttgaatgacagcaaagcactagcaacacttgatctttgccatacatttgactcaacatgagagcttattgacattgggactgatgcataaatttagattgctttcctgaaaattttagaatccatacttgaaactgaaaggttaccctaccttttaagagagaagggttgagaagggttgtta

SEQ ID NO: 20584 - DNA, 258 bp, Setaria italica
  Peptide Sequence Number=SeqID_86558
tatagtagaacaatatgctctacggcatattgaatttcaaggcttttttattcagtgccaattttctcttttggtgagtacaataactgtatgtttatctgctaatagattggatttaaatttcatatgcactcatgatattcattgttcttttcctttacctgcatccatgcacttactggcgttaaatgttttagactacggatcctttctgtgcaatgtggtttggcggacaagttgatgtacttttctttgaag

SEQ ID NO: 20585 - DNA, 1398 bp, Setaria italica
  misc_feature (1398)..(1398): n is a, c, g, or t
  Peptide Sequence Number=SeqID_86559
actgaggcaattgaggacactattactactgaggaagctcaagaggtgtttcaacttgcagagcgaaacttccaggagatggcagctcttgcatttttccactggggtaatgttcatatgtcccgggccaggaagaggttgttattgtcaggagattctccaagagaattggtgcttgagcaagtgaaggaagcatatgagtgggcaagggaagagtacaataaggctggaaagacatatgaagaagccgtgaaggccaagccggactttttcgagggtttccttgcactcgcgcatcagcagtttgagcaagccaaactgtcatggtactatgcaattggtagtaacatggatctggaaacatgctcaactgaaatcttggagctcttcaataaagctgaggataacattgagaagggtatagaaatgtgggaggaaacggaagaacagcgtctgaagaatcgatctaaacctagccaggagaatgttgtgctagaaaagatgggcctggaggagtatatcaaggatgtatccactgatgacgcggctgaacaggcttccaatttgaggtcgcagataaacattttatggggtatgctcctttatgagcgttcagttgtggaatttaaattaagtcttccaatgtgggaagattgcctgatggcagctattgaaaagtttaaacttgggggagctacagctacagatattgctgtgctggtgaaaaaccactgcgccaatgaaaccgcccaagatggtttggggttcaagattgatgaaattgttcaagcctggaatgaaatgtatgacattaagaggtggctgcgtggtgttccatccttccgccttgagccattatttaggaggagagttccacatttgcatactgcgctggaacatatatagtagaacaatatgctctacggcatattgaatttcaaggcttttttatcagtgccaattttctcttttggtcaattgctgcattggatacattacatggatttgtttggtttcatttttttttatacttgaaagagtctgcttcctggttgtgaagctattcatacaagcctattattttcacaaggctggtagccctttgcgtcttgcatactctagttctttgtattggtcaggtttgctttgtagtgcgcaggaagctgtgcctttgttatgaattattggtaatgcatatctatgacatggtagttcattgttggagtatgggattggtgccatcctccttctgtttccttgtattttgtctgttttgcaattgtcaaactcagttaggcttgtactgtggttacatttaggatgtgccgtcattgaagtatgaaagaagaaagcataaaaaagaagcattgtaagtgtgaccaaaaaaaactaaaaaan

SEQ ID NO: 20586 - DNA, 731 bp, Setaria italica
  Peptide Sequence Number=SeqID_86560
agccttttaacatgagtccataatactgagaagagttataatttctgtaggtttcagaaacatctcggcatgttggaaggttgtcagtatcaacaaaccatgatttgcctttcaaggatgtagccaaccaatgtgaagctcttttgatcggaaagcagcaaaaaaatgtctgtctgcatgagtgtccagcaaaaagaggttagtaacagtgtgtaccttaagctctccacagttaaaacagctgtaagtagttttgagaaacattactcacggtcagttggacattgtttgaaccgagtacatcttgcagtggcacgatgtgatggaagcgattttccttttagatatatagcacttaattttgttttgcatcttcttgcttgaacttgccggttcaatcattctaataggggaatttaaaatgagatctaacttacggccacatttttcatctctttatttaggcatagtaaaagttactgtgacaccatctagttcttaatctatcagcatccttattgtgcatttgttgcttcataaggttcttaactctcagggtggtgaatcatccacggagaagctcgagtcatctccagaggatcttcaaggagataggtttctgtgtctagatgatggacaaggcgactccaatttctgtaagctgccagtgttgaatccctatgaccagttccttgcaagatgactttctgctgggatgtagatattggcac

SEQ ID NO: 20587 - DNA, 1603 bp, Setaria italica
  Peptide Sequence Number=SeqID_86561
aaacatcagtgttttctatcttctgctgcttgtttgggaactaaaagagacgtgctttcatctcgtgaaagtcccttctggataacacgaagctaacgcccatcagtgagaatgcagacgagatcagtgcaaatgatgcaagattattcaagtcacagactattcaaaggatggctagcacaaaagatatttcttttccctcttccacagatacgagtaccttgagtgtacccactcaagaaaaggatgctgtcaccctcatgctcagtattcgtcaggcaaatcttctcctttcctccttatggactcaggcattgtcacctgaaaatgttccacggaactatgaagcaatttctcatacttacagcttgatgctattgttttctggagccaagggctcaggtgttgaagttttggttggtagctttcagcttgctttttcattaagaggtgtttcattacaagcaggttttctttcaccatcacgcaggcgctctctttttactttggcaacttccatgctcgtgttttttctaaagcttttaacattccatctctcattcccgttgtgaagcatgtgttgacagaaagcacagttgatccatttcttcatttagttgaagacagtagattacaggtgcttgatagcgtagctaaaccttgctatggttcaaaagaggatgacgatcttgctctaaaatcgctctccaacattgacatgaataaagatcagtcaaaagaaacatccgtgtctcttatacttaatagcctggaagatctacccgagtcagaattatctaccattagaaaacagctgcttgaggaattttcagcagatgacaattgtcctctgggtgaaacatcttcaaaatttgcagcacaaaatggaaaaatgcctcaaaaatctatggaggtcatcccgttgggatttgtttttgaagatgatacccttgtcgaaccatctgacagcctagcagaacctcagttgcgacatcagccagatagcagccttcttgatgtcaatcaacttcttgattcagtttcagaaacatctcggcatgttggaaggttgtcagtatcaacaaaccatgatttgcctttcaaggatgtagccaaccaatgtgaagctcttttgatcggaaagcagcaaaaaatgtctgtctgcatgagtgtccagcaaaaagagggtggtgaatcatccacggagaagctcgagtcatctccagaggatcttcaaggagataggtttctgtgtctagatgatggacaaggcgactccaatttctgtaagctgccagtgttgaatccctatgaccagttccttgcaagatgactttctgctgggatgtagatattggcacaatatctataacatggcttgacacctcgggaaaaaaaaaatcaaaccactgtatctctggtagctctagttcgatgcatgctaacatagggccctttacgttgtcgattgggactggtttcttggagactcatctgagtcatgtgcgctcaagatgacatgagtggccttttcttgcaaatgatcctggcctgtagactagaagatgaagaaggtagtaatacaaggacctacaatagacca

SEQ ID NO: 20588 - DNA, 741 bp, Setaria italica
  Peptide Sequence Number=SeqID_86562
tttttttttttttttgtctgcacagctataacgtctgttataacatgaactacggcacaaaagaggcctgtctacatatgcagggtccacgaattgcattcaaaacttcaaggagtcattcagtcagcaagtgtaataagacggcaggtttccttattccatcaaatcgaaacttgaagatggctatcaaggagagaagggggaagggaagaagacaacagttaactttatgccaaattcaacagatgcttgttcatacaacaaacattcaggatccttgcacaatgcctctgcaagctgtgataaccagcagacctaaatcaaccggatcggaccggggccggatcaggcgagcttggcggtggccgggatgaggccaatggaggcgccgcccttgaccttggcctcctgcgcctcgcggatcttctgcatctggagcatccgctccatgacgagctcgtactggcacttctcgtaggcgtggcgctcgggctcgcacttccaggggaggtagaactcggcgacgcggcacttgttgagcgggatgaggaggtgcgcgcactggtcgcggtaggcgagcggcacccgggcctccgccatctccgcctgcgtggcgatctggggcttcgaggagccgagctgcacgccggccgctgccgccgccgcctccatctgtcactttcttcccctctctctcgccggcgaggtcgttccgtcgatggatgggcgctgctggtttgg

SEQ ID NO: 20589 - DNA, 285 bp, Setaria italica
  misc_feature (275)..(275): n is a, c, g, or t
  Peptide Sequence Number=SeqID_86563
gcgagagacaaatatccaccgaggaggcgagagctcgaaggggaagcgagacgaccgccatggtaggcgccaccaacggcgccaacggcggcgggaaggtgatcagcctgccgctgcagtacttctgcgtgctggcggcggcggtggtggccgtcatggtgctgtcgctggccttcatgtcgccggcggccatggtggccgtccgccagaacctcggctcagtggccgccggcgcctccgcggggagcagcagcaacagcagcagcggcgcgganctggcggccg

SEQ ID NO: 20590 - DNA, 682 bp, Setaria italica
  Peptide Sequence Number=SeqID_86564
ttttttttttactagacacaaagtgtgcaggagataccaattcttgtacaaacttaaaaaatcataagttaaacggcataaggtcttcctttcttctaagttctaacaaaaaaaggtgggtagaataacaaatgtaaggtaaactcaaatgctgtcaatacagtaaaaacaattcagaaaagtaagtgccagaacaactcgctaatgtatgctttcctaactgtgccgactgcctcgcgcctcagccctgagacttggcaagggcctacacatctaaatgtctgtacaagaagcatagacggatcagaatgatttattaaaatctgcatgtccaacagtcccgctgaatgtccaacttttatcaccctttggccattgctgatcgtgttcgtgcattaaaaatgctgaatcctcagagcagaagcatcaaatgcaaggaaaatttaacaatttggccatcatggcggttttgtgaggcacacaggcatcttttcaacgttttctctacaacccagggccacaatgcttgctttatcatcgtcagctgccaacttaagatgagctcaaccgtgtctgcccttttccctttcttctttttgttttttcagttttccagcatgggaagagcccatggcaacctggtgctccagactcagaaccacaatctcattgtcacaatttg

SEQ ID NO: 20591 - DNA, 331 bp, Setaria italica
  Peptide Sequence Number=SeqID_86565
cgctttcgcgtttcgcttcgccttcccttccgccatcgatcgatcccttcccctccctctccctccctttattcctatcggcgttcggccaccttccccttcccgcaccaacccacccgcccccgccattcccgggtgctttgctttgcttcgcccgcgattcgatccaagctctctggtcaccgcgctgtcgtcggaggcatggcgtcgtcgccggcgagcagctacgactgctccttcaaggtcctgctcatcggggactcggctgtcggcaagagcagcctcctcgtcagcttcgtctccgcggcccacatcgacgaggacatcaccg

SEQ ID NO: 20592 - DNA, 574 bp, Setaria italica
  Peptide Sequence Number=SeqID_86566
tgacttgactcaaggctttgagatgagatctctaattgttgacgtggagaactgcttgcaggcgtttgttggtgtagctcataatctaaattcaattgtcgttgcaatcagaggaactcaagagaacagtgtacagaattggatcgaggacttgatatggaagcagcttgatctaagctatccaaacatgccgaatgcaaaggtgcacagaggatttttctcctcctataataatacaattttgcgtctagctatcacaagtgctgttcacaaggcaagaaaatcatatggggatatcaatgtcatagtgacaggccactcaatgggaggagccatggcttctttttgtgcactcgatcttgctatgaaactgggaagtgacagtgtgcaactcatgacgttcgggcagcctcgtgttggcaatgctgcatttgcctcatgctttgccaaatatgtacccaacaccattcgagtgacacacggacatgatatcgtgccacatttgccaccttatttctcctttcttccccagtttgtactattattctacctactttcccttaagagaggtatg

SEQ ID NO: 20593 - DNA, 849 bp, Setaria italica
  Peptide Sequence Number=SeqID_86567
tcagtttgcatcaaggcaactattgttgcttggtgaaatgctggagttttctgatacaatgaaccgaaagattgccagttcttttcttcatgagcttctggtcaggcctcttgaacatgaagttgatgatgatgggaaccagattgcaattggagacggtgtgagtcttggaggagacaaagagtgggcaaaagcagtggcagagttggccaaaaaaggttcattcttctgtcggtgaatttgaaatggtggtttccactgttgttgaagagctggctagaccttgcagggagagaacagcagacttcatgcagtggatgcattgtcttgctgtgacaggtcttcttcttgagaatacttctaccctacggaatctgcaggttacggcaattgatccttcagaactgcttcactctttgttgattcctgctgcaaagcaaaatcatgttgatgtacaaagggccactttaagatgcctttgtcttctcggattgttagagagtagacctaatgcagagttggtgaagcagctgcgcttatctttcatcaatggacctgacctggttagtgccatggcatgcaaggccttgattgatcttgtaacttggcatggtccacaagaaatagatcgggccattggaattgaattgccagatcctagctatgaaaagtctcagttcgctcaagttgatctttctgatatggatggtgatgatctaaacattagcgttcttgacattctattttctggtttccataaagatgactgggaattcagcctcgagggtgataaccatgataatgtcccaaccatactaggtgaaggttttgctaaaattcttcttactt

SEQ ID NO: 20594 - DNA, 953 bp, Setaria italica
  Peptide Sequence Number=SeqID_86568
agagtcgaagtagtaaattgactatagtgctcttcccactcccgctaagaccaacaattgcaactacttcatttggattaagcgtcagattcaatcttcccaaaattggcaccgtaggtctcgatggatatgaaaatgatacatcagcatactgaattctcccttctaacttctctaacttgagtcctttagagctaagctgcttgctaggcaggagatccatcaaacggaagactttttcacttgctccaacagattgcatcagggaggaccagttgtctccgatccaccatgtggacaagattagccattcagcataaagtgtgaattttgtcaactgctcagcagtcaacttcccagacatgatagctagccctccaatcaccactccgatgacctgagtagaatggtatagatagttcaagcttaggctccagcctccgtaagccactgtctgccgaaagcttacatcatatagcttatcgagccactttgcataccttttaaactcctgcttttctgttccgtacacacgcaccgtcctaaccaaagttatcacctcctgagcaacattattggcacttgcagtgaactcctgtgcaaattttgctgctcttttctgaaaccgtccatgaactagcataattgttgatagtgttgcacaaataagcatagtacacaacccaagaggccaagataagactagcagataaattaatgcacctgcaccctgaagtaaattgcgtgaaatcaggttaaggtcatttcctataacacgagacacttgttggcagtcagaaccaagcctacttgtcaggtcaccaacagtttcttcatcgaaaaagaaaatatcctgagaaagaatggaatcaaatagcatttctctcatccgtttgaccaatatcatgtttgcaacaccaaaacagcagcttcgtacaccactaaacactccg

SEQ ID NO: 20595 - DNA, 516 bp, Setaria italica
  Peptide Sequence Number=SeqID_86569
ttacaccgcgtgcgctccttggcatcacttctaatgtttccatcatcatccatttcatcgaagaactcagatagctggattgaagtgcatggtgtcgcaaacagggcagcctcgtccattggaggagaaggcagacccccttcttcctgatccaggcaagaagcatccactgattgtggtgtgtgatctacaatgggacctccatcattcacccactcattaactgtagacttccaaccctcaatgagcgatcggatgagttgccgaatctgctttgaggcatgctttctcagcggtttcaccgccattccaatctcagtagccatgatggcgtccaccgtgaattccagctggcgcagcctctgaagcagctcgagcaactcggcctccgacttttcatgggcattggagagagcggccttgacgcggaacgcctcggcgacgacggcgtcattccgcggcgctgcgccgccgtcgttggtgacgacctcggcgcggtcggagctgcagaggctg

SEQ ID NO: 20596 - DNA, 1180 bp, Setaria italica
  misc_feature (1)..(50): n is a, c, g, or t
  Peptide Sequence Number=SeqID_86570
nnnnnnnnnnnnnnnnnnnnnnnnnnnnnnnnnnnnnnnnnnnnnnnnnngttttcagcaggtcccagaagtcacaactgctgctatctatagtatcactatgtaataatgtaacatcatctctacaaagtttggcgaacgagccacttatgagttatgacccaacatgttagggctgcaacttaaagcagtacatgtacatccctggtgactcagttcccgccttaccgttgttatgcatgtgcatagtgtactgagaccaaaccaaaacactctgactcatgtatccaggttacaagcagcaaccaccaatggcaagggtaagggatttatcttttggcaagggatggatgatatgatggtgggtatccaaaattagtgaagatgcacatggtggatggatttaatcagcgacgcatgcccagccgattccagatgttgttgctgttccttgccttgccgttgagcaccaggtttcggttcccttgcttcggcaggtcttgtggatccaccatctgtactgtcctctgcttctttgcattgttgaattcttggtaaccctcttgaagcttacgctttgtagcttcgagcttggcttcctttgcaagctctagctttgctcgaacagaattttcatcctgccgaggcgatggctgcttaggcaccgttggtttcagtcttctttgggccactgagacatcttgctcttgctttggtctcatttcggagcctttcagctccaaacgcatcatctgaggtcttcctggaccaaatgctgcatttgatggcttcccttgtgcccctggattaggttggtgctttgtctgccagttgaatggctcattcggtcgggattgcttcattgcagactgatctagcctccaattctgctctgggtcataccattggcccataggtgattgcttcctgactggctcttggtttggaggattacaccgcgtgcgctccttggcatcacttctaatgtttccatcatcatccatttcatcgaagaactcagatagctggattgaagtgcatggtgtcgcaaacagggcagcctcgtccattggaggagaaggcagacccccttcttcctgatccaggcaagaagcatccactgattgttggttgttgttgtattcttactaattgggtaccttcctattcttatttctta

SEQ ID NO: 20597 - DNA, 572 bp, Setaria italica
  Peptide Sequence Number=SeqID_86571
tttctttcccttcactatatctaggagaatcgcagtcaaggatggcgacatgctattgtttacaagagcttgtaagatgtcaaatctctgagatgagggcaccattgaaataacctttttcaaagcagcaaatgcttttttacgcatcaatgcctcaggagcagccatcatgacgctttcaatggcctaccaatgtccttgaaatgtttatacagtagattaaaaaattaccacatttttagaaatgtcagaatgataccttgagtgttgcaaaaatacgaggagcataagaggtgaaatctacatgattatcagtttcttcaacatgattttcaccagctagactgagcaataagtttatactgtgggatttgattatccatgggtagctaattgaggataggacagatttaagcatgttaattgattcccatttcttcatatggttgctctgaacttccttcagtgctaattccaactcttctccagcatactttgacatatcatcaaacatatatgtccacacaactgtaaaacaggtgaaacatgtagccgaggagcatatgaacaat

SEQ ID NO: 20598 - DNA, 1417 bp, Setaria italica
  Peptide Sequence Number=SeqID_86572
ggaactcctgctggattcgatggagaatcagctctgggagctctgccaaacgcatattaaataaattttcaaggaaaaccatgctagcaaagggcctgaaaagcactgagaccacaagacaaatgatggagtttgaaccctcaagatcttttcatcctcaccacctactcaatactgcggttggtactgtaaggaaagagtggaaaccgaaaacattagaaacttttcatcttttcctccaccaactcaatgcagcggtacaacaccagttgaacaggatttactgagcacacgatctgatttgcaatctcactatcatccttttcgttctctgactgaatccctgtgacaattggtcttaatgggatcagccactccgagtgcaccttgtgcaaagtctctttctggaacaattttcctgatcttggtcctcttgaatctattatcagaataaatctgagcaagttcagagctgatattacctgttcacagtgatcaggaaggcaaggagggccaccttgtggaggcctcaaaatcagctcgagtaactcaagcacatgagaagtccaaggtggcgattccccatgatcttgaaatccatcagattcaacacgatcattgttcgcttgacaactttctcttgaaacttcttccctcactatatctaggagaatcgcagtcaaggatggcgacatgctattgtttacaagagcttgtaagatgtcaaatctctgagatgagggcaccattgaaataacctttttcaaagcagcaaatgcttttttacgcatcaatgcctcaggagcagccatcatgacgctttcaatggccttgagtgttgcaaaaatacgaggagcataagaggtgaaatctacatgattatcagtttcttcaacatgattttcaccagctagactgagcaataagtttatactgtgggatttgattatccatgggtagctaatgaggataggacagatttaagcatgttaattgattcccatttcttcatatggttgctctgaacttccttcagtgctaattccaactcttctccagcatactttgacatatcatcaaacatatatgtccacacaactgtaagcgcagcaccatccatagcaaaggaaaacactccaaaaatcagcatcttcctctttggaaagcttatcagtggctgttgaggcatcactaccagttagtagaccgagataggtgaacccactagatttaagaaatctgaaatgctgaagaacaactgaaccgcaagcagagagaatatcctgctgtctgcttcgtgatacaagagctatactctgaagtgagtataagccaagaattgcacagaggtcttctttgttcttgttgaccatttgtttgcacatttcttgaatggcattgccaattccatgtgctg

SEQ ID NO: 20599 - DNA, 413 bp, Setaria italica
  Peptide Sequence Number=SeqID_86573
tgagctcaccagggagatattgcagtccattggtggtgtagatgatacaccctatcacgagattccaaacatcgccaagaactaggagaagcttggggaagtggttgcgtcgaagaagttcttcctagttcttgatgatgtttggaatgatgaggggaagaccgagctggagaataggtctgtgtggaacaaagtgttggcacctattagctctgccgcaatcgggagcaagatcttggtgaccactcggatgaagctagtagcagaggttctgaatgcatcatatgtggtcacgcttgacggattaaaaattgtggattgtttgttgttgttgaaggaaactgcgttgggtagtgaaaccatggagattcctcaagatctactagagtttgggagagccattgctgcaaagg

SEQ ID NO: 20600 - DNA, 317 bp, Setaria italica
  Peptide Sequence Number=SeqID_86574
tatcaactgaagagtgcaatcaaggtcgaaagaagctgtgcgcactaagtaggagactgtcgttgaaatccaagcagtatgggttggacagtgcatgtgacaaggagtataagccacccaattgttccctaagcgataagatgcccaatgaactgccattatcagcaccaccagcgccaatcccaaaaggtgaggccgtggcacgtaatgaactgccattgttggcaccaccagcaccgatgacaaaaggtgaggctgtggcacccaatgaactgctgttgtcggcgccaacagtccttaaaagttcaaagcctaag

SEQ ID NO: 20601 - DNA, 293 bp, Setaria italica
  Peptide Sequence Number=SeqID_86575
tctcattcgccctctccgcctcgcgctcgaagcagcagagacccgcagcgatccagccctagctagcatcgccgcccgcgttccccgctcccagccggcgggatgatcccgttcaaccccgcggtcgccgcggaggtccgctccctgatccagggcgccgacgagtccaccttcgaccccatctaccgcgagctctgccagcttgcggattgcagccctgatgggtgcgttttgttgcttcaagtgtgtgtggacgaagtgctgctgaatgttggtggggcaaacgaaccccc

SEQ ID NO: 20602 - DNA, 288 bp, Setaria italica
  Peptide Sequence Number=SeqID_86576
accatgtccaggtccagccgcaggctcgttcggttgcaggaacataatcttgcaacgcctcaacaacagcaacagctaccaccaattctcaaacgatcactttgccctcgtcttgttcggaaggagagatgaacagctccagatattcttggattaattccacaaccatcaacccaaaaacacaggagcaagattatgtctttgcaactgctggactcctgtgggcagaagagatgaagaagcagagcagagagcttgcaagaacacaagagcagaagcaggggaatt

SEQ ID NO: 20603 - DNA, 363 bp, Setaria italica
  Peptide Sequence Number=SeqID_86577
taacatttcatcacccagcaagattgaaacaaatgcctaaaatgagtaaagttaattccttcacataagtttccaaaaccttataagcacctctctacaatgacaaatagcaagggacgcagacacgcagcaaatggtactacaaattcacagctccaaacagctaacttagtaaagaacataaaactatgtcaactcaaaagcaattcgtcaattcatctcatgcattaccctactatgatcaagtcgaaacaggacaaccacaagaaataaagtaataacatctctctagcacacatctactagcacgagaaaggtaaataaatctggacggggctcctctaactttgaccccctactcat

SEQ ID NO: 20604 - DNA, 418 bp, Setaria italica
  Peptide Sequence Number=SeqID_86578
cgtcacccatgtccatcacctccacccagggcggaacaaagatgaacacctcagggggagctaaatagtagagattaagggctagagctagaaattcatagtgatttgaggttttgtctacagtattttagaggcaaaatcgagctctcggggggctgcagccccccccccccgggatccgcccctgcctccaccagttaccttccctctagggacgtcggtgctcatcggcaccgtcgccgtcggagctcggccgccggcgacggcgatgtacgtgttccctccaccagttacctttccctctaggggcgtcggtgagctctcaatcccgaaaatctgaaccttgttagaaataatattgacttgttaaaacgacactcattaaaacgttttgacaattaagacataaatttaaagt

SEQ ID NO: 20605 - DNA, 328 bp, Setaria italica
  Peptide Sequence Number=SeqID_86579
catcaatggaagcagtagcaggatctgttcgctttagcttattcagtcggcttatcagtcatcaaactgttttcctctcacagttagctaagcaaattatggaaggtcttctgctgcgtcttgtgatatgtgtgcaggtgctcatcgcaccgtcgccgccggagctcggtcgccggcgacggcgatgtacgtgttcgggtcctccatactggatgtcggcaacaacaactacctggtccgggggtcggtcgccacgtccaacaggcgctacaatggcatcgacttcccaagctccatcccgacaggaaggttcagcaacggctacaac

SEQ ID NO: 20606 - DNA, 804 bp, Setaria italica
  Peptide Sequence Number=SeqID_86580
ggctaagcaaattatgggaggtcttctgctgcgtcttgtgatatgtgtgcaggtgctcatcggcaccgtcgccgtcggagctcgtccgccggcgacggcgatgtacgtgttccctccaccagttacctttccctctaggggcgtcggtgctcatcgcaccgtcgccgccggagctcggtcgccggcgacggcgatgtacgtgttcgggtcctccatactggatgtcggcaacaacaactacctgccgggggcgtccgtcgccagggccaacaggcgctacaatggcatcgacttcccaagctccatcccgacaggaaggttcagcaacggctacaacatcgccgactatgtcgcaaagagcatgggatttgcgagtagtcctcctgcctatctgtcgctggcaccgagctccggccctctggtccagaacgctgtcgccaatggcatcagctatgcttccggaggagctgggatccttgactccactaatgccggaaacacaatccggttgtcgaagcaggtgcagtacttcggcaccaccaaggcaaagatggttgccgcattgggccccaatgtggcgaatgccctgctctccaggtcaatcttcctcatcggcatcggcaacaatgacatgtacgttttcgaaagcgcagagcgggcgcaaaataggtcagctgtggagcaaaggagggaaacggctgtgctctacggtaacctcatctccaactacactgcaactatgagggagctgtactcaatgggcgcgaggaagtttgccatagtcaacattgggctgctagggtg

SEQ ID NO: 20607 - DNA, 612 bp, Setaria italica
  Peptide Sequence Number=SeqID_86581
atagagaggcactagacagaaaagtaggcaggcagtagcatcaatggaagcagtagcaggatctattcgctttagcttattcaaccgacttatcagtcatcaaactgttttcctctcacagttggctaagcaaattatgggaggtcttctgctgcgtcttgtgatatgtgtgcaggtgctcatcggcaccgtcgccgtcggagctcggccgccggcgacggcgatgtacgtgttccctccaccagttacctttccctctaggggcgtcggtgagctctcaatcccgaaaatctgaaccttgttagaaataatattgacttgttaaaacgacactcattaaaacgttatgcattagcatatggcatatttaagatgagctttcaatcccaaaaattaatctgaaccttgttagaaataatctaggggcatatttagttcttgcatataggatagatgtgtttgtcacattaattcgttaaaacgttctgcattagcatatggccggcggaaacgtgttgagttcacgttgtggccagagttagtttgttcatcggtgcatggtcttttgttagtcacatatgcacgtttagttagctggttagttagcaaaca

SEQ ID NO: 20608 - DNA, 876 bp, Setaria italica
  Peptide Sequence Number=SeqID_86582
tttttttttttttacaaattaaagactcatattaccacaatatgttgtatcaatgtgcgagtgtgcactgtgcagtagggagggagtacatatcagtcttacaaacaaaaggaaaaacaaaagcatcccacgtaaagggatgaatgggttcctttcagcaaaacaaacagcactcgcaagtctagcatgttagtcataccgtagccactgctaagaaaagcatgtatttgacaaatggacacggaagtggcccatgttctgaagtctacaccccagttcttaagaactctatttcaaggcctgagcttctgctgcagccatgggatctgcctcctcttctttctcgccatctctttcggcagccagtttctccctgtgcagtttctctgctacttgcattgccgcacgctgctctgcctgcagccgctgcatctcctcttcctgctgctgcctctcgaaccaagtgtccgcatcagcccaaattggctgggcggcccatccctgctcccctcccttgatgcgctcggggaaggcgtagttgacggtgaggacgcgtccgaagagctcggcgccgtccatgttgtccatggcggcggcagcgtcctcgcgctcgaggaatgtgacgaacccgaaggagcggtgcttctgcgtggactggtcgagcggcgtcttgacgtccttgacctcgccgaagggcacgaacgccgcgtgcaggatcttctcgtccacctcctccgccaggccaccgacgtagagggtgttcttctgcaccggttggttcatagcggcggcggcgacggcggcggcgcggcgattgggggtgctggtgcgtaggggagacggggatgcttgggttttgccttctctgttcggtta

SEQ ID NO: 20609 - DNA, 460 bp, Setaria italica
  Peptide Sequence Number=SeqID_86583
actacaaaactaccaaaacaatagaatagactaaaactttggtcacaagaggaacggatatgatggcaacacccagtgcgacaccgaatatacggtgggagatcgagaatgtagcgctcagctgtggcttcttcagaggaaggtggggcgacaatgggcggtttgcaacaggagccgacaggggaccactagtgtgcagggggcgtcttccggatggaggcacctttggtcgcagagctcctagaggagaagatgtgtagcccctagtttgctcaaggtttgtgtttgagctgccaagagcaccgcgcagcgcaaatggagcatctctgaagggtgcaaatttagttttactgtaatacttctcctctaggagctctgcgacccaaggtgcctggatggatctcactccacggcagtctggggctggggacgacgaggacgcccacgggggaaggaagcg

SEQ ID NO: 20610 - DNA, 359 bp, Setaria italica
  Peptide Sequence Number=SeqID_86584
gctctggttctattgatgctcttttagcaaatgagacctccattatcccagtgtggatggctgaaaccatcaagggttgaaatggtaggagtaatgttgatgctgccattagaaacttcggattctcatcccgaagagctcttgataggcatagtgttgaagtggcaatcattgtatagtccgcccatctcatatactttctgatttctcctcgtgaagtatggtacaagctagaagctattccaactccaattaacgagtttgcataaagtgcagtattcaagttctttcttggagtttgcagtccaagaacaatgaaaggaagtgaggtgacaacattagcaatagtttcgccaact

SEQ ID NO: 20611 - DNA, 390 bp, Setaria italica
  Peptide Sequence Number=SeqID_86585
aggacggggaggaggcggggggagcggaaaccctagatgacccccgatcccgggtccggacctagtctagtagtagccttccggattgcgccccttcgatcgccgccgcatcgcccgccgcctagggttcccgcgcctatagatcggtttgggggagtgccaagtaatgatggggtccaggcggcccaggcgcgtttcgtgggccaccggggccaatctctgcaaggtattgtgataaaaatcctcgccgtaatgatggatgagttcgtccgccgccacggcgaggagaactattcgcgctcccccctcaccttccaatccttcgcggcttgctcgcggtttgaaggtttttttggtttttttgcttctttgttggatttaatccgtccc

SEQ ID NO: 20612 - DNA, 1875 bp, Setaria italica
  misc_feature (1844)..(1875): n is a, c, g, or t
  Peptide Sequence Number=SeqID_86586
ccaccacctcccgtctcatcgcccccttcccaaatccacaccctcccgccgccgccgccgctatcgccatcctcccgcgaggtcaccgtaccccctcgcggtccggtgaggacggggaggaggcggggggagcggaaaccctagatgaccccgatcccgggtccggaccagcagagagccttccggattgcgccccttcgatcgccgccgcatcgccccgccgcctagggttcccgcgcctatagatcggtttgggggagtgccaagtaatgatggggtccaggcggcccaggcgcgtttcgtgggccaccggggccaatctctgcaaggtaaggctttttctctcagaggattccccttctcaagctggattaagaccgcaagacaatctgcaagcaaaaggctcatggttaatgcatgcagctggcccaagctcggatgattccctgcctccgggctttgaatcattgcagccaaccaacgatcacaaaattgacatatctcaaatccctcttattaggtggagatgcccaccacagatattgtataatcctgactggcttgttgtcgctggagaagaaagtgttgaggctgccttacagaatgagagaatatttggagcccttgaggctatatatccacggtcatcaaacattcctccgaacccatttgtctctcctgatgtgaaagactcctattttgatgattctcggacccaattggttccgttgatccctgttgaagaggatgatgtttctgatcagttggaagaaccaccagctggtccaccaaacagttaccatcagtcagataagtatgactctgcaatagtcagggtcccacaaggctcagatgccccatttaccactgcacagcagcaccccaatggttccatcaacacagcaagtgctgctggtatctccactgatcctgatgcagtggctgccgcaataatgcaaagcaatcaaatgggaaatatgattgaccaagatctactcatcaaaatactaagtgaccctgcccaacttgagaggctaatgaaagaatatggcacacttaaacatgaacaaccaaccaacagtcctgttcctgccccgatgctacgaggcccaccgccccaaatgacagctagcattccagtccctttcccagatcatgtgacaacatttcataacataaaccctacgctgccacctccaccacctgtgatgaatcggctgcctccagctattccttcagttggcatgaatcctccagcaagttcaagtcaagcagtgaacttctcaaatattccaggtaggggtatcaactattacaagacactgatccatcagcatggaggggagaggcaggaaccacttcagcagcatgggatgcagtttgcaatgcatcaccattctgttccttcgcagactagcaccattgatgtggttagcaatggttctatgccaggtagggagaagcaaaggcctacgaagccctgtgcttacttcaacagcgccagggggtgtcgcaatggtgcaaactgcacgtttctgcacgatgtgtcagccgcgaggaaagagcagccaaagggatcgaaaaggataaagctagacagcagaatagccggccggtattgactattgagcagcggctgctgctggttgatttttgactgttctttggttcgatattcttatttcgccatctttctttctttttccaaatgattcagtaaatattgcgcttcagttccttggttctttcgcttccagtgcccatttaatctttgtcaagggagaaaatgttttagaaagaaaatcattccatgattaattgaagctctgagttttacactaagnnnnnnnnnnnnnnnnnnnnnnnnnnnnnnnn

SEQ ID NO: 20613 - DNA, 348 bp, Setaria italica
  Peptide Sequence Number=SeqID_86587
taaaaattgactgaaatttaatctgtcgcaactcataaggtttcatatatgcccatgttatgtgctattcctgtaactaaggtgttgcgtatatgttagcaattggctgcataatatatatcagttttctaaacactacagtgtagttggtggaccccacctagatttaccacttagattggctttagacaggcttttgggttgtattttttgccaaatgatcaagctgctgtcgtttagtgccaaatttgtggaattgggttggtcaggtgcttatgtatgtcctgtagatatttatgctagtaatgtaaaggcttgagttgtagtgtgacagcaggagtgcttgga

SEQ ID NO: 20614 - DNA, 280 bp, Setaria italica
  Peptide Sequence Number=SeqID_86588
gggggggggggggtgggtgggggaggttcggacaccggccgaccgaatgaactgggagcgtctcccccgatctgcggcggcaaggctccccaaaaccggatttttaagcgggcgggcgggggcctagggcccaattggggagcgctagtggggggattcggctggagcggagggggcggcggtgggagtggggtggaagctacaggaaggcgaggaagaacatgaggctggggggcaaagcgaagcgagcgtggtaagagagagaaggggaggagcaaaa

SEQ ID NO: 20615 - DNA, 297 bp, Setaria italica
  Peptide Sequence Number=SeqID_86589
taagtttgactgcctggtttcttgcttaagtactgaagatggggcgagttgctgctgatcagataaccttgtccaatgaattgatgactcaggaacgaagggagaaggaggcaaaagagaaggcagcagcgacgtcggagaatcccgaagctccagagagtaagaaagagaattcagaaagtaaggagaattcagaaagcaagaaaaagaattcagatggcaaggtggatagctcaggggcgaaagctgaaggtgagaaggaagcgaccattgaccttaggccactgacaatggaag

SEQ ID NO: 20616 - DNA, 2781 bp, Setaria italica
  Peptide Sequence Number=SeqID_86590
cggcgctgcggaggtggaggcggagctgcggcggttggtcctggacggccgcgagagccaggtcaccttcgacgagttccataatttccactactacctcagcgatcagaccaaggaagtgctcatcagcgcggctttcgtccacctgaggaaagcggaattgtcaaagcacatccggaacctctccgctgcaagccgtgccatactgctctctggccctacagagccttacctgcagtcgctcgctaaagctctgtcccagcacttcaaggcgcggttgctaattctggatgctaacgacttctcccttcggatccaaagcaaatacgggggctccaataaagtcatggtccgtaatcagtcagtaccggagaccacattcgggaagatgtctggtctcattggatcttttatgacatatcctaagaaggatgagcctagagaatcgttgcatcggcagacaagcaacacggatttaagagcaagaggctctgatggttctaccagtacaccttcacttaggaaaaatgcctctgtatcatctgacatgagcgatcttgcctcacaatgttcaggacattcagtgaggcgaaccagtagctggtgttttgatgagaaagttctgatacagtcactctacaaggtcctgatttctgtatctgaaaacgatccgattattctttacataagggatgtcgatcatttcctctggaaatcgcaaaggacttacacaatgttccagaaaatgatggcaaaattatctggtcaagtgttgatacttggttctcggctactcaattttgatgccgataatagggatgttgacgagagagttagtaccctgtttccttaccatgttgatataaaacctccggaggaggagacccatctagattgttggaaaaaccaaatggaggaagacacaaagaaatttcaaatgcaagataatagaaaccacatcatagaggtactctcagcgaatgatctggactgtgatgatttgagctcaatctgcgaagcagatactatggttctcagcaattacatagaggaaatcattgtctcagcagtctcttaccacttgattaacaacaaggatcctgaatacaaaaatggaaagctcatcctatcttctaaaagtttgtcccatgggttaagcattttccaaggtggccatggtgggaaagacaccctgaaattggaagaaacaaaggatggtgtgaaaggagctcttggatccaagaaaactgaggcagacaaatcaaccccagttccagttggcgatggtccattgccaccaccaaaaccagaaattccagataatgaatttgaaaagcgcatcagaccagaggtcataccagcgagtgaaataggagtgacatttgatgacattggagccctggctgatatcaaagagtctcttcaggagctggttatgcttcctcttcgacgacccgatcttttcaaaggagggcttctgaagccgtgcagagggattttgctgtttgggccacctggaacagggaagacaatgcttgctaaggctatagcaaatgacgctggtgccagcttcatcaatgtatcgatgtccacgatcacatcgaaatggtttggggaggatgagaaaaatgtccgggcattgttcagtttggctgcgaaggtagctcccactattatttttgttgatgaggtcgacagtatgttggggcagcgtgctcggtcgggtgaacatgaggcgatgcggaagatcaagaacgagttcatgagtcactgggatggtctgttgtcaaagtcaggtgaaagagttcttgttcttgcggcgacaaatagaccgtttgaccttgatgaagccatcatcaggagatttgagcgcagaatcatggttgggcttcctactcaagagagcagagagctgatcttgaggacactgttgtcaaaagagaaagttgacgaaaatattgatttcaaagaacttgcaaccatgaccgaaggttacagtggcagtgatcttaagaatctttgtgtcaccgctgcttaccgcccggtaagggagctcctgaagaaagaacgagaaaaggaactggaacgaagggagaaggaggcaaaagagaaggcagcagcgacgtcggagaatcccgaagctccagagagtaagaaagagaattcagaaagtaaggagaattcagaaagcaagaaaaagaattcagatggcaaggtggatagctcaggggcgaaagctgaaggtgagaaggaagcgaccattgaccttaggccactgacaatggaagacttgaaggaagcaaagaaccaagttgcagcgagcttcgctgccgaaggtgctgtgatgaacgagctgaagcaatggaacgacctctatggcgaagggggctccaggaagaaacagcagttgacatacttcttataggttacaagcattttggtgggatcgtggaggaacagattccagcgtttggtggatcattgaggaacagagcatggcttttagatgtagcttcgaatctgtgagatggatggtcaattgtaggactaccatgaacaatggtcaattgtaggactatcatgaacaattcttttacaatcatttgtacatccgcatcgctagaattgtaatttccttggtttatttgtatctgtatatttggattgaaaagctcttctattcaaaaaaaaaaaaaaaaaaaaaactagtaatactagtaataatttaggaattagaaaaagactacttactaattacaaagggtagaattttaagactta

SEQ ID NO: 20617 - DNA, 1398 bp, Setaria italica
  Peptide Sequence Number=SeqID_86591
tcttgctgtgttttattttcttcccatctgcgcagaggtgcgtgctcgggagcgagcagctgcgcgcggtggatgggggaaagcggacgggcggggtcgagcagcggggcgcggtgtggacgccgaaggcgcccgcgcaggaggccaggctcgcggcgctgccaagggacgcgcgggactccaggatgaagatcttctccggcacggccaaccgctcgctctcccaggaaattgctgcttacctgggtgtagacctcggcaagatcctcatcaaaggcttcgccgatggagaaatttacgtgcaactgcaagagagcgtgagaggatgtgatgtgttcttggtccaaccaacatgctctcctgtcaacgaaaacctcatggagctcttcatcatgattgatgcatgccggagggcttcagcacggtctattactgttgtcatcccatactttgggtatgccagagcagacagaaaggctcaagggcgtgaggccattactgccaaacttgctgcaaatttacttacagaagctggaagtgaccgtgtcattgtgtgtgatattcattctacacaagcgctggggtactttgatattcctgtggatcacatatatgggcagcctgtgattctggattacctcgccagcaagacaatatctgaagatcttgtggttgtttctcctgatgtgggtggtgttgtcagagcacgtgcatttgccaaaaaattatttgatgctcctttagctattgttgataaaagaagacagggtcacaacatgtcagaggtcatgcacttaatcggtgacgtgaaagggaaagttgctatcatggttgatgacatgattgacacagcagggacaatcactagtgctgcagctttattaaaacaggagggagctgaagctgtctatgcttgttgtacacatgctgttttcagccctcctgcaattgaaaggctttccgggggcatctttgaggaggttatagtgacaaactccatcctgctgccagaagacaaatgcttccctcagctcacggtgctttcaatggcaaaccttgtagcagaaacaatctggcatgttcatcgtgatggttccgtgagcagcatcttccaatagcagatgcacatcgcctcatctcgtcttaagcttatgcagtatagagaagggacctagtgcctgtgctgttttcgtagggagtcaattttggcggcgagatataataatgtggtagtgccaaagatataattaataaggcagtattgccgatgatactgagaatgtagtgtgtcgagctcctgaccctgcctcttgatgttgaggctcagtcctagtgtaaaagcatgacccatgcatgtcactcgcataattctttggatgttgagggatgttgtgttca

SEQ ID NO: 20618 - DNA, 210 bp, Setaria italica
  Peptide Sequence Number=SeqID_86592
agtcggatatcagaaatattaataagttcaacaaatttgtggaggtcaatggtttcaagttaaattcagaaggagggattctgaaagtgagtcctgatggtctccttcagcaaagttcaacagtagctgattcatcattgtttacgtttgctgatggaaaaactgagctgagacacgcaacaggggtaggcaaggcacacaggggatagg

SEQ ID NO: 20619 - DNA, 662 bp, Setaria italica
  Peptide Sequence Number=SeqID_86593
caattttactgtgttctttcccctggaaagctttaaatagttcctgttttggctaagatttggtcgcttgaaccctagtgcatagcatatcttggatttttttttgcatgaagtgtacatgtttcttattattgttccatgttttgtaaagaagctaagttgcatgcttacccccttttatgtgatcatagtgagtcctgatggtctccttcagcaaagttcaacagtagctgattcatcattgtttacgtttgctgatggaaaaactgagtctattcctcgatcctatattgagtttgctgaacgcctacggctaccacagttcaaagatttgcaagatgaagaggtgaaagaacaccataggcgcttcagcaaactcaatataggatcgaggaatagactcagttttccatcagcaaacgtaaacaatgatgaatcagctactgttgaactttgctgaaggagaccatcaggactcactttcagaatccctccttctgaatttaacttgaaaccattgacctccacaaatttgttgaacttattaatatttctgatatccgactctaggcgatgtgtggaaattgtggcatgatttagtgcatagccattaacaagagtccatgcagcatattcactttccctagacaaaacctgaaaat

SEQ ID NO: 20620 - DNA, 1204 bp, Setaria italica
  misc_feature (1179)..(1204): n is a, c, g, or t
  Peptide Sequence Number=SeqID_86594
ggccgctcccctccgcgtccccggtctccgcgccggcccggataccggggcattgccatggccgccgcggcgcatgcacccgtccccgccgacccgcttcccaagggtgctgattcttttttccgaacagttatctcaaacatggaaaaggtttatttgagcaggaatccaacagccaaaaccattttggagcttgtccgttcttatgatggtgaccacatttgttatgatcaccttgctttccggacatttggggttgatggttatggtataaattcacttgctgaatttttcactgattttggttatctacctcgtgaagaattaagatttccagcaaaaaagcttagagcaatatggttttcccctcccaccaatgatggcactggaactggtatttatggacctttgccaaggatattcatttcggaacttcttgtggatgagttgagtgctcaaagccaggaaattatccacaagtacattagaacttctggcaaaggaaacaaacatgctgctcttgcaagtatatctggggagctgacatgggagacgcccatttattcagattttcaggttttgtctagggaaagtgaatatgctgcatggactcttgttaatggctatgcactaaatcatgccacaatttccacacatcgcctagagtcggatatcagaaatattaataagttcaacaaatttgtggaggtcaatggtttcaagttaaattcagaaggagggattctgaaagtgagtcctgatggtctccttcagcaaagttcaacagtagctgattcatcattgtttacgtttgctgatggaaaaactgagtctattcctcgatcctatattgagtttgctgaacgcctacggctaccacagttcaaagatttgcaagatgaagaggtgaaagaacaccataggcgcgatggttttgaggtgggcaacgcagacaagatatttgagagcacgtcgaaggatcagctgacccggagatctgcataaacagtgaactcttgatgaactgtttctgcatgtgatccaatgtgtctcttggaagtgtgttggaggcatgcgttgtgtaaatgattgtatccacctggataaaataaaacatgagaatcaataaatagtgagtgttttctaatctacatcctgtagttaagaacaaaaaaaaannnnnnnnnnnnnnnnnnnnnnnnnn

SEQ ID NO: 20621 - DNA, 318 bp, Setaria italica
  Peptide Sequence Number=SeqID_86595
cagacggcggagcagagccgagccctcgaatcctgccgcgtcgcgtcgcatcgccctgtcccatcctggactcgatccgaggtactttttgggaagggtgtggggaactgatgcggagctcttgcgcaggaaggttatcgaatcaagtctctcgatcaccatggtgcccagagatagggcgcatggcgccgccgcggccccgacggagaagctcgttcaagggcctatcttgaacaagtgcgaaaagaaggctcccaagaaagtgcataaatctgagagggagaaacgaaagcgggacaagcagaatgatctctttgg

SEQ ID NO: 20622 - DNA, 797 bp, Setaria italica
  Peptide Sequence Number=SeqID_86596
gaagccagacggcggagcagagccgagccctcgaatcctgccgcgtcgcgtcgcatcgccctgtcccatcctggactcgatccgaggtactttttgggaaggaaggttatcgaatcaagtctctcgatcaccatggtgcccagagatagggcgcatggcgccgccgcggccccgacggagaagctcgttcaagggcctatcttgaacaagtgcgaaaagaaggctcccaagaaagtgcataaatctgagagggagaaacgaaagcgggacaagcagaatgatctctttggtgagcttggaaatatgctagaacctgataggcagaacaacgggaaggcatgcatattgagcgacactactcgaatacttaaggatctactttcacaagtagaatctcttcgacaggagaatggtgcactgaagaatgaatctcgttatgttgcattggagagaaatgaactactggatgaaaacaacatgatccgcactgaaatctcggaactgcaaaatgagctgaggatgcacatggaaggcaaccctatctggagtcatgacgtgacaaggtcaaatcgtacagtgcctcatcccgcaaccacggtatttgcactgcaacatttgtcgcatccagcagtcactacaacaatggcaccccctctgcaacagctagcagtccttgatcaatcttatactgccccagcagtcagtacaacaatggcaccccctctgcaacagctagcagtccttgatcaatcttatactgccccacggcgggagcttcagggaagagctgtagctcc

SEQ ID NO: 20623 - DNA, 572 bp, Setaria italica
  Peptide Sequence Number=SeqID_86597
tagacttagtgcttggtgaagctgatattctctgagtcgaggtcttgttgtataaacccattcttcaacccagcacaaggattcgctgatccacttgtgtcaaatatttgaagcaaaggaacaaaccaaataaacatagtgtgcacaaaaatctgcattggagacctacgtttccagttgcctcccctgaatcgaatggcttcaggtcgcgacggacatccatgggtgtgctcacgagatccggcggctgccgctgctaagcctcgctgcgcttcccgaccttgccgagtcagtctttgacgtgcttcagctgtacggggcttcctggccatgcctcccgtctcccaatccggcggggtcggtgtcgtcgtcagcgcggctagggctggaccgtcaaccctcatcggaggctccctcgtgcgcagcggcgtgcgtcagaacggcgccggcggcttgcgtaggcgaggtggaggtggaagaagggcgcgcgtcatccgctggagaatggggccgcgttcaccgcatccttctcgtccttcgcgggcacgcgccgccgcacccggccttgtcag

SEQ ID NO: 20624 - DNA, 499 bp, Setaria italica
  Peptide Sequence Number=SeqID_86598
attgagccgctgccagctggtccttcccctcgacggcggcccgatcaggagcgccagacgagaccggccggtgctcgggtactcgacacgcgctccctgctgcaccggagaacagggaagaggaggaggaggagcatgacgcgagttcacgcaggatcgcgagccgcctgcattttctgacggaaaggacatgatcggacccctgaaagaaacacttacagctgttggattggatttggacgtcggatgtggaggctcaatctgaggccttgccgccggccatggagggggaggcggtcgggctaaagaagccaatgagttgcagtttctgccccacgtcagtcttgagatccttactttaaggattgtattgaagctattgatggaacacatgtaagggcatctgtttctaaggatattgagcattcctttcatggtaggaagccctatgccacacaaaatgtaatggcagcagtagattttgatctccaaaaaaaaa

SEQ ID NO: 20625 - DNA, 1294 bp, Setaria italica
  Peptide Sequence Number=SeqID_86599
cgtgctgcggagcgagtgcgagcccatgatggacctgttccgctgcgacgaggaggtgggccgggagggggactggtggatgtacagggtcgacgtgcagcgcctcgaggagaagctccggctgcccgtcggatcctgcaacctcgcgctgccgctttggggagcaggaggcatcaacgaggtgttcaacgtgtcggctgagctgccgtcgccggccggcggtcgtccccggcgcgaggcttacgcgacggtgctgcactcgtcggacacgtacctgtgcggcgcgatcgtgctggcgcagagcatccgtcgcgcgggctccacccgcgacctgatcctcctccacgaccacaccgtctccaagccggcgctccgcgcgctgtcggcggccgggtggaccccgcgcaagatcaagcgcatccgcaaccctcgcgcggcgcggggcacctacaacgagtacaactacagcaagttccggctgtggcagctctccgactacgaccgcgtcgtgttcgtggacgccgacatcctcgtcctccgcaacctggacgcgctcttccggttcccccagctcgccgccgtcggcaacgacgggtcccttttcaactcgggggtcatggtgatcgagccgtcgtcgtgcaccttcgatgcgctgatccggaagcggcgcacggtgcggtcgtacaacggcggcgaccaggggttcctgaacgaggtgttcgtgtggtggcaccggctgccgcggcgcgtcaactacctcaagaacttctgggccaacaccacgggcgagcgcgcgctcaaggagcggctgttccgggcggacccggcggaggtgtggtccatccactacctggggatgaagccctggacgtgctacagggactacgactgcaactggaacgtcgaggaccagcgggtgtacgccagcgacgaggcgcacaggcggtggtggcaggtgtacgaccggatgggggaggccatgcgagggccatgcaggctctcggagcggaggaaggtggagatcgcatgggacaggcatgtggcggaggaggtcgggttcgccgaccagcactggaagatcaacatcaccgaccccaggaaatgggactgactgccgcagctaggccgccgcagctgatcgagctcgatcgccacattttgattcgtgggttcctttgattttctctttgttcgtatatacatatacacaacagaggagtaagcagaacttgaatggattgaataatgaataactacagttccagttcaacaagaaaaaaaaaaaaaaaaaaaa

SEQ ID NO: 20626 - DNA, 519 bp, Setaria italica
  Peptide Sequence Number=SeqID_86600
gtgggttggctactcctccccctcttaccaagtcttcggctttagggtttttcagtgggagaagaagggagatggcggcggcggacgtggagtaccgttgcttcgtcggcggcctcgcatgggccaccgacagcgagtccctccagcttgccttcgcctcctacggcgacgttgtcgactccaaggtccgtttgctctgagttccgttcgattcgcttgggttttgcgatgggtttctgttgacgccagtccagatctgcgtcgtgtgtcaccagatctgctatgtttcggtttagatctgcgtttctctgaatcgaatcaaacacccacgctgatggtgctgttgttccttgtgcttgcaggtcatcaccgaccgggagactgggaggtcccgcgggttcggcttcgtcaccttctccactgagcagtcgatgctcgaagccatcgagaacatgaacggcaaggagctcgacggccgcaacattcaccgttctaacctaggtccctagtccccttcgt

SEQ ID NO: 20627 - DNA, 1369 bp, Setaria italica
  Peptide Sequence Number=SeqID_86601
tctcctgccgtacttcgggagaaataagagattgcattgcaatgcacaatagggaacgtagtatacttcattcttcagcttgattcatttgtagaaagcacatctacagaagtggatcactcttttctttggaaagatattgatcgatgggctgcaactttagcataaccttgtattgcatgcgatcaacaaaaaagaaaacagaatgtctccactttggaatggaaaggatcatcccacaccatagccaaaatccaaaaacaattccagcaatcacacagtagtacagctattggtcacaatctttaccgtctttcttgtccagtgcaggtgaagcatttgtgcagggaatatccaaaggaggtccacagagcccaggattgttgctgtaaatcgatgggtcattcaaggtctgaagttgattccctgtgggtatttgccccgataaatggttgtttgagagattcaatgtattgagggataccatattactcaagcctacaggaatgactcctgacagttcattcaatgagaggtcaagggactcaagaacattcaaactaccaatatttttaggaattccgcaggacagattatttcttgacaagtttagaaatcgaaggccttcaagattggttatctcttctgggatgcattgagacagtgaattgcctgacaaatcgatacccgtcatgagctgaagaattctttggaatatcagctcttgccccttccagattatgtcaattctatcctgataagtggacccgtctagcgatcctgtggaattaattatcggattcctcatggcagttaatttcccaaactctcttgggatcggtcctgtcaagccgttgttggccaagtctagcaactgaagctgcggaagcttcgataagtccggaggaatttcaccagtgaaattgttcgacctaagtctaagaattttcagagctcgatcttcacctccaatccagggaggaattgtaccagagaactggttgttcccaatatctagagtggctagagattcacagccctggacgaccgatgggaagaccccggtgaagccattgccggcaagatggagcgactcgagataacagttgtgggtcggaggggcttcagggatctgacctgagaaagagttgttggaaaggtccatgaactgcaaggcctgcatctcccaccagcagtccggtagctccccggtgagctggttgttggagaggtccagtatctgcagcgacagcagcctgcagaaggccgcaccggacctgttggaggaggtgttgctgttcagaacgttgaggcgtcgttcatcgtataggcgccgtgccggtgccacctcgtcgtagaagagacgtcg

SEQ ID NO: 20628 - DNA, 316 bp, Setaria italica
  Peptide Sequence Number=SeqID_86602
acaaaactaaataggactaggaagacaatagaaaacaaggaacagatgatataacaataatcattgtgcatatccgagactctgaaaattcaggtcctgcagggagcgacaaagtggactatggcagcatcggcacatcaataactgtgcacacaatacagtcagagatgcctgtatttgtaccatcagaagctagtcaattgaacagatgtgttgctactgaaatgcagtcatcgtcctcgggctctccaacagaacgaagcctctcctgtgttgctccttctcctacgcaccctttattaatacaccgtagaat

SEQ ID NO: 20629 - DNA, 618 bp, Setaria italica
  Peptide Sequence Number=SeqID_86603
tcaaacctgaagtttctgaagcttctaccgggccggttgcgatgtgttgctactgaaatgcagtcatcgtcctcgggctctccaacagaacgaagcctctcctgtgttgctccttctcctacgcaccctttattaatacaccgtagaatatcagatgcttccaagcctgtgcaaagtgagcaagctgcatcagaaccagtacaatcttggcatcaagtggacagtggtactgagctggaacggactatgcaacgaagtgtccctccagcctcctgctaaaagtcgaagagtatctgagttaaatggcaaaaggaggccttgtcataccccattgccatcctccggagctactaaccgtgccatggatgtgatgttggtcagcagcaaatctcggtgttgctcgtgttttcttagagcacctgccgcaaactgacgatgtgaaggttctgatccgaagttgggtcatctaaccagagggattgattggtggcaatgggcgccaccagaagtgctgtctgtgatggagttattctccgcttaatttgtatttattaacttacccgtaatttaatttaagttgatgcttggcgttggtttggaatgaagatgacaaaaaaa

SEQ ID NO: 20630 - DNA, 275 bp, Setaria italica
  Peptide Sequence Number=SeqID_86604
gcccgtttcgcctcgcgcttgcgctgctgctgctgctgctgctattgcccaatttgccattccattccattccggggggaggattaggcgcgctctgtttcgcgtgggaagcgtgcttcctcgtttaggcccctcgaattcccgagggcgacggcgacgtgctcggcggccgggcggagaaaatctagggaggcttgggctcgcgagacgcgcgcctgtacgtggcgtacgtgcctttgttggatacagctgcttgctctagctaccaatggccg

SEQ ID NO: 20631 - DNA, 287 bp, Setaria italica
  Peptide Sequence Number=SeqID_86605
aaccaacccacgcaccgccaccagcacgcccaaatcggagagccaaacccttcccaccccttctccctcccctccgaaaccctagcctcgcttccggaatgccccagtagctcctccgatcggccccctcaccgccatggatccgggcggcgggggcgcgatgctcctggaggacttcgggcagcgcgtggacctcacgcgccgcatccgcgaggtgctcgccaactacccggagggcaccaccgcgctccgggagctcatccagaacgccgacgacgccggcgccg

SEQ ID NO: 20632 - DNA, 657 bp, Setaria italica
  Peptide Sequence Number=SeqID_86606
ttttttttttgttttttttagatccaatgaaatgcaactgtatgatccttgcgagaatctgaaggagccagaacaatgcaatgcaagccaaaaaccgcaaacaagaagccaagaagaacagattaaaaacaggagagacgacgacgcctcagcggacgaccagcgcacgaacgcacgcgcacgcggagacgaccgacctacgagtcgtcgctggggctcatgctctcctgccgctcgccgccgccgtgctgctggtggtgctggctggatccgccctccgctccgttctgcgccgcagccgcagcgtccgaggcggcctgcacgcggtacgcgttgagcgcggcgaggatccccatgtggccctcccctccgccgccgccattgtcgttgttgccgcccgcttggccgagcccgagctgctgcccgccggggagcagcgccatcggcgcggggaagttcattaaatgtagcccgctcggcacgccgcggtacaaggtcgccgcgccgccgccgctggctccttgcgggaacgtccagatcgactcgcctccgccgccgcctccgccggccgctgctgctgcggcctgcgcgttgctgctcggcaccatccacacggtgcccggcatttggctctgcgtgtacccggccatctgctgc

SEQ ID NO: 20633 - DNA, 801 bp, Setaria italica
  Peptide Sequence Number=SeqID_86607
atgcttagctccattttctctagacgaacacgctcaacatagagatctggttcttctgcatcttcattaatttcatcactcttctttttgtctttatttgacggtacttgtctcttcgagaataatctatcaatccttgttaccctgagcaatgacctccatgctcgagatatgatgacatccagtttctccatgaagaagtagtcagttgtccgatcaattccaatacccccgacggaagacgatatacttatcagcgaatgctggtagattatcatgtgggtggtccttaaagtaccttgtcaaagcttgctgtctacccttgattcatcaacttttatggggaaggttcagaagatactggccagactgggctacctcatactcttcgtcggatagcaacttgaagttgctcttttccattatctacttaagatcaccaattgtattttgaaacataggtagtacaagttatcgtcgtttaaaatttcaagtatcatgctcattagtatgaaatgaagtagatagtgagccaacctgaaaaatgtaggttaagaaattgagttctagagtatcaagctcattggatgtcatgccctgctgctccaaactcttctcaccattaacaggatcaaataatgcgtacaattgcattagatcatcaaaattggagaagataccaagcacggattgtgtactccaccctcttgcatagcttcatgaactcggcacggtcattgtcgcgctctgcagagttatcaagagcatgtgtgcattatggcagccaaatgattcacacca

SEQ ID NO: 20634 - DNA, 748 bp, Setaria italica
  Peptide Sequence Number=SeqID_86608
ttttcttacttaagtaacgtaaactaacgcttcaacatagagatctggttcttctgcatcttcattaatttcatcactcttctttttgtctttatttgacggtacttgtctcttcgagaataatctatcaatccttgttaccctgagcaatgacctccatgctcgagatatgatgacatccagtttctccatgaagaagtagtcagttgtccgatcaattccaataccccgacggaagacgatatacttatcagcgaatgctggtagattatcatgtgggtggtccttaaagtaccttgtcaaaagcttgctgtctacccttgattcatcaacttttatggggaggttcagaagatactggccagactgggctacctcatactcttcgtcggatagcaacttgaagttgctcttttccattatctgaaaaatgtaggttaagaaattgagttctagagtatcaagctcattggatgtcatgccctgctgctccaaactcttctcaccattaacaggatcaaataatgcgtacaattgcattagatcatcaaattggagaagataccaagcacggattgtgtactccaccctcttgcatagcttcatgaactcggcacggtcattgtcgcgctctgcagagttatcaagagcatgtgtgcattatggcagccaaatgattcacaccatttcaattatgaaatttcagatagtcagaaatagtactgcagaaggttaaagttaactttgt

SEQ ID NO: 20635 - DNA, 841 bp, Setaria italica
  Peptide Sequence Number=SeqID_86609
agtggtactttattcctccatcaaaatatagtaagaaacgataacctccttaacttcttgctggatcacatcatcacacaagtgaagaagtgttcctttcccactatcaagttgcttatcatacattgactttgtaatcaaattttggtatgtgaccatatttgcttggaatgtgaagtagatctttgcacagtatccaatcagaccagataagatagctgtaacaaaccatatgtcagcctttggcatttcaagagaacttattagagtgaccaatccaatcacggcagatattagaaatgtaacccagtccattggtgttaaactagggtttttcttctctggcaggactagctccatatcggccattggaatgtgcttgaagtgctttacatatatcccacgatctggtttactttctgtgctagccttcctatacaccacgatcatcctttcaaatgcaggctcttgaatggtcatttttcttaacagattctttatgcttagctccattttctctagacgaacacgctcaacatagagatctggttcttctgcatcttcattaatttcatcactcttctttttgtctttatttgacggtacttgtctcttcgagaataatctatcaatccttgttaccctgagcaatgacctccatgctcgagatatgatgacatccagtttctccatgaagaagtagtcagttgtccgatcaattccaataccccgacggaagacgatatacttatcagcgaatgctggtagattatcatgtgggtagacagcaagcttttgacaaggtactttaaggaccacccacatgattaattcttaccta

SEQ ID NO: 20636 - DNA, 844 bp, Setaria italica
  misc_feature (325)..(325): n is a, c, g, or t
  Peptide Sequence Number=SeqID_86610
agcatatccctagtcaaaagtgaaaaaaatggctataacgaaaaaatgaaaggtcaatctatactgaaatagcacattcacaactaccacagtatcaaatctggtatgaaagatctttcgcttttctgtgctgccaacatctcatgttaacacaaatctgtctgtttcataaaaccagaatattacagccaaggttcaatggcttcactacattctttttgttcttttcagcaacatcaagcttatagtcaaaaattgaattttcagagaagcataactgaagcatgaagaataaatatagattactgtatctgtaaaaaaaagnttttttgagcagttcaccatatcatgacaagttgaaacgtaagagatgcgcacgggaaacaattctcagaccagttcaccatatcactcatacagtagatcgattggcactcctatattcaactcccagcagcacagttcgttcagctacccatcttccttcctgcattgcaaacacatcatgaattaatcaaattggaagaaccctcctgcacagctatcagaagtcaattggcacagctattagacccaggcatatatgaatagaatagcaagatcagagcatacccaaattgaattggaactacacggttaaactggaggaatccgtacaaatcgctgtaaaattgaagctacaaaagaaaaaataggccatctcctcccgtatttcacctaatcctctctctgttagcaatcatgtctctccaatatctctgctgccgcaggcagatgtagccgagcggccgcataggagaggcagctagcagacgggagcactgttggcgacgacgaggtccct

SEQ ID NO: 20637 - DNA, 497 bp, Setaria italica
  Peptide Sequence Number=SeqID_86611
ctttggagatgctaagttctgaaagttagacattcgcagtttcctattcattttcttcccttttccatcaagaagtggctgtagggcgtatttctttgagaagtgccaagtaagtggaaccggacgtttgtttgatgttacaagctctgtcttaccatgaatctgacttatccagccagctaattcatcaggatttgcaacagtggctgacaagcatataagctggacttcctttggacaatatatgacagtttcttcccaaacagtgccgcgtgagatatcactcaaataatgaacttcatccaaaacaatgacatcaacttgaaataatctaccttctgatgctgtcccaccaacactttggtacagcatgttacgcaaaatctctgtcgtcataattaggatctgggcatctttgttgatagcagaatctccggaaatcacgaaacttctgatttgacaaggcctttaatggtgttgtgtagaagagacgtctt

SEQ ID NO: 20638 - DNA, 366 bp, Setaria italica
  Peptide Sequence Number=SeqID_86612
cgcgtcgccgtcgcgcgccactgaagccgcgtagtcgcgctcctttttaatcactgccgcagcgcccgtccctgcgcctgctcgtgccggccgcactgagcctgagcgagctctggggacggtggactggtggcgatcacatcagagggcacatactatcggctgattgtccgtgacacggcaagatgtcactagcgaagaaggaagaggtttgcagccaccgacttgtaccgcgattgggtgagccggcagttggtgtgcctattaagaagaggccagttctcttgtctgatagatctgttgcgtcttccatgccgctctcaataaagcctccttctccagtgaaggatatgcctgtttctgcta

SEQ ID NO: 20639 - DNA, 431 bp, Setaria italica
  Peptide Sequence Number=SeqID_86613
tcgggtaccacgacatgacgatccgcaggatgaagaggaagccgaacgccgacagcgccggccccgccacgcccgccaccgtcttcgccgtcgccgggtccagctcgcccagcaccgccaacgccgccgaagacgaagcatggcatggcagcactgctagtgtgctgctcatcgtcgtcgccgctgcggcgacggcacccaataggccaccgcgtgctcgcgtcgttacagggacctggccatcgctgcagcgtctttctgatgagtgggtgccgagttccttgttgtggccggcagcgacgacgaggcacctcctgctcgcagagacgatcgaatacacggtcctgggcatggaaggtttgggagccaaaagcaacgaagcctccatgagaggcaagcaagcaagcagcagctctgccgactctgccttg

SEQ ID NO: 20640 - DNA, 521 bp, Setaria italica
  Peptide Sequence Number=SeqID_86614
gaaaagggcatacgtagagcaaaagctcccacataagctgggtctggggaagaaacaaatggatggaaattaaaacaaggaaatcttgagaactgcaaacattgagcttctgcaaaatccttgttttctgcgccctgcaagaccccgagatccaagaaacatcccaaataagaccaagaaacggccaccaaagcaaagacgtgaaagatccatcaagaacccaagaacagcaggagcaggcggcgggggcaacggaccatccgaagaagatggcctagttgtagacggagaggtagagccgccgcagcgctgagccgacgcccgccatcgccggagccgcggtgaggaggaacaagacgccgcgacggggatgtgcgagggcgcagcggaggcgagcgcggatgccggcatggtgccggtggtggcgacgatggccggctcggcctgctgcagcagccactgcacggtctcgccgtcgaaattgtggccgagatccgcgcggcgcagagcgcgggcatccg

SEQ ID NO: 20641 - DNA, 1450 bp, Setaria italica
  Peptide Sequence Number=SeqID_86615
tttagcagggcatatccattcaagtgtcaccgtctcaagacatgaaaatgtttactgaaaaggcagtagatgatactactggcacaagaggaaaaagttcgtggacactggacaaccaatcatgtattgttgtccaaatccgagcgacacagtacaacagcacatctagcaagatatatgagggataagcattaatccaaacataggcaccaaatcacatggaaattcaccctgttatgggcgattttggatcaacaataatttaagcatgcaacagctgatacatcattgggacaacacgtactgatcaggcaattcatggcgaagttccattccaaccccctccccgccccaatcgctaacttctaccgaaagagttggaaactcgagccattaggtacacattctgacatcacacgagcccttctacaaagctcttgagcagcatcacgcagtcttggccttcgacagggccttcttgcgctgcgagagcatgtagccgaacatgtgcgggcttcctggaatgtagatcacgagggcaagaatagatgtgtagagataatcgtacgagaaattccacttgttaggcatcctaaagctgtatttctctgtcgcctgcatgtaaggcaatgcggtgtatatgaggcctacttcactagagataccagtaggatacaggagcataaaggtgctgtacctaagccacaggagccatgaaggtgcagatccaaacgcctccttcatcccaaagaaggagtatctgatgatctcagtgatcgaccagctgatgaccagtgtggaaacaaggatgtgggactgggtctcgggaaaactccacaacacaccccatgtcaggaacaacctggatccaatttgaggaagggttgcagagactggagacctcaccagccctacaaggccgtgcagaatctccatgatggcggcggtctgcgcgaactgcagcgggcgctcgacggcggcgtagacggcctcgtgcccgctctcccgcagcgccaggaccgcgtagtacagcacctgcgcccatccgaagaagacgacccagttgtacacggagaggtagagccgccgcagcgccgagccgacgcccgccatcgccggagccgcagtgaggagtggaggaacaagacgccgcgacggggatgtccttggctgctccgacaggggtgcaggtgctcacctcgctatagtagcacgccgcacgcaccagaacgggtggcgtaataagcttgggcgtcttggcggtgagctgcacggacgaccggacgggggagttcgattcgatctggcagcggcgggccaaccactggtcggatcggattgaatttggaattgaattggggatcggatcggggccgatggaggacaggtgagccggtgggcagcgggggagttattgccgctgcagctgcataactgcccgcccgccgcc

SEQ ID NO: 20642 - DNA, 461 bp, Setaria italica
  Peptide Sequence Number=SeqID_86616
cgctacgatgtttgggggtatcaaagaatacaaatttctcgataattaacagcactggcttggctcggaacagattgaacaacgcagccacccaaattttctttctccagtgcgcctatcagagctcctccaacgactgccgcaagcgggaaaaaaaaaaaggaaaacgaagaatcagtgctctatctgaagcttgggggcccttcattgccaccacgctctactaccgctctggctctgcggaaaagagcgcggcaccccgtcgccggagacgtcgcggctcgtggacagcctctgcttcctcccgctcctcctatcgccgccgccgctcacctcgcacgtccacggcgccggcctctgcttcgtctcgctcaccatgaagcagaagccggacaggcccaggtccagttctagacccggccggccgggcctcggccgcttcgctgccgagtgcatcgccg

SEQ ID NO: 20643 - DNA, 266 bp, Setaria italica
  Peptide Sequence Number=SeqID_86617
catggagaaagtacaacaggaatggagcacttattcaatcggcaaccgtaattttcaagagctggacaagaggttcagaaattaaggacagcacataaaaatagaataatctgccgcccagtaaaagtagtctattttagcccatgcctgaagaatgtccaccagttaatagaacgacaaaagcaacaggtgcgctgaaagagaaagttctaatcctcgccttctcagaataatcaaatgacaaaaaagaaaatctgactgtaaca

SEQ ID NO: 20644 - DNA, 574 bp, Setaria italica
  Peptide Sequence Number=SeqID_86618
agtggaaatgcgtgagaaaagttgccgggggagtttttcggaaaaatttagatttcctttacagaataattcgtttaaacccgaatctcaccatttaaatcacagaaatttctaggagtgtccaaaattagtgaaaccaattttattaggcttgttttattttcctttatgcattaatatttttataccctagaaaaataataaaaatttgggtatttatttaatgcctttcttttaaggtaattaaataaatacttaatctttataaaatgcataaaatatggaataacattttcataatcacaaattattcttaactcataggaaattaggttttcaagttagaaaataattataaccttttctaaaataaaagaaaggccttaagtaagtttaagtaaggaaataaaattgtgggctaatcttttcggggtttttgtgtgttggcttgcaactttatcatgataaattgtatagttcttgttggcttgcaactttatcatgagggaaagttgtatagtcttttattcaaaaatttgcattcctaacccctgcatatgttgtgctatagacc

SEQ ID NO: 20645 - DNA, 471 bp, Setaria italica
  Peptide Sequence Number=SeqID_86619
aacagcttatgagagtttatggtgcattgatgtggtctcttggcaaagtattgaatacacctgaggttttcacgtgtttatattgggtaacttctgatacatttgatctttgttgtgagctctttgatagtttatagcagattacattagacttccaaactgtaggttcacaattactactagactctagaagttccattgatgtatttcatttaccatagtttatcagaatcttgttctggtagtgaccttggatcattcaaacacatgcaaatcattcaaagtgacttccaagtttacctgtaggtcattcaatgacaaaccagtaaatgaatcagctgttggtccacttggaaaggaactatttgagagagagcaagatgatctcctttctgatctcaaagatatccccaagaaagcatgtgatcgtcggatcaatgaatttgttaacgtgcttagtagtcttgtctt

SEQ ID NO: 20646 - DNA, 748 bp, Setaria italica
  Peptide Sequence Number=SeqID_86620
gtcgggtctgcaaattattgggtgttctttctaactcaaccaaaaattaaaataacttccattgatgcattactagttcatttctataagatgcttggatctgaatgtttgtgattcgtgaaaatactctcaattatctagtttatgctgttgtgtggtgattagcagcctttaccttttttctctaatttttctctgaaattatcagctgcagttatatcattaggcatggtatctatgattgtttctgatttcttagggtttgttgggaatgttagctaatataaaagaaacattataagggatgcaagtctcgattgttttgggtcattgggtcgacccaaaactcatctaattgaattaatccggatttcaaagcaagggaagcaagataaaaatgaactaactaatggctcattactacacgtttgtgtcaccacttgcttccctagtattatacagacatcaccaatcaatattaagtttaagctcatcatatattttatgcaaattcttgcttgtggagcttgtaatagatgctaagcacctatttcaacacactcttcgaccacttttagtttatttatcttattctaatgctattgcagttaacttagcatgtgtttttgtacctatacttcccctcttttgttgctccagttaacttgtgtatgctttgccagtcaggatctgacgaaagactattcctgggaatactattgctgttcaagccgacatgccttttagt

SEQ ID NO: 20647 - DNA, 2089 bp, Setaria italica
  Peptide Sequence Number=SeqID_86621
cacgtcgtagggttttgcttcccccggcggtaaagcggaggaggcgggggcggaggggcgcggcgaccgaccgccgcccggccatggagatcgggcagtaccccgcgagcggctgctccaaggagcaccagaagatctaccaggagtggttcgcgctcgcggactcagatggggatggccgcatcacgggccccgacgccatcaagttcttcggcatgtccaagctctcccgccccgacctcaagcaggtctgggctatcgcggactccaggcggcaggggtacctgggtttccccgaattcgtcgcggcaatgcagctagtctctttggcgcaagcggggaatgagatcactcaggatagccttaagcgcgatgatttgagcagtttgaatccacctgtgatggaaggtttggatgctctactcgcgaaatctaagcatgtggtgaagcgggttgatccggaaatggatggatttcctcaggaacaatcacctttaacaaacaaatggttcagctcaaagtcatcaaagaagataccgctgacagctgttacttctgtcattgatggcttgaaaaaattatatatcgaaaagctgaagcctttggaagttacatacaaattcaatgattttgtttcccctttgctgacgagtagtgattttgatgcaaagccaatggttatgctcttaggtcaatattctactggtaaaacaacttttatcaagcatctgctaagaacaagctatccaggtgcccatattggaccagagccaacaacggacagatttgttgttgtcatgtcaggatctgacgaaaggactattcctgggaatactattgctgttcaagccgacatgccttttagtggtcttacaacatttgggactgcatttttatccaagtttgagtgctctcagatgcgacatccactgctagagcatatcacatttgtcgacacacctggtgttctttctggtgagaagcaacgcacacaacgtagctatgatttcactggtgtgacatcatggtttgctgcgaagtgtgatcttattcttcttctgtttgatcctcataagcttgatatcagtgatgagttcaaacgtgtcatcggatctttacgtgggcatgatgataaaatacgtgtagttttgaacaaagctgatcaagtagacactcaacagcttatgagagtttatggtgcattgatgtggtctcttggcaaagtattgaatacacctgaggtttcacgtgtttatattgggtcattcaatgacaaaccagtaaatgaatcagctgttggtccacttggaaaggaactatttgagagagagcaagatgatctcctttctgatctcaaagatatccccaagaaagcatgtgatcgtcggatcaatgaatttgttaaacgtgctagagctgctaagatccatgcttatataattggccatctaaagaaggagatgcctacaatgatgggcaaagcaaaagcccaacaacgactcatagacaatttgcaggatgagtttgcaaaggtgcaacgggaataccatcttccggcaggggatttcccttatgtggagcacttcaaagaggtcttgagcgggtatagcttcgacaagtttgagaaagtcaagcccaagatgatacaggcggtggatgatatgcttggatatgacattccagaacttctcaagaacttcaggaatccctacgagtgaacccatacaggcagttcaaagatgacttttgtctgcaccataatgagggactgagcatgggggcacagattgctgctgcctcccgtagcgctggaattgtcaggcaacgtgaatcatccggtcaaggtcatgtggggcgttatttgccattcattgttgtaatgcataagaatcggagagccattgctcaagctttcacggaacatgtggtcatgtaaaatcgactaaatagtgatctttagtgttatacagctgcactcattgtttctcccaatgagtatttattccttttttgggaacaactggaataacgcagttctctcgaagtgtcaattatcagtgcgtgaagaatcttggaccagcgtggggcg

SEQ ID NO: 20648 - DNA, 2585 bp, Setaria italica
  Peptide Sequence Number=SeqID_86622
aatctggtatacagcaaaatgtaagttattcagctgttggtaatgatcgtgtggcaggatcacctgccaatttttcttgcaatcaatccaagcatttcgtctcctcagagcatgattggttacaatgacactgccaatggccttctatctgtgaagagggaaatgcaagatgctccgcttcaagatcctaagagaataaagccaactggtggtattgatgatgtacagcagcagcatataaggcctcaaccccttggtgggcaggaaatgcaatggaagaacccacaattgcatccacaattagatgtcaaggggatgcagtatgcttcttcattgagtggtcagcgatatcctccttcgatgatgaacaacatgcaagattcaggatcttccttctatttcaatcagcaaggtttaagatatggtgctaagcaagagcaaatggatggttctgataggtcgaaagacgcattgcaatctatggcacctgaaaattctgtgctggatcaacagcaacctcaggctcagcatttatcacagcaatcaacagcaagaaataatgttccaaacatggcacagtggcagaatactcggtttgcagctgagaaggacttgaaaaaagaagaaataattcaaagaagaaagatagcacctagctcccgtgccccttctggtccaatggtccagtctccggtgtcctctaaatcaggggagatatcaagcagttcaatgggtggtcagtttggctctgctgtgacatcggctgtaattggggcacagaaagataaatttgctgcaaattccaatgctgctgttggatacccttctgtagcttccagcccaagtgattctatgcacagaatacagcaacctgctgttgctccttcaaagagaaaaacaaattctgtccctaaaactcaaccacctgttagtgctgttgggtctccagccagtgtttcaaatatgcacgccccactgaatgctagcagcccatcgattgggactgcacctatgggtgaccaagcaatcctggataaatttgcaaaaattgataatctttcccatcggtaccagcttcacagtaagaagaacaaggttgataagatacctcaaaggaaacccatgatcaatgcaagccaagatgtagcaagatgtctctccagttgtttccatactgaggactatatagatacaataagacctctttgcaattctatgattagtggaacaataaacacgtgcaagactagggtaataaactttgtgagctcgaaccgcatgtaccaaggtcatgcaaggccattccaggttgttttcaaggaaatgcctgatgaaactgttagaatgcaatatggagatctagaagattttgatggtccgaattcatatgattgtgtattcatattaccgacgaagtactatgctgacttgctggcagagcagcttattcccctgatgttgcaagatgggcattctaaagctgaagataaagttgtgcgtggcacccctcctgctaacctcaatacactatcaggaattttaccagacaacttagcaagtgacgtgaagcaagagggaggtgtaagccagcaacttaatgctgcagcccatgcaaatgtggcacctggaccaccaatgcaacagcttcctgtcaacaggatgctttcatctgcaaatagcaaccaggttctagcaatgcagcaagggtatatgcaaggggcagccatgcctccgaggagccagcaacttgaccaaactttggttcagcagccacagcaacagcagccccagcagcaaccactgcagcaaaatgctcaagcacagatgcagcaaccatcatctcttccactcaaccagatgcagagacctcaacttctaccaacaagccctttatctcagatgttggggcctggctcaaatctcccgatgggctcaagtcaaatggggaacaataaggctactccgacttccttgcagcttcagatgctacagcagcaggcacaacagcaacaacctatgtctaggaaagtgatgatggggcttggctcagccatgaacatgggcaatatggttaacaatgtcgtcggtctcggtggcctaggaaatgttatgggaatgggcaacgtgcgtccaatatcctcccccatgggatcgatgtcaggcttaggcaacagttccaatacaatgaacatgggaatggcatccaaccttgctgcagctggacttcggccaggtatgaaccctgctgctattgccaagatgcgtttggctgcacagcaaagggcagcaggcatgtatccgcagactggaatggttggaatgcctggaagcagctctccaatccttccaagttcagctggcttgtccatgatgggccatccgctaaatagaagcaaccttaaccccttgcagcgggccatgatgtcttctatgggccctccaaagatgccaggaggtaactttcagctgaacgcccaacagcaaatgcagctccagcagcagttgcagcagcagcagcagctccaacagaatccgcagcaacaacagcagctccaacagaaccccacagcagcagactaagacaa

SEQ ID NO: 20649 - DNA, 318 bp, Setaria italica
  Peptide Sequence Number=SeqID_86623
ggcccaccccaccaccgtcctctccgacgccaggctgcccattcttcgctctctcgctcccgtgacgccgggcgccggccggaggatgtcgaatcggagacggcggcgcaggaggtgggggtgcgcgacggcgacggagaagatgtggtggggagcgggtggttttgggcgtcatcggcgagccgctgagcttcgtgtcccccatggtgatgctgggccgcaagtcgatcacgggcagcttcatcggcagcgtggaggagaccgccgagacgctgcagttctgcgtcgacaaggggctcacctcccagatcgaggtgg

SEQ ID NO: 20650 - DNA, 495 bp, Setaria italica
  Peptide Sequence Number=SeqID_86624
cttctccgtcgccgtcgcgcacccccacctcctgcgccgccgtctccgattcgacatcctccggccggcgcccggcgtcacgggagcgagagagcgaagaatgggcagcctggcgtcggagaggacggtggtggggtgggccgcccgggacgccaccggccacctctccccgtacacctacaccgtcaggtacgcgcttccgccgccctccgccggccatggccgtctccatcgctccggtcttcgtctctcccttcctgctcgatctccgttctttgaaacgtgcacgcgaaggagaattcaggaagacgaacagattctgctgcgtctttagtagttctcgtgcggtcagtttgttttacacttttactcctccgcgatcaggaacacaaatctgatggatggtttcgcaaaaaagagaaaacaaggaatccgatcgatgaatggttgtgaaggaaaaatacctattcgtaatttttttctttcttattccta

SEQ ID NO: 20651 - DNA, 1659 bp, Setaria italica
  Peptide Sequence Number=SeqID_86625
aaaccacccgctccccaccacatcttctccgtcgccgtcgcgcacccccacctcctgcgccgccgtctccgattcgacatcctccggccggcgcccggcgtcacgggagcgagagagcgaagaatgggcagcctggcgtcggagaggacggtggtggggtgggccgcccgggacgccaccggccacctctccccgtacacctacaccgtcaggaagacaggccctgaggatgtggtggtgaaggtgctgtactgtgggatctgccatactgacatccaccaggccaagaaccagctcggtgcttcgaagtaccccatggtccctgggcatgaggtggtcggtgaggtagtggaggttgggcccgaggtgagcaggcaccgcgtcggcgatatcgtcggcgtcggggtgatcgtcgggtgctgccgcgagtgccgcccctgcaaggccaacgtcgagcagtactgcaacaagaggatctggtcctataacgatgtctacaccgacggccggcccacgcagggagggttcgcctccaccatgatcgtcgaccagaagttcgtggtgaagatcccggcgggtctggcgccggagcaggcggcgccgctgctatgcgcgggcgtgacggtgtacagcccactaaagcacttcgggctgacgacccccggcctccgcggcggcatcctgggcctcggcggcgtgggccacatgggcgtgaaggtggccaaggccatgggccaccacgtgacggtgatcagctcgtcgtcccggaagcgcgcggaggcgatggatcacctgggcgcggacgcgtacctggtgagctcggacggcgacgccatggcgggcgccgccgactcgctggactacatcatcgacacggtgcccgtgcaccacccgctggagccgtacctggcgctgctgaagatggacggcaagcacgtgctgctgggcgtcatcggcgagccgctgagcttcgtgtcccccatggtgatgctgggccgcaagtcgatcacgggcagcttcatcggcagcgtggaggagaccgccgagacgctgcagttctgcgtcgacaaggggctcacctcccagatcgaggtggtcaagatggggtacgtgaacgaggcgctcgagcggctggagcgcaacgacgtccgctaccgcttcgtcgtcgacgtcgccgggagcaacatcgaggaggccgtggcggcggcggaggcgccgagcaactgattgacggtgccgtgtgtgcgcgtggaccgtgaggctgtgtcggtctcgtgtgtcgaggtgtgcgtgggctttctgcttccttgggctgagttgtgtgtgttctggccttctgggcttggcgaagggcgagtgaccgctgcagctgaattgctggcacagagagagtttgttcgatcggcatcagcttgcagacgggatggtggatgctcgagttgttctcaggccaaataactatgtaatattattcctataaaaaaactactcctatgtagtatacttagagtatgcctgtatctagtgtttctggcgttgcgtgtttgtgcttaatcttattgtcggccaggacgacttacgaagtacggtacttaggtaagtaacgtaactaaaacgtaaacgttaaccgtaacttaaaccgtaacttttaacgttaaa

SEQ ID NO: 20652 - DNA, 318 bp, Setaria italica
  Peptide Sequence Number=SeqID_86626
tcaggtggtgcatttgcttgtttatcgctgcacgtaggacagatccagccaggtggtttgcgtggcaatcatcgtcaccatacgtgcaatgagacattcgtcatctggggtgcaaagacaaaattcaggttagaaaatgctgacgtaaaagataagggatatggagaggccataattgcagctgacgaggtcggcattgttgcaagtacaagatcgactgcgcatgccttgatcaatatggatgtgcaacctaccttcttcatcggatgtcaggatacactgataaatcctaacagctcaaatctgactacaaggtct

SEQ ID NO: 20653 - DNA, 1288 bp, Setaria italica
  Peptide Sequence Number=SeqID_86627
cagattttacatctgactctgatgatttctgtgaggagattgcaaaaatcatcagagtcagatgtaaaatctgactcatctgaatttgattcctttttctggatatctttatcagaatggaaacctgctggttcattgccatcctcctctgagtcttcagaaggtaatcccaggtcatcgaccttctttttggccgtcaaaggttccgaatcatcagaatcagaagaggtcaaaaagtttgagtcgtcagagtctgatcctccatcctcatcctcttcctcttcagatgatccttcttccttactagccacatgctcttcgggcatattgggttcaaagtcattgtcatctgaatcatctgatggaagatcaaatgcgtcatcttggttagagccatttgccatagtagctgcctctggaaaaactttctcccaagagtcgtcaatggagagatcactcccctggaggtcatttattacatctatacagtctatcttgcaatcacacgcagggcagagccatccttcatctccctcaggaatatcttcagtacgcagaggaggatttaaacagttctggtggaaccctctgtcacaagctccatcacagagaatgatatcattacccaatgtaacatcctttgaaccacaattggcacaaaaaatatcttcacaagatatctctccttcagaatcaaataaagactcatcaatcttccccttcgagaggagagaatcaagattctggaagacttcccgtattctcaacttgcatcgcaggatttccgcctttgctcgttcaagctccttctcaggtcttatcttatccaaactttgatttttccagccttcactagcataagcttcaatcaggctttgctcatagttcattcgattcaaaatgtatctaacccgtttacgaatttgagaaaactcgtctgttgaacttttgtttgaggataaacttttgtttgagggtctgcccctttttctccttttggcagccggttgtactggagtctgtacatgttcagtagatgttgtctttgaacttgatgtgccgcgaagcaccctgacattattatcagatgacctcaaagtataggctttatctgttagtccttgggagccttttttacctctgtttgctgcccttttatagtttttccttatccccatgttgttctgcactgttttagatggagacagcaaaactttgtattgtcttctaactagtctcagacaggagcttacaccattttcaacctcaccattgccctcaataggac

SEQ ID NO: 20654 - DNA, 855 bp, Setaria italica
  misc_feature (445)..(445): n is a, c, g, or t
  Peptide Sequence Number=SeqID_86628
gagttgcagctgatgtgtggcatacttggcagtatgaggaagcaaattctaccaaagcactctgcaaatatggtcccagagttgttgttcgttgcacaaaaccaattatcaagggagatgaagtttgcgtaacatacattgatcttccccagaccaagtgtgatgctagggacttaaataaaccagaggatgctgttgcagctccaacagttgaggatttggatgatgacttgcaacaagcaatatctgaatactcattgggtgatgatgccaaagcttgttgtgatatgattgaaagcatgctttctgaaaacttaatgagagatttgcagaaaggggaacttcgagggagaaaacatatactgcaccctcttcaccatctctgtttcactgcttacatgacacttgcctctgcttaccggtttcgtgccctaagtttaaaacnggcagtttgcatggagaaaaaagtgatgatctttttagaatggccaaagctgcagcagcttattcattagtacttgctggagctacgaaccatctgttcttatctgaatgttcctttatgatgccactgtcgcattttttaataggtgctgggcagtcattgttttttcttgttcaatctatgaagggagagatgaggcagtatttatctgcggctaagttcacctttccttcatgtccagaaagttctgcaaaacatgatttagtgaagtataatgagttcagatcaacttgtgaagggtttggcaaacaaatgctatctttgtcgtttcattgccttggttctattgtcttagttcctaaggttttaccctttgttcctttggttaaaagtttaatttttcttttaaa

SEQ ID NO: 20655 - DNA, 685 bp, Setaria italica
  Peptide Sequence Number=SeqID_86629
gctatgaatagagtgatatatgaagttttccagaaccaaatcgccaattgttgcagaggattctcaaaatgatgcagattgttggatcgcacaaagctgtaaataggatgtctgcgtctgctttggcagcttgcatggcaccacttcttcttcggcctcttcttcttggtgaatgtgaaattgatagtgacttcagtatggctggggacagttcattccagttgcttcaagctgctgctgctgccaaccatgctcaagctattgttattattatgcttgaggaatatgatcagatatttgatgatattgaagacggttcatactcttcagatgcttataccgagtctgacattgacaaggaatattcaacagacaatgacatacatgaagatgatggttcctatggttctggtgaagatgatgtcgaagaagatttgaatgataatactgaacactcttctggcaacaggggtgaacgtgatagtaacattagggttggtaatgcagatgaccaggttatctcgggccctgcatgtgatgaaaatgataaagttgttcaaccacctgtgaggaccacgagagtagaacatggtgtgccaacagaagaaagtaatcaaattagttctcttcaaaaagttgacgaaacctctcaaatggagagcaaccttcatcccaatcaaaacag

SEQ ID NO: 20656 - DNA, 853 bp, Setaria italica
  Peptide Sequence Number=SeqID_86630
tccctagtttgcaggtttcttcctatccaatgtgaggtaacttccagcttgacgactagagaaacgcagcactctacaataaggacatgactgcaaaatagtggatgaattgggcatgagctatcccacgcaaccacttctgagaccaaaacaacaacagcatggcagatggcactggttagggtccctacataaccaaaatttacaacaatctcgccgacaatttcacgctagaatcattggtgaactaaggagttatggcctttccagtctcaaatcaacacctgggctattgatgctacgttctgggtgactgtggtgcatcagagccatctgctgatgaactatctgtgtccgtatcactagaggacgagcccgagtcactactagagcttccagaactacttgatctaccagcagtctctcccttctgatcttccaaatgacccggtgatgattcacccacgtatctctcattgtcatctgctgcattttccttaggttgttgtggttcaacatcaactgcttctggttctggaatcggttcttgtactgcaggaatctgatcctgatctgcctcatcctgcctcacatgctctatcttctccagctcctgatcaggctcagcctcagcctcggcctcatctggccttactgcagaaagctcagccttccgcttattcttagttatactcttcttatagtttgtcacaaatctatcaagctcccataatgtttcaacatcaaagctatcgatatcaacctcaatctcatcatcatgctggctgagtgacaggttcctcttctttatgatctgaacaacattgtctagcttctctggtggcaaatcctg

SEQ ID NO: 20657 - DNA, 479 bp, Setaria italica
  Peptide Sequence Number=SeqID_86631
ggaaaaggatctacgctcccagttactcaaagatggattgaagcctcaacaaggctgtttgctcgcgcgttacaatgatcccaggacaaagagcttcttaatgaggaacgaggtgctgatacggctaaatgactttacattggagttgtaatctattcactgtcaggggcaacagatttatgtaacactacgtgttgggtttggagatttcagtgcaccattggaaaggacaaatcatgtagatgggcggatgtgctttatgtaaatgtaaattctgaaaggccaacggacaggccttcacgcatgacggcatggtgttgagtgagccattgtttcatggggcgtgagtagcatgaatacaactgcctaggctaacactgttagtgtactcctacaatgaatgtttttgtgtgcgaggcattttccttgtggaactagactctttcaaaaacttagaaaagtctgaagccctcaaagtg

SEQ ID NO: 20658 - DNA, 1503 bp, Setaria italica
  misc_feature (1466)..(1503): n is a, c, g, or t
  Peptide Sequence Number=SeqID_86632
caccaccacatctctccgctcccgcctcctcatcctcccaccgccgccggcgtcccccaccgccgtctccctccgtctccgcccacacgccgccgtactgccctcatgttcccggaggaggaacctccacctcacggcacgggcggcgccgcccggcggcgcggtggcccccgcgtcgtcgtcgtcggccccggcggaggagaaagagaaggatgagaagggcgggggtgtggggctgtcagcgaccgatgcggagatgctgtgcgagttccttcgcgccgacctgccgcacctgttcgacgacgtgggcatcgaccggtccgcgtacgacgaccgcgtgcggttccgcgaccccatcacccgccacgacaccatcgacggctacctcttcaacatccgcctcctcaagctactcttccgccccgacttctacctccacgccgtcaagcagacagggccgtacgagctcaccacgaggtggaccatggtgatgaagtttatgctcctgccgtggaagccagagctgatcttcaccgggctgtcgatcatgggcgtcaatccacagaatctcaagttcaacagccatgtggatctttgggattcaatacaaaacaatgagtacttctcgtttgaaggattacgggatgttttcaagcagctacggatttacaagacgccagacatagaaacaccaaattaccttattctaaagaggactgcacattatgaggttagaagttatgagccattcttaatagttgaagcaaaaggagataaactgacaggatcatcaggcttcaataatgtaactgggtatatatttggcaagaatgcttcatctgaaaagattccaatgactacacctgtcttcactcaagcttctgatgacacactttcagatgtatccatccagatagttctgccgatgaacaaagacttgaacagtttaccagctccaaatacagaagcagttactctgcggaaggtagaaggaggcattgttgcagtaaaaaaattcagtggacgaccaaaagaagaaattgtgctccagaaggaaaaggatctacgctcccagttactcaaagatggattgaagcctcaacaaggctgtttgctcgcgcgttacaatgatcccaggacaaagagcttcttaatgaggaacgaggtgctgatacggctaaatgactttacattggagttgtaatcatcactgtcagcaacagatttatgtaacactacgtgttgggtttggagatttcagtgcaccattggaaaggacaaatcatgtagatgggcggatgtgctttatgtaaatgtaaattctgaaaggtaataagctacatgataaagcaatagatcatcctattttgtttatacaccaaattttgaattgacagaaaaaagaagtattagaacgaaagtagatgagaaaggctcttaacctcggcaataacctctcgtgcttnnnnnnnnnnnnnnnnnnnnnnnnnnnnnnnnnnnnnn

SEQ ID NO: 20659 - DNA, 348 bp, Setaria italica
  Peptide Sequence Number=SeqID_86633
aaagctcagcatcttgcttactgagttttgagtgcaaaagaacaaagtagatcttccagaaacatgcttcagtcatatcagtagagcaaatctgaacctttaaatctgataagcctaggacaaggtgctctacagataatgcgtgcacatattgagcatccgacagttcaaaatctagaaaagcaatagaaactatgttaagatacaagaacgcaatgacggaaatctttgaggtctatttcacataatgtgatggcacttttaaaaagacaagacatagctgatcacccattaaaggattaacggcaaaaggaaagtatgagtatacaggcaaaagcagagcatgaa

SEQ ID NO: 20660 - DNA, 1375 bp, Setaria italica
  Peptide Sequence Number=SeqID_86634
atcaaagattcagatctcaattattgcattgcatgaaacggaccggaggagcaacgagattcagaggggcaaagcgggtaggtcttacacaaggcccaaagggggagctctctatgtacaggctacagagaacgggggctcaaataatacagacgcactgctcgccgtcaaacactaacacgagctgcattgacagacgacgcttatcattacgatcccgcatctagggtatccgagaccgggctactccttggattcattacttccgggctctaataataacaaagcaatgatccttggattggatgtgatcccggccctactccagcatgtggttgcgggagtgtcggatcagagagatgattgcgcaccaggaccagattttttagctaacctggtccacttggctactgcccatgccttttattcgcatcctcgtcctcgtcatcttccaggtcactgaaggacacgtcttcctcccgccctaatgaagttctgctgcctgccgcaccgacctcctcttcggtaggatcatcatcaggccactcgtcaacttcatcttcgtcaatttcaaagcgaagcttggactggacgggtggagtcttgccctcgtttttcactgccagctcttcctcaatcactgacttgtcaactatttccacttcagtggttgaaatcgggaatttttcagactcgatttctggcgtgatatctgaagtgggttcctcaaacgatgaaatctctgatgtaccagctttatcttggatgcttgaaggttgaatcaccttctcctcagcaggagcagtggatacattcgtgttctctgatgtttcaccagtaaacttggataccctcttattctgagcctgtaaactttgcaataattgctcccttgcttctaggatctgtggagttgaaagaagctcagcatcttgcttactgagttttgagtgcaaaagaacaaagtagatcttccagaaacatgcttcagtcatatcagtagagcaaatctgaacctttaaatctgataagcctaggacaaggtgctctacagataatgcgtgcacatattgagcatccgacagttcaaaatcatcggcgtagcgctcgctgatgaagagggggaaatcgagccatgtctccggccgcgtggagatgtgcctaacgaacaccaccacctcctcggtgacgccgggcacgggctccccctcgttggcctccccctgcccgaacggcaggagcgacgaggcgatcttggagatctcggcgacggccaggttgttctgcagcatcgagaagccgctcctcaccctaaccctacccgaccgaatactaccgaccaaggtacgactaccggaatacccggacgaataca

SEQ ID NO: 20661 - DNA, 385 bp, Setaria italica
  Peptide Sequence Number=SeqID_86635
ttctccatggacagctccctggtacacctcgtggaatcaggggtggggagtggattggcgatggagccaaatgatgctggtgtggaggattgttgtcaccatagttcccgtaagcaggcggaggcggggcgggacgcggatagtagcaggcgggagggctcttgcgcttgtgggaccaggtcggattggtggcgccgccggagtaagaggaggagaaggcggcggcggggttggtgtagtagtcgaaccgctggggcgggcgcgggcgctggcaggtggcctcgtcccccgcgaggtcggggtccgggaggaggttccccgcgggcgccgggggaggcgcccccacgggcgacgcgctggcggcggagcggagggcgaggaggcg

SEQ ID NO: 20662 - DNA, 502 bp, Setaria italica
  Peptide Sequence Number=SeqID_86636
ggggacgggagttggcgaatcttagggtttcggtcgccggggatggagtcctccggcgatgggggcgatgagggcgctggggcggcggcggtcgggatggggagtcccggcccggcgtcggcccctgcggccgttggtggcgggggtagcggagctggtgcgtctggatccggggggaagccgccggtgaagcgcgtgatgaagacgccctaccagttggaggttctcgagaggacctatgcagaggattcgtatccaaacgagacgaagcgggcggagctgtcggtgcagttggggctgacagacaggcagctgcagatgtggttctgccaccgccggctcaaggaccggaaacctcctgccaagaggcagcagcgggatgaggaggtcaccgtgccagtcatagcgccaccacccgtccttccgcctccattaccgcacagtgagattatggtggggactgttgggacttacggtgagcagctgctgccctactccagga

SEQ ID NO: 20663 - DNA, 299 bp, Setaria italica
  Peptide Sequence Number=SeqID_86637
tatgagctattgtggattggtaagcacatctaacatcgtggatgacgataaagtaactgtgacctcagattctgatctgatttggacgatatctcttcggcattgagctgaatttgccataatttagcgtggttccatgcccaaattttgtcgcctcactgttacatggatcgaggtcatattctgtagcgtggtgtgctgtcttccgctgctttttgcagccggatagatgtcaatatatgtgtgaagttcttgttcataattgacggttccactttatgaaggcctcactaaatgca

SEQ ID NO: 20664 - DNA, 728 bp, Setaria italica
  Peptide Sequence Number=SeqID_86638
aacaaaaaacccaataaaatctcacctcgcctccgcgcagtccagccagcccccgtcgcccaccaccccaatctccacgcgtcgccgccgcctgccggcgagtctatccccctccgccacgccgccgaagcttcccgaccccgcagcggttcggataaggcaggcggtcgccgccaacacgccctcctcccgttcccccacccctccccggccccggaaccgcttcgggctggatctagggttgcgtggggagcagttctggaagcccccgccgcgatggacgcggcggacggtggcgccagcttcaccgccgccggcgaggagctcctccggggccgcgtacgggagaagctgcgcgagttgatgatgagcgagcccgacacttccctcctggattatgttatggtcttgctcaagaatcgaagatgtaaggaaaaggccataaaggagctccatgtgtttctaggggatgacagtgaagcattcgtttcctggttgtgggagcatctttctttacatttgcacctttatgtgcaagcacaagaacaaaatcagcagcttaaggatgatgaggcccccaaagaagtatctgaggcccccaaagaagtagctggaagaccaaaatcatcagatgcgctcccagaaagcaaaggtcaaactcattctgtgcacacaactgaatcaagtacagccactaggggacgaaataagagggaatggaaaggaat

SEQ ID NO: 20665 - DNA, 712 bp, Setaria italica
  misc_feature (706)..(712): n is a, c, g, or t
  Peptide Sequence Number=SeqID_86639
ccgggggaggcgctggccgtgaacctcgctttcgcgctctcgcgcgtcgccgacgagagcgtgtccccggcgaacccgcgcgacgagctcctccgccgcgtgcgcgcgctgggcccgcgtgtcgtggcgctggtggagcaggagctgaacacgaacacggcgccgctggcggcgcggttcgccgacgcgtgcgcgcactacggcgcggtgctggagtccctggacgcgacgctggcccgcgacagcccgcagagggcccgagcggaggaggctctggccaacaaggcgaccaacgcgctggcgcgggaggggcccgaccggatggagcggtgcgaggtgttcggcaagtggcgtgcccggttcggcatggcggggctccggccagtggcgatcgggcagggcatcgccgaccgcgtcaaggcacggctcggccacgcacgcccggggttcgacgtgaagctggacagcggccggctcggggtcgggtggatggggcgcgtggtcaccgtcgcatccgcctggcgttagccttttcctgcctggtgcgatgagctcatcggctcccggggcacaaaattgttgccgtcaccaaatccattaggaatctggacgagccatccgaagatgcctagctgtaatccctcgaaattctttattgccaccgcttgttgaatgttggagagtactatctgattacatcaaaaannnnnnn

SEQ ID NO: 20666 - DNA, 169 bp, Setaria italica
  Peptide Sequence Number=SeqID_86640
ggaagtaccctaccacaaagtaacgaaagacaaaagatgaaagctagcccagaagatggggaggactaaggagaccctctctacacttctatcattacagattatttgccatggctgggcccatctgtcatgatgaaagctagcccagaagatggggaggactaaggag

SEQ ID NO: 20667 - DNA, 623 bp, Setaria italica
  Peptide Sequence Number=SeqID_86641
ccgtgttttttagtcattttgaatcacacgtattaaaaggattagtttcatatagagaggaatgcttgtggttagggaaagagtttacttaataccctcatcctcgggctagaaaacatggatctatttctgcttgacttagtacgaatcctatcatttatggctttcacggggtgccaaaacagattactactcaattctacctggaggacagacatagaagccagaaccaaaccactatgccaagagcttttggggaagcagaaatggtttcaagctgagcccgaaagcaagatccaacagaggccaacctcaagacaagagtcttccaggggccctgcatgtactcctggaaggtgcaaagacaggaagagcatacggtggtaacccaaaagcaaagtccaagacgacagatgactttgtggtagggtacttccaagtaacgaaagacaaaagatgaaagctagcccagaagatggggaggactaaggagaccctctctacacttctatcatgacagatgggcccagccatggcaaataatctgtaatgcccttgcactagaaggcatagaatatcctagaatatgcttgcaactgaacaaaaggggactggatatgagc

SEQ ID NO: 20668 - DNA, 306 bp, Setaria italica
  Peptide Sequence Number=SeqID_86642
ttcccttagttcgttcagcgcccgcccgaggcaggacgcaacagctagcaggcagagcaccgcaccgcgaagcaaaccagaggacgagggggggaaaagaggccgcgcccgcgagggaatcaccggcccgggcgcgggccgcccaccgcccacgcccagccgccgccgccttcgccgctgctgcccacgggataaaccacccgtagcctcccctgacgggcgcattgcggcttgcggtgcggtgcggactacgacgggacgggtgccgagggaataaaagggccgggcctggcggggcggtgcgcg

SEQ ID NO: 20669 - DNA, 627 bp, Setaria italica
  misc_feature (556)..(627): n is a, c, g, or t
  Peptide Sequence Number=SeqID_86643
cggttcttggtgttggtggtggagcgtggaggtgtataggagcaggtctaaggcgagactggcaataggggatatctctggtggcgttgaggacgccgaggaagcactaagaatagctcccagatttcctcaggctcacttattgcgaggtgatgcgcttcttgcaatgggcgaatattgtgctgcagaagatgcttatgcagatgccttggatcttgatccatctattcgccgatccaagtctttcaaggcccgagtcgagaggctacgagagaagcttgtcagtgccactaatccatagctcattttaaaacttcctccccgtcagaagttcatcccaacaagtaatgtagatatgtacttggtaggtctgaattgctcaatccatggctagctgcatcccttgccttatggtcagctgtgcacagtgtacagtctcttcttgattattgttatcaatttcatatttggaataaatgggatgaggagattaagatgttggcaatcccttttggattttttttcaatataagatgttgatgattgaacataagtnnnnnnnnnnnnnnnnnnnnnnnnnnnnnnnnnnnnnnnnnnnnnnnnnnnnnnnnnnnnnnnnnnnnnnnn

SEQ ID NO: 20670 - DNA, 269 bp, Setaria italica
  Peptide Sequence Number=SeqID_86644
gtgtcggcgccgccgctcaccagcgagccaatcccagccgcgtccttggagatggggctgatcatggcgatgtggatggcgtcgaacttggcggtggagaagtatgcgcaggtgacgaggaggaagccggcgacgagccccatcccgaacttgcgcggctccacgcggctgaagctcttgaccagcttgccgtcgctgtggccgacgctggcgtagctgtacggcagcttcccgccgccgccgccgtccatccccatggctatccctca

SEQ ID NO: 20671 - DNA, 436 bp, Setaria italica
  Peptide Sequence Number=SeqID_86645
ctttttgatcatgactgtggccacatgttgttcacaattcactcaatacagaagtctcatctgtggggaattgcaatctggcatcatgcaaaatagttcggacaaacacagtaaagtggaatgttgtgcaataattttttttgaacgaaccgcacaagatagtgcgagcttctattgatatagcagaaaaatacaagactacaaccctgggaggccacaatcaggaaaagaaaagaaaatggaaaaaaaactcagccagttggattgagacatcaacatggccgcaccgctcaactcaagtgcaacaaccgtccggttggattgggacatcaacacggcagcaccactccactcagcagcaactcccaaccggttggtttgggacatcaacacagttgaaaccactctactcaacaacaaacattgcccggatgga

SEQ ID NO: 20672 - DNA, 1614 bp, Setaria italica
  Peptide Sequence Number=SeqID_86646
cagaggccacctctggcataccacaggatggagtacatggtctgtcgacagaaaggctttagtttacaaccagtcattttctggaatgtcacacattggtgctacggctacagcgtaacgcttaacatcatctctctacagagtttacacccaaaagaatgttgtcttcgatatttagctatttctgtgcactgaagtgcaatgtgtcatgcatacatggtacaacacgaatgggcagccggggcaaaacaaatcgtagctcggctttgatgaatcccgtgaggaacaatggtcgtcctccctcccataatctgcacacatcttggaatccatgaaaagaatgcggaagctgggggcattggagtcgatgcttctagctacgttgcagtaagcaaatccagatgctgaattgctgatggtcgtgctgatcaatcttcgtgctcatcttcttcttcagagtcagatcgaacatcatctccaacatttctcgtccttatttgtctcacaagcatccgatatattaaaacccaccaatatatgtggaggacaagtagtgaaaatagaagggaattgaacacatagtagtatataggaccgtcaaaattgtgcttctttttatccaaagtcaacaagacctcatagcttgtacttctcagaatccagaatggaaaatatgtgaggcggagaagaatccatgaaacaacaaaaagcagaaacgaaatgttggcaagccaatcacaatggctgtacttggacatcttccctacttccaggaaaacgtcacttgcatcatgaattgccaatactatagagccaactcgagcaaatctgaacacataagatagaacaatcagaacaacagtagcaacatgatgcgacattgacacgccaaagtctgaacgccttgtttcccaaaaaataagtgcaaatatggaatatgtgtagaatccagcagcatacatgtaaaccgccttaagtttcaattttatcttctgatcaggccaaacctgttctccaggtcctacccaaaaatatctggtattggtgaaccaaggctcattatatgtgactgacagagctaaaagctccccagataggaaatagacacatttccaagccgattccttgaattttcttatcttcttccttgtttcttctgtttcattactagttctctgatgtccctgcccaagtataagcctccttgcaaccctctcgaagacgaagcggtcgaggaagaagcggacggtggggaagaagaggacgaaggccgggagcgcgaggaagtcgtcgtacgccgggtaggactcgcgctcccagtccacctccgcgaggagccgccccgccgccgccccgagccccatgtccccgcttccccccggccccggccgaatcggaggccgcctctggagagtcccgtggcggcggcggctgctagcacagaaggatcgacgcggttgggcccgattccgcggcggctacgggcaggaatggcctctggggggagccgccggcgtggggggactcgtctcgcgctgtgtggccgcggtcgcctccgtgtttacttctgtagaaaaaggaaaaaacaaacaagcgtagtttttttctactttc

SEQ ID NO: 20673 - DNA, 225 bp, Setaria italica
  Peptide Sequence Number=SeqID_86647
cgcgctgctgtccgggatgcagatgacgacgcggagcgtgctcccgctgtggggcagggcgagcctgcggttcaactggggcctgcgcatgccgccggagctgctcgccgacggcggcggcggccgcagcaagggcgcggcgcgcgcgcccgtcagcaagatgccgctgctggtcatgagcaagctctccatcgagcagtccccgcgcgccgacgccgacagcag

SEQ ID NO: 20674 - DNA, 590 bp, Setaria italica
  Peptide Sequence Number=SeqID_86648
gcagggtttcttgggtcacgtaggcggatgttccgaaagcaagcttctctcgtcggccattgatcaagatgctacccgtctttttcttatcgttcccaagtcgtccagccagggcgtcaagtagggtggtcttgccacaacccgaaggccccataagagccagaacttcgccagggcgtgcacacccgctgagcctgtcgagaatcactgcacggctccccttcccactggaggctgtcaccgtgaggtcctcccatgtcaggaaaaccctaggcctggcatcctctgggcgaagatcacggtctcttgctccaacacagtccagtggatgacagccgactcggccgccgccgtcatccgccgcattggccggagcatccgctggcgacggcggcgcggcagaacaccggaagggcacaaagatggagctgaacgagctgcacaccgcccagctgctacatgatgacatcactgtttgcccggtgctcgacaccctgagcggtctggtcgggctcggtgtcggtgcccatcttggtagcggtgaggctgccatggatcgacgatcagtcgatcaacttaagtaagtacta

SEQ ID NO: 20675 - DNA, 866 bp, Setaria italica
  Peptide Sequence Number=SeqID_86649
gagcaatattgatagcccccgtgctgtcagagtgaagaggagtcggtccagtcaaagaaacaccaaaatcctcaagtagccaccgtaactaggagagctctgatgtcaacaacgccatagcacgcaactcagcctctgcactagaacagaaaaccgcggtttgcttcttagtcttctaagcaatgagagaaccacccaagaaaacacagtaagcagaaatggaccggcgatcagagggatcactagcccatgtagcatcagagtaagcacgaagctgcaaggaactggagcgtggaaagaaaagacggcgagagctagtgacacgcaggtagcgcagaacacgaagaagatgactgtagtgaatatgtgtgtgggcggaaacaaactgactgagaatatgtactgcatgagaaatatccggacgatgcacgtctcagtagaccaaactcccaacaagatggcgatagcgggtaggatctgccaaaggctcaccatcagtaggacacagctggaggttaagctccatcggggtgtcaaccgtacgctcatcagtcagagaggctcaagcgagaagatcatgaatgtacttctcctgggataagaagaaaccatcagacgaagaggaaacctcgatcccaagaaaatagcgaagaggaccaagatcagacatgagaaactgctcacaaagccgagccttgacaaaggcaataaactgagaatcatcccctgtgataatcatatcatcaacatataggagaacaagagtacgaccacaaggagaagagtggatgaagagtgcaggatcatggtcactagcagagaaaccagcagcagtgacaacagaagagaaacgctcaaaccaagct

SEQ ID NO: 20676 - DNA, 415 bp, Setaria italica
  Peptide Sequence Number=SeqID_86650
ctgccgtccatgcctacgaacacgcgctgcgagccagcttcgttggtttggaagggcgatgcttgccgttctggttcattttgaggtagccgggcgaacggacggagatgaagcttaacagcgggctggagttcgaggtgtacagccagggcacgttgaagacggagctgtgcaacaagtgggaggagactggcgcgtgcccttacggcgaccagtgccagttcgcgcacggcattgccgagctccgccccgtgatccgccacccgcgctacaagacggagatctgccgcatggtgctcgccggcgtcctctgcccctacggccaccgctgccacttccgccactccgtcagccccgccgacctcttcccccagcatgacgtctgattatgtcagtccatggcattggtcgtcct

SEQ ID NO: 20677 - DNA, 736 bp, Setaria italica
  Peptide Sequence Number=SeqID_86651
cggatgcggccgccgccgcggatcgccgccaccgcctcgcccgcctcgcgctccagtaccaggaggtgctcgcccgcttcgagctctgcctctcgtacctcgccgacgccagcaacgaggcagcggcgctccggcgggagaacgatgagctccgcgtcgccaacgaggacctcgcccgccgcatcaagatggtcggcgacaagctcgccgacgagttcagcggtctccgcctcgccgaggggcacgggcaccccaccccacttcgtcctctagcaccgcttccagtcgtaccggcgctgccgaagagcatctccgtccgttcgcccggctacctcaaaatgaaccagaacggcaagcatcgcccttccaaaccaacgaagctgggctcgcagcgcgtgttcgtaggcatggacggcagcgtgaaggaggatggggagcgcaagggcggggaggagaagaagcttaacagcgggctggagttcgaggtgtacagccagggcacgttgaagacggagctgtgcaacaagtgggaggagactggcgcgtgcccttacggcgaccagtgccagttcgcgcacggcattgccgagctccgccccgtgatccgccacccgcgctacaagacggagatctgccgcatggtgctcgccggcgtcctctgcccctacggccaccgctgccacttccgccactccgtcagcccgccgacctcttcccccagcatgacgtctgatta

SEQ ID NO: 20678 - DNA, 1041 bp, Setaria italica
  Peptide Sequence Number=SeqID_86652
cgagctcgcgcaggcgcaggcacagccgcggccgcggccgcagccgcaggcccaggtggccggccccgagctgcgcagcttggagccgtcgtgggtcccgctctacgtgaggctctcgaagctgggctccggcaggccgccgggaagcgtggcggcggagctggacgcctgggtcagcaagaggaggccgatctcggtggtgcagatcgtcgcctacgttcgcaagctccgcaagttcaagaaagatgcgtgcgcgctcgagttgatggactggatggaagctcgcggagcagagttggggctcattcatcacacgctgcgccttgacctcatttccaaagtgcatgggatacaggcagctgaagaatatttctggagccttccggatatgtttaagtcaaagaaacttatgcctgtttgcttaattgctatagtgcacatgggatggaagatcaaggtttggaactctatgaaaagatgaaggccctgaactttgttccagatacgctgatgtacaacagcttgatggccttgtaccaaaaggcaggtcagccagagaaaatccttaccacatttgaagaaatgcgagaaagtggtataatggcagataaatttacatacttcacattgatagaaagctatattataatgaatgacctagatgccgctgagaaggtcctggaagaattgcaggatgtggctccagttcactggtccttgtacactctgatggcaaacagttacatcaaactagagcagtttggcaaggcggaagcagccctaaagaaagccgagaaagttatggatagggctgaattgcgctcctggcattccctcctctccctctatgcctgttctggaaattcaactgagcttaagaggatctgggagtctttgaggttggcattcaagaaatgcttgaacagaagctatcgggtgatgcttcaagccctgagtacggttgatgactttgactgtttgcagcagatctttcaggagtggcaatccagtcatgagtatttattgactatgtaggtatta

SEQ ID NO: 20679 - DNA, 415 bp, Setaria italica
  Peptide Sequence Number=SeqID_86653
ggagcaccttgaccgttggtgcattttttgagctacttgtgtttgagggaaaagtcaggagcacttcttgagctgcttaacaagtgtgttacacctagatgaaaacaagcaagttgctccttctgaactatgccctattgtttagaggtttgtgctcagttgctcgctattgtggctaaggtttcaaacgatgaggatccaacaagtggaggaaaccactcgctaagtttttgaggcaggcacatttcattgtctgggacaacagttatcttgtcactcatgaggtgatgagtggcctgaagaatgtctatgctattggagctggtaaaactaatctctccattttcattagctgacaacattagtgtaattgggattctactcgatgttgaagaaagcatatcaaacatggaag

SEQ ID NO: 20680 - DNA, 2028 bp, Setaria italica
  misc_feature (1988)..(2028): n is a, c, g, or t
  Peptide Sequence Number=SeqID_86654
caccttgcccgccgcgccgcgccccagtgccggctgccggccagctgcgccccccgggatccttgagctggaggtggtggtggatgaccagttctcggaattttctgaggggaagatcggggggtgttgtgttggtccgcagtgggtgagcggcgtttgaagcgatttcgcgcgtggcggagtcgttgggtgatgcaggaattttatcctgggcggctaggactgcgtcacgctcaaggtgttcgattaattgcctctgagagcacacacgtgcgagctcagctgctataggtatactggtttgagtggtttttgaattctgatcgattgcgagagagatggttgggagcgtgcatatgaatggatcggtgcacggtgccaatggcactgaggagcggctggacgagctgcgccggctgctcggcaagtcggagggagacttgctcaagatcgtcagcgtcggtgctggcgcgtggggcagtgtctttgctgctcttctgcaggacgcctatggccacttccgggagaaggtgcagataaggatttggcgtcgcccggggaggacagtcgaccggtccactgcagagcatctcttcgaggtgatcaactcgagggaggacgttctaaggcgcctcattcgccgctgtgcctacctgaagtatgtcgaggcacggctcggggatcggacattgtatgctgatgagatattgaaggatggattctgtctgaacatgatcgaaacaccgctctgccctctgaaggtcgtcaccaacctgcaggaagccgtctgggatgctgacattgtggtgaatggagtgccatccaccgagacaagggaggtgtttgaggagatcagtaagtattggaaggagaggatcagtgttccggtaataatttccctggcaaaggggatagaagcctcattggatccgattcctcatatcattacacccactcaaatgattagttcagcaactggagttccaactgagaatatactctatcttggaggaccaaacatcgcctcagaaatttataacaaagaatacgcaaacgctcgaatctgtggatccaacaagtggaggaagcctcttgctaagtttttgaggcagccacatttcattgtctgggacaacagtgatcttgtcactcatgaggtgatgggtggcctgaagaatgtctatgcaattggcgctggaatggtggcagctttaacaaatgagagtgcaacaagcaaatctgtatattttgctcattgcacgtcagagatgatattcattactcacttgttaacagaacaacctgagaaacttgctggtcctctgctggctgacacttatgtaactctcctaaaaggtcgcaatgcatggtatgggcaaatgcttgccaagggagagttgagtcctgacatgggtgatagtatcaagggaaagggaatgattcagggtatctctgccgttggtgcattttttgagctgcttagtcaacccagtttaagtgtgcaacacccggaagaaaacaagcaggttgctccagctgaactatgcccaattctgaagaggctttacagaatattgataaaaagggagctcccagcaagagacattctccaagccttgagggatgaaacgatgaatgatcctcgcgaaaggattgagatggcacaaagccatgcattctaccgcccatctctcctcgggaaaccatgatcatattagttctgtatattagaagaacataaacgaaggtgggatgagatcgaatttgccaagctaccgatcattcttgatcgaacttggagcaggtgtatctgcactgctgctggcctgtgtttgagcttatagggccttcgtcagttgtggaattttttgtgctccttcattgccatgttgtacaagatcactgaatcaataaactttatgatcgccagtcatatgaacagagtacctgaggaataagctactcttgaatctcttgaaataaaaggnnnnnnnnnnnnnnnnnnnnnnnnnnnnnnnnnnnnnnnnn

SEQ ID NO: 20681 - DNA, 418 bp, Setaria italica
  Peptide Sequence Number=SeqID_86655
ctctcccggaaagaggatgggggcgggcgcacagcggacgcgcaggcgtgcacggtggtgcacttgccgcgtgctacatcccatccatcatccccctcattgacgccacgacctgcttccccccctccctctctccccgggagatgcgtggaagcggtaaccgaatcaggaccctggagcgcgcgccgagcaaccccactgctcccgtccacacaccaccattaccacccaccctgctgtctactactcccaccaccactgctgataggatgatggatgggtggagagagaaacaggacgagagaaagagagagagagggagttgaaactccaactccatccatccagccggtcggtggcgtttcttgccgggcggtcatgcgtgcttcctcaactcgccccggcctcctgtttccat

SEQ ID NO: 20682 - DNA, 454 bp, Setaria italica
  Peptide Sequence Number=SeqID_86656
cactccttccccccgccgccgccacctccgcccttgttgtggctgccaacgcccctccgcccttctggcccttgctgcagcagcagcgcgggcttgccggccttgttgagcttccggatgatggtgtccggatccagcaagccggacaccgtcaccttcccctgctccgcgtcgatgctgctctggtacacgccatcgatcttgtgagggtcttcttgaccttcttctcgcacccatcacagtgtatgttgaccctcagcaccagagtctgcaccttgagcacatcctccttgctcatcctggaaacaccacctcccaaacgctacgccgaaggcacgggagacagtctctgtaactcagatctggtgcccgggagcgctcaacaagccaggggaaggcgacgagcgaggagggagcagctgtggagcatttctgttctctctcccagaggaag

SEQ ID NO: 20683 - DNA, 742 bp, Setaria italica
  Peptide Sequence Number=SeqID_86657
gggcttcatcatcatcttggggtcgtcgtagaagtcgtcgtctaggccgtcgtcgtcgtaatcgtcctcgtcgtcgtagtcgtcgaattcgtcgtcgaactcgctgccctcgtcgtcgaagttgtcctcggggatggcgaacttgacggacttggggtccttgagcggcgcggccgctgcgaacgctggcatcttgccgcccaacagctccggcgggagcttcatccccttcatctgcatctgatgctgcagctgctggagctgctgcggcgtgggctgcggcatggattgcggcagcatcatcttcgcatccttccccccgccgccgccacctccgcccttgttgtggctgccaacgccccctccgcccttctggcccttgccgccgccggcgtccttggaatggcccttgccgccgacgtccttggtctggcccttgccgccgccgccgccatggtggccgttctgaggggcgccgggcttggcgccccacagctgggcgggcttgccggccttgttgagcttccggatgatggtgtccggatccagcaagccggacaccgtcaccttcccctgctccgcgtcgatgctgctctggtacacgccatcgatcttgtggagggtcttcttgaccttcttctcgcagccatgcacgcgctgacaaacaaaatacgcaccaacaagaaaaacgcaagcaatccgctgttaaaagaaaccagtattttctttcttaccatcgatc

SEQ ID NO: 20684 - DNA, 668 bp, Setaria italica
  Peptide Sequence Number=SeqID_86658
ggaatacaatctaaatgaaggtccatgacaaggatgtcataggaattacgcaccatcctcacaggaatttggttgccacctatgccgaagattgtatgatccagtttaccagactggtagctaaagcaatacatgttcatatcttcaccaacacaatacaaccagtctccttttggggaaactgaagctgcaacaaaatctcccccttcccgtttacctgatgagaaagtctttacaacctgtccttgaaaagtcatgatgtatattgctgaagtcttactacagacaacaatgtgatcagtatttttgggaaatagatggacagaattaacagatgcatctcctcccctcaaaggaggtggtggcttgaaagtatgcaagcaatcagttgtttttgtatcccagacctacattaacaaacaataaatgaagaagcaaaagcaaagaattgttgaacaatagaaagtgggactgtatatatgagatgagatagcaccttaacagtacaatcactggaagctgtaataacacggctaccgtcagttgtaaagatggcataattcacataggaattatgacctcggaattctttcagcatctttccagacttgaggccatgtactctcgcagtagtgtcaaaggatgtactcaatatcttgggttccgtc

SEQ ID NO: 20685 - DNA, 1866 bp, Setaria italica
  misc_feature (1)..(4): n is a, c, g, or t
  Peptide Sequence Number=SeqID_86659
nnnngtaatcatcatatcagctttgtactgtactcaaattataaagatactagaactagtacaggatacaatggaacacattgggttctatatgcaccaaggagtcgataatgaactattaagcacctcccagttctctaaattacaaaactgaatacatcctatttaattagcacttcagacagagccggataaccatgttccctaaaaatacaggattaatacagacaagtaaacaaaaatcagggcttccatatcttcatcatacaatcttcggcataggtggcaaccaaattcctgtgaggatggtgcgtaattcctatgacatccttgtcatggaccttcattagatgatccagtttaccagactggtagctaaagcaatacatgttcatatcttcaccaacacaatacaaccagtctccttttggggaaactgaagctgcaacaaaatctcccccttcccgtttacctgatgagaaagtctttacaacctgtccttgaaaagtcatgatgtatattgctgaagtcttactacagacaacaatgtgatcagtatttttgggaaatagatggacagaattaacagatgcatctcctcccctcaaaggaggtggtggcttgaaagtatgcaagcaatcagttgtttttgtatcccagaccttaacagtacaatcactggaagctgtaataacacggctaccgtcagttgtaaagatggcataattcacataggaattatgacctcggaattctttcagcatctttccagacttgaggccatgtactctcgcagtagtgtcaaaggatgtactcaatatctgggttccgtcacgtgagaatgtaacacttgtaacacctttcgaatgtgcgcgctcaagacgtcgcaagcactggccagttcgtatacgccaaaccttaatcttcccgtcctgtgatccagatgccagcatttcagaatctctactaaagtcaacacatagcacagcatcatcgtgcatcataaaactttcatcggcttgatattgaagatcctttttaagcttcccgctaatataatcccagacttcaatgattccatccactgagcatgaaacaaggtactgaccatcaggtgaaaatcgagcacattcgggatgagttttcttcccaaactttatttgatgagataatgtagtagggtatgtctcttcttcatcttgcttcatagcagcagttcctctgaacaaatcgaactgcgtgccaggcggcaatagtccttggtgctgctgccatttcaaagcctggccaatcaatgccataagccgagatggcgggactactgagacttcagaagcaacagcttgagcaatctgcgctcgccgcttctccttggtggattcttggtaggcctcattggggtcgaaatatgtgcggacaaggaggtgctcaagtcggaggtagcgctcaggctgctcctgcttcatgacgcccatgacctgcgtctggcggagaatggcacgggccgtgtcaagctctcggagctcggccatctccaacacgatctgctcatagaggtcctcgagcttcttgcgtggcagcttgagctgtgcgacctggggcagcaccgcatcccagcgcccagcattgatgtcggcaatgaaggtgtcgatgctgtcgaccgtgttgagggagacctggcactcgttctgcagcgtctggaacgtctgctgaagcgagttctccttgcagaactgcagcactatcttcaccacgtcgcgggcctcgatctcgagggtggacgccgacgacgccatcttcggcttctgcgggcggcggcggcggcggcaccaggtgaggtcgggagtacctgccggagaggaacag

SEQ ID NO: 20686 - DNA, 291 bp, Setaria italica
  Peptide Sequence Number=SeqID_86660
gtcggttatcagcctttgcatctcagaatatgtgtagggtctacagtatatttccagtgataaacgttgtaaagttagtactggagatttgcatcactgcaaattctatctgccatagtgtgcaggattcaggactcactcaacacgtactccagtgctcccctggctcaaacaagatccgacttcattgcaattcttgcttatagaacactgagcttctaggcctgtggagccgcagcatgctggtgactggtgaggtcctcagagtgatgccggagcgtcaatgcagcc

SEQ ID NO: 20687 - DNA, 648 bp, Setaria italica
  Peptide Sequence Number=SeqID_86661
acgcctgaacccaggataccaatgaatttctgttggatcatgatctatcagttgcaattgtccaactaattctgcttactgttttaggcaatgattgcaagctcttatgcattagtggactacaaaagagttcaaaagatagcaatgtttgcgttgcaggtaggaatggttagtggattagccttggctgttggtttgtatgcctcatttggcaacatagctagactattcaccagtgacccggaggtcctaatggttgtcaaatcatgtgcattgtttgtctgtgccagtcaaccaattaatgccctggcattcatctttgatggtctacactacggcgtatcagattttaactatgttggtcaagctagtattgtggttggagtcatgtcatcactgatcctgttatgggctccatctctatttggcctggctggagtctgggttgggttgactacactcatggggttgcgcatggctgcaggcatcttgaggttgctatggaaatgggggccttggtcatttttgcatgaggcgccataaattgaggtttgtcggttatcagcctttgcatctcagaatatgtgtagggtctacagtatatttccagtgataaacgttgtaaagttagtactggagatttgacaa

SEQ ID NO: 20688 - DNA, 541 bp, Setaria italica
  misc_feature (515)..(515): n is a, c, g, or t
  Peptide Sequence Number=SeqID_86662
tattggtataattgaagcattagcattgttcctaggatcaggattgtttcttaaactaatgggcgtgtcacctgtatgtttagattatgattcttattaccatgttttactttgtgatagtgaatagagttggcaatgactctttgactggatacagaacaagtaattgtgcacctcttgcaattagctagatatctcagactagtctttactcttttacacaggcctctccgatgtataagcctgcaaaagtctttctttcaatgagagctctgggagcccctgcaaatgtgcttatgttggcagtccaaggtgtctttcggggattcaaggataccaagactccggtgttttatataggattgggtaatctctctgctgtaatccttcttcctctacttatatatggctttcagcttggcataactggagccgcaatttctactgttgcatcccagtacattattacaattcttcttcttcggtctcttagtaaaagagctgtgctacttccnccgagaattgaccagttagagtttgg

SEQ ID NO: 20689 - DNA, 1977 bp, Setaria italica
  Peptide Sequence Number=SeqID_86663
aaggtggccttctacaagccggggcacaccacccctcttgccagtggccagtcaccaccggggtacagtactgatgattttggtcaaagccttaaaccaaaagacaacgtctctttcgctgctgcaaaggaggctgtcataggaataagcagtggcctgaattctgtgggtgccagaagtgagctaattcttctagctctaccggcagtattaggtcaagctattgatccaatggcgcaacttatggagactgcatacattggtagattaggtgcattggaattggcatcggctggtattggtgtatcgatttttaatattgtgtcaaagatcttcaacataccattgttgagcattgcaacttcatttgtggcagaggatatttctaagagtgctatcaagcatcctagctcaggaaaattggagcttacatctgtatcatctgccttgatattagctgctggaattggtataattgaagcattagcattgttcctaggatcaggattgtttcttaaactaatgggcgtgtcacctgcctctccgatgtataagcctgcaaaagtctttctttcaatgagagctctgggagcccctgcaaatgtgcttatgttggcagtccaaggtgtctttcggggattcaaggataccaagactccggtgttttatataggattgggtaatctctctgctgtaatccttcttcctctacttatatatggctttcagcttggcataactggagccgcaatttctactgttgcatcccagtacattattacaattcttcttcttcggtctcttagtaaaagagctgtgctacttcctccgagaattgaccagttagagtttggtgtatatctaaaatctggtggtatgctgttggggagaactctctcaattctattaaccatgacaattggtacatcaatggctgctcgacagggcccaacagctatggctgctcatcagatttgtttgcaagtatggcttgctgtgtctttgcttgcagatgctttagctgtttctgcccaggcaatgattgcaagctcttatgcattagtggactacaaaagagttcaaaagatagcaatgtttgcgttgcaggtaggaatggttagtggattagccttggctgttggtttgtatgcctcatttggcaacatagctagactattcaccagtgacccggaggtcctaatggttgtcaaatcatgtgcattgtttgtctgtgccagtcaaccaattaatgccctggcattcatctttgatggtctacactacggcgtatcagattttaactatgttggtcaagctagtattgtggttggagtcatgtcatcactgatcctgttatgggctccatctctatttggcctggctggagtctgggttgggttgactacactcatggggttgcgcatggctgcaggcatcttgaggttgctatggaaatgggggccttggtcatttttgcatgaggcgccataaattgagtgtgcaggattcaggactcactcaacacgtactccagtgctcccctggctcaaacaagatccgacttcattgcaattcttgcttatagaacactgagcttctaggcctgtggagccgcagcatgctggtgactggtgaggtcctcagagtgatgccggagcgtcaatgcagccaatgtatggcacttggcacaaccgtttatgagaagatgccattgttcaactccgttttgtaacaattgcagcgatgtctgttaatctggttggagcaatctggttggagctaatgtcaggcgcctgggcgctgggcagagtagcagcactagctgcccctaggagttcagaacttgatatgtgcatgaaactgggacccattagaaatgatgaaagatgtacgttttttctagtttttagaaatcactctctcttttaatttggtttcgctaagccgtaccggcctattatgctatgtacagagcct

SEQ ID NO: 20690 - DNA, 263 bp, Setaria italica
  Peptide Sequence Number=SeqID_86664
ctcaccggcgagagggaaatcaaaccctagcgcccccgtcgtctccgccggcgactccgcgggatctccgtcgagggcccccgcggatagagcgattcctcccgcgagacctaagctccttcgattagggatttccgcgggcgaggcgggtggtggcggtgggcgatttggggggtggaggtggaggtggaggtggaggggaaggggatgggggtctcgtcgaaggtggtgcggccggaggacgtgctggagtcgctgaagac

SEQ ID NO: 20691 - DNA, 985 bp, Setaria italica
  misc_feature (945)..(945): n is a, c, g, or t
  Peptide Sequence Number=SeqID_86665
caacatacaaagttacacacagcagaaatataattacagatgtcaatgaatagaagaaataagaaatcagaaacaaggatataacagaaatgtaacacaactacccacagtataatgtgaaggaatataaatatttaccatagctcgccacttgtgtccttcccagtacctcattttcaaaggatataaagattaacatgtttcataaacgaggtgttagaagagttcttctgagttgaatttgttccatgcttccttcagaaggtcaaacaccttttctgcgatgtacttttgttgaagatttgcacccttttgctgcaccttatcaggatggatgcacaaggtcgctttcctgtactctttcttgacagatgcagctgtaatcaaatcagtcagtgatataggtcgccaaccacattctggccaaagaatatattgcaatgttgacagcaaagcccgaaggttgccttctttcccagcagcccacctctttatctcaaaatcaagtgattcgccaattctatgtctctcttcctgctcccgttgagcttgcaagtcacgctcattcttctcagcaagagcttttgccgcacgctccattgtcctttggtgacgttccaatcttgccttccttctttcttcactctctccacgcacttcttgaaatacagcagatgatgaaggtgctccaaatacagaagataggtcatctacaagattgcttggtggaggctgtgtgaagggagaaactgaaccagaagatgtcctccttacagcaccagaaccagcattaccttgaggttgaacatcgaaagggttcgttgttgcggtgtgtgatctcggtacactacttgatctagaaggcataccaaagaatgactcaagatcaggttctgtagtgctttgctgattttctcttgcccgtgcttcagctgcagccctttnctggcttcattagcagccctttgccgagcctcagcagcaa

SEQ ID NO: 20692 - DNA, 576 bp, Setaria italica
  Peptide Sequence Number=SeqID_86666
aatgcgatcagctaattagatgacaataagcactacaaagataagcaagaagctaaaacagaacacagcaaaaaattaatgataaactgataaagcctcagaaaatgcccagtaatctcatttgaatgtaggactccaagtaggttcccctgacaaacagggcttggagctatctacatctcacacatcaggcaaatcatcataggactagcaatgaaaacacaataaatcaatgcaaatacattttctcaaaacttttgtaaaaataatctatttataaacctcagtaaaagcccatatatctcactccaatgtaggaccccaagtaggttctccctgaaattcagggacttgaggcgatctacacctaattgacagggcaactcatcattggctagtattagaagcaaggaaaatacagttaacatatcattataacaaacagtagcttatctattcaaagggatctgaaagcctattcaactaaacttacataacaatgattggcagacaataaggttagagtacaagcaaccacagccgcatcgctaatttagtgagagagtagtaagtaat

SEQ ID NO: 20693 - DNA, 858 bp, Setaria italica
  Peptide Sequence Number=SeqID_86667
cgaggccagaagattggaatgatcaccggcctcaaaagaaaaatggatctaaaagtccaaagtttcctgattttacgaacaaggtttcaaaagaggcactctggctcgacagtgcacaaagcacagtgctggaaaaactggatgatgtggtctttggtagtggttatgctgcatgtagagaagataaaccctacagtactgacacacagaaaggtaccagtacaaactggtcgaagtttaggaagagcccagatgcttctgcttcatcaaaacaaaaaattgaagaggaggagttgtggcgagatctactggacaatccagcaaattggtgggacaacagaacagacaagcgctcaccaaagagtcctgatttcaagcacaaggagtcgggcaaagctctgtggataggatttaagacacctcaatgggctgtagatgcccttccatccttgaattttaagggaggcagcaagggtacaagaaagcaagagaccttgctgtcatgatggatggatatatgagcttggcctcagtggtaagcccttgcatgtgctgtatgcacaactcccttgctaactattggggttgcctttgtgtaaaggcgtgtggcaattataattatatgtgctaactcctgattcaggtagagtatactaaacaaaattcaggttgggccattttgtcacgtcaggatcaggatgtaaatagtttccgaattgatgctagtacgatattgtcacatcacatcctgtcggcttaattcgatgatgccctttcaaagcccagttttggctattgtaccctttactattttctcgggttgattgctaaaaaaataacccgccatgtttcgtagtt

SEQ ID NO: 20694 - DNA, 253 bp, Setaria italica
  Peptide Sequence Number=SeqID_86668
ttgtcaactttgggatgattcctttgcatgctcgtgttaccttcatgtccacttgttccattttttggaacttctatttatctaatactatgaacaaatgaaaccgccggctcatcagggtatgtacgtattgacgcaaaatctgggcttcagacttctgcgttgatcaacacgaatgacttggggatctgcttaactccagtgcaggctccaaatcagctcgcgaaggtgcaagacgtgctagttaattcga

SEQ ID NO: 20695 - DNA, 612 bp, Setaria italica
  Peptide Sequence Number=SeqID_86669
ccccccccccccccccctcgttgcgaattttttcccctcgttgctataccgtcttaggttggcacctttgtcgacatggacatgggaatgtaaaactactggctcggagactgcttgtgaggagccgctgccatcctctcgaggcggaagctcggcgccgcacagttccaacccaaatccaccgcaatccctcacagttccaacccaaatccaccgcagtccctcacaaatccaccccagtttccaatcaacctacagatcctgaatctccgcatctccactccccagtttacagcttgtttcttcaccaacgagacccctctgctgccatggtgacttaggtgctacaaccttcgtcggcggcagcggcgtcgccggagggcgccgccggacctactcgcgctctgcggggtctgctcctgcctccggcaaatcgcctgcttgtggagcttcatccatcgctgagtgaacagcgacccgggtcctcgcggccaccgctcaggcaaacctccggcgccgccgctctgatctccctgctccggcctcctccgcctaagccggccgcggattggagctctcctccagacgctctctccattaatcccatcagca

SEQ ID NO: 20696 - DNA, 757 bp, Setaria italica
  Peptide Sequence Number=SeqID_86670
cctcctccctccctccctcctccccgtcggagagatccgggttggccccgcccccccggtaatcaatccctcgcgtccgtcccgcccgcaatttcgcctccagaaatcggccgccggggggcgcggtgggagtggaaggggggcccttcttctccctggggcgatggggattggggcggtgtcggacgagctgctgggcacattcgtgccgatcgccgtgtactggctctactcggggctctacgtcgcgctggacggggtggggcggcttgatgggtaccggctgcacaccagggaggaggccgccaccaagaacgtcgtctccaaggccacagttgtcaggggcgtcctcgtccagcaggccttccaggtcgccgtctcgctcaccctcttcgcggttattggtgatgagagtggtactggacagaaacaacctcctgcttctactcctcgctgccgcatgtccccttatcttttaccacggattttgtagagttgtttaggtttttagatgagcctcatgctccacttggttcttcctttgggcgtaatcatgctgtgaaacgaagcaaactcgataattttaattgcagaaatgatcgattgagacagaagatactggctaaatatgaagcaaaattgctgtttaagcttcctaggttgttctcgcatcccgttactgcatagccctgaacatgcttcagcatgcttctttttttcccttctagactagtctcggcacttgagcatccaatca

SEQ ID NO: 20697 - DNA, 750 bp, Setaria italica
  misc_feature (623)..(623): n is a, c, g, or t
  Peptide Sequence Number=SeqID_86671
taagtttttgtttaaatttttgtttacttttctttatttaattttagttaaaattggtaggtagggtagttatttattttatttaacttaatttctaagtccggtacaatacattctgaatttctgatattttcttccccttcattcatttattactgggggtttctatttcgccatgacaccaccagaagcacgtcaaacaggaacttgctcatcaaatcacccgcctttcggtatcaggccatgcatcttgcggtcgcaggtagtgttggttcgacgcagaagcattctcaattcagagacctgacattgcgtagtccatggcgtccaccaagaagtctgcatcatcctttgaaaagcacattggtggttttattctgaaaacattaccatgcagaccgcctttcccaactagtatcccaagatctagttaacaaaaaattacggaaggaaaaaactgtcagggcatgtggttatcaatatacaaccatgggtccatggctatagagagagtaagagatggcacctttgagtttctcaaacagttcggtagtttccgccttggcaggggtcttctcctttctgtcggtaacgagttccacaccaagcatgagtccccttcnctaacatcacctatgatttcgtgcttctcttgaagtgattttagacgctccacaagtgagctccaacgtcagcacaaattgtgcctggcgtttctccttgtcaagaaccttaagcacagctaaccca

SEQ ID NO: 20698 - DNA, 713 bp, Setaria italica
  Peptide Sequence Number=SeqID_86672
ggttagctgtgcttaaggtcttgacaaggagaaacgccaggcacattgtgctgacgttggagctcacttggtggagcgtctaaaaatcacttcaagagaagcacgaaatcataggtgatgttagaggaaggggactcatgcttggtgtggaactcgttaccgacagaaaggagaagacccctgccaaggcggaaactaccgaactgtttgagaaactcaaagatcttgggatactagttgggaaaggcggtctgcatggtaatgttttcagaataaaaccaccaatgtgcctttcggtatcaggccatgcatcttgcggtcgcaggtagtgttggttcgacgcagaagcattctcaattcagagacctgacattgcgtagtccatggcgtccaccaagaagtctgcatcatcctttgaaaaagcacattggtggtttttattctgaaaacattaccatgcagaccgcctttcccaactagtatcccaagatctttgagtttctcaaacagttcggtagtttccgccttggcaggggtcttctcctttctgtcggtaacgagttccacaccaagcatgagtccccttcctctaacatcacctatgatttcgtgcttctcttgaagtgattttagacgctccaccaagtgagctccaacgtcaagacaacaaatagtagacctaggacgtttactaccttagtacaaagaaacca

SEQ ID NO: 20699 - DNA, 761 bp, Setaria italica
  Peptide Sequence Number=SeqID_86673
tggagcgtctaaaatcacttcaagagaagcacgaaatcataggtgatgttagaggaaggggactcatgcttggtgtggaaccttaagcacagctaacccaccagcagaacaaacagggtttccaccaaatgtgttaaattggattttttgagacaacacacttgcaatctcaggagttgttacaacagctcccaatggtagaccattgccgattccctttgccattgttacaatgtctggaatgacaccttgtgtctggaatccccagtaatgacttccagtacgaccgaaaccactctgaacttcatcagcaatacaaacgccaccagccttccgcacaatgtcataagctagcttcaggtatcctggagctagttcgacagctcctccaacaccctgaaatgtttctgcaatgaagcctgcaacccttcctgaacttccataagttatatgttcttcgacttccttggcataagctgcagcatcagacccaaaagtcccccggtaaggatcagggttcatgacatgatgtatttcaccctgaggaatgggatacttccaagtctgcaaaccagtcaatcctatagttccagcacttccaccatgatatgcatttctgagcgcaaccatactgagattcccactatacagccgggccatcaacattgccaattcattcgcttcagtcccagaattgacaaagtatgcaacctttagattgccgggcatttggaggtgagcgcctctgcaaactcgacaat

SEQ ID NO: 20700 - DNA, 892 bp, Setaria italica
  Peptide Sequence Number=SeqID_86674
gcttatgccagaagtcgaaagaaacaataataaacttaataggaaagttacaatgtaaagtccttgtctctttccttgtaaccccataagttatatgttcttcgacttccttggcataagctgcagcatcagacccaaaagtcccccggtaaggatcagggttcatgacatgatgtatttcaccctgaggaatgggatacttccaagtctgcaaaccagtcaatcctatagttccagcacttccaccatgatatgcatttctgagcgcaaccatactgagattcccactatacagccgggccatcaacattgccaattcattcgcttcagtcccagaattgacaaagtatgcaacctttagattgccgggcattttggaggtgagcgcctctgcaaactcgacaatggcatgatgcaagtatatggtggttgtgtgctggagcaacttggtctgctccaccacagcactgacaatatccggatggcaatggccgcacgacactgtcacgatacccccaaagcaatcgaggtatctcttcccatgctcatcatacagatactgcattttcccctccacaatgttgagcggcttctggtagtagtggaagagcgacgggccgaggacggccttcctcttctcgaagatctctgcgccgcccatcccggcgtacgggcgtggctggtggtcgaacggcggcatctccggcggcgtccgcgacggcgccctctcgggcgccgcctccgacgagaccagccgccgcagcacctccgccgggcaccggcggcggcctgcggcgcgaagcagcgaggcggccatggacgaacaagaacaaccgggaatggaatccgaactctgaattcgccgggctggttggttggatgaggagatagg

SEQ ID NO: 20701 - DNA, 1738 bp, Setaria italica
  Peptide Sequence Number=SeqID_86675
ttttttttaattaggaaaatagcaattatactaatggtaaccagttcgcttcctcgctattctccctcctccgttccagtcattccaattttttaaaatcaaaccattttacgggatcataaaagtttatgacaccgaataaatatattatgaaaatatatttaataaaaaattatttgatatcatgaatgttagtaatttattgtataaatttggtcaaacttgagatgctttaaccctccaagaaagttgaaatgactcataattagaaaatggaggagggagtattatttattaactaattcaagccggacaatacattctgaatttctgatattttcttccccttcattcatttattactgggggtttctatttcgccatgacaccaccagaagcacgtcaaacaggaacttgctcatcaaatcacccgcctttcggtatcaggccatgcatcttgcggtcgcaggtagtgttggttcgacgcagaagcattctcaattcagagacctgacattgcgtagtccatggcgtccaccaagaagtctgcatcatcctttgaaaagcacattggtggttttattctgaaaacattaccatgcagaccgcctttcccaactagtatcccaagatctttgagtttctcaaacagttcggtagtttccgccttggcaggggtcttctcctttctgtcggtaacgagttccacaccaagcatgagtccccttcctctaacatcacctatgatttcgtgcttctcttgaagtgattttagacgctccaccaagtgagctccaacgtcagcacaatgtgcctggcgtttctccttgtcaagaaccttaagcacagctaacccaccagcagaacaaacagggtttccaccaaatgtgttaaattggattttttgagacaacacacttgcaatctcaggagttgttacaacagctcccaatggtagaccattgccgattccctttgccattgttacaatgtctggaatgacaccttgtgtctggaatccccagtaatgacttccagtacgaccgaaaccactctgaacttcatcagcaatacaaacgccaccagccttccgcacaatgtcataagctagcttcaggtatcctggagctagttcgacagctcctccaacaccctgaaatgtttctgcaatgaagcctgcaacccttcctgaacttccataagttatatgttcttcgacttccttggcataagctgcagcatcagacccaaaagtcccccggtaaggatcagggttcatgacatgatgtatttcaccctgaggaatgggatacttccaagtctgcaaaccagtcaatcctatagttccagcacttccaccatgatatgcatttctgagcgcaaccatactgagattcccactatacagccgggccatcaacattgtagtaatacccgacacctatactactcacactgcagaaaatggtaagaaccaattagaccgaattaccctttagaccaattagttaacaatagtactaggaaatagaacaaccttagtagtactaggaaatacccaacttaccaataaagttaataatagttacttacgaacttaccttaggacaataaagactagacaagacaatacaagaacccaaaaagtaccccggtaaaggaatacaagggttaacaaataagaaacaaataagaaataaagtaaatttaaacaaacctaaagaaagaaaataaggaa

SEQ ID NO: 20702 - DNA, 495 bp, Setaria italica
  Peptide Sequence Number=SeqID_86676
ccaaattggaaaatgcaaagccaatggcgttgaacaacacggaggaccttggagatttgcttaactctagtgcagactccaaatcggctcgtgaaggtgcaaggcgcgccagtcaatttgacctgaaaattgataagaaagaagaacatgtcaaagtaagaaaagctacaatgaggtcgctggcagataaggcatttaggtagaaagagtatgccatggcatcaaagatttatactgaggtgatagattgtgatggactagacgctaccctatattccaaccggagcctctgtaaactgaaactgggtgatggcaaaggtgccctgtcagatgcttaccggtgcaggacgctgcgacctgactgggcaaaggcttgctatcgtcaggctaaagctcacatgctactcaaggagtacaagcaagcatgtgacgctctcctggatgcgcaaaaattggatcccggaaatgaggagattgagagagcgctaagtaagg

SEQ ID NO: 20703 - DNA, 1053 bp, Setaria italica
  misc_feature (1037)..(1053): n is a, c, g, or t
  Peptide Sequence Number=SeqID_86677
ggtcggcgactggggccgccgcggggcgtacaaccagtcccaggttgccacccagatggggatagtaggggagaagatggacatcgatttcgtcgttaatgtcggcgacaacttctacaagaacggcctcaccggcgtcgacgacaaggccttcgaggagtccttcacccacatctacaccgccaagagcctccagaagccctggtacacaattcttggcaaccatgactaccgaggcgacgcgctcgcgcagctaagccccgtccttcgcaagctcgagagccgctgggtctgcatgaagaacttcgtcgtcgactcagagattgcggatttcttcttcgtcgacacgacccccttcgtcctcaagtactggaccgaccctaagaagagcaagtacgattggagaggcgttgctcctcgtgagacctacatagcaaacgtcgtcaaggatctggacgccgcgctgaagcagtcgaatgcgccgtggaagatcgtcgtcggccaccatgccatcaggagctccagccagcacggcgatacccaggagctcctgcagctgctcctcccaactctcaaggcacatggcgtcgatctctacatcaacggccatgaccactgcctcgagcacatcagtagcagggacagtccgattcagtacctaacaagtggtggcgggtccaaggcgtggcgtggcgtcttcacgcccaactccgacaagctggagttcttctacgacggccaagggttcatgtcgatgcgcctgaccaaggcggaggcgcaggtcgccttctacgacatcgccggcaccgtcctgcacacctgggggctcaccaagggcgcgcactagtagtagtgagccaatgatcgagctacagcatcgtgtgccgttgcctttgtttcaactatagctgattgtgcggatacgatgaaacaaattaactcctacaatgtgaagggagtgaactatcttggtcgtgaaataaattaaatggatgaattttctaagcagacaatagaaaattaataatgcacaagcnnnnnnnnnnnnnnnnn

SEQ ID NO: 20704 - DNA, 491 bp, Setaria italica
  Peptide Sequence Number=SeqID_86678
cggtggacatcgacggcggtggacgcgagcggccgtcctgtgcggcggtggacgcgaacggtggtggacgtcgacgacgaggaacggcgaacggctggggtggtggcgggggagctttgtggcggcgccggcgctgggtgcgcccgtctcgcgggtcgcgagaaggccaaggtatgtccgaccgaactgtccccaggaagggagaccagggtctgtgggcacggacggtccagccgtgtcagaatcatggtgagctggacattggtggcgaagatcaccaccatgaccttctgtgttatgtcctcctgcaccttgcgcagctgcgtggactgcttcccggccgtgcagaagaggcagatggtgctcttctcctggcacgcctccacgagcgtgtgggctcgccagagggtcttctccagatcctccagcgcgccgctaatcgccgggctgtcatccatcgacccggtctcctgcagcggcgacaggatata

SEQ ID NO: 20705 - DNA, 839 bp, Setaria italica
  Peptide Sequence Number=SeqID_86679
cttcccacttcctttgtgtcatatcactacagaaggatgtacagtgtggcttttgatttttcttgtactccgatctgacaatagaagacttatcctcactttcttccaaatttcataccaagaatttcacaacttgtcttcctcgataggaatcaatgtgggtcatctttgccgacacaagaagtcggtaccctagaaccgactgccaacatgtggacttctaaactgcatcacataatggattggctgacaatactgcatctttaacagataacctgctctcaatgatcaatcggcaaattgggcatgactggcacttgttagagcagggctcgcatagaacatgatggcggcagggaagcagaacaatgcagatgtctctttcaaagcaaattcggcacaagatccgttcattttttagcctatcacactgctgttggctatgatttgccatttcagtttgctcttccaaggctagttgaagtctctctacctctttgacaagaactttctttggcatctcttttaccacctctggtggataactgcaaaaggtactatagccaatgttatttgcatagcataagtgagcctgttcctctctgctatcttcatcaatagaccaccagtgaaggagccttgaaccatattgtatcatcataaacagctcattaactttcgaagacacagaaatatgtccttgactgataattccatcttgaagtttagtaagaagcctgtcgaagaatctccaaatagcaaaagatagagcagcaacttgcagcaaaattatgggcagaaaaatagctcgcattgggattaaaatgtgcatttagatt

SEQ ID NO: 20706 - DNA, 303 bp, Setaria italica
  Peptide Sequence Number=SeqID_86680
aactgatcttaggtgtgttcccagttgtgctgtcgccataggcaacagatggatcgccagcatcctctcccttcactccttcaaagagatcttcagacatatctgcagtagcatcatttcgttgcttctcagtctctagacggcgttttgacaagcgattggcttcctctttctcaaacaagagcgaaaaggcgcacctccttcttcttcctggcgaggttccagatcctccaggtcatgttctccaggcgcgtgttcttctcctgcgggctccgcatcgcgttcgcccggagccaggtcttg

SEQ ID NO: 20707 - DNA, 259 bp, Setaria italica
  Peptide Sequence Number=SeqID_86681
ctttggggccaaatggtattctgacgatatgtgcaccactgttctctcctctttcacattttaagttcttgaagcttgtcgaagccaacatctcatctcgttcaccgtagccacgatcaaaatttggggctaagatttgtcttgttaatagatcaacccggtaaactcccggagatgaacttaatgctttagcaagctccacgacatatttgacctggccaccagtatctgaatcacggccaagctccatattctctcc

SEQ ID NO: 20708 - DNA, 296 bp, Setaria italica
  misc_feature (274)..(296): n is a, c, g, or t
  Peptide Sequence Number=SeqID_86682
gcggaggagagcttcgcgagggcgttcctgtgcgaagggtacatcaaggaggaggctggcaggctccgtcacttcgccatcccgagccacaggggcaaggaagccatgccattttgcccttgagagatggtcagatatgctgatgacgttaattactgaagttattgtttttgtttctggtggaacaacttttgacactacgtgatgtgtgtatgcgtgacttcataatgagatttctgtaattttgtccaatgtttatgtataacattggggnnnnnnnnnnnnnnnnnnnnnnn

SEQ ID NO: 20709 - DNA, 634 bp, Setaria italica
  Peptide Sequence Number=SeqID_86683
agggcttctcaagcaagggagacagacgagggaacaaataaacatgacgtacaaaataatgcgccgaattgaggcagaggagttgtcccttgatgcatctgaaatagttatcgcaagcacaaggcaagagatagaagagcagtggaacttgtatgatggttttgaggtcatgcttgcaaggaagctccgtgcgctagtcaagcgtggtgctaactgttatggtcgctatatgcctcgtatggttataattcctccaggtgttgaatttggccacatgattaatgattttgatttgtatggagatgaagatagcccatctccagcctctgaggatccatccatttggtttgagataatgcgattcttcacaaatcctaggaaacctatgattctggctattgcccgtccatatgctgaaaagaatattacaacacttgtgaaggcatttggtgaatgtcatgcattgagggaacttgctaatcttacattgataatgggtaaccgtgaggctatttccaaaatgaataaagtcagtgcggctgttttgacatcagtgcttacattgattgaatgaatatgatttatatggtcaagtggcatacccaagcatcacaagaactctgaagttcctgat

SEQ ID NO: 20710 - DNA, 1009 bp, Setaria italica
  Peptide Sequence Number=SeqID_86684
taccgacctctacaagacatggctgcgcgcgaacgcgatgaggagcccgcaggagaggaacacgcggctcgagaacatgacgtggaggatctggaacctcgccaggaagaagaaggagtttgagaaggaagaagcctgtcgtatgttgaaacgccagccagaaaccgagaaaacacgagctgatgctaccgcagatatgtctgaagatctgtttgaaggagaaaagggagaagatgctggtgatccatctgttgcgtatggtgacagcacaacagggagctcacctaagacaagttcaattgacaagctatacatagtattgatcagtctacatggtcttgtccgtggtgagaatatggagcttggccgggattcagatacaggtggccaggtcaaatatgtggtcgaacttgctaaagcattgagttcatctcctggagtttaccgggttgatctgctaacaagacaaatcttagcaccaaattttgatcgcagttatggtgaaccagtggaattgttggtttcaacaagtggtaaaaattctaaacaagaaagaggagagaatagtggtgcatatataatacggataccgtttggtccaaaagacaagtatctagctaaagaacagctatggcctttcattcaagaatttgttgatggtgcactcagccatattgtgaagatgtcaaaggccataggtgaagaaattggcttccgacatccggtatggcctgctgtgattcatgggcattatgccagtgcaggaattgctgctgctctactttctggagcacttaaccttcctatggcattcacgggacattttcttgggaaagataaattggaagggcttctcaaacaagggcgaaaaacaagggaacaaataaatatgacatacaaaataatgtgccgaattgaggcagaggagctatctcttgatgcgtctgagatcgtcattgcaagcaccaggcaagagatagaagagcagtggaacttgtatgatggtttg

SEQ ID NO: 20711 - DNA, 2288 bp, Setaria italica
  Peptide Sequence Number=SeqID_86685
accatgggaacattaagtgctccagatagtagggtagcagcaactcctgcactggcataatggccacatgattaatgattttgatttgtatggagatgaagatagcccatctccagcctctgaggatccatccatttggtttgagataatgcgattcttcacaaatcctaggaaacctatgattctggctattgcccgtccatatgctgaaaagaatattacaacacttgtgaaggcatttggtgaatgtcatgcattgagggaacttgctaatcttacattgataatgggtaaccgtgaggctatttccaaaatgaataaagtcagtgcggctgttttgacatcagtgcttacattgattgatgaatatgatttatatggtcaagtggcatacccaaagcatcacaagaactctgaagttcctgatatttatcgtttagcagcaagaacaaagggtgcttttgtaaatgttgcttactttgaacaatttggtgtcacattgatagaggctgccatgcatgggttgcctgtaattgcaacaaaaaatggggctcctgttgaaatccatcaggttctggacaatggtctccttgttgatcctcatgatcagcattcaatcgcagatgccctctacaagatgctttctgaaaagcagttttggtcaagatgtcgagagaatgggctgaaaaatatacaccaattttcttggcctgaacattgcaagaattacttgtcaaggatattaactcttggcccaagacatcctgcttttggaaacaaagaagaacagaaggtgcctgtgaactgcaggaagcatatccttgttattgctgtagactctgttagcaaggaagatttagtccaaatcatcagaaattctattgaggctacacgcactggtactttgtcaggttcaacaggttttgtgctgtcgacttcattgacgatagcagaactacgttctctaataaaatgcacaggcatgcaccctacagattttgatgccttcatatgcaatagtgggagtgatatttattatccttcactgccaaataattcccatgttacatttgcactggacaataattaccgatcacatatcgagtatcgttggggaggggagggtttaaggaagtacttggttaagtgggcttcttcagtggtagagagaaggggaagaactgaaaagcaagtcatctttgaagattcagaacactcttcaacatactgtcttgcatttagagtggttaatccaaaccatttgcctccgttgaaggaactgcaaaagttgatgagaatccagtcactgcgatgtcatgctctgtataaccatggtgctactaggctatctgtgattccaattcatgcatcacgatctcaggctctaaggtatttgtctattcgttggggcatagagttgccggatgctatggttgtcgttggtgagactggtgattctgattatgaagaactgtttggaggtcttcacaagacaatcatccttaagggtggattcaacactcccgcaaataggatccatacggtcagaaggtaccctttacaggacgttgttgctcttgatagctcaaatataattggaattgagggtttcagcagtggtgacatcaggtcagcaatgcaacagcttggtatacccacacaatgacaccaagtgcaatctattttttattaatacaaatatacgatacaaatactatcatttccactctattggaaatgcccgattttgcctgccagtcatttagtgtctgtggtccctgcttgggctgtgattgacattcccctggatcctcacactggaatttttggagtgaagagcgtgttaatggatacatcgagctgtacagatgaaacaaatttgttcaaatgtcgatagtaaaaacatcttatggaagcattttcagcaaacaagcttccaatatacgaaagctgcctgagctcacaattttacatcacttcagagttgagcaaatgattactgtgcaaccctctaaactcttttttgctctaggaggggtgccttacaattgtgtaaatactgtgtgacataattgagcattatacatatatacaactttttttgttttcacgaattagtatgcaaaaaaatgtttttcttgagtgtttttccaacagcttgtggttacaggattaataactgtatctatctgctgctgtagtggttatgaaattattgtggcaactgtagtgctctcaccaaactatgacctcatcatgtaacccttgtattatctacaataaaaatc

SEQ ID NO: 20712 - DNA, 240 bp, Setaria italica
  Peptide Sequence Number=SeqID_86686
tgcagagtgaaaccattcccaaagtcacaatctgatcaaaggtctactgttgatcatattggggaaaatggagaaatcatgattgcgaatcctcaaaagcaagggaaggatggacggaaagtattcacattcaacaaaatatttgggcctaatgcttcacaatctgaagtttttgctgatacccaaccattgattagatccatcatggatggcttcaatgtctgcatatttgcatacggt

SEQ ID NO: 20713 - DNA, 2060 bp, Setaria italica
  Peptide Sequence Number=SeqID_86687
ccaaaccatcaccccaaaaagtgggacaaaaggccaaggggaaaggggaaaaagataggttaattaattaacaaatcatggtgcagaatctgctgatgccacaaagccattgcctactctaacgggaagtggtggcttcttgtttttcgcaaggcaacactgggggcaaatgtattccagcccatctgtcttcgcatagtccttgaaagtgcccagcccttgccgtctatcacagccaaagtgggcccattctccacataacccacagttcacccaatcgcccagagcactactgtggcaaatcaagcaacactccccatcgacgtcatcatgtgcaagttcatattccagcaaatatgtctcataatgcctctttagtgtgttcccaacacccgtcattttgtttgtaactgtatggttgctcatctttgaaaagacttgacctttccaatttatgccattacctacataaaagccacctcgggataccacctctttgtataaattatataaatcaaggcgctttgtatttaggactgcatcaggaaattctgccagtcccccttgaggtatgagtcgggtgtggcccctctgaagtagaaactgcatgacatctttcaagaagtctccttcggagcaaatacggataggcaaccgatcacacccatgtttcttcattggcagaggattcatcaatggaactgatggttgaacacgtggcggccaagatgatgattttctttgagtggctgggacaacaggtaccacactatgctttacaggtggaggagctggcaagctaggcttaacttgactagcatcatgaatgatagattgaggtaaacccataaagagatgcatttgttgcttgggagagtggggaaggggtctcattgttgcaggcttcaaccttggcttcaacgatgatagggaagacccttcagtaagatgcttcctgtcctctgtaactccatttgtgccagatgaaatttgttttgactcgagacttccagtgattctatccttagtaagggacgccgaccatcgtgatagatgggcatagggaccattttgaatatcttgatctttgcactggttagagcaaaagaaaagaagacgatctgcatcctgcctatcaaatgaagacactggtgtgccatttacacaagcgattccaagtgcaaccaagcttctgtaggagatttctggcgcaagatgtttcaaaacctttgctgcccatttaggcagggccatccagacttcaaaagtagaagctccacaagccaagcacatggaagacaaaggctcagctgaagatggcttgttatcctcaccattcgatagagcatgaactagctggctcttctcaataatttcattcttgatatggctctctaagagctgatcatcaaaacaagtttgagcactaccagaaacaagaagtgacacatgcgaagaactgcaagttgtgatatcacagcgcattgtgacaaccccatgtgaaagagtttcagcttgtagaggcggaggagcagcactgactctgttctgaagtttactcccacgaatctcaatattcaacaaagcattcaaaccatcctccagtgcacccaacaaacatgcatccaaggtacatggcaatccacagacaagaactttcatgttcacatcttcatcatgtatttttatagcaagagaagcttcagaaccaccttcttcctcatccacttcattctcagaagggatgatatttatctttggagcatccccaagtaggcgagggccaagcttaacactttgaacatgattatttcttacacagtacagtcgaaatgaggcatgtgcaagctgaaatgcatcccatgtatggctgcaggaactttgaatgactgacattaatgcctggcgaaaatgagatgctgcatacattgaaaatgaattcctccaatatattacatatggtattccctgtgaatgaagtgactgggcaagcttttcccctataggaacttccaaataaactatggtgggaaatggtggactgatgagtgagcttaaac

SEQ ID NO: 20714 - DNA, 344 bp, Setaria italica
  Peptide Sequence Number=SeqID_86688
tgattcgaaggaagatcctgagctggatgatgagcacaagacagaatcgacaatcaagtccttaaagaagaatgagcaaagctatgaagatcccgagctggatgatgagcacaagacagaatcgacaatcgagtcctttaagaagaatgagcaaagctatgaagttggttgcttggatggaaacatcgcattggattccattggtaccaattcagcccacattgctgacatggaagagggcagttcgggattagtacatcaagaggaaggggaggatcatccaaatcaatttgcgattcagttggtctccatggagaaggcaattgaatcatcaagtgacaagc

SEQ ID NO: 20715 - DNA, 352 bp, Setaria italica
  Peptide Sequence Number=SeqID_86689
tggtatacatgagactgcatcagagttgtaaagtacaccgtccagtatagcatcaagaaatgcttgtggcaaaccagctgcatcaagaacagaatagcatgttgggtctttatgtatgagatcactcataacatttgcagcaagtgagaaaacaccaccaccaaagtccttgcctctcctaaaaattgtacataaacatggaggcaatacattctcttcagaaccatcaacacgagcagagctaccaggaacatatgttgccagagatattgtacgtagtaaaactttcattaagttcttcctattatacaaaaccaaggcttcagaacatgagggctgcatatctggcacc

SEQ ID NO: 20716 - DNA, 742 bp, Setaria italica
  Peptide Sequence Number=SeqID_86690
cacatgatgaatgctaagacagaggacagtggtacaacagtaagatctggtctcggggctgctaaagtagaagatgggcaggctacccgtggtgggcaatttgcccttggagcaaagggtcctgaagaaaatccaattggaaaatctgttagaataggttctggcaacgctggccaaggatatacttcagacgaggtcaaggtcctttttcttatattggttgacttgtgtcggaggacatctaccttgccgcatccactacctgcttctcaggttggttccaacaacattatcataaggttgcactacatcgatggcaattacactgtgctccctgaggtagtggaagcatctcttggtccccacatgcagaatatgcctcgcccccgaggagctgatgctgctggtcttctacttcgagaactagaactgcaacctcctgctgaagaatggcataggcgcaacatgtttggcggaccctggtcagaaccagatgattttggtccattggataatatgcctcattcaaaagccagtggttccatcagccctcatttgtctgacatggaagaggactccagcaattcacttgggattcaaagtctttggccaagaaagcgccggttgtctgaaagagatgctgcatttggtctgaaacatctgtaggtctgggaggatatctcggtgtcatgggatctagaagggacgttatcactgctgtgtggagaacaggtcttgacgg

SEQ ID NO: 20717 - DNA, 4265 bp, Setaria italica
  misc_feature (4233)..(4265): n is a, c, g, or t
  Peptide Sequence Number=SeqID_86691
ctggagtagtagcgggtggttcgggagaggctatggaggtggatgggggtcctggcgcgggggatgcggaggcgggcggcgcggcgggaggcggaggaggcagtggggcgggtggaggagcgcagcaggcatcaccggcaaccgtgttccggatccggctcaagcagtcgcccgccagcctccggcacaagatgcgcgtgcccgagctctgcaggaacttcagtgcggttgcttggtgtgggaaactgaatgcaattgcttgcgcatccgagacttgtgcacgtattccaagctccaattcaagccctccattttggattcctatacatatcctgaatccagagagaccaacagaatgctctgtattcaatgtgaaagcagattctccgcgtgactttgttcagttcattgaatggtctcctcggtcctgccctcgtgcactgcttgtggcaaattttcatgggcggatcactatatggacacagccaaataagggtcctgtaaatcttgtacgtgatgccagctcgtggcagtgtgaacatgaatggcgtcaagatctttccgtggtgaccaagtggttgtcaggaatttctccgtatagatggcttcctggaaactccactagttcaaacctgaaaacctttgaggagaaattcctcactcaacagcctcaaagttcagcaggatggccaagtattctatgcgtttgttcagttttttcttcaggttctgttcagcttcattggtcacagtggccttctcaaaactcagcacagcctagatggttttctactagtaaagggcttctaggagcagggcccagtggcataatggctgctgatgctattgtaaccgaaaatggagctttacatgttgctggagtgccccttgttaatccatccactgtagttgtttgggaggtgatgccgggtcttggcaatggtattcaggcaactgcgaagataaatgcaacaagctctgttcctccatctctgaatcccccttcctggcctggttttgctccactagcggcctacctattttccttgcaagattatcttgtttctgaggccgcacaaacgaaaaacagacagagaacgagactactgaggctgcatcaatccattgttgtccagtttctaatttttcagcttatgtcagtccagaagcagctgcacaatcagccaccaccactacctggggatctggggttacttcagttgcttttgatccgactcgtggaggatcagtcattacagttgtaatagttgaagggcagtatatgtctccttatgatcctgatgaaggaccttccatcaccggatggagggtgcaatgctgggaatcttcgctgcaacctgttgttcttcacccaatatttggaagtcctactagctttggtgggcaacctcccatgcaaactgtttggtctactagagttaacaaaagcattccaccaacagaggaccttaaaaatcctcaaacatatgttccaatgccaacaacatcagatgaacggagctcctctgagtgcagtgttgacagagcaaacagactcagctttgacccttacgatcttccaaatgatgttagacaactggctcaaatagtctattctgctcatggtggtgaagttgctgttgctttcctacgtggaggagtgcacattttctcaggtccaaattttgatcaggttgacagttaccatgtcaatgttggctcagctattgctccaccagccttttcgtccagcagttgctgcttggcatcagtttggcatgacacgctcaaagatcggacaatactgaagataatacgtgtgcttcctcctgcaattcttagcacacaaacaaaggtcaactcagcagcatgggaacgggcaatagcagatagattttggtggagtctgttggctggagtggattggtgggatgctgtcggttgtacacagagtgctgctgaagatggtatagtctcacttaacagtgtgatagcatttctcgatgcggacttccattctcttccgactatgcaacagaggcagcagcactgtccgaaccttgataggataaagtgtaggttgttggaagggacaaatgcccaagatgtccgagcacttgtgttggacatgcaagcaagattacttctggatatgctaggcaaaggaatcgagtctgcccttataaatccgtcaactctgctacctgagccctggcaagcttctagtgatatgttatctagcattgaacctgacaaaatgactgttgaaccagctctacttccgagcatccagggttacgttgatgctgttcttgatttagcatcacatttcatcacacgcttgcggcgttatgcgagtttctgtcgaactcttgctagccatgttggaccatcttctacaacagggacttctagaaatatggttacaagtccaacaaacagttctccttcgccatcaaataatcaaggtaatcaagggggagcaacatctgcaacaggcaactcacaaatgcaggagtgggttcaaggtgcaattgctaagattagtaacaattctgatggtgctgccactgcgacaccaaatccaatgagcgggaggtcatcatttatgcccatcagcattaatacgggcacattccctggcacacctgctgttaggcttattggggattgccattttctccatagattatgtcaattattgctattttgtttgcttttccggagaaggcaatcaccaaggttactcgcaaatgcacaaaaaaatcaagattctgctatccagaaaatacatcacatgatgaatgctaagacagaggacagtggtacaacagtaagatctggtctcggggctgctaaagtagaagatgggcaggctacccgtggtgggcaatttgcccttggagcaaagggtcctgaagaaaatccaattggaaaatctgttagaataggttctggcaacgctggccaaggatatacttcagacgaggtcaaggtcctttttcttatattggttgacttgtgtcggaggacatctaccttgccgcatccactacctgcttctcaggttggttccaacaacattatcataaaatatgcctcgcccccgaggagctgatgctgctggtcttctacttcgagaactagaactgcaacctcctgctgaagaatggcataggcgcaacatgtttggcggaccctggtcagaaccagatgattttggtccattggataatatgcctcattcaaaagccagtggttccatcagccctcatttgtctgacatggaagaggactccagcaattcacttgggattcaaagtctttggccaagaaagcgccggttgtctgaaagagatgctgcatttggtctgaaaacatctgtaggtctgggaggatatctcggtgtcatgggatctagaagggacgttatcactgctgtgtggagaacaggtcttgacggtgaatggtataagtgcgtacgatgtttgcgtcaaacttgtgcatttgcgcagcctggtgccccaaacccgacaaatgaacgcgaggcttggtggatcagccggtggagccatgcctgcccaatgtgtgggggctcatgggtgaaagttgtttgagtacttgctttggtggcaacttcgctgctgattgctttcttggcagaatatgtattagcatccttggttttccatctaacgatagattgtaggttcaggctggaggatcatatggttggcctgcagggatcatggcagatgcacacacttgcctaacaactgtgtaagccgctggtagaattaggagtagttctggggtctgaaccatgtaactaacatgtgctatgatgtcttcgtgtacataggccccgtttggtagagcttcggcttctcataaaacggtttcggcttcggcttctcataaaacggcttcggcttcggcttcttcggtggagtggctttttagtgaagctgaagccgttttgcaaaacgttttatgatcacttaatgcttggagagagcttctcctctctcgtgtaagctgttttgcggcttctccccggctttggtggtgaagtcgttttgaaattggccctttggtagggcttcaccaaaaatcggtcctgccaaacgggatcataatatatttaaccagtgacgttacagttcatccgctacatgaatgttggatgtagcgatcttactggagaaataaagtcctgcttctatgactttnnnnnnnnnnnnnnnnnnnnnnnnnnnnnnnnn

SEQ ID NO: 20718 - DNA, 161 bp, Setaria italica
  misc_feature (160)..(160): n is a, c, g, or t
  Peptide Sequence Number=SeqID_86692
ctcgaaataagagctactagtatttctcctgccattttgggcagttcatgaacttgacctgtttccccaaaacaaaaacaaggagcaatccatggctccggtcttctcggttctcattcttcttctacgtgtcccctgaagagaaagtcgctgttccctnt

SEQ ID NO: 20719 - DNA, 525 bp, Setaria italica
  Peptide Sequence Number=SeqID_86693
ttctttcctttcttttcatcacctaatgcacttataacattgccaagagctagaaggcctttatttatgtgtatgccttctttaagtctgtgtccatctgctccagtacgtttagccctttcagaaccagcaagatcaaccaggtgaaactttgaagataatatatcatagtcactgctggctgacttgtcagatataccagatgttctcttttgttcaacacatattgtaaagatggcatgagagcgacttgactgcctattcatatttgtgcttgctgttgcacgcgatgaggaaccacgtatcaaatatgatgccatttcctcttttgacttcacctcagcctctgtgacaccagcaagggttatgcctccggttgcagtctctcgaatttgaatcggcactctggcaggtgctgatggtttcgctacagagactgaatcaagtcttgcagcagcatgatttgaatcgagcaaatcaaagacttcttccttgaatatctcaataaaagacaccctaattaaa

SEQ ID NO: 20720 - DNA, 367 bp, Setaria italica
  Peptide Sequence Number=SeqID_86694
atcatggaggacggcgtcaaaggcgctgttggtggatctctgcaacagacagctgctcatggtaggccttctcggcagagatgactggtgcataggatgaaagcatgaagtggatcctcgggtagggcaccaagttggtctggaactcgttcacatccacgttcagagcaccatcgaacctcagggaggcagtcagagatgagatgacctgcatcacaacaatgatgacgaacagaaggttagacaagcacagatttcagaaccattcacaatgcagagggacaacactgaatgttgcgacagtaaaccaaggcagtacctgagacacgagcctgttgaggttggtgtaggtggggcgctcaatgtt

SEQ ID NO: 20721 - DNA, 251 bp, Setaria italica
  Peptide Sequence Number=SeqID_86695
tggtggcgataagtctcaaagtgaaagagagaaggttctgaatcattttcgatctgggaggtctcctattttggttgcaacggatgttgctgcgcgtggtttggacatcaaagatatcaggttagactgtcattccatgatctgctatgcatgtttgtatgtcttgatttataatgtcgtgcaatttaggaataacggaaaagcaaatttgcttgggcattcatcataactcaagtggttagttgtggtag

SEQ ID NO: 20722 - DNA, 303 bp, Setaria italica
  Peptide Sequence Number=SeqID_86696
cttcccaccaccatcctgctccggccgccgtcgccgatgatccgtccaccgaggcgtaccgccgccgccacgagatcactgttacgggggataacgtgccggctccaatgacttcatttgaggctggtggctttccgccagaaattctgaaggagatacagcgtgctggatttgcaagcccaacacctatccaagcccagtcatggccaatcgccatgcagagccaagatgtagtagctattgcgaagactggatctggcaaaactcttgggtatctacttcctggattcatgcatatcaagc

SEQ ID NO: 20723 - DNA, 476 bp, Setaria italica
  Peptide Sequence Number=SeqID_86697
ttgtttagtagtcctttttcttaactttcgttcgtcttgtgtccgcaagtctacgcgttgcgggcacactttatttgtatgctcttaaatcgtcctcatgcactgtctttatttgcgcaacgaagagttaaaaagggacctttttattcagatttgggcagtatatagtaattctgctgttgtccttacttgcctgcatttgttgctattttccactgtttttagatacagcgtgctggatttgcaagcccaacacctatccaagcccagtcatggccaatcgccatgcagagccaagatgtagtagctattgcgaagactggatctggcaaaactcttgggtatctacttcctggattcatgcatatcaagcgcctgcagaacagcacaaggaatggtccaacagtgctagttttggcaccaacaagggaacttgcaacacagattctggatgaagctgtgaagtttgggagatc

SEQ ID NO: 20724 - DNA, 1318 bp, Setaria italica
  Peptide Sequence Number=SeqID_86698
tgggggataacgtgccggctccaatgacttcatttgaggctggtggctttccgccagaaattctgaaggaggtacgaaattccgctggtgaaccccctgactcatgatctaactctaaccctaacagagtcgcatgcgaaggatcaggatcttccagtgagcaaagcgcgcgatggaccgtgggcgtgtgctccagctgttgcttgtttctctttatttacttgattgtgctaaatcagggctgcctatgagaccgactgcttatctccatctctgtggcagatgcgatatctgctccgaggtggagctaatgtcgtatgctgcctcacgcgccctcggccaatagtgcgacgggctgagggccggtctcgttgatggagctgccaagggtgggtggacgcccgaggctgctcgttccctccccggggggctgcccatggcgcgaaggggcacccactcgtggcacccacggtggccgattcgttgctctgcgtgcagttcttggaaaaggctcctcgcatggatgatgggcctcttctggggctcgacccatggaggtctggcccaggctgtcaacatccatccatacataggattgggtggcagctgctggaaggggccttgtggatgaacgatccatggctgagcgagcctccagggactctgttagagccttttctacttcgccttgtgtccgcaagtctacgcgttgcgggcacactttatttatacagcgtgctggatttgcaagcccaacacctatccaagcccagtcatggccaatcgccatgcagagccaagatgtagtagctattgcgaagactggatctggcaaaactcttgggtatctacttcctggattcatgcatatcaagcgcctgcagaacagcacaaggaatggtccaacagtgctagttttggcaccaacaagggaacttgcaacacagattctggatgaagctgtgaagtttgggagatcagcgagaatttcttgcacgtgcctatatggtggtgctcctaaaggtccacagttgagagatttagatagaggagttgatgttgttgttgcaacacctggaaggttaaatgacattctagagatgagaaggtccggaggattgcagacgatcttcttgttcatcctgtccaggtgacaattggaagtgttgatgaacttgttgctaatagcgctattactcaggtatatggactggccctatagacctgttgatcaatcatgacatattctttcctttgtggtgcattcatagttctgttcttatttatctattacccgatgtatagtcatacattaact

SEQ ID NO: 20725 - DNA, 2182 bp, Setaria italica
  misc_feature (2115)..(2182): n is a, c, g, or t
  Peptide Sequence Number=SeqID_86699
gcgattggccatgactgggcttggataggtgttgggcttgcaaatccagcacgctgtataaataaagtgtgcccgcaacgcgtagacttgcggacacaacaaggaatggtccaacagtgctagttttggcaccaacaagggaacttgcaacacagattctggatgaagctgtgaagtttgggagatcagcgagaatttcttgcacgtgcctatatggtggtgctcctaaaggtccacagttgagagatttagatagaggagttgatgttgttgttgcaacacctggaaggttaaatgacattctagagatgagaagggtaagccttaagcaagtgtcgtatcttgttctggatgaggctgaccgtatgttggacatgggctttgagccacaaatacggaagatagtgaaagagatacctcaccgtcgtcaaacacttatgtacactgctacttggccaaaggaagtccggaggattgcagacgatcttcttgttcatcctgtccaggtgacaattggaagtgttgatgaacttgttgctaatagcgctattactcagcatgtggaggtgataacaccctcagaaaagcttcgacgtctggaacaaatattgcgatcccaggattcaggttcaaaagtattaatattttgtaccaccaagaagatgtgtgaccaacttgcaaggacactcaccaggcagtttggagcttcggccattcatggcgataagtctcaaagtgaaagagagaaggttctgaatcattttcgatctgggaggtctcctattttggttgcaacggatgttgctgcgcgtggtttggacatcaaagatatcagggttgtgatcaactatgacttccccactggtgttgaagactatgttcacaggattggcaggacaggaagggctggagccactggtgtcgcatatacatttttctgtgatcaggattcaaaatatgctgctgacctcatcaaaatcctggaaggggcaaaccaaaaggtaccccgtgatttagaggacatggcttctcgtggtggtgggcgaggtaggaagaggaaccgttgggcatcccgcccagacaggggtggttcacgctctgaactggattctaggtacagtggcagagatgcctctgggagatcaccacgtggcggtcgtggaagggatgattatggtggtcgtggcaggcatgactatggtgaaactgatgggcgatctcgcagatctgctaggggtcgcagtagaagccgtagcagaagtgacagtagaagccgtagcccaagtcctaagagggcacggcgtcatgaggctacacgtagcaggaccaagagtcgcagtcgaagcaggactaagagtcggagcaggagcaggagcaggagctatactagaaaccgccgtgctagccgcagcaggagccgtagtcctgttggtagtcgtaggtatgaaacagctgctgctgtctctgggtctgctcggcctaactcagggcactcagagcacaaaagccctccaaggtcccagtctgggaatgaccaccatgtgaaccactctgaggacgaccatcacatggaagatgggaagatggaaaaggttgatcttgatcgctcgcccagcccacaagatgacaaatctgctccttatagtcctgtatacaatggcaaagccagtggttcaaagagccccaacggtcagccagatggtaatgccaaatctgtcgaagcttctgaaaaacctaaccctgcatctcctgtacgccacagcaagagcagagaggatgaggaggaaggtgttatagatgaggatggggagatagctgaggatgatcctcgatcaagtgctgcagctacacagaatggtgataactgattctgtgaatgtagaatggcggcgtggctcctgcatcagcttgtgacaagaagacaatttatgcaagctaactattcgctaagttgagaatgtggaaatgcatttgtatctcgttaaattactgtaccagtttttatggttgcggagcatgttatggtgatacctgtgccgtttgtgaaccaaaaccagcgatatttatgccatattatgttgtgtttattgtcatacaaaaaaaaaaaaaaaaaannnnnnnnnnnnnnnnnnnnnnnnnnnnnnnnnnnnnnnnnnnnnnnnnnnnnnnnnnnnnnnnnnnn

SEQ ID NO: 20726 - DNA, 1339 bp, Setaria italica
  Peptide Sequence Number=SeqID_86700
ccattctcttcttcctccctcgcctccgatccgctcctcctcgcgcctgcttccgccgcctgctcctcatcctccaccgccggcgccgcgaagtgggtggagaagttcggttctcggggttgggggccgaaccggcggaggcgacgacttcggcagccggtcttccctgcaaccgcccatccctatgtgaaatgctgctcttgtctcacaggaattccaaccaacgcactacctctgtcaattctagttaccaactgattgtctccaagctcttctgattgtccatgccactgccttccgcagagaagatgctgtcagtctatctttacattcctaacatcattggtaagcctctggatggttgtctgcttacgtatcgccttattgtttcgagctaactggataattcagtatgtgtgcccaagagtagccattttgtacttcgttcattatggttccagtatctgaattagatgtttcaactgaattgttgttttgctgctgggagcaatgggtgcccaagagtagcaacaaaaaagaggcacctgaaatctaatggagcacatagtttgaccaacaatgcaatatgtttatttacattctgactttaggtctttatcgtgtggatgataatctgaaagccagtaacataatagatttcatattttgactaacaagacgttttattaaacaatctgcttttggcatatggtgaaagatggagatatattggacaacattctagaattgttatcatgcagggtatttcaggatcatcataaatttcattgcatttgctgtttgctattcgaacaagcccctctttgctatcctgtacttcttcaggtgagtatcataaacttatctcagaccactcttgtccattataatatgcaaacagtttatgtaggttcatatcatgtatatggttctagcatcgttgcaaaaatttcagctttgtactggacggtgtcgatggttggttcgcacggaagtttaatcaagcatcaacatttggagctgtgctggacatggttacagatagggttagcactgcttgtttgttggcccttctctcacagtgttacagacctggcttagtcttcttgatgcttcttgggttggatattacaagccactggtttcaaatgtacagttctttcctgtcaggcaagagtagccacaaggatgtaaagcacacaggtttcaaatgtacagttctttcctgtcaggcaagagtagccacaaggatgtaaagcacacaggcaattggcttctgaagttatattatgggtacagaccattcatggccttctgttgtgtttcttgtgaggtttat

SEQ ID NO: 20727 - DNA, 393 bp, Setaria italica
  Peptide Sequence Number=SeqID_86701
aggtgagtcacttagatttatctgcagactagttgtgttcgatatgctatgcaaactatttatgtttgtggttctcacatccttgcaaactatttatgtttgtggttctcacatccttgcaaacatgtcagctttgttcttgatggcgtggatggttggtttgcacggaagtttaatcaagcatcaacatttggagctgtgttggacatggttacagatagggttagcactgcttgtttgttggcccttctctcccaattttacagacctggcttagtcttcttaatacttcttgggttggatattacaagccactggtttcaaatgtacagttctttcctgtcaggcaagagtagccacaaggatgtaaagcacacaggcaattggcttctg

SEQ ID NO: 20728 - DNA, 634 bp, Setaria italica
  Peptide Sequence Number=SeqID_86702
cccataatataacttcagaagccaattgcctgtgtgctttacatccttgtggggttttatatatcattctctttctctttgctgatgagaagtcgacaagcttgcttagtgtatccagaggtatcctgaatcaaagtcccctcattgtcttggtgtttatttccactctagttggctgggccgtgaaacaagttaccaatgtcatccagatgaaaaccgctgcagatgcatgtgttgtgtatgatctgaagcgcgggaagtgaagcatgaaggcacctgttttgtgttttgtatcaacatatccaattcgtgaggcttgtgcaccagggttcgtacgtacagtggctacttcttatatgccttgacatctttctgatgatgcttatctgttggggcgagacggcgatcttgctgtgggaagaacataaagaaaacggaggagataaatgttttgaggagaaagtggaggctgtttaaattgtttgccagtgtttaattcggttatacaatgatgatgcaatcatgatctttgttaggtagtgtagccttttgagttgacctgaaccatgtttgcaagccacatgtttcaaatttcaggaacactaggatcgtgatacataaaaaaaaaaaacaa

SEQ ID NO: 20729 - DNA, 880 bp, Setaria italica
  Peptide Sequence Number=SeqID_86703
ctgccatcaagctaagcgaggaattgcctgtctcctagaacttctcctgatcttccgtggcacaatcatcctctgagaaaatgccatcagtttatctttacatacctaatattattgggtattttaggatcatcataaatttcattgcttttgctgtttgctattccaacaaggcgctctttgctattctgtacttcttcagctttgttcttgatggcgtggatggttggtttgcacggaagtttaatcaagcatcaacatttggagctgtgttggacatggttacagatagggttagcactgcttgtttgttggcccttctctcccaattttacagacctggcttagtcttcttaatacttcttgggttggatattacaagccactggtttcaaatgtacagttctttcctgtcaggcaagagtagccacaaggatgtaaagcacacaggcaattggcttctgaagttatattatgggtacagaccattcatggccttctgttgtgtttcttgtgaggttttatatatcattctctttctctttgctgatgagaagtcgacaagcttgcttagtgtatccagaggtatcctgaatcaaagtcccctcattgtcttggtgtttatttccactctagttggctgggccgtgaaacaagttaccaatgtcatccagatgaaaactgctgcggacacatgcgtcgagtttgatccgaagcacagcaagtgatgcagaaaaggcaccagcttcattcggttttgtatttgaggaaaccctccttggggggcttgtacacaaagtttacatacagtggctacttatgtgcaggagctgaatgtgttgaggagaaagcggagatcgttatattgtttcagtttgtg

SEQ ID NO: 20730 - DNA, 297 bp, Setaria italica
  Peptide Sequence Number=SeqID_86704
gccggcctctttctatggctgatgttccatttcatgggcacatcaggctgtaaatttagactgagtgagcataatattaaaggatttattatcataaatatccgattgctataatgttccagtcagcaacataagtaaactatgtagattgtgctattgccatcaatagcaataacacaacatatccgcacttataacttaaccacgaagatgagtgatagaattgccaccaaggttcccacacactaccaatataaccaatcttaaagaaaccaatataaccaaccaagtcactta

SEQ ID NO: 20731 - DNA, 261 bp, Setaria italica
  Peptide Sequence Number=SeqID_86705
gcacgccgcgccgggctccgcttgagacgacacggccgccgacgagccggagacgcgggacgcgtcgacgtcgctcgccgacgtgctggccggcgaagacttgctgctgtggtgcatggccaccaagctcacgtgccactggctggcgatggacacgatcctctgcgccctgtgcgtgatcctggcggcgccgaacaggcacatgaagaagccgctcagctgcaccgccgagccgacgaggaggtcgccggtgttggagaa

SEQ ID NO: 20732 - DNA, 236 bp, Setaria italica
  Peptide Sequence Number=SeqID_86706
ggtggcggtggagcgctagatcgcaacgatggtggcggaggaggcggtggtggaggagcacaatgtgctgaatgctgtcttgatctttttcttctgcataactgcctttgaggaccaggcattccgtcaggatggtcaagttgcgggcttggatgccctaggtgttgtcatgtacacttgtgttgtatgggtcgtgaactgtcaaatggcgctctctgtgaactacttcaccatca

SEQ ID NO: 20733 - DNA, 771 bp, Setaria italica
  Peptide Sequence Number=SeqID_86707
aggacaactagacctaataggtacaagggtgtcaaacgggtgtcactgaagttgagagagctatggctatgaggaaaggggctcggttagatgatgacattgaaaatggagaccacaaggacaagaaagttgacgacagtcctcatgttaaagggttcaatttcaaggatccgcgaataatggatggaaactggactaatgagcctaatagagatatgataagagattttttccggctcttagccatctgccacacatgcatagctgaaatagatgaaactgggaaggtttcatatgaagctgagtcccctgatgaagctgcatttgttattgcagctagagaactagggttcgaatttttacaagaggtcaccaacaactataattgttcgtgaacgggatccaagtcagaatgttgttgagaaaagaaagtatgacctcctaaatatattggaattcagtagctcaaggaaacggatgtctgtgatagtcaaggaaccagagggaaggatattacttttcagcaagggtgctgatagtgtgatgttcaaaaggcttgcaccagatggaagaaaatttgaagaagatactagaagacacataaatgagtattctgattccggtctgagaaccttagttctagcataccgtgtcttggatgaaaaagagtataaggaattcaatgaaaaattgaacgatgccaaaacatctgtaagtgctgacagggatagaaaaaattgagcaagctgctgatgcattgaacaggacttg

SEQ ID NO: 20734 - DNA, 1527 bp, Setaria italica
  Peptide Sequence Number=SeqID_86708
agatcgatacttctatttctgtccatgatttctaattgttgtccctatgtgaacagtgtgatgttcaaaaggcttgcaccagatggaagaaaaatttgaagaagatactagaagacacgtaaatgagtattctgattccggtctgagaaccttagttctagcataccgtgtcttggatgaaaaagagtataaggaattcaatgaaaaattgaacgatgccaaaacatctgtaagtgctgacagggatgaaaaaattgagcaagctgctgatagcattgaacaggacttgattcttcttggtgccaccgctgttgaagacaagctccaaaagggggtgcctgaatgcatagacaagctcgcacaagccggaattaagatatgggtcctgacaggcgacaagatggagacagctatcaatattgggtttgcatgtagcctactcaggcaaggcatgacacagataattgtcacactggaacaacctgacatcatagcattggagaaaaatggagacaaacaagcaattgctaaggcatcaaagcaaagggtcatggatcagatagaggatgggattgaaaaaattccaccttcaactcaaactagcactgcatcatttgcactaatcattgatggtaaatcactaacttatgctttggaagatgatgtcaagtttaagttcctagatcttgctatcaagtgcgcatcagtgatatgttgccgatcttcaccaaaacagaaggcactggttacaagacttgttaaagaagtgacacacaaagtgactttagcaataggtgatggggcaaacgatgttggaatgcttcaagaagctgacataggggttggcattagtggtgctgaaggaatgcaggccgtcatggcaagtgatgttgctgttgcccaattccgctttctagaacgattacttctggtgcacggacattggtgttaccggcgcatttcagtgatgatatgctatttcttctacaagaatgttacttttggtgtcactatctttctgtacgaagcatttgcatctttctccgggaagccagcttacaatgattggttcttgtcactctataatgttttcttcacttcccttcccgtcattgctttgggagtgtttgaccaggatgtgtctgccaggctgtgcatacagtatccgcagctctaccaagaaggagtgcaaaatatattattcagctggcggcggatacttggctggatgcttaacggtgtgatgaatgctgtcttgatctttttcttctgcataactgcctttgaggaccaggcattccgtcaggatggtcaagttgcgggcttggatgccctaggtgttgtcatgtacacttgtgttgtatgggtcgtgaactgtcaaatggcgctctctgtgaactacttcaccatcatccagcacatattcatatggggcagcattgccgtatggtacctctttctcttggtttatggtgccataaacccaaggttctcaacaacagcatacatggtcttcatcgagcagct

SEQ ID NO: 20735 - DNA, 1113 bp, Setaria italica
  misc_feature (1113)..(1113): n is a, c, g, or t
  Peptide Sequence Number=SeqID_86709
ttttttttactttttttttggttttttttcttttttttggtttttttatttttttgcttggctggatgcttaacggtgtgatgaatgctgtcttgatctttttcttctgcataactgcctttgaggaccaggcattccgtcaggatggtcaagttgcgggcttggatgccctaggtgttgtcatgtacacttgtgttgtatgggtcgtgaactgtcaaatggcgctctctgtgaactacttcaccatcatccagcacatattcatatggggcagcattgccgtatggtacctctttctcttggtttatggtgccataaacccaaggttctcaacaacagcatacatggtcttcatcgagcagctggcccccggccctttcattttggttggtgacacttttcgttgtgatggcaacacttgtcccctacttcagctatgcagcaatccagatccggtttttcccgatgttccacaacaagattcagtggaaaaggtacctggggaaggctgaagatcctgaagtggcaaggcagttgtcgtcacgacatagaacatcatcacagcagaggatggtcggtatctctgctcgtcgtgatggcaaggctatgcaaataacaagggagacagagctagaggttcaggaatagtattttcagtagattttgcgttttgtacagcttatagtttatcgtctccgggaagatgacagctgaactgattggaacctggggattttcctggatttatgcttctatgatgtctgtcataggagcttttccagttcagatgatagagcaagatcacagattgtttagatagatcacaaggaggccaagagaatacttactgtaaagttcatttttagcagttcaatgctttgtgcttttttttccacctttctcttatacatgtagatgcttgtaaccaggttggtagaatttccttttgtgttgtatttcttttgccccctttgcctgcctctctcaattgtatcttaaaaaataataatggtaaggcttctgatttgagtggttttcatgttttattatttggaacgaatcataaatgaatgatttgctatgtagtgatacttgtagaaaactaaaaaaagn

SEQ ID NO: 20736 - DNA, 489 bp, Setaria italica
  Peptide Sequence Number=SeqID_86710
cggcaagggaaggaatgcacgcccgcagcacgtgagctccagctctaaaccctcgtcttcccctcccaagcaaatcccactaccacccttcccttcgccgccgccgcccgaaaccctagccccattcgcggccctcgccgccgcctcgctcgaaatcccagcccccttcggcgcggccgctaccgccggagaggaggccatggaggacgtgtgcgaggggaaggacttctccttcccggcgcaggaggagggggtgctcaagctgtgggcggggctcgacgccttccacgagcagctccgccgcacggagggaggcgaggagttcgtcttctacgaccggccccccctttgccacgggcctgccccactacggccacatactcgccggcaccatcaaggacgtggtcacccgccaccagtcgatgcgggggcggcacgtctcgcggcggttcggatgggattggccacgggcctcccccgtagaattcg

SEQ ID NO: 20737 - DNA, 345 bp, Setaria italica
  Peptide Sequence Number=SeqID_86711
cgacgcgtacataaacggctgtggaagctgccggagatgccactccccgcgccgttccgggttttctccccaccttccgccgccgccaccgccgccgccggtcccgccggagcgcagcgtgcgctgatctacggacgccgcgcgccgctcgcgggagcgctcctgttcttcagcatcggcgctgtcagcgccgccgtcgcttgcaggacggggtgctccttctcccaccgccgcttccccttcctcggggcaagaggtctcagctctgctcgaatggagtccgcttccaccaccgtgccctgagacacgcaacagaggataagcaaggcacacagggggataggg

SEQ ID NO: 20738 - DNA, 2016 bp, Setaria italica
  Peptide Sequence Number=SeqID_86712
cattcattcgctcagtccccccctgcagtcttccctccactcctcgctcctcagccggggtcgtcacttctcgcaacggcagcaacagaggaggaggattcggcggcggccatagaccggcaaggagctcgggagcgatggagcagtacgaggtggtggagcagatcggccggggcgcctacggctccgcgtacctcgtcctccacaaggccgagcgcaagaggtacgtgatgaagaagatccgcctctccaagcagaacgacaagttccagcggaccgcctaccaggagatgtccctgatggcgagcctcagcaacccctacatcgtcgagtacaaggacggatgggtagacgaggggacatccgtctgcatcgtcaccagccactgcgaaggaggggacatggcggagaggatcaagaaggccaggggcgtcctcttctctgaagagagggtctgccggtggttcacgcaactgctcctcgcccttgactacctgcactgcaaccgcgtgctccaccgcgatctcaagtgttccaacattttattgacaagggataacaacatcagactcgctgatttcgggctggcgaagctgctcatggaggaccttgcctcgtcggtcgtaggaaccccaaactacatgtgtccagaaatactagcagacataccttatggatacaaatctgacatatggtcacttggttgctgtatgtttgagattttagcacaccgccctgcattcaaagctacagacatggcagcgttggttaacaaaataaacagatcttcaatatctccaatgcctccaatgtactcatcagcactgaagcagatagtgaagagcatgctgaggaaaaatccagaacataggcccactgctggagaactattgaggcatccacatctgcaaccttatcttgctgaatcatgcagctgttcaccaatctatcttccagtaaagcccaccaaaagtaacctgggagacaagcagtcaaagaagccaagcagtggcagaaagcgaaccatcaaagccaatggatccaatggaacactagaaactgcagcagagcacactgtggaaggaagagacagctccacaaacttttcagatgcatcaaccattggtacccaggaagccttgattttgcaaatgccggtggatctcgatgccagaaacaaagaaccacagagcaatgaggttttatcatttcagcacgcagaagagaacttgatggcaacaactgatggacaaattgattcgaccatacgtcttaaagctataagaaccagtaacgtgaaagatgaggcgcccgtcagtgtttcaaatcaaaagcctaatgaggcgccaataccaaatgaggaattgacaattggagtagtgcaagaagaaaggaaggatgtcaaaccacgctcatatcaagtaccaaagccaggctcaggtgacacaacgatgacagagggatcatcgccaatcagcacgctaaaattggtgcatacagaaagcgcacccgccgagtgggatcatctgaacatagtccagcagagagccgacgctctggagtcactcctcgagctctgtgcaaagctcctggagcaggagaggctcgaggagcttgcaggtgttcttcgaccgtttggcgaaggagccgtgtcgtctcgagagacagcgatatggctgacgaagagcctcatgtctccaccgaagtttggagagtccccaacaaagcttctgtaacagagataaatttgaggatttcattttcaaaatcgagtgctgtttcgagagtgtatatagcttcgccagaatccatgatttgtgcttactgaggcttgagtttttcatttatcttgatgtatatggtttgcatgactctctgggcattgtgtgcgtgcgctgactatttatcggctatttattgtacaataccatgagctgcttatctggttctacaaaccttcaaattgataaaggaggttcatgtgaatttccaaattaaaaaaaccttaaaaaaaaa

SEQ ID NO: 20739 - DNA, 332 bp, Setaria italica
  Peptide Sequence Number=SeqID_86713
ggtggaggtgtatatgatgatggtggtgatggtggcggtggcggagcaggaccatcattaaacgagtttccacttgtctggagattattgattccctttagtttatcaggtacccaaccggtgaattggttgttttcaatatttaagtcagtaagaggaagatcggcgaggacatctactgtgccactaaatttgttgttctgaagataaagtgctttcaaacttttcaatgagttgaagctttgtggaatattaccggaaaagttgttgtatgacaaatccattgctgttaagtttgtgagctgattaaacatatcattgatgtttgagag

SEQ ID NO: 20740 - DNA, 679 bp, Setaria italica
  Peptide Sequence Number=SeqID_86714
tcgctagcggagcagcttgctccgcagcaggatcgagctgctgaaggccggcagcaaggcggcgggcggtcagactcaggggtggggggcagggaggaggaccccggccaggcaaattcggctcagggtggcagccacacaagcccctgatgccggagcagaccagatccggcgctccgatggagtggacaacggtgcagcacctggacctgcgccactccggcggacgccgcggcgcctcggcccgcccgatgcagccgcacgccgccgccttccgcgcctcccaggccatcgtcgccgtcgccatcggcacccacgtagttgaatttgatgctctgacgggaagcaagatagcttcaattgaccttggcacccgtgttgttcgtatggcatatagccctaccactagtcatgttgttattgctattcttgaggatgctacaatcagatcctgtgattttgccacggagcagacacttgtgctgcactcgcctgaaaaaaaatcagatcatgtctcaatagatacggaagttcatcttgcattgacaccccttgagcctattgtcttcttcggttttcacaaaagaatgagtgtaacagttgtagggactgttgaaggagggagaccgccaaaccaaaataaagactgatacttaaaaaaccctattgttaacctggc

SEQ ID NO: 20741 - DNA, 774 bp, Setaria italica
  Peptide Sequence Number=SeqID_86715
tttttgtttttttcgtttttttatttttttcgttttttcctttttaatttttttgtttctttgttcttgtaagttatggttcctaaggtcctgaatgggccggtggaaactgggagatcaaaacacctactaacatcaagactatacctcagtgggagcttgcaggagaagtcatgccctacatgaagacaactgatgcaggtatcccatccgttgttgcagatcatattggtgtgtacttgggtgtgatgaagggccggggtagttaagtggaagaagttgttttggtttaaagtcttattatagcagcagctagtagtgagaatgcacagccagtatcttccgaatcagctgagaaaaataaggcaattgctggtggtgattcggttggtgatactctggccaggcagctgggtgtccaaattgcatcttctgatgaacaggcaaaagctgctgaggagtttaagaagactttgtatggtgttgttgatggtgcgagtagtgatgaagatgagtctacctcgaagactaaaaagatacatataaggatacgtgataagccggctgcatctgctgttgatgttaacaaattgaaagaagcaaccaaacagctaggcttgggtcctccactgagtaggacaagatcattatcagggacaccacaagaattcaatcaggctcctacgcagccaggaggtccagcagctgctgtttctccagcaattgtcctaaattacttgtcttaattttgttatttttgtttttggttaactt

SEQ ID NO: 20742 - DNA, 2568 bp, Setaria italica
  Peptide Sequence Number=SeqID_86716
cctacggtagtctagtactactttgttgtcttgtctacttcgtccttgtaaaaaaaattctagatcatgtctcaatagatacggaagttcatcttgcattgacaccccttgagcctattgtcttcttcggttttcacaaaagaatgagtgtaacagttgtagggactgttgaaggagggagaccgccaaccaaaataaagactgatcttaaaaaacctattgttaacctggcttgccatccccgcctccctgtattgtatgtagcttatgctgaaggcttgatacgtgcctacaacatccagacatatgctgtacactacaccttacaacttgctgttgacagtacaattaagctaatgggagctggtgcgttcgggtttcatccgaccctggagtggatatttgttggtgatagaggtggtactctcctggcatgggatgtatcaactgagaggccaagtatgattggcattacacaggctggttcccagcctatcacatctgtatcctggcttcctactctgcggttgcttgttactattgcaaaggatggatcacttcaagtatggaagacacgagttataataaaccctaacagacaacctatggaaactcatttcttcgagcgtgcagctattgaaacaatggatatcacaaagatactaactcttcaaggaggagaagcagtgtacccactaccccgaataaaaaatttggcagtacatcccaagttcaatttggctgctgtaatttttgcggatatgtccgggacagaagctgcaaagaacaaggctgcatacacaagggaagggaggagacaactttttgctcttcttcagggagctaggggatcaactgctgctgttttgaaggagaaacttttagcattgggatcatcaggaatattagcagagcatcaacttcaggcacagctgcaagagcagcatttgaagggccagagccagctaaccatttcagatgttgcaagaaaggcattccttcacagtcatttcatggaagggcatgctaaaagtggtccaatctctcgcctacctctcgttacaatttcagattctagcaaccttttgcgagatgttcctgtttgtcagccatatcatctggagctgaatttcttcaataaggaaaaccgtgttgttcaatatccagttagggctttctatttggatggatttaacttgatggcccataacctatcatctgggaccgacaatctctataagaagctttactcaacgattccctcaaatatggaatgccatcccaagaatatatcttacagtccaaagcagcatctttttcttgttgtgtttgaattaagtggtccaaatggagtggcgcatgaagttgttctttactgggagcagactgatctacagacagtaaacagcaaaggaagttcgataaaaggtcgtgatgctgcctttttgggcccagatgataatcaatatgctattctggaggaagataaaactagcctgaatctctttagtctcaaggcagtagccacaaaggaagctcttgaaaataatgctgctgtgcttgaagaaaacacttttgctgataatgctgctaactcaacggaacgccaaggtcctctgcattttacttttgaatcagaggttgatcgcatattttcttctcctctagaatcaacattgttgtatgtgatttcgggaaagcatatcggactcgcaaagctcctgcagggatacaggctgtctacagacaatgggctatccatcacaacaaaaactgatgggaagaagtttatcaagttgaaaccaaatgagactgttcttcaggtccattggcaaacaactcttagaggtccagtagtaggaatattgacaactcagagggtactaattgcttctgcagatcttgacatactatcaagcagctcaacaaaatttgatcggggtctcccatcatatcgatcaatgttgtgggttggaccagcacttatcttctcaagtgcaactgctataagtatgcttggctgggacaacaaagtccgatcaatcctctccactagctttcctcgttcagtattaattggtgcattgaacgaccggctgctgcttgtaaatccaacagatataaatccaagacagaaaaagggagtggaaataaggagctgtttagttgggcttcttgaacctcttctcattggatttgctaccatgcagcaacattttgagcaaaaacttgatctttcagaagtgctgtaccaaataacctcaaggttcgatagtttacgcattactgcaaggtcattggacatactagctaaaggacctcctgtttgtggagaccttgctgtatcattatctcaagcaggacctcagtttacccaaattatgcgctgcaattatgcaattaaagctcttcggttctctactgctctgtcaattttgaaagatgagttcttgcgttccagagattatcctcaatgccctcccacttcccatctgttccagcgcttccgagagttgggatacgcatgtataaatagatccagcatgctctcatgatctgcaatacttc

SEQ ID NO: 20743 - DNA, 2751 bp, Setaria italica
  misc_feature (2710)..(2751): n is a, c, g, or t
  Peptide Sequence Number=SeqID_86717
gcttcttgaacctcttctcattggatttgctaccatgcagcaacattttgagcaaaaacttgatctttcagaagtgctgtaccaaataacctcaaggttcgatagtttacgcattactgcaaggtcattggacatactagctaaaggacctcctgtttgtggagaccttgctgtatcattatctcaagcaggacctcagtttacccaaattatgcgctgcaattatgcaattaaagctcttcggttctctactgctctgtcaattttgaaagatgagttcttgcgttccagagattatcctcaatgccctcccacttcccatctgttccagcgcttccgagagttgggatacgcatgtataaagtatggtcagttcgacagtgcaaaagaaacgtttgaagttattgcagatcatgagagcatgctggatctatttatatgtcatctgaaccccagtgcattgcggcgccttgcgcaaaagttagaggaatctgctacagattctgagttgaggcgataccttgagagaatattaagagttcgttcaactggatggacgcagggcgtattcgccaattttgctgctgaaagtatggttcctaaaggtcctgaatgggccggtggaaactgggagatcaaaacacctactaacatcaagactatacctcagtgggagcttgcaggagaagtcatgccctacatgaagacaactgatgcaggtatcccatccgttgttgcagatcatattggtgtgtacttgggtgtgatgaagggccggggcaatgtagtggaagtaagtgaaaagagtttggttaaagctatagcagcagctagtagtgagaatgcacagccagtatcttccgaatcagctgagaaaaataaggcaattgctggtggtgattcggttggtgatactctggccaggcagctgggtgtccaaattgcatcttctgatgaacaggcaaaagctgctgaggagtttaagaagactttgtatggtgttgttgatggtgcgagtagtgatgaagatgagtctacctcgaagactaaaaagatacatataaggatacgtgataagccggctgcatctgctgttgatgttaacaaattgaaagaagcaaccaaacagctaggcttgggtcctccactgagtaggacaagatcattatcagggacaccacaagaattcaatcaggctcctacgcagccaggaggtccagcagctgctgtttctccagcaatgccaaatactgcaattgatttgtttggaacaaatactttagttcaaccacaagcaccctctggtgccacaggtcctgttattgcaggcatgggagtgacggctggacctatccctgaggacttcttccagaacactattccatcgcatcaacttgcggctcgactaccccctcctggaatagtcctgtctcgaatggctcaacctgctcctggaatgtatcaaggcccaccagtacctaatcaaaacatgatggctaacgttggccttccagatggtggggtgccgccacaagcaccaccgcagcagtcccagtttcctcagcaaccaggcattcctatggacaacattggcctgcctgacggtggtgttcctccacagagccaaccacttccttcacaaccccagacacttccttcacagccacagggctttcaacctggcattcccactccatcacagccaattgatctcagcactctggtggagggtcctggagcggcaaagcaagctgctcgtccgccagctcctactgctgtgcgccctggccaggtaccgcgtggtgctcctgcagcagaatgctacaagatggctcttgctcaccttgagcagaatcagcttaccgatgcactatcttgtttggatgaagcattcttggccctcgcaaaggaccagtcacgtgaagctgatatcaaagcgcaggccaccatttgtgctcagtataagattgcagttgctctgctacaggaaattgctcgcctgcaaagggttcaaggcgctggtactctcagtgctaaggaggaaatggccaggctatctcggcacctcgcttccctacccatccaagccaagcaccggatcaactgcatcaggaccgccatcaagcggaacatggaggtccagaactacgcctacgccaagcagatgctggacctcctctactccaaggcgccccccacgaagcaggacgagctcaagagcctgatcgacatgtgcgtccagagagggctgacgaacaagtccatcgacccgttcgaggacccctcgcagttctgctccgtgaccctcagccggctctcgaccatcgggcacgacgtgtgcgacctctgcggcgccaagttctcggcgctctcagcgccggggtgtgtcatctgtggcatggggagcatcaagagatccgacgccctcgccggtgggccgggacctgctgtgccctcgcccttcggctaagctgcggacgcttccttccaacctttgttttttatcttgtatctacagtgtgcagtttgcattccttctgctcgattgttgtagcttgtatgtagcctttttttttgacgtgtagcacgttggtgtaaagagttgagagacttccatgtacgcttactttgatttggatgtgattatacacacggttttggcgaggtatcaatgtgagagaaatctagtaagctcttggttacacacttnnnnnnnnnnnnnnnnnnnnnnnnnnnnnnnnnnnnnnnnnn

SEQ ID NO: 20744 - DNA, 998 bp, Setaria italica
  Peptide Sequence Number=SeqID_86718
atatgcatcggatttacggtgctaattgactctataatgtggcgtcgaatcctgtggccagaatttgaagttctctggtttaattcagttctgaatcgaagttcagaatggggcacccattcaattcattggtactttacctcagcacttccacgctccatgcttgtggcgtaccctctttgcatggttggtgcccttcttgatagaaggatagtaccatacatgcttccggtcttcttatttgttgtactctattcaaaacttccacataaggaacttcgtttcataatcggctcaattcccattgtttaatgtgtccgcttcactagcagctagcagactatataataaccgaaagaaagctgggtggaatttactctatattctcatgcttggtgcctttcttgtcagtctaggatactctgctgtgacttttatggcatcctacaacaattatcctggtggctatgctctaaaggctctacatgaagcagattcttcagtgaaggaaaagatggtacatattgatgccttcaccgcgatgagtggggtttctcgtttctgcgaaagcgaatatccgtggagatattctaaggaggaacaaatttccattgaagaatttcaggaaaggaatttcacctatctactgaatgaacaccactccattagtgggtacaaatgcttgtttgctgtggatggattctccagagtaaaacttcagcaccaaattcccccactttacctggtgaaagagcccaaggtgtttgcacatgggaatctgagagaccctgacattctttcactgaattggcccggctgtccttgaggacagacttctgtcacaggaccactaactgccaacagtgaagatgtgttcgctgttcagtcagtctgtgtgatacatatgatatatctggggggtgttggcattcatttagtgcaacctgtaaatctagatggattcctcccatatcccaactcccaaaccacagctttaa

SEQ ID NO: 20745 - DNA, 587 bp, Setaria italica
  Peptide Sequence Number=SeqID_86719
cccatagctgttttccatgggagcagtcgacaacatcatctgacgtaccatgaataacaagcactgggcaatttaccaagccaattttatcaatgttcttgtaaatgtcaaccaaaatgtccgtttgactggatatagtactcttagtccagataaaatgggactgtgcaaaaccacagctcgcaagtttggcaatcgtgaagcaagatcaatggttggaccacttccaacagactgaccatataagattatatcctcatccgcgacaccatatttttccttgaggcagttgtatgctgcttcaatgtctgcatatgtattacactcagtgggcttccctgtagatctcccataaccagagtaatcatacccgaagagattgacacggaggcgcttgctgagctcgacgaagagcccgtacatctggccgaggtcggcggcgttgccgtgggagtagagcatcgtggcggaggcccgcgcgtggcgcacgtacacccccacgatctcgttcccgcggcgcgtgcggaggcgcaccacctccgtgccgtcctcctcctcggtcggtaggtcggtccgtaggtaggggt

SEQ ID NO: 20746 - DNA, 401 bp, Setaria italica
  Peptide Sequence Number=SeqID_86720
aagaagaaataatgaaagaaataaggcttgaaatagatgagaaattcaaaaatatgcaaaaagactatgaattgaaaatggaagtgcccatatctgatgatgatatgatggatttccgtggagatagccaagaataaccaagaaaagaggcaacccgataaagaagaagaagaatagaaatacagtttgaataaaagaatattgtcacacaagggaataagtctccaatgttgttaaggtgttaacaacaattgggccggggcagaataatactacatgccatgatgttttgattgaagtctgcgatgtcaatcattcgggcgtggaagaccataccaagcagcatccagaatatcacgagaagacagtacgcgatagaggacaaggcaaaaggaataaac

SEQ ID NO: 20747 - DNA, 415 bp, Setaria italica
  Peptide Sequence Number=SeqID_86721
cggttcagaaattcagaaggatgcagtggtggcccttgtcagtgactagaggaaaggagaagggcagtcatgcaggtagcagctgcttcaagatctctaaatggataaagcagggttgacaacatatgtttgaagcctgagatccagaacatgaaacaataaaaaacttaattgtttgtaataaattgctacaatatgtatggcctaatatggtcaaccaggccgttggaactaaagaaagttgaaaactctccctttttccccttagttatctgacaactgcatttagaaacgtatggtctccctcccctccctgagaagaatctccaagattcccccttattaaccgttaactcaaacggtttgcatctgaacaaattgctgtataaagaaacagataaattcacaaggagtc

SEQ ID NO: 20748 - DNA, 401 bp, Setaria italica
  Peptide Sequence Number=SeqID_86722
gtgcgggccattctcacgagcggacgtcaattcaggtccccatctctactgtgccgcctcgccgccgatccgttgccttgcaccggtggcggcaggggctgggaactgtgcggtggcgcctgacgcgactgccgagtcggttttggccggccgcggtctactgattcgctactccggatggatggatggatggatggatcatggatagatgcaagggtcccgaaatggagctgaaaaacatggagtggagcagtccaaaacaggcccttattctctgtcccaatcattactatacagctgctgcggcagccacagcggtgatctctttagcctgctgttgcctgtgtgtgctgtgctgtgcctgtgatctgctgacggctctgctttgctctggattctcc

SEQ ID NO: 20749 - DNA, 387 bp, Setaria italica
  Peptide Sequence Number=SeqID_86723
tgaagatccaaggcgtcgcggggagttctttctgttctatagctatgcgacggtggctggtggcccattgctgatggccttggttgctggtgaagctgctcacaattttgaaaccacgccgccaactgatgctgtcagctcagttcttcaaatactaagaggtatctatgaaccacaagggattgaggttcctgatcctctacagagtgtttgcactagatggggcactgactccttcagtctaggttcatattctcatgttgctgttggagcatctggagatgactatgacatattagccgagagtgttggtgatgggcgtcttttctttgctggtgaggctaccacgagacgttacccagcaacaatgcacggtgcttttatcag

SEQ ID NO: 20750 - DNA, 433 bp, Setaria italica
  Peptide Sequence Number=SeqID_86724
aaacatgacagtagccagattcttcattaacttagatcactattatttctgttgcgtgatttcatttttgtgaatacaagtgatctgtctcctcagataaagaaattcattctccaaagccaggctctttcctcatatatttgtctatcagggaatggaacaccacggttgcgggcacatatgtgccaaaggcacgatggatggtagagatgttgagtgtctctatgtgaaatgggaagataatgtgccttaggttaatcctaaagagaactgcaggtggcttccaatgggagcaaagtctacctaggtgattggctaagttctcacattttagttcaagattatatctccagtaattttccataggtgcaggtcgacaaatatttgataacaattcaatcaagtgttgctctgcaatgactgataacaattc

SEQ ID NO: 20751 - DNA, 1168 bp, Setaria italica
  Peptide Sequence Number=SeqID_86725
tgccagcattgccctgttcgcaatatgattagaaaagttagatatagtgtatatcgcagttgtaaaaaaaaatctggttggatagacttggttatatggatattctttgccgaggtgtcgtattcgaaaattttgtggtacaacttgtatagcaaaatcagtagatgcatctttcaagttcctgatatatcattcctatggaaggcacggtgtggaaaattcttgtctctgtgaatgttttgtactcatcgactcaaatgctccctgtcagcttccaggtgatttttctttgttttggttttcctctatcagcttctattactcatatgtacatctcttggtttgttatgtgtaatggtttttctctttattctgtcacgcatgcgtgaaggcatgtagtggatggaaaaggggagataacttcaagaagagaaggtaatgtcaaaattatttgggatctgaaacatgacagtagccagattcttcattaacttagatcactattatttctgttgcgtgatttcatttttgtgaatacaagtgatctgtctcctcagataaagaaattcattctccaaagccaggctctttcctcatatatttgtctatcagggaatggaacaccacggttgcgggcacatatgtgccaaaggcacgatggatggtagagatgttgagtgtctcgtgagtacagtcctctgcttcatttcctcttctatacatacagtactattgtacagtcaatttctaaaatatcttttatactagtatgtgaaatgggaagataatgtgccttaggttaatcctaaagagaactgcaggtggcttccaatggtaagagctccatgccaagctcctatcgccactgcatataatctgtccactgaaatgactaacagaagaaaataggcaggagttttgatactgattggcttatctgtgcatgcattgcagggggcaagtctacctaggtgattggctaagttctcacattttagttcaagattatatctccagtaattttccataggtcgacaaatatttgataacaaattcaatcaagtgttgctctgcaatgactgataacaattcaatcaagtgttactctgcaatgaaggctgaaggttcaatcaagtgttactctgcaatgaattcaatcacgagtcta

SEQ ID NO: 20752 - DNA, 495 bp, Setaria italica
  Peptide Sequence Number=SeqID_86726
aaactagaagtttagggaaacttagaagaaggtacaatagatcgtatgatgaaagaggggagaggtgcagagtttcatgtgccaagataatgtttcatcgaccaccaatgcagaggcacggtgtggaaaattcttgtctctgtgaatgttttgtactcatcgactcaaatgctccctgtcagcttccaggcatgtagtggatggaaaaaggggagataacttcaagaagagaagggaatggaacaccacggttgcgggcacatatgtgccaaaggcacgatggatggtagagatgttgagtgtctcggagcaaagtctacctaggtgattggctaagttctcacattttagttcaagattatatctccagtaattttccatagcaaccagacaaggaaccggacattggaattaaccaagtaggcatcaagtattgtgatttaaaataaggtagtacaaagtaaaacaaaactacaacttagtttacttttttaa

SEQ ID NO: 20753 - DNA, 1827 bp, Setaria italica
  Peptide Sequence Number=SeqID_86727
accacgccgccttcattcacagctccccgatcccatcggcccaatccgcgtcggcccccgctcggaggaggcgcagctctccgaggaacgctgcatcaacgagctcgacctgcctctgcgtgctgcacgagatcgcggctccggcgtgatgactctccagtcctgggtcgagatcgaggcggtcggcaccaccacgacgcgctcgaactgcgggggcgaccccaatcccgttctcaatcccctacccatcccaatcggcggcagcatggagtgatggagaaggtggacgcggccggcttcaacaacctccatgggcggttctccgttgccgccgccaccccggtctcgtgtgctggcccatgggaacagggaggaggttaggaggaggtggcacggtggcggcagaccgatccggcagtcaggggagctcgagggcggcaacccgccatgcccgctcggccaccgggcttggtcgtgtcaccggatacatccggtggttatttctcacggagagtcccagctccggcaaaatccagactgatctgagcgcaatacaaggtggtgtatttgggattaccaccagtttccccaattcgttgcaaactcaagtcgattttgagtcaccactgggattctactgatacgaacaatgatgagagctgtgcttctgtcagttgtgccattccccattcaggcgagcaggaacaggctcctgagattgtaggtgccttcaattgcgcagtattaaatggatgcatcagtttgtacaaagtggggacatggacacatggtggcatctggctgcagttatatcagaattattggttacatgatgaagtcagattccaactgagtttgggaacttgagaggtacaatagatcgtatgatgaaagaggggagaggtgcagagtttcatgtgccaagataatgtttcatcgaccaccaatgcagaggcacggtgtggaaaattcttgtctctgtgaatgttttgtactcatcgactcaaatgctccctgtcagcttccaggcatgtagtggatggaaaaggggagataacttcaagaagagaagggaatggaacaccacggttgcgggcacatatgtgccaaaggcacgatggatggtagagatgttgagtgtctctatgtgatatgtgaaatgggaagataatgtgccttaggttaatcctaaagagaactgcaggtggcttccaatgggagcaaagtctacctaggtgattggctaagttctcacattttagttcaagattatatctccagtaattttccataggtcgacaaatatttgataacaattcaatcaagtgttgctctgcaatgactgataacaattcaatcaagtgttactctgcaatgaaggctgaaggttcaatcaagtgttactctgcaatgaattcaatcacgagtctaaagtttaaattcgtgtccaattccaaatgtgctgaaaaccttaaagctctgttcagatgatgagcagcgtgctctgtttacaatcagctctggttattatttgattaaatttcgtgtgtgaaatgctaaatgttcttgaaaagctcgagtttctgaagctcacatgcgtcttttgaagtgattttttgtttgttttatactatatgacactttattaattactataaaagaattgatcaatgatagaaattagaggaagtttggcatttgtactcatgtgaggcctatgaaatgatcaagaccttactataaagaatttgatggcagagaagtatcttatggcggagtaatcttagtatgcatggtgttggagattaaccaaaaaaaaaaaaaaaa

SEQ ID NO: 20754 - DNA, 377 bp, Setaria italica
  Peptide Sequence Number=SeqID_86728
attcctgaacctgatttgaattgatcatgacattatcaggtagtgcaaagtctctgaatctattggacagctcatcggaatatcagctcacctatgaggaccgggatggggactggatgctcgttggagatgttccctgggagatgtttgtaggttcagtgaagaggctcaagatcatgaggacctcagatgccaacaacggtcttggttagattcttgtctttcttcttcagcccaaacagtagtaaacatctggcaggaatctagttaaatggattgttgtttgtatttcccagttagttgaatctggaggtttaaggcattctggttatctactgttttatagcaccgtaatcagacaagatttatgcacttgg

SEQ ID NO: 20755 - DNA, 891 bp, Setaria italica
  misc_feature (12)..(12): n is a, c, g, or t
  Peptide Sequence Number=SeqID_86729
tactaataagtnttgtccgtattgtaattctaggtctattgtctagtaaagtactaaggtagtagtcgtagtaagtaaaggtacgggttcgttcggtttgggttgtaaggttgtaactattggtattggtagtattatttattcggtaaggtaaggttggtattcttctaattgtcccctattcgtcaagaaggctgccgatgaatcaggcatgcagaaagacaaggagagcgagaagaaaggacgggtcgtcggttgggtgaaggtgaacatggatggagatattatcggaaggaaggtggatctcaatgcccatcgctcatataagacccttgcctcagcacttgagctcatgttcatgaagccgtccatcggtctctgcacttctagtagtgcaaagtctctgaatctattggacagctcatcggaatatcagctcacctatgaggaccgggatggggactggatgctcgttggagatgttccctgggagatgtttgtaggttcagtgaagaggctcaagatcatgaggacctcagatgccaacaacggtcttggtccacgattccaaggcgttcacagaagtgcagcttgcacaagaggcagagcttgaaaactgccgatggggcgttgttgctggagagctataccgctggtgaagcttgaaatgtgtctgatatcacataagagcagtccgaatccttggcatagttgtgggaattacttgtgtctagtggaaatagtaaaagctgtgaaagcctctgctgtctcttgtgttatgttctattttcaattgccctttcgcgccttctttgagctcttctcattcatggctatgagcatctactccgtctcttttgcccacactgtctttatccaaagtgtcggttg

SEQ ID NO: 20756 - DNA, 690 bp, Setaria italica
  Peptide Sequence Number=SeqID_86730
atgagcgatgggcattgagattccaccttccttccgttaatatctccatccatgttcaccttcacccaaccgacgacccgtcctttcttctcgctctccttgtctttctgcatgcctgattcatcggcagccttcttggtgccagcctctgaagcattttctttggcctggttgaataggttgttcatcctgaaagttcttatgggtggccatcccaccactccaaagctgctctgcgggtggccagaggcgaccgtccccggcgaggtggtggcgttgggcgccgcatccgccttggccctcttgctggccgccgccgcccctgcggcaggggaggaggacgacacggaggagtccggagacagggctcccggctgcaggtccctggccgtcaggatccggcacggcgccggcgacggggtctgctgctgctgctgcttcttggagcctaggcagagccccagctccagctcgtcgtcctcctgctcctcctcctcctcgccgccagagttctcctccacctcctccgccgccgccgcatccggaggcgggtcgccggcgatgaacgccaccgtgggccccgctcctcctcgcatcgcgctgctcttgttcttggctcagtgactgcggcgatggtgtgtgtgtgttttgggagagacacctcgagagggaggaaaggagctgttacta

SEQ ID NO: 20757 - DNA, 280 bp, Setaria italica
  Peptide Sequence Number=SeqID_86731
ggcggaggaatctcagccgcagcgcctagctcgaggcggagggggtcgccggcgtcggcggcggagggtggcgcggaggaaggcgccggtgttcggtgaggagggaggcacagccgtcggcggggagtaaggcacaggtagggaagggaggtgcagccgtgcaggcccatccgcagctccgtgcggccggagagggaagcgtgggcggggaggacagtgcgggcgcagggataagccttgagaagcagcttggcccctgcttactggagatgtcgtcccg

SEQ ID NO: 20758 - DNA, 369 bp, Setaria italica
  Peptide Sequence Number=SeqID_86732
attgaataatgaagcaagcggttgcagatactgttctaagaagttattttaaacgtgtaaaaccatcttttgcaatgtctgtctccaaagaacactgtatatgattatcttcttctcttctataacctcagtactataagtgtttagtttgaggcatgtacatgattatatgtagcttattttcatcgtttaccttcaaagtatgcaatagggattttcttttctatttagttcaggaggacgtgcaagtcatatccctattttatcgtggtttattatttggatctatacaatcttacttgaacattgtgctgaaaaagaatcttggtacagaaaaaataagaatataatttgttacgcaatacaggc

SEQ ID NO: 20759 - DNA, 235 bp, Setaria italica
  Peptide Sequence Number=SeqID_86733
aaagagcacctgcagctccgccataacctctccaagataagtcacaggttccgcatgttcctcctcctgctcttcatttctgtcacagcaagccagtttgctattcttttcaagacaacagcctacattggcccgatcaatttcaccaatggtggtgacatagctgtgagtatcacatgtcttttgcatcgacattcagttgtgtgtcctcctatttatgttaatttctagaaaa

SEQ ID NO: 20760 - DNA, 454 bp, Setaria italica
  Peptide Sequence Number=SeqID_86734
caatgtaaaattcccattccctatctaagtggtctgaccaaactgctcttgctcttcatagattaccttgcaatttgtagtgaaaatttaaactggaacgattaatatttaatacagcatcatcctaattcctaagagccttggtatatttttctgctgacacgtgttgcaatatctaccacaggacttcttcagcatacttacatggtggatattgccgtgctttgttgtgaaagtcgctcgagaattattccgcttttcccacatcttccaggagtcagtttggagagcatgtgttgtgttttctgcttccatcatgtcatggatgtatttgacaacgataattctgtcatcctgcatgctcttccacctggtttgcaatctgcaagttattcactttgatgactatggcaaacttctagaacaagatgcggatccttggtctatttgaaag

SEQ ID NO: 20761 - DNA, 1449 bp, Setaria italica
  Peptide Sequence Number=SeqID_86735
tattggccatgtacggactccgcaagttcctcttcgtcgacccggagctcgggatgaggatccggttccagaaggagtacgtcgccaagatccaggacttcttcagcatacttacatggtggatattgccgtgctttgttgtgaaagtcgctcgagaattattccgcttttcccacatcttccaggagtcagtttggagagcatgtgttgtgttttctgcttccatcatgtcatggatgtatttgacaacgataattctgtcatcctgcatgctcttccacctggtttgcaatctgcaagttattcactttgatgactatggcaaacttctagaacaagatgcggatcctttggtctatttgaaagagcacctgcagctccgccataacctctccaagataagtcacaggttccgcatgttcctcctcctgctcttcatttctgtcacagcaagccagtttgctattcttttcaagacaacagcctacattggcccgatcaatttcaccaatggtggtgacatagctgtttcttcagttgttcaagtcgtgggtctcgtcctctgtttacatgctgctgctaaaatctcccacagggctcaaaacatctcttcaatagctagtcgatggcacgcattagcaacatgctctactgattctaattatgtgaccaccccaaacagctctgggaaccttatgccctttcctgcacatctgtttctgagagattattcggaaagtgatctggagtccctggagagtgctgcctctctgcatggcaattctcaaggcacagctcagttggcctcgtacatgtcttcataccacaagagggaatcacttgtgctgtacctgttagcgaatccaggcggcatcacgatatttggctggatagttgaccgggcattcctaaacaccatcctgatgctcgagttaactcttgtgctcttcgtgcttagcaagaccgttgtgatcccaagcaagacactcatgcagagctacatcgggctcacatgattacaggaccctcacaatgcacggattcaaacattcagggtcagctaggaggtcatgatttgatgatgacacattgccagggtttgcatgccagagtgggagaaactggcagaaatggtggaaaatttggttttcttaggcgcgcaagcgcaaatcatatgcacatcatgccactacagacatttgggatcagcgtgctccaggctgaaggctggctgaggctaaggatgcgccgtgtacagttttgggcgggtgaagtggtctgaggcttctgttcttttttttgctgtgtatatacgaaatgtatgtgctactactgtaaaccaatatgatatacgtacaacaatatatttctctacccttttgtcaatcatgggcgattagcaggtgtatatataacaagctagatgtgccatgatgccatttggcctaa

SEQ ID NO: 20762 - DNA, 252 bp, Setaria italica
  Peptide Sequence Number=SeqID_86736
cataatccatgtttgaaaaagagaaatactacacaggaatcttatcagcagtctgcgctgacctcagagttttcatctacaacagctaataccagttgaggctcaacgtatccctctgcgctgacctcagagttttcatctacaacagctaataccagttgaggctcaacgtatccctctgctcttgccttcttgcgttcacgctgcatgcggaagtactctctctttcttgctctgtaactgtttgggttt

SEQ ID NO: 20763 - DNA, 860 bp, Setaria italica
  misc_feature (1)..(64): n is a, c, g, or t
  Peptide Sequence Number=SeqID_86737
nnnnnnnnnnnnnnnnnnnnnnnnnnnnnnnnnnnnnnnnnnnnnnnnnnnnnnnnnnnnnnnnttttttttttttttttttttgttcctgaaaaggtgcagctgatagaacatatctaaacaacatcgtgtaatatgaccttgtatggatcatgtagtcttacaattcagggaaaaaatatcaaacatggattatgaaaaagagaaatactacacaggaatcttatcagcagtctgcgctgacctcagagttttcatctacaacagctaataccagttgaggctcaacgtatccctctgctcttgccttcttgcgttcacgctgcatgcggaagtactctctctttcttgctctgtaactgtttgggttttcaggctgtttctcatatgggtaaacacttacctttttcttgtctggtccatatttctcaaacttgactagaccatcgatcaaagaaaagagtgtatgatccttgcccattccaacattatttccaggatagaccctggtgccgcgctggcggatgatgatggcgccgggcttggcgacctggtcaccgtatatcttgactcccagccgctgccccttggagtcacggccgttctttgtgcttccagctcccttcttgtgcgccatttggatcgtcagacgccgcgccggcaccggcacacccaccgcggcgccgccgacggagagcgcggcgcggtctccgccgaggaaggaggggcgcatggaggacgagggggacgcgagggagaggcccttgaaggctcccgctagtgagaacgccatggacgccatgagcggagagggctggagagaggcaacggcagtttcaggactcggaggggaaggagat

SEQ ID NO: 20764 - DNA, 383 bp, Setaria italica
  Peptide Sequence Number=SeqID_86738
aactcatgccttgctgcttttcggtatattctttgccaccaaagtcctccatctgcgctgagccttttccttcccgcatcaagtggtagcgaaccatcaatgacaaggtttatgactgcaaggcaagatagccaatcgatctcgtaagggcagaagcgatgcttctttgtaacatgttcattgtcaatcttcctcatcgacctatcactgaggctgaacaagaagagaccttccccctcaatccagagcaccagcataccactcttcccatggaaaatctccagtctgaccttcgcactggcatgcatctttagcacccgcattggtaagggacttgtcatgtcgatcgtttcagaacaaacccagttgccgctaccattgcc

SEQ ID NO: 20765 - DNA, 338 bp, Setaria italica
  Peptide Sequence Number=SeqID_86739
cgaggaacctccccgcccccggatctctccccccgccgaatccccaggcccgctcgccggccggccttccccccgcgatcggctccgcctacgtccccggcgggaggttgactcgactcgcgcgttgcggcggcggcggttccctcgccgccactcggctcgggggctcgtcggttcggcggtcgctttcggtgcggtccgatcgaggccagcggtgccggggcaatgcggtcggtccgcggggctgcttgaggcgcgcggctgggatctgggcgtggaaggtgcgggggcgcgagcggaacttctgtcggtggggagctctggtggtgggtgtagtg

SEQ ID NO: 20766 - DNA, 562 bp, Setaria italica
  Peptide Sequence Number=SeqID_86740
caaaaaagtactggcatgttgttgcttgaagcatggaacagtctcatatcatcaaaattggagaccaaggaatcaactttgatacacaatttctttaggttgaatcacatggtgaaaaagtttcttagatcaatcacgagcatttgagaggcatatatgttcttttagttttcttattgtttcctgcttattaccttcctgaagctgtgtcttcacagctgttttcagaagaagcctgggggagaaactgaacagcaggagttgacatatcctagtcttcaggaaactatctctacaccttggaataatctaccaaggaagatgacaaaattatactttgctatgagaggtaaggttaacaaaattgaagacagtgctgcaataaagaaaagttccctttttagtttctatttgccaaatgatggaacttaaaacatgctgatttcaacacattttggccttcttgattcctctaattttcctgttctcttgatcatatcatttttgtagtcctgtagaattatgaattattctgaaggacactgtcctggcaaaacaacac

SEQ ID NO: 20767 - DNA, 1453 bp, Setaria italica
  Peptide Sequence Number=SeqID_86741
tacttaacctaaaagaaactaccttgcaaaaaccctcgcccgctacccccctctcccgatccccccggcggctgacctgattcgcgttctcagtctcggggatccgggcgctcgcggcgatggacagcggaggcggcgcggagggggagctcacggcgcaggagacggcgctctacgaccgccagatccgcgtctggggcgtcgatgcccagaagaggctgagtaaggcgcacgtgcttgtgtgcggcatgaacggaaccaccaccgagttctgcaagaatattgttctagcaggagttggtagtttatccttgatggatgatcacatggtcacggaggacgatctgaatgcaaatttcctgattcctccagatgagagcatatatggtggtagatctctagccgaagtttgctgtgagtctttgaaagatttcaatcctatggtccgagtttctgtcgaaaagggtgatccatcactgattgatggagaattcctcgacaagtttgacatcattgtagttagtggtgcatctcttaaaacaaagctgtttattaatgaaaactgtcggaagagaagcaagcgtattgcattttacgctatagattgcaaggattcttgcggtgagatatttgttgatttacagaagcatagctatgttcagaaaaagcctggaggagaaagtgaaccgcaggaattgacatatcctagtcttcaggaagctatatctgtatcttggaataatctaccaagaaggaccgcaaaattatactttgccatgagagttttggagaattacgaattatctgaaggacgcagtcctggtgaaacaacgctttctgatatacctgcagttttggctcggaggaaggacatgtgtgataacatgtctttgagtgagtctcaaattcctactgctctcattgaacgactggtagcagctggaaagaaggaacatcctcctgtatgtgccatcctaggtggtattcttggtcaggaggtgattaaatcaatatcctgcaagggtgatccaatcaagaatttcttctattttgatgcggctgacggtaaaggtgtcatcgaggatatcccaccaccaccaccttctgtgaactgacatgctcagctgcctaactacctactctacctggttcactaatccttgtacccacctcattagcatcagaacatgtagaaacttttagattcatagccaactggaatcgaatgtggcgtcttaggaattgtatcgagcaacagacgtgtcagtattgcactaacaatttcaagctgagtctcgatggtttccatactttccggatgatggatttctttgtcgtctctttactttttgtcgaatttggtagcagtggttgggaatggagtgaaaaggttatgatatggcggtgaagtgactccagctatatcatcatgcctgtgtactgacgtggcatt

SEQ ID NO: 20768 - DNA, 464 bp, Setaria italica
  Peptide Sequence Number=SeqID_86742
agttggatcacttacaggttcttgcttatcagctgccaccccacttctctcttcaactaaggaaacagcttgtcttgtggcccttgatgttgtggagaatgctattatatctatcaccaaggttgaggaggcttacaagtgtgaaaatcaaagtaaaggaattattgaggagtccatccagtttctgtcatttgatgaacttcttgatggtacagatgccagcgaagatgctgatgagaatcgattgctcccagctatgaacaaactatggccttacttgattatctgtctaaggaacaagatatcagtgccggttgttagaaagtgcactgaagtattgagtagagcaattagtatgtctggtggtgatttttatgtacgccgctttcataaggatctccttccttctcttttcccttagtttctggggcttcccattatgttggtgcacagttaattttagc

SEQ ID NO: 20769 - DNA, 410 bp, Setaria italica
  Peptide Sequence Number=SeqID_86743
ctgagagtcttgctggtggagatcgatgactccactcgtcaggtggtcagtgccctgctccttatccctgcagaaaatggtttacatgcatggcaacatcttgaagatctgcagaacaacattgaccttgtattgactgaggttttcatgccttgtctatctggcatcggtctgcttagcaaaatcacaagtcacaaagtttgcaaggacattcctgtgattatgatgtcttcgaatgactctatgagtatggtgtttaagtgtttgtcaaagggtgcagttgacttcttagtaaagccactacgtaagaatgagcttaagaacctttggcagcatgtttggaggcgatgccacagttccagtggcagtggaagtgaaagtggcatccagacacaaaagtgtgccaaacc

SEQ ID NO: 20770 - DNA, 295 bp, Setaria italica
  Peptide Sequence Number=SeqID_86744
acagacacagagcacatgggttaaggaaaatttcttctagcccggctacaagtagtcctccctgaccatactgtagaatagaagcttattctgagcatgtcttatgttcaggacggattggtctttgattcctgtatgttttccttgcagattcgttgttggattcagcatatgcatttctgacgccgacataggaagtgctccaccatctgtgaactccctctagttgcacaaaccactgctgcgctctcgctctttgaatcaggttaaatgggtagcacctgccaagctggca

SEQ ID NO: 20771 - DNA, 645 bp, Setaria italica
  Peptide Sequence Number=SeqID_86745
catgcaacttactattatgttcataatctagtaatgacactgatattatgttttgcacctggtgaaggctgacagatctgatcttctcaaaatattccactcatcatggatttccgttgtagctccatttgttttcaatctcttcaaacccaactcatggggtgtcacttcgatatgagaatcatgatccttatcatttccaacgggcatcttggcagggcaatcagggccaacaagcagtacaagttgctgatgcacctgattgccctgccaagatgcccgttggaaatgataaggatcatgattctcatatcgaagtgacaccccatgagttgggtttgaagagattgaaaacaaatggagctacacggaaatccatgatgagtggaatatttttgagaagatcagatctgtcagccttcaccaggtaccatacatctgtggcttccaatcaaggtggagcaggatttggggaaagctcttcaccacaagataacagttctgaggctgttaaaacggactctacctgcaagatgaagtcaaattcagatgctgctccaataaagcagggcttcttaattggtctagttagcaacaataatgacatgggctccagtacaaagaatgttgtcgccaagccttcgg

SEQ ID NO: 20772 - DNA, 311 bp, Setaria italica
  Peptide Sequence Number=SeqID_86746
cgcctccgcccatttggacccgctcgccgtcacgctctgctcgtcctcgtttccacacgagcgtaggttccacgcggccgggtctctcggaggagcgcgcagcccatgccactggccccacttcgtcgccgcagggctacgactccgcgtcctgagtccccgcaagctcccaagggcggtgtattagtgggattgaagggagactgctgcttctgacgttctgtcaattcataccaaatttgaattggaagcaactgaatttgggcgtcacagacacagagcacagttggggttaaaaggtaaaacttttc

SEQ ID NO: 20773 - DNA, 461 bp, Setaria italica
  Peptide Sequence Number=SeqID_86747
cgcgtcgcctccgccatttggacccgctcgccgtcacgctctgctcgtcctcgtttccacacgagcgtaggttccacgcggccgggtctctcggaggagcgcgcagcccatgccactggccccacttcgtcgccgcagggctacgactccgcgtcctgagtccccgccaaggtgcgcgtcgcccttttgctgtggctaccgagagctagctcgcaaattcaaccgcgttgagcctcttttttgctgttgagattttctccccttcgaatttagctggttttgggggttgtctgtacggcaaagtcccggaggctcgtatctggtggatctcggcaagtccgtttcctcgagtggagcggctcggaggtgctgctgtttcctcggtcgagacaagttcgaagtgtgctgtttgctttactaacttttcctgcttaggtttggtctgacgaggtgtatcctta

SEQ ID NO: 20774 - DNA, 1177 bp, Setaria italica
  Peptide Sequence Number=SeqID_86748
acagcaacagccatcaattgaccgtggatcatcagatgctcagtgtggttcatccaatgtgtttgatcctcctgttgaaggacacgctgcaaactacagtgtgaatggggctgtctcaggtggtcataatgggtccaatgggcagaatggaagtagtgctggtcccaacattgcaagaccaaacatggagagtgttaatggcactatgagcaaaaatgtggctggaggtggcagtggaagtggaagtggcaatggcacttatcagaatcggttccctcaacgtgaagctgcattgaacaaattcagactgaagcggaaagatcggaacttcggtaaaaaggtagcctgctttcagttacatgcctgttgtagcagtaagtcctaaaatcagtaatatagtggaagggccctgcgaattccactgagtacagcgagaaagacttgtaatgctatccaaatggtttgcataaatattatcataaaatatggaattgattataactaacctctaccttcagaggagaaaaaaattagctggctgcttccaagtatgccctgattttgataatgccagcacaagatcactgaaataagtcgaatttctgttttctgactgcatctttttacaagattgcacattgatgttgtttcatttttcctgactgctggcctgaatgaaatttgcattggaccgttatcttctaatggtcttgtccgcctatttgcaggttcgctaccaaagcaggaagagactagctgagcagcggccacgggtccgtgggcagtttgtgcgacaatctggacaagaagatcaagcaggccaagatatagagagatgacacgggactactaatacaacaaggtgtcttcgtttgcagatctgagaattaggcaggtcttcgcattgctggtagcagcccattgattcccaacgctagagtactcctcaattaataagagctccagttatcgtttctgttgttgacttcagatgatcagagtgctatggagtcaaactgtgtaatatctatgagttttactgtgtatgccggtttgcaatcttgagtttctcttggcccttcaaagatatacttggccaagattcttaaggagcaaaccagcagcggcattgctaatggaatatgcatcaggatcgagctgggatcgttgattcgtt

SEQ ID NO: 20775 - DNA, 3247 bp, Setaria italica
  Peptide Sequence Number=SeqID_86749
taccacccgcgtcgcctccgccatttggacccgctcgccgtcacgctctgctcgtcctcgtttccacacgagcgtaggttccacgcggccgggtctctcggaggagcgcgcagcccatgccactggccccacttcgtcgccgcagggctacgactccgcgtcctgagtccccgcaagctggttttgggggttgtctgtacggcaaagtcccggaggctcgtatctggtggatctcggcaagtccgtttcctcgagtggagcggctcggagctcccaagggcggtgtattagtgggattgaagggagactgctgcttctgacgttctgtcaattcataccaaatttgaattggaagcaactgaatttgggcgtcacagacacagagcacatgggttaaggaaaatttcttctagcccggctacaaattcgttgttggattcagcatatgcatttctgacgccgacataggaagtgctccaccatctgtgaactccctctagttgcacaaaccactgctgcgctctcgctctttgaatcaggttaaatgggtagcacctgccaagctggcacggacgggccttcccacaaggatgtgagggggatcgcaaatggcgccacagcgaatggctaccatggggccgaggctgatgcggatgaatggagggaaaaggaagatgacttacccaatgggcacagcgggccaccaggcgcacagcaggtggatgagcagaaggaccaacagggacagaccattcagtgggagaggttcctccctgtgaagacactgagagtcttgctggtggagatcgatgactccactcgtcaggtggtcagtgccctgctccgtaagtgctgctatgaagttatccctgcagaaaatggtttacatgcatggcaacatcttgaagatctgcagaacaacattgaccttgtattgactgaggttttcatgccttgtctatctggcatcggtctgcttagcaaaatcacaagtcacaaagtttgcaaggacattcctgtgattatgatgtcttcgaatgactctatgagtatggtgtttaagtgtttgtcaaagggtgcagttgacttcttagtaaagccactacgtaagaatgagcttaagaacctttggcagcatgtttggaggcgatgccacagttccagtggcagtggaagtgaaagtggcatccagacacaaaagtgtgccaaaccaaatactggtgacgagtatgagaacaacagtgccagcagtcatgatgatgacgaaaatgacgatgaagaagatgacgacttgagtgtcggactcaatgctagggatggaagtgataatggcagcggcactcaaagttcatggacaaagcgtgctgtggagattgacagtccacaacaaatgtctcctgatcaactagctgatccacctgatagtacatgtgcacaagtaattcaccccaaatcagagatatgcagtaataagtggttaccagctgcaaataaaggacagcaagaacaaaaggagaataaagatgaatctatggggaaatacttagagataggtgctcctaggaattcgactgcagaatatcaatcatctctcaatgatacttctgttaatccaacagaaaaacggcatgaggttcacattccccaatgcaaatctaaaaagaaagtgatggaagaagatgactgcacaaacatgctgagtgaaccaaatactgaaactgctgatttgattagctcgatagccagaaacacagagggccaacaagcagtacaagttgctgatgcacctgattgccctgccaagatgcccgttggaaatgataaggatcatgattctcatatcgaagtgacaccccatgagttgggtttgaagagattgaaaacaaatggagctacaacggaaatccatgatgagtggaatattttgagaagatcagatctgtcagccttcaccaggtgcaaaacataatatcagtgtcattactagattatgaacataatagtaagttgcatgctaactctttctgattatgcaaggtaccatacatctgtggcttccaatcaaggtggagcaggatttggggaaagctcttcaccacaagataacagttctgaggctgttaaaacggactctacctgcaagatgaagtcaaattcagatgctgctccaataaagcagggctctaatggcagtagcaacaataatgacatgggctccagtacaaagaatgttgtcgccaagccttcgggtaacagggagagagtaacatcaccgtcagcttgaaagtgggccacccagcagaggtaccacaaagctgcgtgcaacatcatcatcacgtccattattacctccatgttatgacacagcaacagccatcaattgaccgtggatcatcagatgctcagtgtggttcatccaatgtgtttgatcctcctgttgaaggacacgctgcaaactacagtgtgaatggggctgtctcaggtggtcataatgggtccaatgggcagaatggaagtagtgctggtcccaacattgcaagaccaaacatggagagtgttaatggcactatgagcaaaaatgtggctggaggtggcagtggaagtggaagtggcaatggcacttatcagaatcggttccctcaacgtgaagctgcattgaacaaattcagactgaagcggaaagatcggaacttcggtaaaaaggttcgctaccaaagcaggaagagactagctgagcagcggccacgggtccgtgggcagtttgtgcgacaatctggacaagaagatcaagcaggccaagatatagagagatgacacgggactactaatacaacaaggtgtcttcgtttgcagatctgagaattaggcaggtcttcgcattgctggtagcagcccattgattcccaacgctagagtactacctacaattaataagagctccagttatcgtttctgtggttgacttcagatgatcagagtgctatggagtcaaactgtgtaatatctatgagttttactgtgtatgccggtttgcaatcttgagtttctcttggcccttcaaagatatacttggccaagattcttaaggagcaaaccagcagcggcattgctaatggaatatgcatcaggatcgagctgggatcgttgattcgttcagccattcatttggagatcgtgcttttgaatcaataataatcaataaatatatgttggttactaaaaaaaaaaaaaaaaaaaaaaaaaaaaa

SEQ ID NO: 20776 - DNA, 2210 bp, Setaria italica
  Peptide Sequence Number=SeqID_86750
cttcgaatgactctatgcaaaccacatcagtgtagcagctaaaagtatttaaactaaataattaacatgacaacatttcatgtgcactagaggagttgaggaaagctacttactaatcacaggaatgtccttgcaaactttgtgacttgtgattttgctaagcagaccgatgccagatagacaacattgaccttgtattgactgaggttttcatgccttgtctatctggcatcggtctgcttagcaaaatcacaagtcacaaagtttgcaaggacattcctgtgattagtaagtagctttcctcaactcctctagtgcacatgaaatgttgtcatgttaattatttagtttaaatacttttagctgctacactgatgtggtttgcatgcagtgatgtcttcgaatgactctatgagtatggtgtttaagtgtttgtcaaagggtgcagttgacttcttagtaaagccactacgtaagaatgagcttaagaacctttggcagcatgtttggaggcgatgccacagttccagtggcagtggaagtgaaagtggcatccagacacaaaagtgtgccaaaccaaatactggtgacgagtatgagaacaacagtgccagcagtcatgatgatgacgaaaatgacgatgaagaagatgacgacttgagtgtcggactcaatgctagggatggaagtgataatggcagcggcactcaaagttcatggacaaagcgtgctgtggagattgacagtccacaacaaatgtctcctgatcaactagctgatccacctgatagtacatgtgcacaagtaattcaccccaaatcagagatatgcagtaataagtggttaccagctgcaaataaaaggaacagcaagaaacaaaaggagaataaagatgaatctatggggaaatacttagagataggtgctcctaggaattcgactgcagaatatcaatcatctctcaatgatacttctgttaatccaacagaaaaacggcatgaggttcacattccccaatgcaaatctaaaaagaaagtgatggaagaagatgactgcacaaacatgctgagtgaaaccaaatactgaaactgctgatttgattagctcgatagccagaaacacagagggccaacaagcagtacaagttgctgatgcacctgattgccctgccaagatgcccgttggaaatgataaggatcatgattctcatatcgaagtgacaccccatgagttgggtttgaagagattgaaaacaaatggagctacaacggaaatccatgatgagtggaatattttgagaagatcagatctgtcagccttcaccaggtaccatacatctgtggcttccaatcaaggtggagcaggatttggggaaagctcttcaccacaagataacagttctgaggctgttaaaacggactctacctgcaagatgaagtcaaattcagatgctgctccaataaagcagggctctaatggcagtagcaacaataatgacatgggctccagtacaaagaatgttgtcgccaagccttcgggtaacagggagagagtaacatcaccgtcagctgtaaaatctaatcaacatcctatgccgcatcagatatcaccagctaatgtagttgggaaagacaaaactgatgaaggaatttccaatgcagtgaaagtgggccacccagcagaggtaccacaaagctgcgtgcaaacatcatcatcacgtccattattacctccatgttatgacacagcaacagccatcaattgaccgtggatcatcagatgctcagtgtggttcatccaatgtgtttgatcctcctgttgaaggacacgctgcaaactacagtgtgaatggggctgtctcaggtggtcataatgggtccaatgggcagaatggaagtagtgctggtcccaacattgcaagaccaaacatggagagtgttaatggcactatgagcaaaaatgtggctggaggtggcagtggaagtggaagtggcaatggcacttatcagaatcggttccctcaacgtgaagctgcattgaacaaattcagactgaagcggaaagatcggaacttcggtaaaaaaggttcgctaccaaagcaggaagagactagctgagcagcggccacgggtccgtgggcagtttgtgcgacaatctggacaagaagatcaaagcaggccaagattattagtagtagtattgtactacgg

SEQ ID NO: 20777 - DNA, 557 bp, Setaria italica
  Peptide Sequence Number=SeqID_86751
aggagatgctctatttcgctggcagaaagaactggatgatccccatacctttgtggatcttcttgtgtcaacttcaaatcccttgctgcagctgaggtcattatcaagtgaggtaccctttggtgcatggttggttgggagaaaagggagcttaactgcaggagtacagtacaagccaattagcggcagcaaaaatcctatgccatttacagaattggagaactggaactgtgcaatcagttatggagttggctcaactagcccgctcagcccttcgttcattttctccctggagcttgccagaagcacacagctgaccgcatcattctatcagcacctggttgttcaaagaagggtaaaaaatccttttgaagatgatcaggttgttggcattacaaactacatcgattttggacttgagttggctgccagggttgataaagacaaagcgactgagaatggcagctccttgtttcagttggctgcaagctggcaagctaacaaaaactttcactgaagggaaagcttggtccttccaagtcttctgtagctctggc

SEQ ID NO: 20778 - DNA, 606 bp, Setaria italica
  Peptide Sequence Number=SeqID_86752
ggtgccaaagaatcctcaagaaacaagctggatggagatgtgttcttttcattctttgtgtagaaactattggttatttatgggccaaaacatttggaaattacaacactgacatagttaagcagttgccaatgatgctagctaaataaattctttatctaactagtgcttgcttcatcaaatttttaatcttatttgcagtgacatttttgtttccttaatgtgacagctgaccgcatcattctatcagcacctggttgttcaaagaagggtaaaaaatccttttgaagatgatcaggttgttggcattacaaactacatcgattttggacttgagttggctgccagggttgataaagacaaagcgactgagaatggcagctccttgtttcagttggctgcaagctggcaagctaacaaaaactttctactgaagggaaagcttggtccttccaagtcttctgtagctctggcattcaaatcatggtggagaccatcgtttacatttagtgtcacagctgtgaatgatcatacgatgttgtgaacatcgtatggattttggccttcgagttgaggatcttagacagccagttaccaacgagctga

SEQ ID NO: 20779 - DNA, 416 bp, Setaria italica
  Peptide Sequence Number=SeqID_86753
attcattttttaaagatttatttacttcacaaaaagctttttccttaccacaatttcactaggtgtctgctgctgctgatcaaaaatagtggaacggaagtaaaaggagatgctctatttcgctggcagaaagaactggatgatccccatacctttgtggatcttcttgtgtcaacttcaaatcccttgctgcagctgaggtcatgtgcgtatgatccaaattatcgtattggtgcctttggaacattacctttgctgatgggaaacagggtgcgttcaaaagattatggggtcatgggtgtaagatatggttcagagaatttatcagttggggcatcctttgtgccaattcctttatcaagtgaggtaccctttggtgcatggttggttgggagaaaagggagcttaactgcagg

SEQ ID NO: 20780 - DNA, 679 bp, Setaria italica
  Peptide Sequence Number=SeqID_86754
gtaaagatccttccaacagaagttattcaacttccctatttaattcacctgtttggaaaatttaagcttcgagataaagccatgcaagatgaactgcagaaatttctggcttcaggaaaatgtaagttgcagacactaggaggatttctcgtagatgaaagtgaaggatttgcagaacttatggggtatatgaaaaaaatgcgaaaggtcaagatctggtgtgagtcatctgcgactagtactaaattgactactcttcagaaggccatacaagagttcattcatgatgaaaaggatgcaagcaatgaccctcgttcattgtcactctattttgatggatgctctgaggattttttgaaagatttaaaggctccctgctatcttaggtcactgaaattacagggcaggttactagaacttcctgggtttgtcacggcactgcgccgactcagggagctgtaccttcaatcaactaaaatgacagctgatcttctcacagctttgaccaatttgacgcatctgcagtaccttaagcttattgcagatgaacttgaagatatccacattaaggacaaggcattgccaaggctgctcggcctatgttttgtgctgcagcgtccaacatttccaaaggttgaaaaaggtgctttgccatttcttaatctcttcagctgctctg

SEQ ID NO: 20781 - DNA, 257 bp, Setaria italica
  Peptide Sequence Number=SeqID_86755
gtaatttctcgtgtttactcctatgcggtgttagtttgtacttacaacatgtccaggaatatggcaagaacattttttcctttctaatgcagatccaacttacatgatccgtgctattccaagcaatgcatcggacaacgtctattgcacactgctcgcacatagtgccattcatggtgcaatggcaggatacagctttacagttggaatggtcaatggcaggcatgcttacataccatttcatagggtaacatcga

SEQ ID NO: 20782 - DNA, 542 bp, Setaria italica
  misc_feature (529)..(529): n is a, c, g, or t
  Peptide Sequence Number=SeqID_86756
ttgcactcgtatatagctttcttcccactggcaccttgtttccttgcagtgaaggaagagaaaggggaaagacagcaatacagtcaagtcgatgcttggaaagcaactgttatttataggcctttgatacttctactctttgctgcctaagctcgagctagctattgtgtaactgaaaaatcctgcagcttttgttgttgcatcagcttgtcatggacagaggagcaggtattcccatggatgcaggccaggatttgtgggactgggaggtcctgcctgacgaaaggaccttctccatgggccatggcagcgtgcatctcaatgatcaagaaacagaggaacatattctgcctcctccgtcaggagatgctgctgaggccgagcctgacgtccagtgcaaggacatcggcgtcgtgccggatgagagcaaaccagtgcttagtgttgccgatctgatggcctctgacaaaaacgaggaagagaaggtgttccagagccctgatgatctgatggcctctgacaaaaacgnggaagagaaggtg

SEQ ID NO: 20783 - DNA, 997 bp, Setaria italica
  misc_feature (992)..(997): n is a, c, g, or t
  Peptide Sequence Number=SeqID_86757
ttaatcctgttcatgatcagcagtagctcttattctggtgatcggttacatgccagatcaagaaacagaggaacatattctgcctcctccgtcaggagatgctgctgaggccgagcctgacgtccagtgcaaggacatcggcgtcgtgccggatgagagcaaaccagtgcttagtgttgccgatctgatggcctctgacaaaaacgaggaagagaaggtgttccagagccctgatgatctgatggcctctgacaaaaacgaggaagagaaggtgttccagagccctgatgctaaggaggccgacgatgacaaattctctgaagaggaagaagatgtcaagaaggacaacaacaaggctcggccggagtgtgtggtgttcagcgtgggaaagctgaaggtgaatgggatcggcgcgctgtgctcgttcggtgtcgcggctgccactgtctgcatcttcctgatcggcggcagggtgcagcaccaccacaggcagcaacaacagcagaagatccagctgcagttctatggcgatgataagaggatccagcaggttgtgcagcagacatctaggctgaaccaggccatgtcatctgtgatgggggcagggggagcatcaacaagggccaacatttcattcggtggcttctacgatgggttctgaattctggtggatgagaacgggtgtgtgatcaagcacaagttgccatggtagcaggtagaaacttattagatattcttcggccaggtggtctgaaactctgaatgtatactaccacgcacctgcacatagctagtgtgtagtggatgtaaataattgggttcttagacctttcattacatgcagataaggatgggttatagctaggtttgttcaggctgatggtaactaagagacagaccttggtttattacatgcacctttattttatttaacacacatgatttgtgaacaggatagaactagttttctaccaaaaaaaaaaaaaaaaaannnnnn

SEQ ID NO: 20784 - DNA, 710 bp, Setaria italica
  Peptide Sequence Number=SeqID_86758
taaacaatatgtaaagtctgcaaattctttagatggcaaatattaccaagaatttttacagcactaaagcaatccaatgatctttgttgcaaatcatggattacaatcacatataaatggcgtaaattaattagtgtagttatttccaatggcagctcctccacatagctgaatctgagatctaaaacttgtaggttcctaagttttttgaatgatactggtatgtgcttcacttttgtgtgagaaaaatctagatagcgcaaattatacaattccgttaccatgcctggcacttgttcaatgttggcaaatcttaggcataggaccctcagtagtctgaattgtgataaaacatcatatatccaagaagatggtacttcagggtcaaacaaaatgaatgagcggagtcgtgaactggttaaagaatttagggactgggcacctttttggatgcttaagcggcgagcttcatgggaaactttggttatcccagcatcgcgatatgcaataccaaacttctcctttttagcaatgactgaggttacctctcgcacaagatcatgcataacaaatgttctaggtcttccacatgcattacattctgtgactcgaagaagacaacgctgagtgagctcggtaaggtaatactttgcaacctacctccattgttgttccatcttctctatcttccacgagaccttctgcgatcc

SEQ ID NO: 20785 - DNA, 295 bp, Setaria italica
  Peptide Sequence Number=SeqID_86759
tcgtggtatcgctcgtacagcgccggcagcgtcatcgtgcccaacaccacgaagaaggaagacgtcagggagctgaagcagtcggcgatcaccgacgcgatgtacagggagaacaccgtcaggatgaacattttgatgtccttgccgcaagcgatgtagtagagcgtctcgaccagcctggatagccttctgtgcccgtcttggatcgcttgcctggtcgctctctccgacaggagagtctcagggattcgaggaaccggcaggttgaagaatgaggacgcgttggtccatatag

SEQ ID NO: 20786 - DNA, 504 bp, Setaria italica
  misc_feature (442)..(504): n is a, c, g, or t
  Peptide Sequence Number=SeqID_86760
tggcctccccgcccgcgccgcccatggggagcccggcctccgctccctcggcctccgtcccggccatgagcccgctgggcgggggccttggcgacgctctgcccccggccggagcctccgccatgaccccggcagcggcacccgcaacggagaagagcgccgccgcgtctgctgctgccgccagcttcgtctccgtcgctggcgctgtggtcgctgccgtagtgttctagacgacgatgtggcctgtggcgatggaggccaggcgctctgctgtgctcggctctcctctgctgttgatacatgtactctgtttcttcgttttttggtgaattctttatttattatatttagtttgttgtttccgagcctgagacagagatgaggatatgtaatccaatttttagacggcagctgattctatgcttatatgatgagattattnnnnnnnnnnnnnnnnnnnnnnnnnnnnnnnnnnnnnnnnnnnnnnnnnnnnnnnnnnnnnnn

SEQ ID NO: 20787 - DNA, 1340 bp, Setaria italica
  Peptide Sequence Number=SeqID_86761
ggggcctcggcgacgcgctgcccccggccggagcctccgccatgaccccggcagcggcatgccggcgccgttcgtggcgaagacgtacgagatggtggcggacgcggccacggacgcggtggtgtcgtgggcgcccggcggcgcggggaacagcttcgtggtgtgggacccgcaggcgctcgccgtcggcctcctcccccgcttcttcaagcacgccaacttcgcctccttcatcaggcagctcaacatctacggattccggaaggtgaatccagatcgttgggagtttgcacacgaatccttcttagcaggccaaaagcatttgctgagaaagatcaagaggcggcgcgctcccaagcctcagatggaagcgcatccaagaaacggagcaagcatttgtttcaagcaacccaaggattccggtgaggtagagagtttgaagagagaccgtgcagctctcagggcagaagtcctcacgctgaagcagcagtacagcagctgcaaatctcagctcgttgccttggaggagaggatcctgaacaacgagaggaatcagcagaaggccatcgcgttcttcgcaaaggtgctcagcaacccaactttcgtgcagcaggtcctgctcaactatgccgcgaacaaagagctgtatagcactgcgaaaaggaagcggctgatggaaaatgaagagcagcgtgtcggtacactgaagaatggtttagaacctacattggcgacggaggcaagtgcttctgctgctagcagtgatggtagcgcggtcgcaaaacacgagcccatgcccgagtggaattatcaggagatggacaacatttgggaggatgtatgggacgagctggacgcgatacctggcgctgaaatggaccaagaagacaaggctgcagctgggttcgaagtcgaggagttcactggacggccttgtggttgggttgatgactgcccatatctggtggagcaaatgcaatttgtggagcactagaggatgcaaaaatagcttgatcttgagagggatagtggattgttcatattaggactctgccacctgaaatttcgtgtgtacatcagccaacgagcccaattcaagtggcatgtctactgttgagtgtttccgagcctgagacagagatgaggatatgtaatccaattttcagacggcagctgattctatgcttatatgatgagattatattggttcattatcagtttcttcttactcaaatcagaacgaatgacatgggactacactgcctttgaaatattaagaatttcttacatttgagaatgaaatagccacatagacattgggataacaaaaaaaaaaaaaa

SEQ ID NO: 20788 - DNA, 245 bp, Setaria italica
  Peptide Sequence Number=SeqID_86762
ggtcaccagcaggccactccgtgctctcgcggaaacactggaagcaagcaagcagcagagcgaggcgaggaggaggagcaggccgcgaaggcgagctcgactgatctgatcccttcttccctccagcggcaatcgacgggctttggttacttgatctcggtttgatgaattgatccgcgcgcagaggaacggggtcgcggccggccgccatggaggaagcggggagggggagaggctgcggcttg

SEQ ID NO: 20789 - DNA, 1428 bp, Setaria italica
  Peptide Sequence Number=SeqID_86763
gtcaaaccacccactcaaacccttctttagttaatcatatcatgatattttttattgagtaggactgacagtgacacttatgccttttgtctttgtcggctggagcactttttggattgtttatttattctgctcttttttagtggaaaccccttcttattgagaggaattttaggcgttaacctgacttattcctggatatcttttttggtctcatctctagatttcaaattttgggtgcaaagaactgaacatgtgaaagccaatagggtaacattgtcttgaaagaaatatacatttttgttcagcaatcgacgatgccccaagcttggctggtccaatagaagatggtttcttctagacagccctacaccggcccatgaggaaatggtcaggccaaatacctctccagcaagtgatccacagtattttagtataggtctagtccggatctgatctaatgaagcaaaagtgccagttgtattaggttagacaatggttttcgatatactaattactgaatggccaccttgacctagtagttaggttattttgatacttattaaacctgtcaaatcaagggtgcatggcttgttagtattctttccttaatgaagtatggtgtaccttagatctaacaaccagttcttccttcctttcattctttcaccggaccctgcagactgcaaagacaaaagtcatcaacagttgcctgaatccagtttggaatgaagagatgatattctccatgaaagagccagtaggagtcatcaaatttgtaagcatctattatattttacatgatgaattgctgcacaccaagagacagcgttcaatgcacattttgccatttggacctttagtctccttgagacttgtttcttgtctgttttttatgaaacgacatgtttcatgtctcaagaagtcttctttggttaatgttttgaccaagaaatatggtcataccatgttgtgctctattattgctgtttaagacatgtgaccaataaatgcaaatttttatcagctacagagtagtactagtacttaagcacatatggtaccacctctagtcaattaaatgttattgactacatccacaggtgaaaatctgcaatatcaatttcttgcccattatcttctctgctttgctctgttggtttctaaactatgccttacagtaaaattggataacaatgtgagttctatcagcatctgcaagattgcaactgcactgttttcctgttgaatgaacatttgcctgtggaaccttgttttctccttactggaaatactcagcttccagcttcatctttaccagtattaacaagaaaagtgacctggccagcaaatatcacctacaagaaccccaaccaccgaactcccttccttgcattggactctaataaaggacacaccaattattgt

SEQ ID NO: 20790 - DNA, 944 bp, Setaria italica
  Peptide Sequence Number=SeqID_86764
ccagtcaccagcaggccactccgtgctctcgcggaaacactggaagcaagcaagcagcagagcgaggcgaggaggaggagcaggccgcgaaggcgagctcgactgatctgatcccttcttccctccagcggcaatcgacgggaggaacggggtcgcggccggccgccatggaggaagcggggagggggagaggctgcggcttgctcaaggtggttgtggcgcgcggccgcagcctcgccgtcagggacttcacctccagcgacccgtacgtcatcgtccgcgccgccgacacgactgcaaagacaaaagtcatcaacagttgcctgaatccagtttggaatgaagagatgatattctccatgaaagagccagtaggagtcatcaaatttgaggtgttcgactgggaccgattcaagtacgacgacaagatggggcacgccttcctggacctgcagcctgtggcagtggcgacgaagctgcggcgagcgctgcgactcactgcaggagagaccaagctccggaaggtagcccctgacgccgataactgcctgctctccgacagcttcgtgacgtacgccaacggggaggtcgcgctagatgcctggctgaggctgcgtgacgtcgagtctggcgagctgttcatcacagttaagtggatcgaagctgaagacacgaaatgatcacagcccaggagaccattaacgatgcatttttgcttgcaatgcaaccgtagatgacatgacgttggtgtaggggtggttctcttgtggtgcccttgtgtgatttattactgtgttatttcttctttctttgtgtgtgtgcactgtctgatctgaatgtaaattttccagacagttcttaacagaacaagtagtgtcaaatgtacccggaacggtattctgcatccacagcgccttggatgcagcacactgtttatgttgatt

SEQ ID NO: 20791 - DNA, 273 bp, Setaria italica
  Peptide Sequence Number=SeqID_86765
gttgccacattgcccaccctggatgtgcaagatctctctcatcttcgccctagaaacaagaaaaagagcatatgaattaatttgagatgctgcagtaagcacactaacttaaaaacagtgccaaagcaaaaaaagtttgctagttgctatactcctcaagttgattagatcaagcatatacacttgtccagccatttacaactgaatcagaaccttgaaatcataaatgagagtacaagcaagctcacattatcctaaaccagtccagatatg

SEQ ID NO: 20792 - DNA, 341 bp, Setaria italica
  Peptide Sequence Number=SeqID_86766
aggactacaaacgaagggctccttcccgaggagccggctcaacgacgggtactgcgactgcgccgatgggaccgacgagccaggtacctcggcttgtccagaaggcaagttttactgcagaaatattggagacacccctcatttgttgttctcttcgtttgtgaatgataaaatatgtgattgctgtgatggaagtgatgagtatgaaagtggcgtccattgtcagaacacgtgtcgaaatagaaatgatattgctgaggctgataatggaggtgtcaagctctcagtaacacgtttagatgctactaatgagtttaccaataaacatacaattgatattg

SEQ ID NO: 20793 - DNA, 891 bp, Setaria italica
  Peptide Sequence Number=SeqID_86767
cagatgtggaccccatcaccaggtcgtcgcgtcgtctcctccgctcccgccactctactgctccgcctcctcctcctcgccggcgccgccgacgccgcgccacctctcgttggcgtttcgcccaagatgaggcgtacttcgcgacccaggtgatcgcctgcagggacggctcgggctccttcccgaggagccggctcaacgacgggtactgcgactgcgccgatgggaccgacgagccaggtacctcggcttgtccagaagattgctgtgatggaagtgatgagtatgaaagtggcgtccattgtcagaacacgtgtcgaaatagaaatgatattgctgaggctgataatggaggtgtcaagctctcagtaacacgtttagatgctactaatgagtttaccaataaacatacaattgatattgaaaaccttgtccacaaccacatcaacaaagaccttatccagaaactaagaggattaaggatggctttagtcattgagctgggccttgttgtatgtatttttgttttctgtgttgctcggcgccgaactagaacacgcaggagacaacatattttgaaacgttagctgagcagtagttactacagaaacagttgatcgatgctcatttgcaaatattaaagcttaggaggatggtggagaattggagatggaatgaacggctctgcaccttttttgccaggtgcatctgctgttctgaactttgttgctaggaaaactatgtatatgtttactcggaagaatggtctgaagtctgaactgtgaattgctctgtagtgggtagtctggtgtacttaatagttgtatgtgattttgttgcaccatcaactcttcattcaacgagctggagcttcttataaaaagaaaaaaa

SEQ ID NO: 20794 - DNA, 1250 bp, Setaria italica
  Peptide Sequence Number=SeqID_86768
agatcgatgtccataaaggattccacactttgagtgcagatgtcatttcctgtgtggcatttggaagtagctacgaggagggaaaacgaatttttcaattgcaagaggaacagatgaaacttgctcttcttgcaatgaggactgtttatgttcctggcttcaggtttgtaccaacgaaaaagaacagaacaaggcagaagttaaacacagaaatccaatgttccttgcgcaaattgattgaaatcaatggtaggaagtgtgaggattcctaaaatttgcttgggttaatgctgtcagctagcaaagcagggagcgaatttaaaatgggaatcgacgagataattcatgagtgcaagacattttactttgctgggaaggaaacaaccgctaacttgttgacatgggcagcacttcttcttgcattgcatcaagagtggcaagataaggcccgtgaagaagtacttaaagtgtgtggaaagtatgagcaccctaatgcagataacctgagcaatctcaaaattataactatggtgttaaaagaaaccctcaggctgtatcctccagctgtcttcatcaataggactgccactaaggatatcaagcttggtaaactagacatcccgggtggcacacgatttgacttccctattatcgacattcaccatgaccatgatgtttggggcaacgatgcagacgagtttaatccattaaggtttgcagatggcaagagctatcatcttggtgcttacttgccctttgggatcggtcctacaatctgcgttggccaaaatcttgcaatggttgaggccaaggtggcacttgcaatgacccttcaacggtttgcgtttaccgtctcgccatcctatgttcatgcaccaatgatgttgttcaccctccaaccccagtatggtgctcaagttcttgtccagaagatgtgagccttctttttgatatagctaatacgggcataaggctccggtatctttgtgagcagcctgaaggtgccatgagccctctacttgtttcaatccagttcttgaaagactcttatagaaaatagacttgttctgtacagtaataatttgctaaaggctacaaacacttgatactaaaagagcgtttgtatcgtacaaagaccgtctataatctgcatgaatgtaccacaaataggattctgtaacttgagaactccttacaatgttctctttttgaaagaggattgtgtgcttgggtttgttagaaaaaaaaaa

SEQ ID NO: 20795 - DNA, 576 bp, Setaria italica
  misc_feature (417)..(417): n is a, c, g, or t
  misc_feature (564)..(564): n is a, c, g, or t
  Peptide Sequence Number=SeqID_86769
aaaccacctctactcttccagagaatactgacatggattggcaaagctgccccttgcaatctgggaatgattctcctgcaactactgcagtgacagttgaatccgataaagatattggtgatgctggaactgcttgtgttggcaagacagaatcttctagtggtgttgggattgagatgatggttgtccaggaaacttccatttgtcttgtattgtcttgtactaattcgtaaccctattagtctaattactaaattgtattgtatttctgaattagttaaagtattgaagacaccatggttaatcctgttgacagcacacgagaaccgatggaagaaagcaccattattgcttcagaaatttctgatttccgaataagcaaagctgcacctcgcattttggaaatgatcccccttnaagtatgcaggcgacagttgagtctaataaagttactagtgatgctgaaatggtttgtcctggcaggttagaatcttctgttattgagactggaacagtgggtatccaagagactgtcattggtgatcttgagagatcagaaaaacnggggattggatg

SEQ ID NO: 20796 - DNA, 181 bp, Setaria italica
  Peptide Sequence Number=SeqID_86770
gttgttctgaactatgaaccataataatcttgcacatgttcatcattagcaggtgaaatcgtcttgtttggtgtggaggcacatagttcagaacaacaaaaaacagcatcttcaccaggtgatggggttaatagttcagaaaaacaaataaaacttgattcggttgcagagattgaaacag

SEQ ID NO: 20797 - DNA, 363 bp, Setaria italica
  Peptide Sequence Number=SeqID_86771
ttaggttcatagttcagaacaacaaacagagacggtttcagatgcacagattgacacattgtgcgtccaggagactgcaattgttgatcatggtgaaacaagaggaacagttgatctgaatgacataagtacacagactcctgcattacctggaagcggcttgtttggtgtggaggcacatagttcagaacaacaaaaaacagcatcttcaccagagattgaaacagcggacgtcaaggagactgccattgctgatcatgaggaaacaggtgatgagagtggcgtaagtacacatgctcctctattaactgaatctggagaaaaaggatcacctggaactgacttgcatgattttgagggtga

SEQ ID NO: 20798 - DNA, 441 bp, Setaria italica
  Peptide Sequence Number=SeqID_86772
tacccttcctaggtaaattgtattgtaaaattgtagtcttgtcaatttgtccaccttcatctggtgaggcaatggtagagatatctagtgagccactcagccaagaggcgaaggaagctgcaagcactggccctccaggaaataatgaaaatgcaaaggtgcaagaggctactgttgctgctcaggtacttctgagcaccgaacatgctcctgatggtgaaacttcaagacttgctggaggtgatacagaactgcaattgacaccagctggtcaggctatggtagacatatctagtgagccacccagcagccaagaggtaaatgaggctccaatcagtgacgctttgggaaatgatgaaaatataaagacagcagacactggtttcgcttgcctttcagtgttggcttcgccgagttctgtattttcactaccaggggcag

SEQ ID NO: 20799 - DNA, 3297 bp, Setaria italica
  Peptide Sequence Number=SeqID_86773
tctgttgcttcccaaaatcaagaacatgttaagactgggaaggaccatttggcagtgtgttctgaagtccctgctagtcatttagcaatggctagtgcaaatcctgctagtgatcataaatctgaaagtgctcaatttgaccgatctgcttcattgcttcagaattcaggtaaggaacccactgtagtaccttctgaggttgatatagctgctccaaataaggcaccaggcagcaggaggaaagggtcggctcgggaatcacgcagcagaagtaattctgcaacagctgcaagtgaacgccgagcccgacttactggatcaaagcaggtggaggacatatcagcaaagccaaccacaacagtgtgtgtttcatcagtcgagcaacagagaactgactctttaagagctgaggttaccgctgcttctgtttgtgaagcacagaagaatcctgggagtcatgtgtcttctgacatttcaattccggtggggagtcatgcgtcaggcgcagcagttactgaagaaacaacgatgatgacacaaactcctgtgatggctaaatcagaagaaacaaaacttccaggtgatctacaaggtattgagtttaaaagttcagtaccacaaacaaacatggtttcagctgcggaatcagcacctgcaaatgatgaacacttgcaaggtgccgaagttaatagttcagaacagacaaaagtggtttcagctgctgaaccagcaccttcaaatgatgaacatgtgcaaggtgtagaggttgatagctcagaacaaccgacaaagacagtctcagctgcagaatcagcaccttcaaatgatgaagaacacacaacgcacgaagtgcgtcttaagacttctgatgttaatatacttacctctagtgcagcaacagacatattgcaggacaaaattgataccagtgttgcttgccagtcagatgcaccgtgtacggatgaaattgcaaggcagtctgatgcatcgctactagatagcaaagcccctcatgatggttcagctaaatactctcgtggctccaccaaagaagatgattatgtcttgcgcagtgaagccactggtgttgatgtcactggttctaagcaagatgatgtgaaagttgatgacacgcaagttgatgatacttctagggcttcttccagtcatttggctgctacttcacaatccactcagtcagatcagcctccagatcaagtggagattgtggagaataggaatgaacaagtgaaaatggaagaaacattggataagagttctggagacaatcaaactcatagtcagaaccatgaaacttctcatgatacagcattattaagaaattctccttcagagtacttgaatgagcattgttctgctcaagtagatggtgatacatttaaaagtaaagaaaatattgttgaaatccatgctgccatgaatattgatggtcctgaggaagctctggatgcttcgtccatgcaatctcagaaagagggcagcacaacagacgttggtttatccaccgatggtgatacatctgaaactaaagaaactactgttgaaacccatgctgccatgaatgctgatggccctgaggaagctcaggatgctttgtccacccaatctgataaagaggccagcatggcagaagttgatgtgcctaccgatagcagtcccacagtttgcaaagcacataatgatcttgaaggccaggtatcttgtgaagaaaccttggttagggctgatgctgacaatcgaacccatagcaatacaaatgatgattctaataataaagatgaagacaccatggttaatcctgttgacagcacacgagaaccgatggaagaaagcaccattattgcttcagaaatttctgatttgaataagcaaagctgcacctcgcattttggaaatgatcccccttcaagtatgcaggcgacagttgagtctaataaagttactagtgatgctgaaatggtttgtcctggcaggttagaatcttctgttattgagactggaacagtgggtatccaagagactgtcattggtgatcttgagagatcagaaaaaacaggggatttggatgaaaaaactggcagtccgcagcgtgatgttcttggtacatcatgttccatgatgggtcttgtgtgtgaaaaaacacctattgaagatcttactgcaggtagccatttggaagcaccagtagaaccaactcaagaaactactgttgcaaacgcagtggtgttcatggatgcctgcaacacagaacctgatggtgattctactgttgctgaagggcaaaaacagactgtagaaatggttcattctccagaaaatcaatctgctgcatccgaacatgtcgagacacaggcaaagccaactgtgatttgtggtcctatgctaaatgaatctcagactgcagggctggaagatgacttctcaatactgaagcatggtggtcctactgcctcatccgagcttgttgtagaatccaatccaaccagtgaaatttctgctattcaagtggaaacggaggcaacaaagtcagatgggtactgcacagtggaggatggcaatgcttcatctgaaactgtcatggaattggagccaaataaagaaactactattcctatgcaagaggatactacagaaactaatgatactattgctacttacaaagcatgcaatgattctgagagtcattcatttggtgaagcggtgatggaaatgcagtcatcagagatcaaggcagcatcttctattcagtctggtgcaggaaacataagcacacaggctcctgcaatgcctgatggaactgaacaaaccaatatggcttcaacttcagaagtagcacctgaaaatgataaagaacatatgccaggcactgaagttcatagttcagaccaacaaacaaagacgatttcacctgctaatgatgaacatgtgcaagatattatggttcatagttcagaacaacaaacagagacggtttcagatgcacagattgacacattgtgcgtccaggagactgcaattgttgatcatggtgaaacaagaggaacagttgatctgaatgacataagtacacagactcctgcattacctggaagcggcttgtttggtgtggaggcacatagttcagaacaacaaaaaacagcatcttcaccaggtgatggggttaatagttcagaaaaacaaataaaacttgattcggttgcagagattgaaacagcggacgtcaaggagactgccattgctgatcatgaggaaacaggtgatgagagtggcgtaagt

SEQ ID NO: 20800 - DNA, 3655 bp, Setaria italica
  Peptide Sequence Number=SeqID_86774
aatactaagtagaagaccaacccaagacaagaccaaagaaggtaaaatagaaggacctaccaaatacatagacaataccaataagacaaaacttaggaaaaatagaatagtactacagaacggttgtagaacaaccattgtgcgtccaggagactgcaattgttgatcatggtgaaacaagaggaacagttgatctgaatgacataagtacacagactcctgcattacctggaagcggcttgtttggtgtggaggcacatagttcagaacaacaaaaaacagcatcttcaccaggtgatggggttaatagttcagaaaaacaataaaacttgattcggttgcagagattgaaacagcggacgtcaaggagactgccattgctgatcatgaggaaacaggtgatgagagtggcgtaagtacacatgctcctctattaactgaatctggagaaaaaggatcacctggaactgacttgcatgattttgagggtgagaaggatcattctactgggattaacatagagggcatccaaggcccttatgatgcctcagacaaggatcattctactgatcctcctgcaactaccctggtgatggttgaatctgataaagatacctgtgatgcagaaattgtttctgctggcaaattagaatcttctggtggtggtgatattggaacagttagtgtccaggaagctgcagatgatgctgatcacgagggaacacaaggaaaaggtattgaggctcatggttcagaacaaatggagatggtttcagttgcacaagcggcatctaatctggctttagtaggatattcttcttcagaagactcaatgttggatgattctgcccgagcagctgatggtggtgattttgtggatagtaaaggagctggtgttgatagccaagaaactacatcaactcaaaccacctctactcttccagagaatactgacatggattggcaaagctgccccttgcaatctgggaatgattctcctgcaactactgcagtgacagttgaatccgataaagatattggtgatgctggaactgcttgtgttggcaagacagaatcttctagtggtgttgggattgagatgatggttgtccaggaaacttccattgctgatcagcaaggagcaattggaacaggtgatctgaatgaggaaaatgacagtttgcgacgtggtgatgactgtggtacatcatgttccacattagttactgcgtgtgaaaaagcacctagtgttgaaggggttattgtggctgaccattcagaagtgcccacttcagttgaacttatcgctgcacaatcaactcaagaagctaccatttcaaaccaagaggaaattgttgcccatgaaaaagcaactagtgtagaagggcttactgtagatagccgttcagatgcacctgcatcaatggtattagttggtgtggaatcaactcaagaagctatgtcaaaccaagaacaaattatagatgctgttggctctatgcatgaaagcaacagtacagccagtggtgatgctgctactgctagcggagcagacctgactgaagaagtggttaaagctcctgaagagcaaccaatcctgtttcaacttgttgattcacaagcaaaggcagctgagatctctggccctatgcaggaggaatccatagcaaacttggaaaatgatgtctcagaacctaaagatggtagccctactgcctcgtctgagcgtgttgcagaacccaagccagttgatgaaacttctgttatgcaagtggcactgacaacgagtacaggggatgaatgtgcagcagaggatcataatgttgttccatctgaaactgttatggaatcggagcccattcaagaaattgctgttcctatgcaagaggacggtaaagaagctaatgatgctcatactgctcgcgaagtatgcagagatcttgagggccatgcatcaggtgctgtgtcgatgccagtagaatcagaaattgttgctaggcaaggggatgacgcagaagctaatgatactactatcatcagcgaagtatgcaaaggtactgagtcccatgtatctggtgaagtaccaattccagtagagtcatcaccactcaaggtggaactggcgaatgagacagatgactctcaaggtttgaatcgagggacgggattcgatgagcgtgagatgcaatgtacgactcagcctgttgctgtagctgatgttcccattatagtgggagacgaggtattaaacacggagtctacacctggtggtgcaaatgcaaaatctgatggagctgacactgaacagaaattgctaccttcctctgttgagcccatggtagacgtatctagtgagctgcccagccaagaggtaaaggaggctccaagcactgacctttcaggaaatgatgaagatgtgaagatggaagaggcccctgctgctcagggacagctaaacactgatgcagcttatggtggtgaaaatgcaaaacttggtgaagctgccttggagctgcagttgccaccttcatctggtgaggcaatagtagagatatctagtgagccactcagccaagaggcaaaggaagctgcaagcactaaccctccaggaaatgatgaaaatgagctgcaattgccaccttcatctggtgaggcaatggtagagatatctagtgagccactcagccaagaggcgaaggaagctgcaagcactaaccctccaggaaatgatgaaaatgagctgcaattgccaccttcatctggtgaggcaatggtagagatatctagtgagccactcagccaagaggcgaaggaagctgcaagcactggccctccaggaaataatgaaaatgcaaaggtgcaagaggctactgttgctgctcaggtacttctgagcaccgaacatgctcctgatggtgaaacttcaagacttgctggaggtgatacagaactgcaattgacaccagctggtcaggctatggtagacatatctagtgagccacccagcagccaagaggtaaatgaggctccaatcagtgacgctttgggaaatgatgaaaatataaagacagaaaatactgctgatgctgaacctgcccctggtagtgaaaatacagaactcggcgaagccaacactgaaaggcaagcgaaaccagtgtctgctgtggttatggtagaatcatctagtgagcttcccagccaagagggaaaggaagctgcaaccactgacctgtcaggggatgatgaaaaagcaaagtcagcgagggctgctgttgttgcggaactttttggagatgcaacagaaggcggttcagatcaaccattaccgtcgcctagaggtgaaggtgaggatgcagatggtgatggaggtgtagagtaaattatgcaaatattgtactaagaactactagaatctgtgtaagtaagaactgctattagtgctttagctgtaacccatggaagctttcactgaaattaatgttagtttacgtggtgctgagattacagacgttgtggcgcacggcagttaattcttttctaacgtgtgaatgtttgctgtactgatatgtgttgcttgatccgcatcacatcgtatcatgttgttagtatggtgcttcggtggtcctgttgagttgataactgttttgttccagac

SEQ ID NO: 20801 - DNA, 689 bp, Setaria italica
  Peptide Sequence Number=SeqID_86775
agacgaaccggcgaccagggccatgtccacggcgcttgccactctagccccttccaggtgatcttccttggccgctgtggggatgaaattatcgtatgggtttactcatcggagacagggacatggggagatgccatctcaataatgtggctgagcccatttgacccggatgattttgcttgttgcaataccctggtcggaaattccatctactggctgttcaatgaaagcagtatgaccatacttgagtttgatttggatacgcaacgcctagctacactagaggtaccaccggaagtgattgatcttgacacttctgtccgtgacgagtgccaattcttgttaatgccgacagaagatggtgagcttggcttcctcattctagaaggtttcaatgcccgaatatggaagaggaaggccaagtccgatggtgatactggatgggtactcagaaatactattaaactgcaccttccattgaagcgatgggcacatgggtatccttcagagataataggatttgctgaagactgtaatgtggtgtttatagcaactggtggtggtgttgttttcatggtccatcttgagtctgcgcagtttaagaaacttccccaaaaactgggctaccgcacatgctatccattcacaagtttctgcgcagcaggtaaatatccagcatgctccttcgt

SEQ ID NO: 20802 - DNA, 262 bp, Setaria italica
  Peptide Sequence Number=SeqID_86776
ggtccctctcctctctcctctacacatcctgacatccgcctccgtcgcagactcgtccgtggacggtgctggtgctgcgttcgatcaaagacagaacctcgtaacaggtcaggaagcttcgaagcatggcaatggagatgagggctcgggaatctgtaaacatgtcggaggacctaactggggcaatcgcaccatacgccatcgccctacatgacgtgttcctccactcccattgctcatcatgcttcagcgaattaccgcc

SEQ ID NO: 20803 - DNA, 243 bp, Setaria italica
  Peptide Sequence Number=SeqID_86777
agcagcctgaagctgcgccaacccccctgactcctgccaggtgcccaggtaccagaatttgtaccttctctaaaattcactggaagaccagctgtacattaggggcagctccattgaatgcacagttgtttctataagcaatatgggtttgactggttacgcgtgcactctagtgcgccatttcattctaatggaaagagtagttcacaagctggtagatgtgatgaggattcagttactact

SEQ ID NO: 20804 - DNA, 261 bp, Setaria italica
  Peptide Sequence Number=SeqID_86778
ctcgtcttcccccttccgcctgcgccgccacaccatgccgtcacgctcccgtgccagggggcggacgctgcagccggttgtgctggacgatctattagagggtgtcttcgacgtcgactacggcgaagcggacctggaggggggcgaggccgaggaggagtccgatgatgacggaggctcggaggaggaggacggtgaaggatccagcgacgacgacgatgaggaggaggatgatgaggaggaagaggaggagcaggaagg

SEQ ID NO: 20805 - DNA, 287 bp, Setaria italica
  Peptide Sequence Number=SeqID_86779
ctcttcctccggagcaggtgggtgagtgacggatctctcggtagcaatggcgagttctccgtgcaagaggagccgtcctcctgccctcgcgcggctcctcctcctcttcctcctcgccctcctcgccggccgcggcggcgctgcggggggaggcggcaagggcagctcggtgtacccagcggccgtcgtgtacccgcaccactcccgccagatctcctggaaaccccgggtgttcctgtaccagcacttcctcagcgacgacgaggacaaccacctcatctccctcg

SEQ ID NO: 20806 - DNA, 424 bp, Setaria italica
  Peptide Sequence Number=SeqID_86780
gttgtattctggtagggaatattagcttgataaaaataccctgatgttttatcgtacactacatgaggcctactttatcattggacaatattttactatcttctgaattatatggtgaagcatcacattttatcctactatcctagtgtattacagcttcatattgcaaatgctgtaagttcccaaaaaaacagggaacgtatgagatgacaatgctttgatccctttcccattatctcatcaatacaaaggcaaatatattatccttttatcccctttttccattatctccgtaattaagaaggggacttcagagattttagggataaagggccggctgataactcaggcgcagggaggggaaatcgccctgatgattttagggaaacaagggttaaatttccttatgagcctatatttaatt

SEQ ID NO: 20807 - DNA, 512 bp, Setaria italica
  misc_feature (1)..(22): n is a, c, g, or t
  Peptide Sequence Number=SeqID_86781
nnnnnnnnnnnnnnnnnnnnnngcaacggccttgtcacttttttctccgacttagtgtgagttttttttaattccatgtagctcataataatttgtttatttcgacgaaatacacgatagtacgtatgcaaagtaatccattcactttgccgctaacagtgtatatacaccgtatacaattaccatcgactaagcacattaccgctattgttctgtttatcacgctcgtttcgcagagagtatgatcggtataggcgtataccagacacatgcatgctgacgtgcttgactcgactccacacccgaccgtcaagggtgtgcgtgcaacacttgcatgcgctcgccatgcatgtcaagcaaaggccgaatcagacaccgccgccgatgccccctccggcgccgccaccatagcctccaccgccgccagagccaacgccaccacccgcgccagcaccgcagccaccgccagccccagctcctcctccaccgccaagtccgccacctcccccggc

SEQ ID NO: 20808 - DNA, 272 bp, Setaria italica
  Peptide Sequence Number=SeqID_86782
ctcctatgcagaaaaagtagcaagaagaatgataacccctccaaggcctgcatgttttttactattttgatggctctgctgaagagataatgcaagcagctccagcgccatatgcagcatatccctagtttcagcagcttcaacaagagcaagcacaacaggcatcccaccgactgtttgaacagtgtcaccaattgtgcactgattacagatgtaaacatcaccacttagacgtccatatcttggtatacctcctattggggatgcagcag

SEQ ID NO: 20809 - DNA, 311 bp, Setaria italica
  Peptide Sequence Number=SeqID_86783
ttttttttttggatagaccaataaactcttctgtcataaaaatcttttctgaagtgccaaactttgcagggtgtcagcaatcaacaaatgtgggtgctctttcagactacaaaagacggtatccattagtaataacagacaagctgaacagtaaactacgtgatgaaccctaaactaattttacagtcaaggtctgtatgcctgcgctcctcagatcctccgcgttatgcttgtagtccagctaaacaacccgtcactgttgaggtattcgtactggtctgtgaggccttggcgcattcgggtttccctgg

SEQ ID NO: 20810 - DNA, 377 bp, Setaria italica
  Peptide Sequence Number=SeqID_86784
atcgaatcgaggcccctcgtcttcttccccaaatcgcatctccgactcccgtcgcccccaccgaagcagccaaaccctaggtaggggcgagatgctgggcggcctgtacggcgacctcccgccgccgtcttcgtcggccggcgacgacgacaaggcctccacggcctccgtctggtccagcgccaccaagatggcgccgcccaccctccgcaagccgtccaccaccttcgccccgcccccgtcgctcctccgcaaccagcacctgcgcccgcccaaggccgcccccgcctccgcggctcccgccgtcgtggccgccgagcccgccctcgcccccgccgcgtccttccagccggcgttcgtcgccgtccagtccgtgg

SEQ ID NO: 20811 - DNA, 1773 bp, Setaria italica
  misc_feature (1)..(16): n is a, c, g, or t
  Peptide Sequence Number=SeqID_86785
nnnnnnnnnnnnnnnntttttttttttttagactacgactacaagcatccgctgagcctggcaaaagtttgtttgctcgtctcaacatcgcaaggattcattgttgctgccttggtagtattttacacatgatttcgcggacggggcaccaaatctcgcttagtgctctaatcaccgagcgtgacaggcaccatacgtacaataccaacacacaccgaagaaccaaaagaatttttcacaacaaagtttgtagacgtcacgaacgaatcccgttcccggccggcaccaggagcaggaacccggcttcaccctcggcggcgctgctcaggctcagctcagcaccgggggcttcacggccggctgcagccgctcggtccagaacagcgcggcctccgcgccgtcgcccttcaccacctccaccacgcacaccgcgtcagcgagcttgaagacgctcactttcgccacgatgccgccgctctcctcctcgaggtagaccggcccggtgccccgcttcccttccctcctcacgcggtacccttccttccgcccggccgcctctacgcggctcagcacgtcggcggcgggctcgctcacgaacacccgctccttgcccggcccggcgccgaacagcgcggacaggtcggacccaggcgagaagctcaggatgtcgaacgccgtcatctccctcgccatgtcctccttgaactcgggcttgaaccaggcctcctcgtgcccgcctaccatgaggcgcgccagctcctcgtcgctggcgccgtcgcagaaccaggggtgggccacgatgccgtccgcgtcaatgcgagcgtccgggttggggtgcagcacgcggcggagaaggtcgcgcagcgccggcgagaaccagctcgggcaccggaacttgcccgcgtagatcttgcggtacatgttcacgaggctggcgtcgttgaaggggaggtacccggcggcgagcacgaacagcaccacgccgcaggaccagatgtccaccttcgccgggtcgtaccctttcctcgacaggatctcgggagccacgtacgccggggtgccgcagagcgtgtggcggaggttgccgccgtcggccacggcgccgagcccgaagtcggcgaccttgagcgcgccggcctcgtcgaggagcaggttctccggcttgatgtcgcggtggaacacgccgcgcgcgtggcagtagcgcacggcggagatgagctgccggaagtagtgcctcgcgaggtcctccgtcatgcggccggaggcgtcgacgagcgagaagagctcgccgccggcggcgaggtcgaggacgaagtggaccttcttgcgcgtggctaggatctcgtggaggcgcaccacgtggcggtggcgcaggcggcggaggatggccgcctcccgctcaatggccgcgggccggcgtccctcctcggccccgccggaggcgcgggggttggggaaggacttgatggcgacggactcgccggtgaggaggtcccttgcgaggtacaccttggcggacgcgccgcggccgaggaggccgccgagctcgtacctgccgaggagcaccgtcccggcgggagattcctctcccggcgcggcggatgcgacggcgccggtggcgggcgacatcgtggcggcggcttctgctcggctggcgccgtcgtaatgagcgggcgcgacgggggaattttttttccctgtccctagcaggccggcgacggagaggagaacgatcggggtggaggagctgctgaaaacccgggtggctttgcg

SEQ ID NO: 20812 - DNA, 646 bp, Setaria italica
  Peptide Sequence Number=SeqID_86786
aagtccgtaacatccaagagccactaccaagtagatggggagctgaaacagcaacagcaaaattcataacacattaccaatcaccttgcagtatatttttgagaaatttacaagtgaaaaccagtgacactgaccagccaagtataacttcgaggaatagttgaggtttcaaggagagcaatccagatggatgagattgctaccagtattgcaacaatcttgaatatgtgcttcatttgggaatggtgtgctttcctacaatacaaaatatagctgaatgctatggacaatcaattcgttttcctaacacataagcagttgcacagtttaatttgacacatgtttatgctggcagttgtgggttttctaccacactctagatgtatttaagctgggaaaaatgcatatagaccatgaacaatccacaccagtcaaggaatccagtgggctgaggaatagatatcaaaaagaaggatcaagcacatctagatcgagcggtgatcctatacaccttttggttgaatagcacctaagcatgtggattgttgtgggagtcttcgtaatttcgtcaacacatctagctcactcaggagcattaactcatgcttgtgattttgtgcatgcttgtcagtactcaagtctaact

SEQ ID NO: 20813 - DNA, 440 bp, Setaria italica
  Peptide Sequence Number=SeqID_86787
caacaaatatcctgttgtagtagtatagcttcttgaggacaagttgggaagaacataagtccaaatccaaccataaaaagtccgtaacatccaagagccactaccaagtagatggggagcagccaagtataacttcgaggaatagttgaggtttcaaggagagcaatccagatggatgagatcgctaccagtattgcaacaatcttgaatatgtgcttcatttgggaatggtgtgctttccacaacggatgaatcaatccaggtccggatcgatcggcgcacctggggcagcagcagcgcgcaggaggcggcgggcagcgacaacaggagcggaattccagccgacgagctcccgtcgcaggatccttcgggaggcgtgcgtcggcgaggtcaggcggaatggttcgttgggcgatggcggaaaccgggatgccgggcac

SEQ ID NO: 20814 - DNA, 681 bp, Setaria italica
  Peptide Sequence Number=SeqID_86788
tagcagacacaagtctagaccatactccaaattggtttccaggggtaaaatcttcaagttcatgtatccagaaacttggcattagaagcatattccttgtcggaccaatcattgaagggttttttcgatgtaattaagcaggcagaagtgagaacaataccacatcctttttcgtcatcccactcgacagctatgccagtgcaccgatttatctccttatcatcaatgtatgccgaaaggcttaagatagattttgatgcatttaaaagtatttccttctgctttggaccataagattcggtgatgctagagacagtcaaactcgacctaagggtaggtaattgttcttgccgagcttgtttttcactgtacttctgataagactcatagtagctgtttaaagccagtcgatcactagttaggccatagtaaactttaccagcagaacttgtccaaattggtacaagtggaggctgcggctcacgaattggcgaggaatctgagcctgaatgctcttgtgctaattcctgttgggtaacttgggttacatcttcctcttcttctttctcaatgggcaagcgtgtgagctgcaattgaggagtggttctggcttccaccctcctcctctttgccgatgtagttggcagaacagatgggtgctttctccttcggcaccaactt

SEQ ID NO: 20815 - DNA, 1441 bp, Setaria italica
  Peptide Sequence Number=SeqID_86789
atggtgctgagcttcatggaggactccgcggccgtggcggaacggccccgcgcgggcgctgcgccggcaactgcttcaacggcaaccaggacggcagcgacgacgaggacttcgacttcctcccctccgcctccgccccaccgtcgcgccggccgcgaccggcgaccgttcgtccgcatcgcagggcctggtgcagtgcgcgagcacggcggagcggaacctcctcgccgacgcgtcgcggatcgccgagcgctgcggcaagggcggcggcggctccggccggaagaaggcggacgtccggcgggcggtggcggacggtctccgcgctctcgggtacgacgcggcggtgtgcgtgtcgcggtgggacaaggcgccctcccacccggcgggggagcacgagtacatcgacgcggtggtggcagggtccggggcggcgtcggtccggctcgtggtggaggtggacttccggtcggagttcgaggtggcgcggcccaccaaggtgtaccgggcggcgctgcaggcgctgccgccgctgttcgtgggcacccccgaccggctcggccgggtcgtggccctcgtcgccgacgccgcgcggcagagcctccggaagcgcggcctccacttcccgccgtggcgaaagcccgagtacatgcgcgccaagtggctgtccccgcacgcccgcgccggcgtcccggacacgccgccgctgacgacaacgctcgccacgccggtgtccgccgccagcttctccggcgagttcgagctgcggttcgatgagaagccaaaggcgcccgacggcaccgcccgcgaagacggggaggagaagatcactgtggtggtgtccccgtcgccgtcgccgtggcacccggtggaggccgaggcgagcgcgacgagcccgccgcaggccaaggggaaggtggtgacggggctcgcctccgtgctctgattctgaaccagcacggcggcggcggtggtggatcgaataacgctagctagccgatcacacccaagaactccccagtccccacctccacccaaactttttttggcgccgatcttttttttcctcgcgtttctcgatccgtccgagggccggctccaggtgttttagcggttttccggcgccttggaaacgatagagagagagagagaaaaacgcctcctttttgtccgttttttgttcctgcgaaagtttccgttttccgccgccggggtgaacggaaggaaccgggggtcgagtttttggttcctcgtccctcgttgttgtcgagaggaagacgaagatggaagaacaagcctcaccgccatgatctgaagctggatgctctgaactactactacctgtagtgctgtaccatatccatcaggtcatgccaggcttgtgatttcaattgaagaggtactagtaaaaaaaaattctactgcagcaaaaaaaaaaaaa

SEQ ID NO: 20816 - DNA, 448 bp, Setaria italica
  Peptide Sequence Number=SeqID_86790
cggcggcgcccgccggcggggagaaggatgagctgtcggagcccagctcgctgtgcctggacggcatggtgcggagcttcctggaggacggcgttggcggcggcggcggcgagcggggagcggccgcgcggtgctgcaactgcttccacgccggtgacacctccgacgacgaggatggccccgcctcggcggatgccgcagccgctgacatcgcggagaccatcaagggcctcgtccactgcgccagcctccgggagcgcaacctcctcgccgacgtctccacccaggtcgagcgccaccgcgcgtcaggggcgcgcaagcgcgacctcctccgcctactggccgagtccctccgcgccgcgggccacgacgccgcggtctgcctctcgcgctgggacaagtcgtcctcccaccttgccggcgagcacgcgtacctggacgtcctcct

SEQ ID NO: 20817 - DNA, 435 bp, Setaria italica
  Peptide Sequence Number=SeqID_86791
ccttcggctccttcaccgcctcctccggcttcttgtccgccgccgccgcagcagcagcatccttgccggcgtcaccggcaggcttcgccgccggaggccctgccgcctcggtcttgttggcgggcgggtggcaatcccagggcacccccttcttgccggacttgtgcagcctctggacgagcgtgctggcgtccacggtccccgtcaccgtcaccttgtgctgcgcggcgtccaccgtcacgctctgcacgcctgaaaagaaaaccagcaaccaaaaaccaccgcgattcagccaaaacaccacgaaatgcatgcgaaccggactcgctcgagaagacatctgtgtattcagctaggtaggcaccgtaccttcgatgctccttagcaccttccggaccttcttcttgcagcgcggagcagaggaacacgggcttt

SEQ ID NO: 20818 - DNA, 550 bp, Setaria italica
  Peptide Sequence Number=SeqID_86792
cttctcggggctctcggccttcggctccttcaccgcctcctccggcttcttgtccgccgccgccgcagcagcagcatccttgccggcgtcaccggcaggcttcgccgccggaggcggcagggcctccggcgccggcgccggagcaggcgcggcctcggtcttgttggcgggcgggtggcaatcccagggcacccccttcttgccggacttgtgcagcctctggacgagcgtgctggcgtccacggtccccgtcaccgtcaccttgtgctgcgcggcgtccaccgtcacgctctgcacgccttcgatgctccttagcaccttccggaccttcttcttgcagccatggcagtggatggacaccctcagcaccacggtctgaacggcaggggctgccgcagctcctgacgccatggggagcgctctggagagtggtcgctctgttcggctgctcgcggagcagaggaacacggctttgtggctttggcgccgaaggcgtgcagagcgtgacggtggacgccgcgcagcacaaggtgacggtgacggggaccgt

SEQ ID NO: 20819 - DNA, 389 bp, Setaria italica
  Peptide Sequence Number=SeqID_86793
atcttacccttacccagagaaacctttgcaagacatctctgcacagtgccttcagattccacttgacacaaatcatctgtcctgagcatgcttctctttatagtactgttctcagtgttcttgtcacaggaaatggcaggtgaaagtactttcctctttagcaaaatcggtgatttcccgtttgacaaaacctccgtttcaatttctctgattcatttcggcacaggtcatctgccttctgcatattttgctccatgttcttattctgtgtgttttcattcctatgcttggcactggtagtagatagcacattttcctgacccaggtccccaactgacggtatagaatcatggcacatgtcactggaagcaggtatatcttggtattta

SEQ ID NO: 20820 - DNA, 512 bp, Setaria italica
  Peptide Sequence Number=SeqID_86794
gcactaggaagcgtcgaaagataaacaccgatgatcttgcagatgttcgttggcacaagacaggcaagacaaagccagtattagttgaaggaaagcacctcggctgtaagaaaataatggtgctttatacgagcactacaaagggtgggaaggctgagaaaaccaattgggtgatgcaccagtaccacctaggcactggggaggatgagaaagagggtgaatatgttgtctctaaattattttttctagcagcaatttaaacctggggagaagaatgctcaagagctaaccacagcggatggtttagaatcaatggctgctgaagcagacattcctgatttcactacattgccctctgaagaacttgttggtacaatccaagaaattgctcagaatccagaccataatccttatcaggttaatgaaaactgtgaaataaacattcaagagaatgctgctgaagagactgttgtcctcccaccctctgagaaaccagagggtggagataaccc

SEQ ID NO: 20821 - DNA, 316 bp, Setaria italica
  misc_feature (88)..(88): n is a, c, g, or t
  Peptide Sequence Number=SeqID_86795
cccaggaaggagggaatggagaggaaagatgttatgtcgaaaaatgtttcaatctacaaaggtcaagcatctgccctcgaagctcatnggcccccaactgcaaggttctggttgttgccaacccagcaataccaatgctcttatcttgaaagaatttgctccatctattcctgagaggaatgttacctgcttgacccgtctggaccacaacagggctcttggccaaatttctgagagacttaatgtccaagtcagtgatgtgaaagaaatagttaattaataatagggtaaaccaactacaatacctactacaaga

SEQ ID NO: 20822 - DNA, 277 bp, Setaria italica
  Peptide Sequence Number=SeqID_86796
gaagaagatggatgctaccgcccaggagctgtccgaggagaaggcgctcgcttactcatgcctcgagtaaactttgaatagcaattgctacacttatgctttgaataaagaaactccagcgtcgttcatagattccctcacccagaactgctgcacatcgaggtgcaggtgcgttgctggcttcgcccagcgtgtatgaggcttgtagctccttttttgcctgatttgcaggacatttattgaaaacccgacaaagttaagaaactgcttagaaaaa

SEQ ID NO: 20823 - DNA, 703 bp, Setaria italica
  Peptide Sequence Number=SeqID_86797
atgttgtggaggcctgcactggtgtgaatgtttgtcggttctattggttaggtggattcccaggaaggagggaatggagaggaaagatgttatgtcgaaaaatagtttcaatctacaaaggtcaagcatctgccctcgaagctcatgcggccccccaacctgcaaggttctggttgttgccaacccagcaaataccaatgctcttatcttgaaagaatttgctccatctattcctgagaggaatgttacctgcttgacccgtctggaccacaacagggctcttggccaaatttctgagagacttaatgtccaagtcagtgatgtgaagaatgttattatatggggtaaccactcatcctctcagtaccctgatgttaaccatgccacatcactgacttggacattaagtctctcagaaatttggccaagagccctgttgtggtccagacgggtcaagcaggtaacattcctctcaggaatagatggagcaaaattctttcaagataagagcattggtatttgctgggttggcaacaaccagaaccttgcagttgtgggccgcatgagcttcgagggcagatgcttgacctttgtagattgaaacatttttacgaacataacatctttcctctccattccctccttcctgggaatccaccaaccatgaccgcaacattcacaccagtgcaggcctccacaacat

SEQ ID NO: 20824 - DNA, 760 bp, Setaria italica
  Peptide Sequence Number=SeqID_86798
ttgttcccccttaactttgttcttaaggttttctttggtttgtttgtcctaaccctagcaaataccaatgctcttatcttgaaagaatttgctccatctattcctgagaggaatgttacctgcttgacccgtctggaccacaacagggctcttggccaaatttctgagagacttaatgtccaagtcagtgatgtgaagaatgttattatatggggtaaccactcatcctctcagtaccctgatgttaaccatgccacagtgaagacttccagtggagataagcctgttcgtgaacttgttgctgatgatgaatggcttaatggggaattcatcacgaccgtccagcagcgtggtgctgcaatcatcaaggcaaggaagttctccagtgctctttctgctgccagctctgcttgtgaccacatccgtgattgggttcttggaacccctgagggaacatttgtttccatgggtgtgtactctgatggttcgtacggtgtgcctgctggactgatctactcattcccagtaacatgcagtggcggtgaatggaaaatcgttcaaggcctcccgatcgatgagttctcgaggaagaagatggatgctaccgcccaggagctgtccgaggagaaggcgctcgcttactcaatagacctacgaagtaaaactttagaaataagacaaattagactaacaaacctaaataagaactttaagaaaataaaaagaaaaactaaccaaagaacgtaacgttaacaaataa

SEQ ID NO: 20825 - DNA, 697 bp, Setaria italica
  Peptide Sequence Number=SeqID_86799
tagtaacttactaagttacgtactaacttaagttaacctaactaaactagggtcttctttggtcctaaattttcttgtagtagtactttaattgttcctaagttctagttgtattgttgtaagtaattgtttattatatggggtaaccactcatcctctcagtaccctgatgttaaccatgccacagtgaagacttccagtggagataagcctgttcgtgaacttgttgctgatgatgaatggcttaatggggaattcatcacgaccgtccagcagcgtggtgctgcaatcatcaaggcaaggaagttctccagtgctctttctgctgccagctctgcttgtgaccacatccgtgattgggttcttggaacccctgagggaacatttgtttccatgggtgtgtactctgatggttcgtacggtgtgcctgctggactgatctactcattcccagtaacatgcagtggcggtgaatggaaaatcgttcaaggcctcccgatcgatgagttctcgaggaagaagatggatgctaccgcccaggagctgtccgaggagaaggcgctcgcttactcatgcctcgagtaaactttgaatagcaattgctacacctatgctttgaataagaactccagcgtcgttcatagattccctcacccagaactgctgcacatcgagtgacaggtgacgttgctggctt

SEQ ID NO: 20826 - DNA, 472 bp, Setaria italica
  Peptide Sequence Number=SeqID_86800
ctaatagaccgaatagaatgctcatagaattctgcaagcttgttcgaacgttagaaagaacgattccagcaaccgagagagggatcttatttagggagcccacaagactatcagaagaaatattggcatcagaaaacacatgatggtacagaagacaaactgcaaagcaactttagagaagtccagtagttgccctggcagttaatgaagctggaaaaagtttatgtggaaacttatctgtgttcacatttatatttcaaaattctaatgaatttggtacctgtatgtagtcgcgcttgtctgatgaagaaaccacaatgaagtaaagcttattccaagccccaaaactccactgcccgtgatgacaacccaaaactcaggcatccttaggagagatgtctccaaaaggtactccacttcattaaaaccaagaataaggataattcccaatggcagcgaaagaattgtttat

SEQ ID NO: 20827 - DNA, 1640 bp, Setaria italica
  Peptide Sequence Number=SeqID_86801
ccaccgtaatttttacaagatacaatacaccgaccgaacgagccgttcatcccaaactgactgggattcggtttcatccgtttttgtatcctacacccttacacacagcaatgaagacgtataccaccaccacaggagcaacaactggggggtcaaggtcagcttggcaaaaaaagggaccggagagcccccaggccaaccgcgtagttagaatgttgccccttggcctagtcaggtgggaaacaaccatcgcatctgcacaaatttcccagagaggtagtttgagcgagcgttctctgtcgaggattgattgtgtatgtcttgccttctacacactataaagcctgcccagaaactagctcggcgagttatctcgcaatttggccctcgcgaaaaatactcctgctaatagaccgaatagaatgctcatagaattctgcaagcttgttcgaacgttgaaaagaacgattccagcaaccgagagagggatcttatttagggagcccacaagactgtatgtagtcgcgcttgtctgatgaagaaaccacaatgaagtaaagcttattccaagccccaaaactccactgcccgtgatgacaacccaaaactcaggcatccttaggagagatgtctccaaaaggtactccacttcattaaaaccaagaataaggataattcccaatggcagcgaaagaatgttattcagtaacaccattgaaagctcattcaaattcccagacttggtggcttgcttggcgctgtccattacatgccgcaatgtaagcgaatatgatgctgtcagaaaacaatttaaggtctgccaggtatatccgacagcatggaatgacagatctgttattcctcccgcaactgcagagattatcatcaacataagagcaatccaaacttgaataccatgctgctttttgaaaaaataagtttccccagatgcagtaaggacattggcgacattcttcaatatagtcaacattgcaacgttaatgtacttcaaactaaacatgcttgtgatcagcattccaacaaatatgatattcacaggcaaccagactttgattaggttccatgtcaatggttcagttggaatagcaccagacagggatagtgtggaaactatgctcactgatacaatgttctggtatagcatcaaaaatattggagcattgaaaccgtagccagacagaacaaatttgttgactaaaatcatgctgcatgatgatatgcagtaagccagaccagatagaagagcctgattctgtatcgtcgggagcttgagtaactgtaaagaaccatctctttcttttgagggcttaccatcttctaagtcattgtcatcaacacagaaggatcttgtcatagatctgtttccaatttctctcctgacaggacttgcaagtgcagtgaaccctgcattctgattccgaaatacacccttttcaccattcttgagagggctacttacactccctggcacatttctcctaggagaggcctcagaatctgctgatatgtctaactgaaggactctggatgagcccatggcggcgtccccggcggggagcccgggaggcggcgccgtgggcggcggagcggaggacggcgaggtggtcgatggaatgccg

SEQ ID NO: 20828 - DNA, 237 bp, Setaria italica
  Peptide Sequence Number=SeqID_86802
tgcaccaggcgaccatgtcctcccggtgttcaccggtgagtgcaaggagtgtgctcactgcaagtcagaggagagcaacatgtgtgacctcctcaggatcaatgtcgacagaggtgtgatgatcggcgatgggaagtcccgcttctccatcaacgggcagcctattttccactttgttgggacatccaccttcagcgagtacaccgtcatccatgttgggtgccttgccaagatcaa

SEQ ID NO: 20829 - DNA, 316 bp, Setaria italica
  Peptide Sequence Number=SeqID_86803
ttctaagcaagagaaggattaggacacgagaactcgcggaagagagagaagaaaagctagggagggagggagagagaggtggtgcccgtgccgaggtggtggagttgggtcggcctgtgcggatcggaggaggtcatgaacagctaatgcccattcatttattatggatttgcaccagttgttaaagtacagattaactggtgctaacgtcttctacgaatttcccacagagaacaacttagcaaacaatccctggccaggtactccactgaagtcggaattcagcaactccccgtacactcccctttcagcccag

SEQ ID NO: 20830 - DNA, 227 bp, Setaria italica
  Peptide Sequence Number=SeqID_86804
gttgcatattatgccttgatgtagtgtacaagtgatcaggtatactttgggaaaacacccaagtgagacctgatcacttgtacactacatcaaggcataatatgcaacacgctttacggaaaatagagactgttctgatggcacctgatgctgatgatgctgccactagcaccaagcatgagtttgaggaacacaaacctgctccgctgatgaggcagcggtcaagg

SEQ ID NO: 20831 - DNA, 423 bp, Setaria italica
  Peptide Sequence Number=SeqID_86805
ctagtgcttggatcagtgttatccattgtgtcccttgagcaatctggaaatcaactatattggattttgtcctcatttctcaatgcctctgcaattgccccattagcagccatatagccaaacttgaagtacggacagatattgtataacactgatccaagcactagctgcaaggcctgggggtccaccacatgtgcggatcactggaattgatgatccagtgtcagagtacgcccgtggtgaaggtctggaccttgtagggaagatgttgaaaagcatgtccgaagaattcaggatacctctggagtttacccctctacccggtgtctatgccacccaagtcacaaaagaaatgctagacatcaggccaggcgaagcacttgctgtcaacttcactctgcagctacaccacgctctcttcta

SEQ ID NO: 20832 - DNA, 2002 bp, Setaria italica
  Peptide Sequence Number=SeqID_86806
ctttcaaataagttgttcatagtttcctatcttctgctatgtacaggtcatgaacagctaatgcccattcatttattatggatttgcaccagttgttaaagtacagattaactggtgctaacgtcttctacgaatttcccacagagaacaacttagcaaacaatccctggccaggtactccactgaagtcggaattcagcaactccccgtacactcccctttcagcccagcttgagtgtgacaatttgtctgctattagcaacactccagataaccagagttccacagaaaccatttcagcacaaccaatatcaccgctagaagttgacagctccaacagacaggcaggtatactttgggaaaacacccaagtgagacctgatcacttgtacactacatcaaggcataatatgcaacacgctttacggaaaatagagactgttctgatggcacctgatgctgatgatgctgccactagcaccaagcatgagtttgaggaacacaaacctgctccgctgatgaggcagcggtcaaggacatggagtcatgaattaaggcagccatcaccaggagttgtccggacacaatttgcatctggataccccacagcaagctatgaattccgcccagaaaagcgacaaagggagttaagggaagatccgcagagcatggtgaagcagttgttaacaaagtgcgctgaagcattaagtgaggagaggatagaggagttccttaagcttgttcagcaagctcgtggagttgtatcaattactggggaaccaatacagcggttaggtgcttaccttcttgagggtttggttgctagacatggaaactcgggtacgaacatatatcgtgctttgaagtgccgtgagccggagagtaatgaacttttgtcctacatgaagattttatacaatatctgtccgtacttcaagtttggctatatggctgctaatggggcaattgcagaggcattgagaaatgaggacaaaatccatatagttgatttccagattgctcaagggacacaatggataacactgatccaagcactagctgcaaggcctgggggtccaccacatgtgcggatcactggaattgatgatccagtgtcagagtacgcccgtggtgaaggtctggaccttgtagggaagatgttgaaaagcatgtccgaagaattcaggatacctctggagtttacccctctacccggtgtctatgccacccaagtcacaaaagaaatgctagacatcaggccaggcgaagcacttgctgtcaacttcactctgcagctacaccacaccccagatgagagcgtggacgtcaacaacccacgggacgggctactccggatggtgaaagggctgtccccgaaggtgaccacgctggtggagcaggagtcgcacaccaacacgacaccgttcctgatgaggttcagcgagaccatggactactactcggccatgtttgagtcgattgacgcgaacttgccacgggacagcaaggagcggatcaacgtggagcagcactgccttgccaaggacatcgtgaacatcatcgcctgtgaggggaaggaccgggtagagcggcacgagctcctgggcaagtggaagtcgaggctgaccatggctgggttcaagccgtacccgctaagctcgtacgtgaactcagtgatcaggaagctcctcgcctgctactccgacaagtacaccctggaggagaaggatggcgctatgctgctcggctggaagagcaggaagttgatatctgcttctgcgtggcactgacaataagtttcagaaaaacataagtaaacaccttctcttacatataaatatatatagtgaattccctggtctgttttcccagaaaaggttttctttgttgtacttgtacaggatgctgtatccttagttttccctaaattgtagaccaggataaacattgacattagattgtagctgtatgattaaattaactttcttatgtccgccctatc

SEQ ID NO: 20833 - DNA, 418 bp, Setaria italica
  Peptide Sequence Number=SeqID_86807
aggaagtcaataatcttataaaatttcaactctcaatgagcgagagagggacattattcggttatatcaacggcatagggaaacaatgccatacatgggaagatatcagcagacagtaagtatttagtctttgattaatgaagagaaatttgttcatgcattgttatacccataacctctattttcttacttgaaatgggtccgaaatttgttttgcatagtctgctcgtatcacgagcgccaccatgagaacttgcagagaattctttggatatagaggtctaattcttgcatgggaaatatattctccaggtttgggttgtcgagggagcgtgtgaggcaagttggactcgtcgccatggagaagctgaagcatgctgcaaggaggaaacatttggatgcattgcttgaggattat

SEQ ID NO: 20834 - DNA, 575 bp, Setaria italica
  misc_feature (1)..(1): n is a, c, g, or t
  misc_feature (3)..(3): n is a, c, g, or t
  misc_feature (7)..(7): n is a, c, g, or t
  misc_feature (15)..(15): n is a, c, g, or t
  misc_feature (35)..(35): n is a, c, g, or t
  misc_feature (46)..(46): n is a, c, g, or t
  Peptide Sequence Number=SeqID_86808
ntntttntttttttntttttttttttttttttttnttttttttttntttttttttttttttcttggttatactactgttgttggcctcataatcttgtaagcatttctttttatgtaactggagaagaatacagatccaggacatagatgttgttgctctactgattaaggcgctaaatgatacattacatatacatatattacagaaattctgtgaagcttccaagaaaaaagccgcctctcttctcgttggatcgccttgatgattgtgctggcatatatcttgatctgcctattaattgttacaaatgtacatgtataattatctgcagagtgagtggcagtaaagcctttcaaggatgatgtaccctatgtttccgagtatatacaaccactgcgtgtggggaaccgactcaagtgaaaaacatctcaactcaataatcctcaagcaatgcatccaaatgtttcctccttgcagcatgcttcagcttctccatggcgacgagtccaacttgcctacaacaacgaactaaccctaacgaaaacaaaaacccaaaaaactaaagtaaactaaa

SEQ ID NO: 20835 - DNA, 280 bp, Setaria italica
  Peptide Sequence Number=SeqID_86809
ctgtgtcaaactctggtccatcaaacggatcgactgcaaatccgccacggccaccacctcctccgcctccgccaaagttttcctcaaaaagcactggtgtaatgaagagggcaccacaggtcgcagagctctaccattcacttatgagaagggactcaaaaaaggatacttccagtggtggagtctgtgaagctgctaactctgctaatgtgcggagtagcatgattggtgaaattgagaaccgctcttcccatttgcaggcaatcaaggcggatgttga

SEQ ID NO: 20836 - DNA, 245 bp, Setaria italica
  Peptide Sequence Number=SeqID_86810
atccccagttcttccccaatcaccttgtggtctctcgtgtcgcggttcccagggacgcctccggctcgtcgctcgacagcgatctccgccccagcaagatgcagatctttgttaagaccctgactggcaagaccatcactcttgaggtcgagagttcagacaccattgacaatgtcaaagccaagatccaggacaaggagggcactccccccggacagcagaggctcatctttgctggcaagcag

SEQ ID NO: 20837 - DNA, 355 bp, Setaria italica
  Peptide Sequence Number=SeqID_86811
tctaattgtcttgttgacagctgggaagccggttgacaaggtcccgaaagatgcttcaaaaaaggaatgtcgatgagcagatagcagattctcagatactgaaaaaccttgggaagtacttattgttgaatgacagccctgacttccgcttcaggcttgtgttgtcattaggcctattagttggtgcaaaggttataaatgttcaagtgcctttcttgtttaagctcgctatcgattggcttgcagcccttggtggtgctgaagcctcactggcatcgttcacggaaactaacgccaccctattggctctctttgcaagcccagcagctgtgttgattggttatggaattgcacg

SEQ ID NO: 20838 - DNA, 2667 bp, Setaria italica
  Peptide Sequence Number=SeqID_86812
gtccaactccgcctccacgctttcgtccgctgaccctacccatcacggccaccgccgccgccggcaagcgccatgcggccttcgtcccgcatactagcggcggggaacctcctccgcggctcccggtttaacccccagaccgccgcccctgccgccgccggattccggcggctgaacggagccaacaggccgggcgtgccgaaacctctcttcagccctttcctcggaggattcggacctaactgtggtgtcccgcccgggaatgggggtcccttcggccgcctcggcagcttcctgccggactctacctacccgccgcacggcgcgcggcttacccgagacacgagagtacatgcattctccacatctgccaatgctgtgacagctgggaagccggttgacaaggtcccgaaagatgcttcaaaaaggatgtcgatgagcagatagcagattctcagatactgaaaaaccttgggaagtacttattgttgaatgacagccctgacttccgcttcaggcttgtgttgtcattaggcctattagttggtgcaaagaagaataagaaaggctaggtggacatatatttgaaagctgagggagtacttgtttgaaaacggttataaatgttcaagtgcctttcttgtttaagctcgctatcgattggcttgcagcccttggtggtgctgaagcctcactggcatcgttcacggaaactaacgccaccctattggctctctttgcaagcccagcagctgtgttgattggttatggaattgcacgatcaggagtgtcggcctgtacagaactgcgaaatgctttattttctaaagtgaccttgagagccatccgttcagtatccagaatggtattttctcacttgcatgagcttgatcttcgttatcatctaagccggcaaactggtgctctaaatcgcataattgatcgaggcagccgtgcaataaattacattctcacagtgatggtgttcaatgttgtgcccacaatactagagattggtatggtgtcaagcatacttgcttacaagtttggttccacttttgcttggattacttcagtttcagttgctacctatatagctttcactttggctgtcacacagtggcggactaagttcaggacagccatgaataaagctgataatgcttccagtacagtggcagttgactctcttctgaattatgagactgtgaagtacttcaacaacgaacaatttgaagttgcgaagtacgacaaatatttaaggaattatgaggatgctgcattgaagacccaaagtagccttgcctacctgaactttggtcaaaatgttatctttagctcggctttatctacagcaatggttttgagctcatatggagtaatgagtggtgctcttactgtgggtgatttggtcatggttaatggacttctattccagctttcattgcctctaaacttccttgggagtgtgtatcgagaatctagacaaagcctcattgacatgaagtctatgtttcagttgctggaggaaaaacctggaataaaggatgagcctcatgcacaacctttgcagttcaagggaggatgcattgaattcgagaatgttcattttgggtatgtaccagaaaggaagattcttgatggtgccaccttcactgtacctgcaggacagagcattgccattgtcggaactagtggcagtgggaaatcaactattcttaggcttctgttcagattttttgattcaacttcaggatctatacgaattgatgggcaagatatccgaggagtgacactagagagccttcgaaaacatcttggtgttgtacctcaggacacggtactttttaacgacacgattaagcataatatacagtatggacgtttatcagcaaaagatgaggaggtctatgatgctgcccgacgtgctgctattcatgatacaattatgaacttcccagacaagtatgacacagtagtaggagaacgaggattgaagctaagtggtggggagaaacaacgagtgtcgatagctcgcgtattcttgaaggagccctccattctgttatgtgatgaagcaacaagtgctcttgatagcactactgaagcctcaattttgaattctctgaagtcgttatctgttgaccgaacatcaatctttattgctcatcgactcacaactgcaatgcagtgtgatcagataattgttttggagaatgggaaggtagtagaacaaggaccacatgacgttcttctttcaaagggtgggcgttacgcagaattgtggttccaacagaacaacagtgatgctgttgaccctgcagcagttaccctgcaggtttgattgccggtgtataactttcctttttgcaaggggaaacagattcacaactgagagggtgcaggtttcaacttatctgcgccttgtaaatggagtaggattttagatatgcgaggacataaacttacagtttaggagagagagatccactccaagatagcctgggcgattaacatttctcctttgggattatatagacaatccctacagttttttcatggcaatgtaacatttctgtatcacaaggaataagcctagtaaatatttagttgtctcagctcagttaccattttggtatagatgatgttactgtgtacacgtgttgc

SEQ ID NO: 20839 - DNA, 354 bp, Setaria italica
  Peptide Sequence Number=SeqID_86813
ctaagacaagacctcgaattggcttttgaggacgaacttgatagcatctttgacgtcactcagatgcgccagtcgcttgggcagaagaagcgagagctggagatcgaagtgaagaggatcaagcgcttgaaggagaagtttggggagataaataagaagctcaattctcttcaggttaggcagtaggtcagtccagaactgagcagtaagcttgctaggctaggactccaggtagagtgtttctatgctgtaatagtgtgacatcttgttgtacctttctagttggacatatggaaaaccatgtactaacatcatacataagacacaggaagccttcatatttacaactactta

SEQ ID NO: 20840 - DNA, 723 bp, Setaria italica
  Peptide Sequence Number=SeqID_86814
aatatagttgcacaatatatttatcaatttgaacattttatggttttgttaggactgcttgtgtaattgctgtggcaaaagcacgtgacgcatttgagccattccttcatcagttgggttttaggcttttgtacatactgaagaggctgatcccaacatctgtttatctgctggagaaagatggtgagcgcttcagtagccatgaagtacttgtaaggcgtgtccaagcggaattcaagaggtttgctgaatcaacggagcaatcatgtcgtgaaaggtaataatcttcctgattctgatacttgtgatggctttcttgtttatttgcttctgtgcactctagtcaaaatacagtttatctgtgcaaaggcaatgcttccatattgaaatcttgtatattttttcttgaacatgcatgagaggggataaaagaacccgggacctttgatttgaaactgtagaatgtagataccttttctaacatttcttggtgtcaacagtaattgtgctatctatggatcttcttttgagaatatagtttggctatttggctgtatctatgaaatgataaaaaatgcttttctgctgatttacctgttcatgcagttgtcactttccagttaccatttcaacttgacaggtatactttagaattgaatggaataacatttgatggaccttactcttatatgcttaatttcagttcgaacggctgctagatct

SEQ ID NO: 20841 - DNA, 1698 bp, Setaria italica
  misc_feature (7)..(7): n is a, c, g, or t
  Peptide Sequence Number=SeqID_86815
agattcnccccttttcctatcagtaccttctggtagggttggttcttgccatgaagcggtgttcagatctaatgaagagtttaagaaggccatctcatcaagagagtctgaagatattgtgtctattgaagacaagttaggaaggtcacttacaacagaggagaaagaaagaattggagtgagtaacttgagactatttttggaagagttgctgaggaagaggtacattgagagtgttccactaatcattccacttcttgagaaggaacatcgaaatgcaacaaggaaactgcgtgaaatcagtcaagaaatcagtgatctggatgaagccaaactgaaggaaaaagctcagctattccatgactcatttttgaccaagttatctttgctattgaaaggcatggtggtggcacctcctgataaatttggagaaactttaattaacgagaggatcaatggaggaacatttactggaagtgagaatttccagctcccaaacaagatgatgccaaatgctggaatgcgtctttatggtggtgcacaataccatcgggcaatggctgaatttcgtctggtagttggtagtatcaagtgccctccgataactagggaggaaattgtcaatgcttgtggtgttgaggatattcatgacgggacaaactactccaggactgcttgtgtaattgctgtggcaaaagcacgtgacgcatttgagccattccttcatcagttgggttttaggcttttgtacatactgaagaggctgatcccaatatctgtttatctgctggagaaagatggtgagcgcttcagtagccatgaagtacttgtaaggcgtgtccaagcggaattcaagaggtttgctgaatcaacggagcaatcatgtcgtgaaaggtgtatggaagatttggagagtaccactcgttatgtcacttggtcccttcacaacaagaaccgtgctggattgcgacacttcctagattcatttgctgccccagagcaactatcagtaaatacactgcacgagcagttgcctgtgttgaatgagaacaaacaggacaggccaaagggcgacccaaagtctaatcattcttcagacacaaattcatcgggtgctgtgccagagacaaggctggtcgatctgttggacagtacactctggaacagaaggctggttccctcatctgaaagactcgtctacgcattggttcaccagatttttcatgggatcaaagagcattttcttgtcaccactgaactgaagttcaattgctttctcctcatgccaattgttgacaaattacccgcgcttctaagacaagacctcgaattggcttttgaggacgaacttgatagcatctttgacgtcactcagatgcgccagtcgcttgggcagaagaagcgagagctggagatcgaagtgaagaggatcaagcgcttgaaggagaagtttggggagataaataagaagctcaattctcttcaggttaggcagtaggtcagtccagaactgagcagtaagcttgctaggctaggactccaggtagagtgtttctatgctgtaatagtgtgacatcttgttgtacctttctagttgtaaatatgaaggcttcctgtgtcttatgtatgatgttagtacatggttttccatatggccaataaagtgctgcatcccttgccaagttattttacataaaa

SEQ ID NO: 20842 - DNA, 779 bp, Setaria italica
  Peptide Sequence Number=SeqID_86816
cttctctgtcgcgctccgcttccccgcgcaggccgccggcgcggtgggcggcgccctggcgatctcggagctgatgccggagcagtacaagcacacgctcgcggcggcggggccggcactcaaggtggatccacataccggcgccgtcgccgaaggggtgctcaccttcgtcatcaccctggccgtgctctggatcatcgtcaaggggccccggaatcccgtcctcaagaccatgctgctctcggtctccatcgttagcctcatcctcgccggggcagagtacacgggtccttccatgaacccagccaacgcatttggctgggcatacgttaacaattggcacaacacatgggagcagctatatgtgtactggatatgcccctttattggggccatgcttgctggatgggtcttcagagcggtgttcctaccatcagcacctaagccgaagaccaagaaagcgtgatacattgcaatcctggattcatatatatagtcatcatttggtgttggatgttggtttgaagaaatcagaaaacacaggaatatcaaagaagttcatgatgtatttgatttcctcaacttacaacaaatctggtattgtgctttattacttatgtgtcattttatttgtataatgaatttagctaattagcatatcttatttatctttttattctttcacgcatagagcctgccaagtatgacaaaatcatcaatcccaactggaagtcaaaaatttgctattggacatcttataaacgtggaatttgctttcg

SEQ ID NO: 20843 - DNA, 300 bp, Setaria italica
  Peptide Sequence Number=SeqID_86817
cgagaccattcgagtcgaggcgagtccaccctaccaggccaccacaggcagattcgagcgcgacgacatggcgatgcggtccgtgctggcctccctccccgcgcgcctccgcgccccctcggcccccgcggccgcctgcggccggcgcctcctcagcgacggcaagggccgcttgctaagcgaggaggagcgcgccaaggagagcgtctacatccagaagatggagagggagcggcaggagaagctcaagaagaagctcgagcaggagaaggccaacgccgacaagaccaagcccgccga

SEQ ID NO: 20844 - DNA, 976 bp, Setaria italica
  Peptide Sequence Number=SeqID_86818
gacgaggcccagctatcaccacacgaagcgcggagcacaaaaaatgtctgctcccgccagcggccgtctcccctgccctccgcttctcctccgccactcctctccaccggccgctccgccggcggctcccgtccgtccggtgctcccttgccgccgcccccggtgtccgggcgccaccggagctcgtcgactccatcctctccaaggtaaatggaactgaccgaggagcgttgctgcctaaagatgggcaccaggaagtggctgatgtcgcgctacagttggggaagtactgcatagacgagcccgtcaagtccccacttatatttggagaatgggaagttgtgtattgctcggtggcgacgtctccaggagggctataccggacacctcttggccgcctgatattcaaaactgatgagatgatccaggtggtggaagcccctgatgtcatcaggaacaaggtgtcattctccgtctttggtctggagggtgcagtatcattgaaaggtaagctgaatgtactggacagtaagtggattcaggtcatctttgaggccccagaattgaaggtaggttccttggggttccaatacggtggtgagagtgaggtcaagctggagatcacttatgtcgacgagaagatcaggctaggaaaagggtctagaggctcgcttttcgtgttcctcagacgaggatagaacggcatgtgtgcactggcatatgcttgagatcacaagcacaagggatggcactgatgcggtcgtctgtacaatattgtattcaggatttcacatgtaaaactcagaagtcagtttgggtagcagtttttctgcatattgtaacctgatgaagaacgttgtctcgccctttgtgacgacaaccgacaacgcatgtagcgttcattggtgttgtgagatgatattttgttgattcagtgagttgttcggaatttgaaattaaaaaaaaaaaaaaaaaa

SEQ ID NO: 20845 - DNA, 287 bp, Setaria italica
  misc_feature (284)..(284): n is a, c, g, or t
  Peptide Sequence Number=SeqID_86819
aattggtggtatagttggaggttgaaacttgagaggtaagcaagggtggttggtgcaaggtgctcatgggaatgcctatacctctgagcataatttctatcgctgttggggtcaacttcaccatctgctcagggcctacattgcattcatgctcagtgaaggaccaaagaggcatgaatgaattagaatcttagcttgtgagcttggttgtcagctttgccggtccattatctttatcgttttgttggctgcttaagaaaacttatgttagtgcagaattttcngag

SEQ ID NO: 20846 - DNA, 686 bp, Setaria italica
  Peptide Sequence Number=SeqID_86820
gtgcaaaccgtatggagaaagcaagcagtctcactaacaaacgcctgaccaagacctgaagatttacaaggattcgatcaagcagggtagtcctctgatcccggggtgtcaaactccaactcacagtgtgcaatcaaatgtagcaacagcagcagccactgcgatgacctaattgaggccaggtgatcaccgaaaatacaggtccaccggttaatgattacggccctacggttttgtgtggtatgggtgcatgagtcgacgtatcagctggtggcctcgtcgatgctttgcagcgacggccgccattgccggtgccgcgcactggagctccggttgccattgtcctgacgcgccaactgatcaaggctggcgtcgagggccgcctcgtcgtcgtcctcctcctcggcggcgcccctcgccttgcccggcctcgactccagcagctgctgctgcgctttcctctgcttctcctccttcctcgcctgcacagccttcgtcacctcctgggtggtgatgaggcggtagacgtggccgaggagcagggtctccttgggcttgagcagcttgacgcgcgtgaggcgcacggtgcggctctcgccgccgggggcgtcctgccgctccttcggtcgtacgtcgtaagggttgtacgttagttcgttcgttacgtttagtttggtttcccggtt

SEQ ID NO: 20847 - DNA, 308 bp, Setaria italica
  Peptide Sequence Number=SeqID_86821
aacagcgtggtgccggcgtcgagcgcggcgccctcgggcatcccgttggagtcgcggatccagtcggccgtcgtgagcccgccgtagacggaacccgcgacggagtccagcgtgtccccggcccgggccacatagcgcacggaggtggccttgcggatgccgtcggagcaggcgcatggtaccggcacgtggagcggcaggcccgccgggaggacgcggtcggcggggtcgggcgccgcgaagtcgatggcgttggcggccaggatggcgagcgggtcggcggcgaagagcgccgcgagctcggcgag

SEQ ID NO: 20848 - DNA, 391 bp, Setaria italica
  Peptide Sequence Number=SeqID_86822
tcagcttcagggaagaaaggaacctcacacaaaggcaaaatgtcactaaggctgtgcacctggtgccattaataatcgacaagtcacccttcaactgctgccatcaccaactgtaaatcggtgtccccctgaccacaccaacgcaaactgaattcacacatgcttcttatctcccctccggattttgctgctaggagagagggagtcagaacggcggagcacgagacgcggcgtcaggcctcatctgcgcctccgtgccttttccgcggaagaaccagtagactctctggaaaacccacatgctcagcagcacctccagaacaaatatcgcgaagcccataaagtacattatccgaagactatgccgctacacgcaaaacatccacaaact

SEQ ID NO: 20849 - DNA, 786 bp, Setaria italica
  Peptide Sequence Number=SeqID_86823
cttccccgccatcccgtcgccgccaccgccaccgccgcctcggcttccgtcctcgacgacctcatcgcgcaggccgatgtgcaggcggagcttctcaagaaagcatcacagctgtgcgacgagatcaacgcgctctgcgacgcgcacgaggcggccatcgtggatcacatagccgtgctgccggtatggggcaacccgcgggagcttgtggcttcgctgtacagtcccgaccctcacgagcaggctgaacccggtaccagtggcttggatgaagggaatggaggcttccaaagtttgagtagccaaccgggcaaaagagctattggagttgcttcagcggcagttgaaagggtaaaaattattggtgataaacggattcagagcccttccccatgcaaaagatgctcccacttcggttgtggtgggaagaactgctgtgaaacccgtgctgaactaggcgatgagcttcttccacccgttctcgctgagaacaggaagaagaaaggggcagctagtcctttaagctccaatagtgttgcagcacaagcctctaacaaacgaaagagtcagaagacatcagggaataaatctatgccctcaggcactcccggatcaacaacgagaaggaaggctgcttccattccaagagctccagacacatctcgtagcccggggcctacaaccaggagaagggcagcagcacagcatgcatcaccacgctcatgaccagctcttatatatgtttgttgtaaacagtgcgttttctcgcagcttgatttatggtgt

SEQ ID NO: 20850 - DNA, 997 bp, Setaria italica
  Peptide Sequence Number=SeqID_86824
tcgtcaccctatcatcaagtccgccaacatccttctcgacaacaacttcgaagcaaaggtcgcggacttcgggctggccaagctgacctccgacaacaacacgcacgtctcgacccgcgtcatgggcacgttcgggtacctggcgccggagtacgcgtcgagcgggaagctgacggagaagtcggacgtgttctcctacggcgtgatgctgctggagctcctgacggggcggcggcccgtcgacaccggcggcaccgccacctcgttcctcgaggacagcctcgtcgactgggcgaggccggccctgtcgcgcgcgctggccgacggcgactacgacggcgtcgcggacccgaggctgcacggcaactacggccccgtcgagatggcgcggctggtcgccagcgccgcggccgccgtgcgccactcggccaagaagcgccccaagatgagccagatcgtgagggcgttggagggggacatgtcgctggaggacctgaacgagggggtgcggccggggcagagcatgacgtttggccccgcggcgccggtcggcggccgcagcctcgtacaatgccaacagggcgcccgggcagtacacgtcagacatggagcggatcaggcaggcgcccatggcgatcccggagtacagcggcaccgtcaccgggttcggccgcccctcgccgatcgagagcgaggggtccttctccgacgacgatttgagtccggtgaagggtcagtcgcgccggtagcaggcagctgtcgacctgtcgtgtacgccagtgatgccaggccgttgcaacttgcaattcatgctcgccgcgccagttgttgattgcgcgatcgtcctgccccttcgcaagttgcaattcatgctcgctcgtctgcctctttgccaccagtcgcctgtaacgcggcctgcaaggctgcaagccgatgtgcatatcgacagacattaatcacacggagaatgtgtagatgaacagagatacccaaaaaa

SEQ ID NO: 20851 - DNA, 410 bp, Setaria italica
  Peptide Sequence Number=SeqID_86825
aaggcggtttgcttgcttgcattgctaacctaattaaattcctatcaccttgtgacttgcctggcaatgtcgcgcaactctcatcaagagaattttgcaacagcaaagagaagcctggccagtatgagagccactacgcgttcacaatgccagggcgctgccgctttgctacaggcatcaatgtctttgatcccaagttcaatattgctgcccctggtgccgatcagtctgtttatttcccattcacactaaaagcagaagcgcctcacagacttgcacccgcagattgaggagctagtctacagcaaagaggacaatgacgagcacatgtaagtacactactattcctaggtctttgtcttttctttttggtttttttggttcttaaaaatttcttttgttctttgtta

SEQ ID NO: 20852 - DNA, 985 bp, Setaria italica
  Peptide Sequence Number=SeqID_86826
ttagcatggcaaatagttaaataatttccaatttttctagtcagatcatgtgaatctcttggtagtgatcaactgccaagacattcgatcttctagatgtctattctgtaatgtaaggtaagtaaagcatgctagtaacatgattacagcacataattttccacattgtaaagccacataattgatggtacatgtcttaaagcaaacggaatgaaccatcttagtgtagttctaaacatctttgttcctaggcaccggataattagtgctagctggcaatgattgagaggcatattgccgttgcatgatctggctaccaactcccactttctcaaagcttcaagattagttatgtagaaattcagataggtctatcataagaagatatctgttacgcccagtataactggcctgtttggatagttagcggtgttttggtatccaaacacccatattgtactgctggaatgagtagctgataaagaaacctggctttaatgatctagccgttaaaatggcatagtttccttcacaaaatatcagcccaccctttttttgcaggatctgcatgacagacatcatggtgtgatagcagtaccaccaaatcttgcaaggcatgatcctagctctagcatccaacatgatgaacctttcttatattggaacatggggaggtgtcggagaaacaccactacctcatcgatcacacctatcagtgttgcgcctgccaattttggcacgaagaggaatgctgattcgaacagttttctccctctgaagctcaggaaactaagtagggctacttagagctcagtgaaatatctggacggcagcttttttgaaatacataagaagcatcttaaatatgctgctatctggaacagcatgtagtaatgcttcaccattgattagagtctttgtactaaagtcttggtagtattggtacgttatttttggtttggttcttaaccgtttgtttaaattt

SEQ ID NO: 20853 - DNA, 884 bp, Setaria italica
  Peptide Sequence Number=SeqID_86827
tgggacgccgccgcatctggcgcctctgttggtggtagcggcgttggaggcggcccaccgatgctgtcgccgttcttccgtctcccggcgccgccgccggtgacgcaggtctcggatttcggagaggtcgcgcctgtgaggccgctgatcggtcttggaagccacagcggcagcagcgggtttcctgggctatcaccgccgatggtcggcggtggcgacgccagtgccacctggctgctgggcagagctgcaggtgctgcttaccctagccatgctttggacatggttcccataagaacacttgatgatctgcatgacagacatcatggtgtgatagcagtaccaccaaatcttgcaaggcatgatcctagctctagcatccaacatgatgaacctttcttatattggaacatggggaggtgtcggagaaacaccactacctcatcgatcacacctatcagtgttgcgcctgccaattttggcacgaagaggaatgctgattcgaacagttttctccctctgaagctcaggaaactaagtagggctacttagagctcagtgaaatatctggacggcagcttttttgaaatacataagaagcatcttaaatatgctgctatctggaacagcatgtagtaatgcttcaccatgatagagcttgacaaagctggagatggacgtatttggtggcaaccgtgtaaattgtaaatttgccccaaaccgctgcacttggtggtgtcctactgtcctttgagccgtatgtttgtttgtataatacagtgtgacatatagggagatactatgtgccacgtttcctgtatggcttcatatcttaacaaatacataatttttgttccaaaaaattgtagtgcgactgagttaaa

SEQ ID NO: 20854 - DNA, 861 bp, Setaria italica
  misc_feature (710)..(710): n is a, c, g, or t
  Peptide Sequence Number=SeqID_86828
tctcagaaagtcagcagtttttttcactccttttaatccagttggcgccttggatatcaccgcacaaaatgttgatttcccactggatcttataaccttgcgatgacgaaatttctgtttgtgtaggtgctgcttaccctagccatgctttggacatggttcccataagaacacttgatgtaagattttcaacttcatgtctcgcattacttcgacatgtattcttatggccaatgtggatttattatttctaggttgttgagggctactcccataacaaagaataaatgaaccccactttcattttaaaactgaatacatacaagactaggggtcatcagtttaacaaaaatgtgagaaagaccttggtcgactttcacgtaaatgtcctaaatttactggaagtaccagatgattgtattatttagggacatatcacagttgcatggcaaataatgacaagaacatcaataggaaagcttcatagtaaaaaagaaagacttgaccaacctacgagtgatgaggtggcattataaataagaataagtgggcaccaaatttgagacgaagaggagctaagctcagttcctaaaggcctcatattttgaaagatgcagctggtgaaattttggatggacatgtcatcataataactgttagacagcttattgacgtcaagtcaacttgttgctcagagtgctcttttttgngtggcaacattttaagaccttaaagaaaactgtgacaatgaagtcatgttgatcaagctagccagagcgtttaactgacacaagctagttatctcgtgtgggcatcagtagttatctgagggatttcagcaattccaaaatcaccagcatg

SEQ ID NO: 20855 - DNA, 403 bp, Setaria italica
  Peptide Sequence Number=SeqID_86829
tttcgccgaacgagtggcgcgcaccgcccacccaaaccccccgcctccccgctccccgctccccgccccaacccgtaccccaaaacccttactccccgccgcgccgacgccatgctacactccggcctctccaagtcccaccccttcccgctcctcgcggcggcgtcctcgcctcgccgcattctcctcgccggcctcctccgcgccggctacctctccaagcatccggcctcatcacccgtgcctcgtccggcctccaccgcccgtgcgagctccagggccgcaacctccccgggcgacccctcccgcttcgggctgggaggcagggtttcgttctccaccgccccagatgggtccgcatcggctggcggcgggagggcgcttccctggcttgctgccgaag

SEQ ID NO: 20856 - DNA, 571 bp, Setaria italica
  misc_feature (2)..(2): n is a, c, g, or t
  Peptide Sequence Number=SeqID_86830
cngtttgcacttgtcacggagttcacaagacaacttgtgttcttcatttgacctcacaacccaaaggaatggttttccagaattgcacaatccgttgccaagctcttccaactgtgtttcatcatagtcggacacagtcccatatgatacaaggactacagagcacgggagctgcttgtcaagccaagccagacatgacacactgctgctgaataggttgaaaccataagtcttgttaaatggcaaacggtcatcatcaagataaaatgatggcaaggttgggcctattgtctttgcgcgccatgttagtgccatataatctgcctccttgggttccatgtcgtggaatgagttcacgagcacgtcgtcggcgtcctccagcccctcgaactgccgcacggagacattaaggaacgccgggcaccagtccggcctcgccgcgaacggcggcacgtcgtcaggcccgagctcgacacctagcaagccgcgcgtgaacagctccctcccgtccgtcaccggcagcggcagccgccccgccacacctcccgtagacgacgtccacggagcacgg

SEQ ID NO: 20857 - DNA, 290 bp, Setaria italica
  Peptide Sequence Number=SeqID_86831
ctgctgattttgagtcatggatggtggttgctgctgctgctgcatttgattctggacaaggacctgagcctggacaagattggtttgagattgactcaatggaagaagttggttcatggactgttgttgcctctgcagattgctgggatcgtgaatctgttcttgcagtttggtgcccatgccaagctgattcagtgggagtgttgccttggacaactcattgaccggctgcatttgctgaggaagtttggaagaactaaactgaatactgttctgttgcagatctggtt

SEQ ID NO: 20858 - DNA, 270 bp, Setaria italica
  Peptide Sequence Number=SeqID_86832
aaaagtttgctctgttacatgggtgggcaagcaaaatgagccacaaagaaataacattaaagcaccagtactactctgggccaccacccaaatatgctgagaaaaatagtcggtgatgcttttcagataagatatttctcctgataagaaaacaccatggtagtacttgtatgtatgcttgagaaacacaaaacgcgggtcaaattgttgcttgtcaactgtacagtatttgtactcaaacaactataccgtgtatactttgtttttttg

SEQ ID NO: 20859 - DNA, 659 bp, Setaria italica
  misc_feature (1)..(33): n is a, c, g, or t
  Peptide Sequence Number=SeqID_86833
nnnnnnnnnnnnnnnnnnnnnnnnnnnnnnnnnccgatgtgacactgttaaagtttagcacctcatatccaaacagcccctaagtcgattgctctgttctacaaatccttcgtgtttcttcttcttgttctaattgctactaagttttaagtaaatacatgaatgaaacaacaagcaagcaaccaacaagctttctgcagtagtggttctcatctctgcaccatggcatctgcgtggccgtcctcgagccgccagctcgtgctccggctcctggacccatggctgaaagcagcgctccggtcggacgccgcgtcgttgagctccggcatcatctgtgattgggaggacgaggcccgcgaagaagagtgaccgcggccgaagcacgcgaagacgctgcgcaggatgcgcctgatggcgcccctctccgtggacgggctctgccttgacccccaggagatcctcctgggcgcgccgccgttgttgaagccgccgtccatctccgtgtagacgacggggagctccctctcctcgggcctcctcccgccggcgaacctgccgacggcaaagccgccgccggggagcctccagatggtgaggccgacggtggcctcctcctcggcggcgccgtcgcctgcggcggcccgcgccccgccggcgcc

SEQ ID NO: 20860 - DNA, 528 bp, Setaria italica
  Peptide Sequence Number=SeqID_86834
ttcactgcagccattccccttgctatggattccactagccacggtgcggtgccaagcttgggcctgggaatcaggaattcaggaccattggctggccaactggattagtaaaatggttgataatgaactcagcgcagctgacatagataatttacaacctccaactcttgggagtctaatatacttcatgatggctccaacactctgttatcagccaagctatcctcgaactactcatattagaaaaggttggctgattcgtcaaattattctgtacttgatatttactggtcttcaaggattcattattgagcagtacataaatcctattgtagtgaactctcaacatccactgaagggaggactattgaatgctgtggagactgttttgaagctatcattaccaaacgtttatctgtggctttgcatgttctattgccttttccatctatggtaaattccattttatactatttataattcaaattcaaatcgatggagaatcacaaaatatagttattcaaacat

SEQ ID NO: 20861 - DNA, 381 bp, Setaria italica
  Peptide Sequence Number=SeqID_86835
tgctgctaccagtcttcacatctttcttacaacatctgaaattgtatatccagtgctagtaattcttatgtgtgattctgcagttttgtcaggctttgtgttgatgtttattgcctgcattgtttggctgaagcttgtatcttttgcacatacaaaccatgacataaggaaattgatcacaagtggcaagaagcccacggtgcggtgccaagcttgggcctgggaatcaggaattcaggaccattggctggcccaactggattagtaaaatggttgataatgaactcagcgcagctgacatagataatttacaacctccaactcttgggagtctaatatgagtagttcgaggatagcttggctgataacagagtgttggag

SEQ ID NO: 20862 - DNA, 513 bp, Setaria italica
  Peptide Sequence Number=SeqID_86836
gaagttagtcttaaacctgtaaagaattccagtaacaaaggtttatctgaatttattgagcataaggatgtgttgatttttgtatggatctactgtctctactaaaagactacctgctatgttggaggtgcctataagtcttgtcttttgtcctgttattattatttgctgttcagagagtcaattgtgcctattttgttgcaggaagttgctgttttttatatcgttctttgtttctgctgtactccatgagctatgtgttgctgctccatgtcgcatactgaagttctgggctttcctaggaatcatgttgcagattccccttatcatattgacatcatacctcaaaaataaattcagagacacaatggttggcaacatgatcttctggtacttattctgcatatatgggcagcctatgtgtgttactaattagtaattaaccaatagaacgtagaatagaaacaaaggaaataacgaaagaaaagaaacaaaaataaaaactttactaga

SEQ ID NO: 20863 - DNA, 1648 bp, Setaria italica
  misc_feature (1597)..(1648): n is a, c, g, or t
  Peptide Sequence Number=SeqID_86837
aaggagagccccctcagctccgacgccatcttcaagcagagtcatgcaggccttttcaacctgtgtatcgttgttttggttgctgtgaacagcaggctcattatcgagaacttaatgaagtatggcttattgataagatctggattttggtttaatactacatcattgcgagactggccgctgctaatgtgttgccttagtctacctgctttcccccttggtgcatttgcagttgaaacgctggcattccgcaatcttattactgatgctgctgctaccagtcttcacatctttcttacaacatctgaaattgtatatccagtgctagtaattcttatgtgtgattctgcagttttgtcaggctttgtgttgatgtttattgcctgcattgtttggctgaagcttgtatcttttgcacatacaaaccatgacataaggaaattgatcacaagtggcaagaaggttgataatgaactcagcgcagctgacatagataatttacaacctccaactcttgggagtctaatatacttcatgatggctccaacactctgttatcagccaagctatcctcgaactactcatattagaaaaggttggctgattcgtcaaattattctgtacttgatatttactggtcttcaaggattcattattgagcaatacataaatcctattgtagtgaactctcaacatccactgaagggaggactattgaatgctgtggagactgttttgaagctatcattaccaaacgtttatctgtggctttgcatgttctattgccttttccatctatggttaaatatacttgctgagattcttcgatttggtgaccgtgaattctacaaagattggtggaatgcaaaaacaattgatgagtattggagaaaatggaacatgcctgtgcataaatggattgttcgtcatatatactttccttgcatgcggaatggtatatcaaaggaagttgctgtttttatatcgttctttgtttctgctgtactccatgagctatgtgttgctgctccatgtcgcatactgaagttctgggctttcctaggaatcatgttgcagattccccttatcatattgacatcatacctcaaaaataaattcagagacacaatggttggcaacatgatcttctggttctttttctgcatatatgggcagcctatgtgtgttctattgtattaccatgacgtgatgaacaggatcgagaagacaaaataaactttctgcagctccgtttttgtgttccattcttccatcaaatatggaatctgaaaaagcaataatttgtgtgcactccacgaaacggcatccatttttgatcgctttgctacagccggccttccagttttttcgtgggaatccagtgtagatcttattattatgtgtatgatagctagcctcgtctcactcttgtatctgtacataattaagcttcattcaggtgaataggtgatgttctacatgtaattgtaatggaatattattcccctttctgcactagtagtgccactgccacctgctcatgatgttactaacatcatttggtatcaagctggaatgaaaaataaacatagatgtnnnnnnnnnnnnnnnnnnnnnnnnnnnnnnnnnnnnnnnnnnnnnnnnnnnn

SEQ ID NO: 20864 - DNA, 336 bp, Setaria italica
  Peptide Sequence Number=SeqID_86838
cccacattttctatcagaaacgcgagattcccgagcggcgtcggcgttataccgccgaccatgacgttgtaactgtcctgttgcgccttgagctcatcgagaactgaaagcaacaccttgaccttgtacttggcctagaggccgtagtcggtggagcccaaactctgccgtgacggccatggcattgcaaacagattcttcgatgctgagaccctgcatgcgattcgcactggcgtgatcttcgccgccttgctgtttttgcgccagatgggggaggggaacaaggaggaccggggggagccgttggatcgatggatgcagcagcgaagcggtgac

SEQ ID NO: 20865 - DNA, 1120 bp, Setaria italica
  Peptide Sequence Number=SeqID_86839
aaaaagactagaacaattagacaacttttgcattatgtagcatttctctgacatttttaagacttttatgtctgagaaatgctacataatgcaaaagctgacattgcaactttacgaattgacaagaatagtagccttgttttacagactgcactgaaattatcatgcggtgatgataatgagttgcgtcacataatatcaattcttttggttatgatgaagatggtactgtagagatgagagattacagtgaaaaaaaggaggagattgttacattacttgaagaaagtgcttatagccatctcttagaggtgattgtggaggttgccccagacgaattgcgcaatggtatgcttttaggtactcttaagagtgcattatttccaatctcatctcaccactgtggcaattatgtggtgcaagctttgatatcatcagcaaaaacctctgatcagatgagccaaatatgggaggaacttggttcaaaaattaaggaattgctcgagctaggtaaaacaggagttgtagcttccatcttagcggcatgccagcggcttgaaacttatcgccttgagagttctcaagctctttctgcggcattaagttcagattctgagtctcctgatagcattgttgcgcatatgctgtttcttgagaactacctacgagagagatcttattggaaatggcctcttggtgcaaagatgagtgttttgggttgcttgatgctgcaatcaatttttcaatacccacatcaatatattcgaccttatgttgcaagcttgctggctatggaggatgatcagatcctccaaatttctaaggactcgggaggtagccgtgttcttgaggcttttctaggttcaagtgccactgcaaagcgaaaatttaaagtatttggaaagttgcaaggtcattatggagagattgctatgaacccttctggctcattcttagtagagaagtgctttactgccagtaacttttctcacaaggaggctatagtggcagagctgctggctgcgcaatctgaactatctaaaacaagacacgggttccacttgctaaagaagcttgatgttgatagatatgctaggcgacctgagcagtggagggctag

SEQ ID NO: 20866 - DNA, 1041 bp, Setaria italica
  Peptide Sequence Number=SeqID_86840
agccgtgttcttgaggcttttctaggttcaagtgccactgcaagcctcaaggactcgggaggtagccgtgttcttgaggcttttctaggttcaagtgccactgcaaagcgaaaatttaaagtatttggaaagttgcaaggtcattatggagagattgctatgaacccttctggctcattcttagtagagaagtgctttactgccagtaacttttctcacaaggaggctatagtggcagagctgctggctgcgcaatctgaactatctaaaacaagacacgggttccacttgctaaagaagcttgatgttgatagatatgctaggcgacctgagcagtggagggctagtcaaacttcaaaagaaacaactctcagacaatttgaggtggaatttggttctaatagtaaatctgttgcgcaaactttcgaagaaaagttcctttctcaaagtccctcaaagaaacgtaagcaggggaagtctgacaaaattactgaggatgccagctacaacaaaccagatttctctcagacaggaaacagtaagaggccaaaatctgccaagtcaacttctgagaaagaatttagcagcaagaaacttgcaagggaaggcaccagcatggcattcttgaaggattctggcaagaggaaatcaccaggtttcctctcagataagccaagcctgaagaaacaaaaacatcaatggcccacttctggtaaaccagacggcaagaggtttggtcaaggtagtagttctagcatgccgtttgtcaagaacactggcaaaccgaaacggtccatcgcggagcttgctgatctggctggtaaggagaagctgactgcggccgaggtccgcaaattgctgaagcccgaaatgtcaaagagctaatccctcccagtcccagactgtgtaggcagcaattttgtttgtcatttccccccatgtattgcaagccatgaggcttaatatacctggtcgaaccttgtaacacgtgagaatgtgagatggtttgcctcggtaaaatgaagtttctttacggttgtt

SEQ ID NO: 20867 - DNA, 259 bp, Setaria italica
  Peptide Sequence Number=SeqID_86841
aaaaaaaataaaacaagaacaacacttgctcagaaatcagcacaccatgtcaagaatgaactgctaaattggagacagagtccagtacacaatatcaacatgataaccaaactatattactttgcttaaagaaatggaagcggcaaatttatttgtattaaattaactccttccacatatggacctgctaaactaagaagtgcaaatcctaaagcacattagtcagcaatatgccaatatctgaagtccccagtaagtc

SEQ ID NO: 20868 - DNA, 482 bp, Setaria italica
  Peptide Sequence Number=SeqID_86842
cagctacaaggacctctccattgctctgaaggagatgtttagcaccttcacaactgggaacaacatgaatgagttcatgccactcactggatcaaccaatttcccgtcattcatgttgttcccagttgtgaaggtgctaaacatctccttcagagcaatggagaggtccttgtagctgttgtacatcttcaggtccacctttcgcaggtagggcgcaccgtccatgctgaccttcacgaaggcggagctgttgctgctagcattggcagcgggctgctgcttctcgggttcctcttccttcttgctcttcactgtctggacggtcatgacgttcctgcggtatgatcggactggtggccaacccacagcttgtgccctgatataaacacataaatttagctatagttccttgaatttcagtatcaggtctgctttagagcttgaataagttaagataatttgctagggtgattgggaaaccc

SEQ ID NO: 20869 - DNA, 633 bp, Setaria italica
  Peptide Sequence Number=SeqID_86843
ttttttttttttgatcacatacagattgccaaatattgtattgacaattaacaaacaggttaacttacaagataccataataataatagtctcattgatgccctttacttaacaatcacacaagcttgattaacaacactggaataaaatcaccaagtagattctgggacacacgataggggacatcacataacaccaatccagctacacacagatagattattgcttctggtccatgaacaaattgaacaagacagctccctccactagtaattaaaacacattatatttctaggaaaaccgtagcacactgcaagggcaccattcttatgacacaatgcgcaacatcttaacgctgcatcttgttcagcttttgttcttgcacttgtccttggttcttggtgctgcatttttttatgtagaaaatagaggattagaattaacgtgtgaattttgaaatggaagagaattttagctgaagacactgaccaagaccgatggcttcagaactcttcatgatccttaggcgcttgcatgactcgacaaacatcctgcagggattataattgacaatccaacataagaaactgaagtctgaacatcttgatctcatcctgatcatgggtcagtaaa

SEQ ID NO: 20870 - DNA, 684 bp, Setaria italica
  Peptide Sequence Number=SeqID_86844
ctttgcaagtttttattgaacacttgcagtaattggctgtgcaggattaaattgttaatgtggattatttatatgatattttctggtctcctgcatatactgggagagctctacttccgtaaagggtgagatctccctgagttgtacattgctcaagcttcagtttgatgtaagccagttacattttagttctgtatagcaatgtggtattatcctctcaaaatgcttgattttctctgaaaatgtgccgttcctattttatgttggtatgccctttaagccagccatgtcaacaccacaaggatatagcctgcctgtaattctcaccacataacttccacgtaatttttggaaggtttcaattaattgttgcgtgatcccaaaaggacacccatcatttgatactgttttcaagatattatcatatgctcgacaccctgcagaccaaatactattggcatcttatatatcggttacatttccctaatcataaatgtgcgatgaaataataatggtttagtttggtgtaatttaacttagtggagggaggctgtcttgttcaatttgttcatggaccagaagcaataatccagctacacacagatagattattgcttctggtccatgaacaaattgaacaagacagctccctccactagaaatataatgtgttttaattactag

SEQ ID NO: 20871 - DNA, 1289 bp, Setaria italica
  misc_feature (1)..(27): n is a, c, g, or t
  Peptide Sequence Number=SeqID_86845
nnnnnnnnnnnnnnnnnnnnnnnnnnncctttaaattttatttttgtttatttttgttacttaattttaacttacacttgttttaacttactagataccataataataatagtctcattgatgccctttacttaacaatcacacaagcttgattaacaacactggaataaaatcaccaagtagattctgggacacacgataggggacatcacataacaccaatccagctacacacagatagattattgcttctggtccatgaacaaattgaacaagacagctccctccactagtaattaaaacacattatatttctaggaaaaccgtagcacactgcaagggcaccattcttatgacacaatgcgcaacatcttaacgctgcatcttgttcagcttttgttcttgcacttgtccttggttcttggtgcaagaccgatggcttcagaactcttcatgatccttaggcgcttgcatgactcgacaaacatctcccacgggacatcgccaacaagcatccagtcaccgtccttgtcttcgtaagtagtgacaacatcggcaccactcactggatcaaccaatttcccctcattcatgttgttcccagttgtgaaggtgctaaacatctccttcagagcaatggagaggtccttgtagctgttgtacatcttcaggtccacctttcgcaggtagggcgcaccgtccatgctgaccttcacgaaggcggagctgttgctgctagcattggcagcgggctgctgcttctcgggttcctcttccttcttgctcttcactgtctggacggtcatgacgttcctgcggtatgatcggactggtggccaacccacagcttgtgccttgggtgcgggtggcttctcggcatcagcggccaccgcctcggcgggcctcttggccttctcggcggccggctccggcttgccggcggcggcttcctccatgccggcggtgggcagcttcagcttgaggtcgatggtgtcctcgaagcccctcttcgcggccttggccgcctcggcgccgcctcccggcagcccgaggctgagctccgtcccgacgtcgacgtcggcgctagccatcggctccgcgggagctagctagcagctggtcggctagcctgtcgcggcggccgtcgtcgtcgtctccctcagcttggacaccttcaaggctccaacaaagctaagctagctgcctctgcttcttgggtctgagctcctctctttgtttctgcaaggagatggagatttggggttgcagtgggttggaggtgggtttgt

SEQ ID NO: 20872 - DNA, 403 bp, Setaria italica
  Peptide Sequence Number=SeqID_86846
tacttcaaccaaagagtcagagatagtattgatagcattctagtaaggaatatgatgaatcattttttggagttaaggacccatttaagagggtgcaatttcaactttaccacctaagtttggctgagcaaagcatcccttgctttgccgcttgggtcaagacattcagtctgtttctgctggtgaaatagtccattaccagcttttaggatcttgtttcatgaacctaacatatatttctgctttgtactataaatttgccttaaagttttagttgtgtctaatcataattgtcaacagttccatacactgcaaagcaacaactcagaacattgaacatgaatcattattgccagttcttctgcctttgctatttcgttgaactggtttattgtaaagtatt

SEQ ID NO: 20873 - DNA, 458 bp, Setaria italica
  Peptide Sequence Number=SeqID_86847
aagaactaagaaccaaagaactactaataactagtaatagatactgccaacccattgatccacatcaatctcggatggtgggttcgcgatacacggaatgtacagggggctcacaggccaaacgactcatcttagtgcaggcggccattaccattctgtctagagtcagatgatccatacgcatagtggccgttccgcctgggtgagtcagctgatccatatgcatagtgtccgttccgcttgggtgagccaactgaaccatttgtgtgatgaccattctgcctgggggaatcagctgatccgtttgtttggtggccgttctgcttggtggtgtcaggcgatccatacccatatgggttcttgctggcccagttccattggtcgcgacacattttctttctaattgtcctattatttttgtcttttcctagtttaagtcttcccttttcttgtcttta

SEQ ID NO: 20874 - DNA, 2108 bp, Setaria italica
  Peptide Sequence Number=SeqID_86848
gttttcgggtttagttttggttttccccggtttcgtttagtttcgtttcttttgtttcgtttacgtttcgttttcggtttacggtttcgtttagttctttcggttaggttagtttgtttgttaggtttgtacacagcaacttacttgttgcactcaatggcacattttacaacttgatcgactaaagtgatacaacaatacaacaaagtgcaatttactcaataaataaccatacatagctgcatttttttatgttaaacagtaaccaaccaaacttggtgaagcgtaatgcagttccattagcaggggaagaatagaatcagctgatacactatgaccacattcctacacatttgaaagaaggaaagaataaacaccaacgtaggagataggttttacccacaacaaactggaaattctgctgccagactctatactgtatgatctgccaacccattgatccacatcaatctcggatggtgggttcgcgatacacggaatgtacagggggctcacaggccaaacgactcatcttagtgcaggcggccattaccattctgtctagagtcagatgatccatacgcatagtggccgttccgcctgggtgagtcagctgatccatatgcatagtgtccgttccgcttgggtgagccaactgaaccatttgtgtgatgaccattctgcctgggggaatcagctgatccgtttgtttggtggccgttctgcttggtggtgtcaggcgatccatacccatatgggttcttgctggcccagttccattggtcgcgacacatttcttcaatgccatattttgctttccagttaagctccctttctgctttagcagtcactgaaaacagtatctctgcgtcaccagggcgtcttgcgccaaaaatcagaggaattttcttcccagaagccttctcgaatgctttaacaatctccagcactgatgtacctcttccagttccaaggttgtatgcttcacaccctatgctagagttctcaaaaagcttctgcaatgcagcaatatgtccatcagcaaggtcaaccacatggatgtaatctcggaccccagtcccatctcttgttgcatagtcatttcctaaaactgtcagagctggcctcctaccaacagcaacttgctgaacgtagggcataagattgttgggaattccacatgggtcttcaccaaggtatccactgggatgagcaccaactggattgaagtatctaagtaaaatgatcttccattcaggatctgaacggtagatgtcacggcaaatatcctcaacaacaagcttagttttgccatatggattgtttggagtcagagggaactcttctgtgcaaggtgagttcttgggtgatccataaactgcagctgatgatgagaacaccaacttcttgcagccatgagcagacataacttctagaagatttatcgtcccaatgacattgttgtcataataaagcaatggcttctgcacactttcacccacggctttcagtccagcgaagtggacaacagcatcaaatcttgttgaagcaaaaaccatttccagtgctcccttgtcacggagatcgaccttgtggaaggagaggttgcgggagtggtccccggcgagcgctgcgacgcgtcggacggcgagctcggaggagttgttgaggttgtcgacgacgacggcgcggaaccccgcgagcaggagctgcagcacggcgtggctgccgatgtagcccgccccgcccgtgaccagcacggtcctccccgccgctgaccccgctcccgctccaggcaccgtcttctccaccgccatcgcagctgcagcaacagctaggtagctaggcctccgcccctcctccccggccgaagctacctcccccacgcctacctccgccgcctcgacgagagcgcgcgcgccccgaggaagcccgggcctccctcgcgccccgcggatctggtcggaggcgttcggagcggcgaggcgtggaagcttcggaatggtgggaggagtggaagcgaaggtgaatagtaccaatactaagactaaaggttactaaacctaactaattaggtaattagttaaattacttacggtaacccctaa

SEQ ID NO: 20875 - DNA, 1049 bp, Setaria italica
  Peptide Sequence Number=SeqID_86849
ttttttttttggtagtacactttagtatggcccatgtggatacaaccaaatgtattctttggcgttggacatttcctcttgcaatagaacaaacaataggatgcacatgccacacatacacagcatcccggatgatagatacgtacgtatcgcctgaatacggcgcaaaatctacaaaacttgcttcctaatacagatagggagaagggttacatagctgtgcatggatttatgcacggcttgcttagcttgcattgcttctttagagagtaaccgtatatacatgcagagtagctcactggtactgtacatatgcatacacatgatccttcattatgcctcatgatctcagtgcctactgaagcagcgaaaaggaagaggaggaaggggaaaaactctacatcgtcttacaagaagttttacccgtgaatgaacgatcttgatcacatttcagtatgtagttcccatctctgatctctcactgatgcttcagcaaactagggttcttggggtcctgaagagttctcaacaggagctgcatcgcctcgacctgagctttgagggacacggcgtagtctagggtttcacccagcaacgtgcactcgtccatccctctccctccgggcacgatctctctcagcgcccgggccctcttcctcaccatgaccctcgcgagagcgccggccgcctgcttcgccgtggctctgctcttcggcctcgcccggagcctcctcctcgggatcctcttggcgcaggacatcttgctcggcagcttgcattcggacgacgaaggcgcgctcgtggcaggaggaaggcggccctgcggcgagagctccgccgcaagggaccggctccagcgcggcgcggcgcccctggcggtggcgagggcggcgtcggcggcgcgcctgatggcgctcctcctctcgtggaagcccatgcccctggacgcggcaccgcccctcctgagccctaggagaaggttcttgaggatcgcctgcctgaatttcttggaccccggcatgcccacgctaccaggcgaagacatggaa

SEQ ID NO: 20876 - DNA, 270 bp, Setaria italica
  Peptide Sequence Number=SeqID_86850
tccccgtcgcccgttcggggcgcctctgagctttccccgctgcccccacttgcatgcaggcgcgcagcggacgtgaggctgccgtgccaaggaggagctcgcatcgttgcagcggcaggcgcaatggttgccccccagcctgaccatgcattccaggctgctcaagaggctcgcgaagaggatcatgtgacgacgccttgccgtcgtctgatcatcgcgtgcctgcagtgaaattatgtggaggatggatggcttcatttcgtcgtgtag

SEQ ID NO: 20877 - DNA, 340 bp, Setaria italica
  Peptide Sequence Number=SeqID_86851
ctctttcaccacgaggctgaggtcggcggggtcggcgtggacgtatcggcgggacaccttgggcttgcactcctcccggatgcgccttcctggctcgtggaagacggccgccgcggcggccgacgtgcactccatctgatcggcgctgaccgggatggcgaacggcggcgacagcttgcggtcgaggctgtcgctccggatccgcttcctggacggcgacgccgcggagccgccctccgacgtggaggactggcggttgttgttgcccgcggcggccactatgtcgttgacctggccctgcagctccgtgtacttggccaccaccgcccgcagcatctcg
